United States Patent Application Publication US 2011/0183924 A1 - sequence listing, part 295

SEQ ID NO: 983179 - protein, 88 aa, Homo sapiens
PDTAGAERNPRHTPPPQPYPAATKRTHGATRQNVVPRPGTQKRRKECDVLATGPLRRGAPTGNAHPSQVRSPQNRRDTGSNKGAAPAS

SEQ ID NO: 983180 - protein, 64 aa, Homo sapiens
MRAEWAGLTEPYSKNQVPGTLAVHSVLHPKVTSSAVHQEAARGTEGAEAHTPQSLGAISLGPTQ

SEQ ID NO: 983181 - protein, 58 aa, Homo sapiens
CLILGGKRVLLEILADAIIHECHYCRSMPTPSHSDDAAPTPQAPPTPSHLRTCTMLPT

SEQ ID NO: 983182 - protein, 47 aa, Homo sapiens
QALRGLFSLQHRLGIQIFEEEPERKRKKGPAPKMLATACRLWDKASS

SEQ ID NO: 983183 - protein, 53 aa, Homo sapiens
MGFHHVRQDGLDLLTLGSARLGLPKCWDYRREPPHPGDEVRHSKSRDETGSQH

SEQ ID NO: 983184 - protein, 68 aa, Homo sapiens
PYTCPGLYPCRGFLDDFPIVIKHQSSPNLRRYLTGRNGDIIKPPKCSSSTPHPLPETSDEIHPIVLKL

SEQ ID NO: 983185 - protein, 37 aa, Homo sapiens
ECQNVTLKHTHPHRRAAPTPQAPPTPSHLENSTSSPQ

SEQ ID NO: 983186 - protein, 108 aa, Homo sapiens
  misc_feature (3)..(3): Xaa can be any naturally occurring amino acid
EAXEEHGEADVVTVVGPHLPKPRHEARFRPRDDVNEAQDGEQEGGLGVGHAQVLGVAHHEHGRYEEPQHHDRGGHGVKHKAAVPEDAQVYQAPGGSRWPRARVSRDHQ

SEQ ID NO: 983187 - protein, 49 aa, Homo sapiens
MGNVLTTEFTLTPQILEVVSPEAESKWRLSELQLIAVNPTAAGLASAQR

SEQ ID NO: 983188 - protein, 94 aa, Homo sapiens
MVMLHTVLSKGQQWVEYVLSSFWYEASSFSIGDRSRMVVFSPVFILLLEEKSFRDRVTSWDTSAMCLWRSAIHRSSSSSRSTSFTRAPPIQRPG

SEQ ID NO: 983189 - protein, 99 aa, Homo sapiens
YPCRGFLDDFPIVIKHQSSPNLRRSVAGRNGDIIKPPKSSSSTPHPEPETSMRPIPESLSFRSTLVAPASRLFSTIFFIQCLDSVPPAQSKSDGLTSDQ

SEQ ID NO: 983190 - protein, 67 aa, Homo sapiens
MRLETELSSTNGSRHTALVTDHLKQNLPHRGSLCAPIQTTSCYSDTPRITNIVPFLRTLKHQAPLQD

SEQ ID NO: 983191 - protein, 54 aa, Homo sapiens
MDVVSTTSRHCVSLPPVSCPPAAAANDCHGDSHMTSQVACLSCLLGAQAVVVAP

SEQ ID NO: 983192 - protein, 52 aa, Homo sapiens
NRRDIRRSCDTIRPGLQNKRWTQAAIQTSSLEKSYETAMTDQVITIENERFR

SEQ ID NO: 983193 - protein, 77 aa, Homo sapiens
VYGRVREPDTPLRSTLRQSETLSQKKKNFLAGFGGPHLGPWLLGLFKHKITLTPGGSFERGNGPLMSSWVARSRFFL

SEQ ID NO: 983194 - protein, 71 aa, Homo sapiens
GSRSRPAGQEASICRSVCWAREQGRGFFSTRKPESEGGETRIWGSEHELCLRAHLSSSDRVTRAELPPSLT

SEQ ID NO: 983195 - protein, 42 aa, Homo sapiens
AAWLQGYLGPRLYTCSKATFFVLFRLKKCESKRSTKLPDSDW

SEQ ID NO: 983196 - protein, 66 aa, Homo sapiens
KWWPSDACYHHTYLMSSYNGRLYIDSRSGPPLNTLAVEDTEEAMTSDASRISSGDDLSPQTLDSAR

SEQ ID NO: 983197 - protein, 44 aa, Homo sapiens
YVVVEGMPAPASKVEEWVSLLKSEETTKVLSVAQRCPIRGALRT

SEQ ID NO: 983198 - protein, 49 aa, Homo sapiens
LSLTITVVEGYASPKVNRLRSGCRCLKSRGDHLVLSVAQDALQGALRTP

SEQ ID NO: 983199 - protein, 97 aa, Homo sapiens
SPTHGELLCDPVIIPVRVFMLHHWTCDLARIAFFSSRDLRHLGTELGFERMTIAYPGDVNMQIFIFDLCGVDQMTVQCTQTEAARPARHSRSGPGME

SEQ ID NO: 983200 - protein, 58 aa, Homo sapiens
LHLKRVIRSVSTVLTCRRNLYRRGMHRMVNTRRPGSIFADIEDVRTVLTYQRNYVQEG

SEQ ID NO: 983201 - protein, 40 aa, Homo sapiens
PANSGRAAGIMIWVSRSFFLSDIHCHAVVVKTSKMQLAPE

SEQ ID NO: 983202 - protein, 92 aa, Homo sapiens
RILTIGTFSGAIKLYGARSVYFMGMHHENKLCDQIHLLPGQCQLITLLHDNSLHLRSLKGKDATSELQEDESFTLRGPPGAAPSATQITSAL

SEQ ID NO: 983203 - protein, 65 aa, Homo sapiens
NFEGELQSVQVFGRKKTATAVAHCKRDNGLIKVNGRPQLRDSRREAERLVRQAGGGGGTGSSPLS

SEQ ID NO: 983204 - protein, 67 aa, Homo sapiens
SATDSAADQEYPNLVHETDLEYPNPTTRLTRNTPTQPRDLSGIPKPIHETDQEYPNRITRLMWNTQI

SEQ ID NO: 983205 - protein, 41 aa, Homo sapiens
FHQEIYSTYQKSSNFMRSSGTVYPKRPEKPGPPTTPQLAPE

SEQ ID NO: 983206 - protein, 43 aa, Homo sapiens
  misc_feature (23)..(23): Xaa can be any naturally occurring amino acid
RSFYAARSDYAGRSDYTVRSDYXGRSDYGGSIYYAARADYAGR

SEQ ID NO: 983207 - protein, 119 aa, Homo sapiens
CSRGARPLQEVGARRGAARAAGTVHAAASRLAACCNVWWRLQHPVRVCSWGNLGPAEERVWLVGPAAGGCWHLASHLQLRVQPQVSGARDITASVYPTGLGKKRTVPEREGDPSSSPLS

SEQ ID NO: 983208 - protein, 38 aa, Homo sapiens
NYYEDMLRQKSLAERREKVDYDHHVQHEQDTQQQSAHV

SEQ ID NO: 983209 - protein, 33 aa, Homo sapiens
IPLLLLPRINQICAGDLLSSQKAVIKWISSLDK

SEQ ID NO: 983210 - protein, 113 aa, Homo sapiens
ELDSLSVSGVGMARSFETAVTAVLAALAVQAEEMAAVAADVACDEASVVFLVSKDARIRRQMSSNTFDRDILNKLLPPSTIHGFGGPFLYFKFAHTSCEIHHCYCYDLWFPLQ

SEQ ID NO: 983211 - protein, 37 aa, Homo sapiens
EHLLWTLDLHKVDWLHECVAGLVSTLARGSAVPLGRS

SEQ ID NO: 983212 - protein, 126 aa, Homo sapiens
SRVIPETLHPARPDGDGAAQASGAQTTRYVYDDATGLQLRFAVSAEGRVTEYRRNAYGEVISTLQHQVARYGAAAASTEAALSAWNGQQNLQQLQRTDYVLDFRGQAQVTTTYSATDAAGKRAGGG

SEQ ID NO: 983213 - protein, 45 aa, Homo sapiens
RVIPRELARSMRASDGAQYGTEDASVNASMAEHQRQADQRYFVIE

SEQ ID NO: 983214 - protein, 33 aa, Homo sapiens
SQPDHATPSTKTELCSTFHTIGIYAPYGAPTDT

SEQ ID NO: 983215 - protein, 135 aa, Homo sapiens
REIVCVLDLDRFLVTGDSLYGIFVESLKSWDGDRLRLTCEVRDLDLRRLIKRVLDLDRRGVAGEARDLERFHGAGDVRERENASDWLGVSESGLFGVERRSGNFPGGQVTLSDNQRLPSGGEYTRELDLVRCLRR

SEQ ID NO: 983216 - protein, 38 aa, Homo sapiens
CELGGEAANSHTCGLPLRDQPSSSPLLQTAPEVKGHQR

SEQ ID NO: 983217 - protein, 59 aa, Homo sapiens
MYTNLLREIEYMGKEIRPTYADSKSAMELLKRGIIHAQALGRECLAETERNARTYRKRL

SEQ ID NO: 983218 - protein, 58 aa, Homo sapiens
MGMVSDESLADHQYVPPGSLCAARACTEVLVVAWTGTGPGTRRVHEEQTERSRQRSSY

SEQ ID NO: 983219 - protein, 69 aa, Homo sapiens
RVTLEAPVELLLKKWPPEHCRSTHRAGRCTFNLGLDTADTHTSRAWTRTLGSWWMGLGLLSAHHPLSPQ

SEQ ID NO: 983220 - protein, 43 aa, Homo sapiens
LDSVIPESLKKEVFSRPETSVLGCTVTSHGGNGTYHGQQLAPE

SEQ ID NO: 983221 - protein, 56 aa, Homo sapiens
LKITNHSPLTLYNSHNFQNLFFSSHLKHILSARLLQPYSLFIEIPTITIIPGTDFN

SEQ ID NO: 983222 - protein, 35 aa, Homo sapiens
QFIYQECRGPPQVLGRITLKFRVALVSTVRSSPLS

SEQ ID NO: 983223 - protein, 107 aa, Homo sapiens
ARIPYLLCPCTARSQAICLPTTPFSSCPPRSSPTVLFLLLSQPLGFCTGCSLCLNTLHWAENNSLRPLSAVASFGTAAAAVPLPAPRPAEPPVFFSSHAPSTSSWPL

SEQ ID NO: 983224 - protein, 51 aa, Homo sapiens
STVTSTCLCQYSHVGLESPSGPEMLFLKLQLVLHREGMESSVDFPLACIIS

SEQ ID NO: 983225 - protein, 85 aa, Homo sapiens
ILFRALSSVQFTFYQRKPLGCSHWRGPPSQATTLPSLVHYNSSCSQEGVHLTLIADLINAAISVMQLKHICDPLTAPTPKVFLVP

SEQ ID NO: 983226 - protein, 114 aa, Homo sapiens
PVPLRFFRQSYPTSSWTSSLTRWAQHFIIHHLLEGVPRGAPLATLLILGVGVTAGRDLSRNLAPLTEPRLRSAHGLLLDTDRIQKSMLSILKPRRSQEQRTALRRYCGPTDLQA

SEQ ID NO: 983227 - protein, 31 aa, Homo sapiens
MVSILHAVNLKNTEVMIYILGMAQPLTKSTG

SEQ ID NO: 983228 - protein, 67 aa, Homo sapiens
MSKESPRSAHSDTYQAFHVRRISLSSSCLESPTSPRLEMDPNCSCATGGSCTCTGFWKCKQRKCTFC

SEQ ID NO: 983229 - protein, 40 aa, Homo sapiens
CSVNSDGLTPCLTLATVQTTLNQAYTGHATRVCHRHHWLG

SEQ ID NO: 983230 - protein, 67 aa, Homo sapiens
DTCPGLYPCRGFLDDFPIVIKHQSSPNLRRFLIGRNVDIIKPSKSSSPTRDPQREAVNEIHSIVLKL

SEQ ID NO: 983231 - protein, 36 aa, Homo sapiens
  misc_feature (13)..(13): Xaa can be any naturally occurring amino acid
FLKSGDAAIVDMXPGKPMCVESFSDYPRGGRGAVRD

SEQ ID NO: 983232 - protein, 57 aa, Homo sapiens
HNSEIQMLQSLKLFECQHDTQRKCLLGASQTQVFEFEMLNRVSNSAIYYRNLRTQSQ

SEQ ID NO: 983233 - protein, 45 aa, Homo sapiens
DIPSSSRSAVLKWISSLHSSIKVDHPAMHSSIKVYSSGLTSSIEV

SEQ ID NO: 983234 - protein, 39 aa, Homo sapiens
RLYRSLIHFILLCRLDIHFNTPRYATRYVQATSSRPDEQ

SEQ ID NO: 983235 - protein, 68 aa, Homo sapiens
  misc_feature (5)..(5): Xaa can be any naturally occurring amino acid
  misc_feature (53)..(53): Xaa can be any naturally occurring amino acid
  misc_feature (65)..(65): Xaa can be any naturally occurring amino acid
TATCXVVIDNFHNAFRGGGSLPESLRGVQELTGRSVEFAEMDILDQGALHASXSNKYTLYWRSSXLCG

SEQ ID NO: 983236 - protein, 46 aa, Homo sapiens
MEFDNGVSNPALLWPHDLTRHNRRICIPSVLRAEYASDSPSAIRYS

SEQ ID NO: 983237 - protein, 66 aa, Homo sapiens
MWCFAEASGPHRRDSRGKTQAQEREVIQKGVCHIPVLLPRREPSAQAPAAWPKLLYVHMLGYPHPP

SEQ ID NO: 983238 - protein, 46 aa, Homo sapiens
QRRAAYEDLEIVLLRTPHVSGDGCCFSTSPKPASVPCCVYPDSETV

SEQ ID NO: 983239 - protein, 83 aa, Homo sapiens
MCETGPCPSSTWLFLISCQDYLDPRTFDSPTSLCLPSGIGQYDYDEYAVRGYPVADLLVIADKYDPFTTTNTDCLCKEPRRLP

SEQ ID NO: 983240 - protein, 90 aa, Homo sapiens
SGRLLGGRTTAGVHEMWGSEMCGSGDVQSRRKDELIGRCPGPGIHRVRRQRGSGECVGSLQTIAPPGNISGPAHLPSTHSSDLHIFGAAH

SEQ ID NO: 983241 - protein, 91 aa, Homo sapiens
CVFTETVGGSGDCGVQRCGGRRCAGLGDVQSKRTDELIGDAQVRGSNGVRRRAGPEMRWVPCRLRSARDILRNLHISHPHIFRLAHLWTRT

SEQ ID NO: 983242 - protein, 63 aa, Homo sapiens
IVRTELLDHLSYIKTQSTYKSPSPCLQAQYSTSNLTYHTSICKLQTPPHHPHRIPTNNLCTGA

SEQ ID NO: 983243 - protein, 64 aa, Homo sapiens
MKTDGTNGHTDRRTDAPSGSWTAKTTFEECLERMRTEPLLRNQNHMSADDSDMMASLLDYLMTG

SEQ ID NO: 983244 - protein, 88 aa, Homo sapiens
  misc_feature (2)..(2): Xaa can be any naturally occurring amino acid
VXKPQHFQCQHANGLLIGQQMPSRTFIADEEKSMSQCPKDRLTLVLRAHAASKFKLNPLLISILGPLRIMLNIPLSDAFLMEQQSLAG

SEQ ID NO: 983245 - protein, 35 aa, Homo sapiens
MTSTYQLRLWKSCTKKATEIGPSGCLEFNPFRRAP

SEQ ID NO: 983246 - protein, 40 aa, Homo sapiens
MFTCPSSGMKDPELWLQMYAGADWHGIAYVGLGLWNALFN

SEQ ID NO: 983247 - protein, 35 aa, Homo sapiens
MVVRRQVTVFLVLKESFTDGRGSVLCGRWLTVWRA

SEQ ID NO: 983248 - protein, 80 aa, Homo sapiens
  misc_feature (73)..(73): Xaa can be any naturally occurring amino acid
RRCGGSGDAGSEMWDRNVRSVDVQRKKDELIECQVRDPRVRRARVGDAWVLADFAPPCTSPDLHISHPHIFRXAHLWTRT

SEQ ID NO: 983249 - protein, 48 aa, Homo sapiens
RRELLSTVSPTDISTIHHPCITRDNSAGISVKSATLQTKHDTGKCSER

SEQ ID NO: 983250 - protein, 103 aa, Homo sapiens
RSSLRFPPVTLPLSLLTVLRLYRPSATEPGPDAFFSKVLSVILIFVILLLLELTDLLYGEPHALSVCVEHQFFHTNARIDGIKRKMYPQGDLSQCCYHFSSLT

SEQ ID NO: 983251 - protein, 86 aa, Homo sapiens
ALEDTTYALTHPVVSVISRCLEKYLSSTPQRLKVLVANLQYILLTGALQFGYCLLVETFPFNSFLSGFISCEGRFILAGNTGSGKV

SEQ ID NO: 983252 - protein, 62 aa, Homo sapiens
WSNQSGLDLNWKTEHHFGILLIISPFLPSDNANSKSLGMGTVVSASFPAILDPILDSDTSLE

SEQ ID NO: 983253 - protein, 56 aa, Homo sapiens
MISGTYSQCESNFCKYTQHSYKFPPDDLPSNIFIFIFHVCQQCWDHSHREYLLTSG

SEQ ID NO: 983254 - protein, 62 aa, Homo sapiens
YGICGTRDTFNSIMKCDVDIRKELYANTVLSGGTTMYLQGIADRMQKEITGLSAHAPEKIKI

SEQ ID NO: 983255 - protein, 46 aa, Homo sapiens
VRCLAAPQYTYLSDCNLVTPVEVFISDSLRVDDTFGIYQSCDTPQG

SEQ ID NO: 983256 - protein, 81 aa, Homo sapiens
RAVSALHKEAAIECTRTTKKSAVNITKTLYANVSNKNRNKTEAMGLNNYCFNAKTQMYIHKKQQQTRNEDLPKQTKQRTSQ

SEQ ID NO: 983257 - protein, 56 aa, Homo sapiens
IPQESCPHNDILASREDISYEWLLSIRCNAARTIAAFFRFSELAESDSVNYYGPRP

SEQ ID NO: 983258 - protein, 88 aa, Homo sapiens
NQKGEVSGHAAPLGLWKCAEMRASHKAEVTYSHHQSLFGRTVALYRTERITHAPDYLVTSCWMGRNDWDSQPHRTTLFLYISEDVYLV

SEQ ID NO: 983259 - protein, 69 aa, Homo sapiens
SVIISGYRTTVRDSVSRYLGITARNKADKFSVCVGYSYLENAECVENPRFLTDAREMSHYCIWEVQIEF

SEQ ID NO: 983260 - protein, 38 aa, Homo sapiens
MVAAIPAMPQNLTLLVKYSFTLAIANAALMLSAGPPGD

SEQ ID NO: 983261 - protein, 37 aa, Homo sapiens
AAPPLEQPGGPPAPVEVTILDAATYVRNTQSRHKSHY

SEQ ID NO: 983262 - protein, 55 aa, Homo sapiens
TLQPGMVAHAYNSHVTWRALRQENSFEPGTAEVTVTPRSRRCTYRLGNKNEPPLR

SEQ ID NO: 983263 - protein, 43 aa, Homo sapiens
MDLAGLHIPRSGSLFCRSINTSKYPIHRKYPIHRKYPIHRKYP

SEQ ID NO: 983264 - protein, 92 aa, Homo sapiens
MHRDAAHEGSGLLLANTTGMGPLTQQAHFKEPIPESLGQTHMQGSLMPYGWIHERSEMTRMSNNRAQSNKLGGSHVRERRAIKRFRSRAQPR

SEQ ID NO: 983265 - protein, 106 aa, Homo sapiens
RRSRHEILPLRVPLPSWSASVCTDLQQLHFLIVFSSAADAFFFSSSFRFPLQTELFVASQVCTVIFSLLSYFHNPPGDLHYRRLLPHSGARSRNFAHVSCSRLLTR

SEQ ID NO: 983266 - protein, 79 aa, Homo sapiens
VSRNLLGRRRDHQIGSNSKVHCSRESGMHIAGPSPSGRKELILSCSPPVLVNNIHIKSKLKEKADQRRKSAIMVTHLAW

SEQ ID NO: 983267 - protein, 145 aa, Homo sapiens
DNLPSLTTGGLEEDGGEEILQDLRKFHSASSCGKGLLGRQGVLLRRRRGLQLGLCSCCGSCQCYGCGVRLLSLLGARAFALSCAGSDSGFRVRVLRREREPDRDRRSTLRRTAFAGCHFGLLLCDGNVCFESESLNDSGFWSRTG

SEQ ID NO: 983268 - protein, 37 aa, Homo sapiens
CYFATLNRVRVLCIGQLQPGTTNCTPGSWVEITSVGA

SEQ ID NO: 983269 - protein, 147 aa, Homo sapiens
CGDALASYKRKESKMHQVLVSLGRGAEWLMPTELVDREGWVKAQYEGRLSLLEEPGNGTFTVILNQLTSRDAGFYWCLTNGDTLWRTTVEIKIIEGEPNLKVPGNVTAVLGETLKVPCHFPCKFSSYEKYWCKWNNTGCQALPSQDE

SEQ ID NO: 983270 - protein, 76 aa, Homo sapiens
GAGYVHRTQSLPLDLACLVSVSPENCILRYHTVPNYTKQKKESLVPELDSTRSRLPREQEGVQDYLYDTVRHACYT

SEQ ID NO: 983271 - protein, 43 aa, Homo sapiens
TAILYTIFFIFFFICSIVQDSDELLCGIAQQPPNTINNPPVPL

SEQ ID NO: 983272 - protein, 37 aa, Homo sapiens
MRTRLPWQYWSRMVLQVHLGPHGPVDPAGKHGYREWS

SEQ ID NO: 983273 - protein, 33 aa, Homo sapiens
RARYVLGYIHLAYTVYTLLLLGYKIPVQHVTVL

SEQ ID NO: 983274 - protein, 64 aa, Homo sapiens
HVPRERSQRAPAPGGDAQFDDPKVDLKGPQVDITGPNAGTYKVSKDGSHSPLMWKVSGGSSSTR

SEQ ID NO: 983275 - protein, 127 aa, Homo sapiens
SVHRNSHYFWAVSAHLWPATLQSCSTCCVAYADPVAHGLHVALNPPPAPPPAGRSRASRRSLLVPRSAYLPDRLLDSSSASSSFSRSACMRALSAVARSSCSCMRSASKLLAFFSFSLAVAKISSLE

SEQ ID NO: 983276 - protein, 36 aa, Homo sapiens
AHQLFLYCSPGLMLGPLIPAAHRQPALILTLLPIVN

SEQ ID NO: 983277 - protein, 62 aa, Homo sapiens
MLPGCGPGSCVRILSANNHAYGRPGVVLSSGIAVSGDHSDHDSRRTDAHVVSTDDLMPRLRY

SEQ ID NO: 983278 - protein, 76 aa, Homo sapiens
GWDRAGSITKLKDTSSKVIQSVRVSECEAPDALELPAARSRLQPCDLDSWLAVEPCWSSRPHMGPLTACAGSSTDV

SEQ ID NO: 983279 - protein, 54 aa, Homo sapiens
MCVVQVTAFYERVNPYAWITAKRFLGYVSRTTTCEDYHVYEEKVNWLILLGWRL

SEQ ID NO: 983280 - protein, 63 aa, Homo sapiens
GPPCAPPGRGGTDGLRGTYVVTKVQLAELETWVQLVPLASLVRRVPLEEAGTSCNSCSTPGPT

SEQ ID NO: 983281 - protein, 42 aa, Homo sapiens
MYKLRTTTGLDFTQTVASCEVFQERLVLTARPHYWGCRRTCN

SEQ ID NO: 983282 - protein, 94 aa, Homo sapiens
MGYKCERGMAPGGVDPPIGDVEELTAFRTVVMPIDHDVSPDVVLVTAGLDAVEGHLSPLGGYSVTEQMSRPLDQAADDPGRDAELVLTLHGGDP

SEQ ID NO: 983283 - protein, 79 aa, Homo sapiens
MWREHYRKLLEGEESRIISSIQTYSALNFRETSPEPNGVLTGPYQARRLIIKTIEHTGLEAGRQLRPHTQQHEHALTDR

SEQ ID NO: 983284 - protein, 94 aa, Homo sapiens
SKSRKTQRLIDWSPVYCEDLHDLRVDHATDTSPENKVVGKGLPFRSDYNRDGDSSEVTTGVTTYDPSLERTGAIAVSIGLRNAGRPARRDSSTS

SEQ ID NO: 983285 - protein, 38 aa, Homo sapiens
SGLSRVFSSAASAWQLPPPPGCSSRSSIVWAIFFLSDL

SEQ ID NO: 983286 - protein, 81 aa, Homo sapiens
VFIAGQTEAQRGRHTGLRSHRKSVGLGDRGYGQTGSPVIQPGQSGGFHGLGPEDDVPPHRSGTSLRHGILVTADDWAGTTA

SEQ ID NO: 983287 - protein, 56 aa, Homo sapiens
GSDGSPPPQGAGMSTRPDDLPADSAPGSAGNSWSSRSSRILFNIVFSGGPRGAIPV

SEQ ID NO: 983288 - protein, 114 aa, Homo sapiens
MGLDLAGRDLTDYLMKILTDRGYSFVITAQIEIVRDIKGEAMCYVALDFENEDGHKQLPLTSLGGRAMRLPDGLGYYPIGNETLPLCLSTLLPDLPLFGMDVRCEFYETNLQFP

SEQ ID NO: 983289 - protein, 99 aa, Homo sapiens
MTHPGGEHQIFKGRSWYFPDQTANSLTARHPVLFMYYYYIFREGLTLSPGWSAEVRSQLIADSTFQAQVILPPQPPKYARTTGACHHAQLIFSFIFSKD

SEQ ID NO: 983290 - protein, 36 aa, Homo sapiens
EPVLTLEALPVYRCEGSCPHHYLHGLDLYSHQSLAW

SEQ ID NO: 983291 - protein, 49 aa, Homo sapiens
RTAAVYEVLQARGPGAAESAGELQASIAPASVGELQGLSGTAWNEELRP

SEQ ID NO: 983292 - protein, 114 aa, Homo sapiens
NPGPTVFCCLLSQGITYISLPRVISPLTSHVPDVKMKEEYNTYSSLSLYSCHTLGTRLFWDRSLLSDWPSLTPEVNRTRTGYYKLQTIVSSPTFAMFLFASNTLPLFHFFLIRL

SEQ ID NO: 983293 - protein, 89 aa, Homo sapiens
GAQETLEQAEKGPLTAEADVASLSRRIQLVEEEQDRAQERLATALQKLAEADTAAAESERGLTVIENPGHDGGGERWNCRRMQLEVAPR

SEQ ID NO: 983294 - protein, 45 aa, Homo sapiens
WHILLRSSQASEERGWPVSPPLMTGSWLAAKKQELEEILHEMGAA

SEQ ID NO: 983295 - protein, 90 aa, Homo sapiens
CGSLAHHAPQQGLECEAALMGTVAREISTLNLRMGNASLAESGSRSGIDQVVSASNTSLLPPFLQPPLFPSVRQGKGQYAQPYLGILSKA

SEQ ID NO: 983296 - protein, 42 aa, Homo sapiens
SPSCVPGALKKLAQLSDFILATTDDRIGVAVDRGPASTVQTR

SEQ ID NO: 983297 - protein, 44 aa, Homo sapiens
SVVLCTFAALGRAAAPLSARTCSSGFTLVNSRHHVPVSQLEGAA

SEQ ID NO: 983298 - protein, 73 aa, Homo sapiens
IGSCEQSEGRSKDEGRDRGREERILSKRMGQTEGDRKTCSGHKGNSQVVECHSDRGAYIAGTHIPISATVGLR

SEQ ID NO: 983299 - protein, 55 aa, Homo sapiens
SISYRIPAFLDLGGRDLTDLPHEDPHRERLFLCDHCLKEEIVRDIEEKLCGRWYQ

SEQ ID NO: 983300 - protein, 44 aa, Homo sapiens
DTPIIDLDMLYHVICGLQLLDFLFVEFLQQTGNLFLQRFHFDVQ

SEQ ID NO: 983301 - protein, 64 aa, Homo sapiens
AADAAGRSTGSPSSTITVCVPVSLGLPGLGYFPEPVTVSWHSGARDSCWRSHPSLSVPIWSFMT

SEQ ID NO: 983302 - protein, 62 aa, Homo sapiens
LAGSPVILYSNGQAVSASSPRPDPEFGLLSIFCSLQAMLPAQYLVSSPFPYGLHGDLNGAPR

SEQ ID NO: 983303 - protein, 41 aa, Homo sapiens
MKLQLHNFPYQISCVSRNSHASKAFPYSSSPPVPLQLVYCS

SEQ ID NO: 983304 - protein, 45 aa, Homo sapiens
CGPTKTQPHFSHRCRSQLDVRTWSTGVQGVRVAIPTCACGSPCGD

SEQ ID NO: 983305 - protein, 123 aa, Homo sapiens
FSHCRLCRDKKSSNIGVPGYTLTHCGKVESGTAIVDKAKQGLLSSELTSIPDQEVELTNCEIRRHQVSLLVQVSYPRFGRLFYYHRHPVRVFLSALLALRAALLERLLFFVHALPPPGNRAGP

SEQ ID NO: 983306 - protein, 95 aa, Homo sapiens
FPVCVDGVVPQDPLVLLGPPGSPCVLRWERTGFVVLVVTQGPRWPTLETSVPLVPLASLVTKGPSGDGWYCWTLLALHGPQGLLGAPGILGLPGS

SEQ ID NO: 983307 - protein, 30 aa, Homo sapiens
MWAGPLRQPGSEGMYYTHCLACTTGYGTRT

SEQ ID NO: 983308 - protein, 85 aa, Homo sapiens
ALHRAQERLDTALQTLAEARQAADATRERTLQVTRQNRAMTAEEQMELQEMQLEGAARLLLLTRLTMPSPYLAWSPSPIAGCGAA

SEQ ID NO: 983309 - protein, 44 aa, Homo sapiens
YPGSDTVQARARRHFKQSFLTFILSSHASTGKQSKKPTLDGGRA

SEQ ID NO: 983310 - protein, 88 aa, Homo sapiens
NAVWCLFTRTRVNFDAVARIGGPPLGDQSPVSCSSLHEKDPPTTLGPQTNQPKKHLTNFKSSKPLLFTLFSNLPHYPSISFSFQPWRP

SEQ ID NO: 983311 - protein, 39 aa, Homo sapiens
SSHQTSLTLDISCRALKMTDVGWAWWLTPVIPALWEAKA

SEQ ID NO: 983312 - protein, 41 aa, Homo sapiens
DIDQMYQVEFDDGFQIAMKREDIYTLNEELPKRVKARLTTD

SEQ ID NO: 983313 - protein, 139 aa, Homo sapiens
MNQPTRSQRGRRCFYSVHNSCPRHLCGLQLVHEVKRVDGNRQIIGYVLGTQQATPGPAYSGREIIYPNASLLIQNIIQNDTGFYTLHVITSDLVNEEATGQFRVYPELPKPSISSNNSKPVEDKDAVAFTCEPETQDAT

SEQ ID NO: 983314 - protein, 34 aa, Homo sapiens
MLIPSAVVGDERGFSQNVVPAGCSIVEASYYEST

SEQ ID NO: 983315 - protein, 96 aa, Homo sapiens
KSTTTGVSVAWLECSGTISAHRNLRLLCSSDSSASASRVEEQFLQPPETWLTAHLVVRAFPFLSLCPSHSLFSITSFRLFQNGNSIEMDSVYRLRV

SEQ ID NO: 983316 - protein, 112 aa, Homo sapiens
MTVLSSDSGYRNGQPEDSDVRCGIESSRAAPVRYSLEVPAPMSVTSQMLLRMCSAAVRTRPVTCLMFLPLQGRAAELEGDLEGRFLLWECILKRGQLHTQHTHTPPYAHVYR

SEQ ID NO: 983317 - protein, 78 aa, Homo sapiens
SVDQYTGADVITGWLIIADACFLTGPVFIHRSESLRARKVAGWAEITTFSQDRAFTLPVSPAGHAVLAILAAHSLRHA

SEQ ID NO: 983318 - protein, 44 aa, Homo sapiens
MLIRNGYKNVQRHSANLTPPVYQNTSPLDITRYETAPHCPRDTL

SEQ ID NO: 983319 - protein, 72 aa, Homo sapiens
MHTMARVVLSECAHVPTQRRLQVRAQRDTELWCRQEHNLQLPSGSSEATIDYALRDTSTRAYEGCAFLSWSH

SEQ ID NO: 983320 - protein, 150 aa, Homo sapiens
MTPGGRATMDVNSSSSNHKDMQQLMRVNPDVILCQEQSYGAPGRIQGSSCDVAAGHQHQPAYLPYGGGLKAPLRDGIVQGRNDSTQARAQTHSCSYSPLLRGGKHVPLGDSNGCNAQHTDANHVDVVSYVSHATQQRLQNLVEKISETAQ

SEQ ID NO: 983321 - protein, 86 aa, Homo sapiens
PRIASNQANNITYIDPVHPNKARLLTASHNLHATEPGNQESRYIRLKYSRLIFEAHQLILRTSCTTMEKGFPSLLLTKYPRRYDFS

SEQ ID NO: 983322 - protein, 71 aa, Homo sapiens
MNCGPKIYSVTVRGEAEEQLTLPKLSLSPLLSPYEPLRSIGMPRLDGSIATLVFLQCYQASAKAPGTVVSG

SEQ ID NO: 983323 - protein, 32 aa, Homo sapiens
MRQKHAQAVEELTEQLEQFQRVNAFMVIAFLV

SEQ ID NO: 983324 - protein, 77 aa, Homo sapiens
RKKLTFLRSQSEVAAEQLSPLQALDFPWTKHSWILTSTNRFFRSLLEIGERITFSNLPYSEPCLHWHIPEKCKAVWD

SEQ ID NO: 983325 - protein, 87 aa, Homo sapiens
SVFIFHMPQEVGSAQRQGAVKSIWGMCYIHYHTSYAQGVQFLNYNTGAIHFICWVSHYPPIMSSSGTSQQQTAAFRPSTLGSAVGRA

SEQ ID NO: 983326 - protein, 43 aa, Homo sapiens
MRAGVGEREDDVDTLLSSLRGNRHIGGTDLLTGTLRPLTTASD

SEQ ID NO: 983327 - protein, 67 aa, Homo sapiens
MSPFQIIAAPSPSTLTYCTHMYINQLCLPTYDSSEEVHRMLQAGPQRRVATGSGLLCPSSCPSPGTP

SEQ ID NO: 983328 - protein, 32 aa, Homo sapiens
MTALPPLLTLTFCLLVTRLQRLVLTYFRMWTV

SEQ ID NO: 983329 - protein, 41 aa, Homo sapiens
VGDPPISAPSSGDYRHATLCLAHFVFLVDTGFGHVAQAGLE

SEQ ID NO: 983330 - protein, 33 aa, Homo sapiens
GTLIIQWNRTGKHPYGETQVNLPMNHTIRSRIP

SEQ ID NO: 983331 - protein, 32 aa, Homo sapiens
MTSSICLRQTDLDSFIDTSLQSATWRRTPGVI

SEQ ID NO: 983332 - protein, 112 aa, Homo sapiens
ESALLFSSSHPSCPFTSLLLGDQEGRSNLVRMAKGDPKKPEGKVSAYSFFVQTCREEHKRNPEVSVNFAEFSKKCSERWKTVSGKENPKCGEMTKADKVCYAWKVQDCEPVK

SEQ ID NO: 983333 - protein, 48 aa, Homo sapiens
MRNEERRKRRREKNKVAVALMPGTRKKERTEICSGNPERVELMNAELE

SEQ ID NO: 983334 - protein, 88 aa, Homo sapiens
SSSAGLVLAVLTPSRLRYMLISPSSRARTVCSTWYSWFLRSTVSPDLSTLGLNIGDHALHLVQLGAVAGAHSPDSVFSRAVPLKERKT

SEQ ID NO: 983335 - protein, 49 aa, Homo sapiens
DCEAGGFAFARACECRVWLTRYRDTVEYRNRFHLTQCSRGYGTLVLGPI

SEQ ID NO: 983336 - protein, 77 aa, Homo sapiens
CLQLTTRGGADCCSLRVMQLRTSGGADVVRVEGLSEWSLRDALSILTEVHGELVTRTGADVLASGSSSCRPREELMY

SEQ ID NO: 983337 - protein, 142 aa, Homo sapiens
YCLLGDWGTHALPPPRGSRVRERGEWRIRWLGDGEEQQLGYLGWGSRGRTTDEWKGCGGRLQILGAQVLGKEDVGGGTLPPTSDTDPQPITGWVQVAMETTHTGGNVISRERSEFLGPPGENQKTAIVTLLRDIQPVPLAQV

SEQ ID NO: 983338 - protein, 77 aa, Homo sapiens
YTSVGLVDADSTTPMSVALREQDCSKISENNQKHNSCFYEDGRDMLNVNRNCTCQRGKIQFRELEKSRPTLLADARD

SEQ ID NO: 983339 - protein, 62 aa, Homo sapiens
LVSTSNNVESNRRNRMENPDGSPIHVRQAIGCDTTKVHPRILTTHSSGKITLYLELAHFLEF

SEQ ID NO: 983340 - protein, 39 aa, Homo sapiens
MREELPGMDPTISAPYATARCWPRWASQPLLLRPTPILG

SEQ ID NO: 983341 - protein, 102 aa, Homo sapiens
MNRPATVEISIENMRLSDNSQPYHCYSQHVHSEALKKYGVTPLVRVCDATLLYSSSLKNDTELTVLDLSHLTDWSIITNKSDYVTTWYNTCIKPNFRDDEGP

SEQ ID NO: 983342 - protein, 161 aa, Homo sapiens
GTLEDLNGNRCGVGNIPCLNAEQLREVSGALPLFSPTIHVDVDSVSLCSLPPSSVDVGSVSLCSLPPSNVDVDSVSLCSLPPSNVDVDSVSLCSLPASNVDVDSVSLCSLPPSNVDVDSVTLFSPPSNVDVDSVSFCSRPPSNVDVDSISLCSLPPHNGTW

SEQ ID NO: 983343 - protein, 40 aa, Homo sapiens
MGVKVLCHLSLAALESGRYFLKASLVELGRGQCSSVASQC

SEQ ID NO: 983344 - protein, 64 aa, Homo sapiens
LTQPVVVYLSTEEITDTTEPVYCQRSHTKITLLQAPKIKAKASYSTNNIYLSSGKNSALLWVAE

SEQ ID NO: 983345 - protein, 56 aa, Homo sapiens
SILQVHFCNHQHKTTSHSTSGFTSSNATTETTSHSTPGLQFFDLPPPGTTLTHVLS

SEQ ID NO: 983346 - protein, 108 aa, Homo sapiens
VIRVALHTVESLPDSSIMAWPVSWLELALESTGDSHLVGQVIIDLPVEPGEDVGAHVVGGGEVGEWGHLEGIHVHCGLPLCGRDDGAKTWKGRIPREGIGPGKDILSG

SEQ ID NO: 983347 - protein, 36 aa, Homo sapiens
  misc_feature (16)..(16): Xaa can be any naturally occurring amino acid
HQARNRLSQASRGGLXTAWVVGSSSTTGCCEGLVIE

SEQ ID NO: 983348 - protein, 37 aa, Homo sapiens
MSGRSDMECNQCDGAGVSADGVGHQCQRSGSLVPLEL

SEQ ID NO: 983349 - protein, 45 aa, Homo sapiens
  misc_feature (35)..(35): Xaa can be any naturally occurring amino acid
LSSLVGPADSADAWLVSMVRCGPPCSTMLWHMEFXQRGRFGGGRH

SEQ ID NO: 983350 - protein, 64 aa, Homo sapiens
TTSVLRWESSKSGKRAARAALNPCAPAGRVCADEGVGDGSCVLRRISTRMCPGYHESQLPGVLR

SEQ ID NO: 983351 - protein, 38 aa, Homo sapiens
PRLGEESTTSRSQTGSTHSTVSLPDTSRLSEESTTVYS

SEQ ID NO: 983352 - protein, 66 aa, Homo sapiens
FLFTWNKLRRSLETNGEINLSKDYSSTDLDLDTEFEILLPRQRGLGPLCYRSRQLLDSPTQRHVDR

SEQ ID NO: 983353 - protein, 95 aa, Homo sapiens
EDPAGMDYTRRSEFWADGLSSGCCGLGVVAGLHTAAVGKVKCCGSCHTGSRVQPVSTAECQALGDPHYVTLDGHRFDFQGTCEYLLSAPCHLGQR

SEQ ID NO: 983354 - protein, 87 aa, Homo sapiens
VEDDQICLRLQHPACTLLYRLCYTCTASGRTTGIVMDSGDGVTITVPIYEGYALPHDIMRLDLAGRDLTDYLMKILTERGYSFVSTA

SEQ ID NO: 983355 - protein, 40 aa, Homo sapiens
PLANGLISYPFLTELNVVVGGMRHLCVEKSTLRATDVCLG

SEQ ID NO: 983356 - protein, 40 aa, Homo sapiens
EDRPVANGLRLMDCFLTLCSRQEGDSSDSWWWTVLAQRCD

SEQ ID NO: 983357 - protein, 45 aa, Homo sapiens
NVALCPFRVEPEISLMGTSDLNALPGLKHCDREGAGCCLQGLSDY

SEQ ID NO: 983358 - protein, 69 aa, Homo sapiens
WSICSRMDCAICGAEISLMGTMIEGCQYVTRRCGCVYKALSDTTSYWKATWLKAKMCHPGHACTQKFSH

SEQ ID NO: 983359 - protein, 84 aa, Homo sapiens
  misc_feature (4)..(4): Xaa can be any naturally occurring amino acid
GGQXASLMRKLLSAACAGATLLGFSKGFQVDVVVTQSLVDMSSTFSVTYWQLLQVMVRIRQDLRLHDGHNDILLVDTVIVAERG

SEQ ID NO: 983360 - protein, 34 aa, Homo sapiens
AGQWQYTASSLARIYYLPQRPGSTETTLLPDNTQ

SEQ ID NO: 983361 - protein, 52 aa, Homo sapiens
MTLWYREDHDTVMHHCDQKTVDGPPETVAVMARCLQNIILSLLALQSCGQGH

SEQ ID NO: 983362 - protein, 47 aa, Homo sapiens
MTFCRRKDYGEEVTCKVQQLQSHQKQKVDSRTKSKDYCKVIFPYETR

SEQ ID NO: 983363 - protein, 72 aa, Homo sapiens
MDYEDEVQNTRERQQKGENELKELEQKHSQLTEEKNLLHVIMLLCETELYAERLSEIAVAAGCAKKQELEEI

SEQ ID NO: 983364 - protein, 153 aa, Homo sapiens
SVCVAQYWGGDCTRVVESAGPMIYKRPTGDIGVLGGHPEAVLYRVAGAESRDTTWDTTMTSNAVAIHPDMVTIATGQVCGNHYGMGMPMPPHVRIWDSVSLSTLHVLGMGVFDRAVCCVGFSKSNGGNLLCAVDESNDHMLSVWDWAKETKVV

SEQ ID NO: 983365 - protein, 52 aa, Homo sapiens
RDRKSVITVRTEPEQTENRHMLAGRLVKVTASGIRICWSGAFYFLVRSDAGC

SEQ ID NO: 983366 - protein, 66 aa, Homo sapiens
MTASIPERASAVGRNVRCTPINISSEMDYRRRYDLGCSLIIGDISEEASYDGKYSSYVIGHKESEL

SEQ ID NO: 983367 - protein, 57 aa, Homo sapiens
AEHECWHYRRDRMRLAHFIANLASCVTGVGASWAPESSTQCRNMTAMARQQPSLGPS

SEQ ID NO: 983368 - protein, 85 aa, Homo sapiens
MSVPNTLLDGESTALVVGRLVTRSAFNSGKVDIVAINEPFIEPQATCVYIVPMMIPRQWQNSMVTGQWRENAEALSSYGKSLSRI

SEQ ID NO: 983369 - protein, 103 aa, Homo sapiens
VKIKYGSSETTEYNVHQHLIAYSYYKPGPPAGRPTGDIVPGFSGYDGHPGGTDPGPHPHLAKAALAQLDLTSRSDSRGISQDILWPGPEYCGYGGISGERRPC

SEQ ID NO: 983370 - protein, 41 aa, Homo sapiens
PNGDPGFNQIEVEAHDNIVISPHGIASVLGMLQLGAGRNPM

SEQ ID NO: 983371 - protein, 45 aa, Homo sapiens
MHRLGRRIATNLELVRTRKSDSKIKTKHTRKPSRRVYDADSDTLA

SEQ ID NO: 983372 - protein, 49 aa, Homo sapiens
MITPSILILLICFLVRYALLLSTHNQELTTTNILSTLRHIENASELSCP

SEQ ID NO: 983373 - protein, 85 aa, Homo sapiens
ASVTTHDHKSMPSLPPPETVDGPLLRKLWRDGRVALQYTSSLSLLALPRSVGKVITEITRTLTGMAFRVPTANVSVVDLTCRLGA

SEQ ID NO: 983374 - protein, 171 aa, Homo sapiens
SSVPLQAWSPVVLSLMSSSVWIFTSTNPEHKAGCEDECAREARCLGNWHTLHSVEGIAYNRAAQQEGIAYNRADHTGVSSTTELTNRRVSPTTELTNRAAPGHIWLFTVNIQPKFNKMCHFGSSTTLAIFQVLRWTTGGYRIGQCRYGALASSQTILSGSASLNSFRLQRT

SEQ ID NO: 983375 - protein, 33 aa, Homo sapiens
MGISVVDRLLVTGVPPHLPILTCQYLSSTSQIQ

SEQ ID NO: 983376 - protein, 33 aa, Homo sapiens
YPLYHELKARPGDQAPPSRISNPCLVSVIVVRE

SEQ ID NO: 983377 - protein, 84 aa, Homo sapiens
EYHDYSVDGNGMRENGVSRSGDNEVDEEEEEGGDGRGGGMKKVMVWKRMEMNIRKLSQLRCKRAAEDDEDEMSDTKKQKTDEDD

SEQ ID NO: 983378 - protein, 104 aa, Homo sapiens
MCLGNCKPALPRLILVRGFSWSLIEKPWLGRPFLQLLTASDPPASASRGAGIADGVSFTQCSVVSRLECSGVISARYNHLPAACLGLPKSRDCSLCPAATPSGK

SEQ ID NO: 983379 - protein, 69 aa, Homo sapiens
VRYDRFYTLLDRLPLPYIIAVIISVRNTRSAQLQISSTHVSYLLQELSITPGAKELNYDIRLHKSAYIL

SEQ ID NO: 983380 - protein, 105 aa, Homo sapiens
  misc_feature (90)..(90): Xaa can be any naturally occurring amino acid
MSQVCSKHHGCNGEHNKVLVSSQNLRFQCRQEIYTVISVVTRAMIAKAIMPGTVAHTYNPSTFGGPRQMDRLSPRFKTSLGNVAEPCLYXKYQKISQAWWRVPVL

SEQ ID NO: 983381 - protein, 38 aa, Homo sapiens
PGKKQEMNLYLERTEQHRHIGQMSPVCHPLQQKRCIDH

SEQ ID NO: 983382 - protein, 69 aa, Homo sapiens
LEVRYDMRRLSAREMLLFSAPETRRFAKTLLLHTTPGTLNASYLHDATTTAARLNPLQLPVARDWYFEA

SEQ ID NO: 983383 - protein, 46 aa, Homo sapiens
LVYWAPVQQASRSSSCSGADVRSGLWSVAYADNTPAASPRLEQELH

SEQ ID NO: 983384 - protein, 79 aa, Homo sapiens
  misc_feature (72)..(72): Xaa can be any naturally occurring amino acid
RGGCAERITSQTGWRSGRDTPQFPDLKLNTTFFDPARSEETPYLEQQLFLIFLVTLEVYIRYPNKASGIISXYCNFTTP

SEQ ID NO: 983385 - protein, 41 aa, Homo sapiens
MVCHVLPGKQALVRLDEMHEHAELLRLSVYKDSAHVGQAQC

SEQ ID NO: 983386 - protein, 51 aa, Homo sapiens
ISRYPIGLEQVVPALEFKTLIIGVIIVTETCLLLPYLLPVLLQMIKSFISY

SEQ ID NO: 983387 - protein, 40 aa, Homo sapiens
SASLIFHQASSSVNFSPRVCHHMSEVLQMKKYKALMGYRR

SEQ ID NO: 983388 - protein, 59 aa, Homo sapiens
QRYYTSGIEWQGIERTGIERNGLDGTKTAHWTQVSNWNGTLIVNWNCELELKLESNRNW

SEQ ID NO: 983389 - protein, 100 aa, Homo sapiens
RESHGVEWNGMEWNQPDCNGMEWNGMERNGNNPNGMEGNGVVRELNRFNPNVMEWNGTEWNGMEGIEWNPPECRGIEWNGMQWNGIIRNGMEWNGMEWNG

SEQ ID NO: 983390 - protein, 60 aa, Homo sapiens
AVRELYDELCSSETSDPACGKTYWYLIVFNQKTFRDEKPEEEARTHTEIEMFLRKEQQKL

SEQ ID NO: 983391 - protein, 39 aa, Homo sapiens
MGASAEGAEIDDPFGSPLQMSPSLLHGGEDASGPHDNCS

SEQ ID NO: 983392 - protein, 81 aa, Homo sapiens
PRIARRESASESHDREWNAMECNGVEGIRINWNGMEWNGMESTPVEWNGMEWIIMEWNGINPGGMEWNGMQWNGMESTRVE

SEQ ID NO: 983393 - protein, 106 aa, Homo sapiens
MTTAHTRDLWRRFSLMRRSQANLRAERCQVPPAIHSRFSTASLKLDRESICSSSSWMDSKVPLWLYCTTPTRVPVSDLWSLAMAPSLSTTLMTKVFSSENLVHPML

SEQ ID NO: 983394 - protein, 119 aa, Homo sapiens
MAWKCCPEAMFPLHTSQLGGLTYMTLHSWPMEDDATDSCPSSWDSLLRDTAAGEQRGTPEPEDLSDVAIAIHQHQGNKQFGTAKVGFLYKKSDGIRRVWQKRKCRSQVWMPDHLTTNCS

SEQ ID NO: 983395 - protein, 84 aa, Homo sapiens
MWLADETGACDFGLEGVAPDVVKGADRYLMEIRKLPGAMRIIGDAVAPTGHSWKSIFTLEGLSMVHRQVTSSRICSCSRKLQLT

SEQ ID NO: 983396 - protein, 51 aa, Homo sapiens
AVVVVTGVFTTMEKAGAHLQGGAKGVIISAPSARCPPCSVMVCEPIEKYDN

SEQ ID NO: 983397 - protein, 34 aa, Homo sapiens
PVLVRRSVWNSGFAAVVCELGRESRVHAGARRVL

SEQ ID NO: 983398 - protein, 45 aa, Homo sapiens
FWLAAVVCEHEQCWELVPCLVTIDGPSKVKMDCQLSAHEGYLCHP

SEQ ID NO: 983399 - protein, 99 aa, Homo sapiens
WLAAVVCEAALLAYVCLAQPQCPCATTLLAVSRPIDPGAPLLWVGTWWPLCHETSTTHLMTVSVEASGELDETGGLVTYGLERGLPQIVVVGQPYLIGD

SEQ ID NO: 983400 - protein, 53 aa, Homo sapiens
AVVVSPVLGTFPPTMGCREAHPARFLSGSSAGHSPLLHAHASTLTILCSIDGT

SEQ ID NO: 983401 - protein, 83 aa, Homo sapiens
RTMICRMDRPDERESQCTPRKVQWDTVKMAADTGGGLLRPNVSDAGIPRWLDHSRPCGFTQGISQALLLAPAPSAGEKLLETE

SEQ ID NO: 983402 - protein, 122 aa, Homo sapiens
KEKHEWNGMQWNAMNGMEWNGKEWNGTGMEFNVMEKKRGNGMEWKGLECNGMDWRQPDSNAMEWNGMERNGMNWNGIERNGMNWNGMDGMEFNGMEWNGFNLSRVARNGMEMNAMEWNGMER

SEQ ID NO: 983403 - protein, 39 aa, Homo sapiens
HSRSGVQEHQQDISTRDFLASRDRGPGGQLHQDVHLTHL

SEQ ID NO: 983404 - protein, 73 aa, Homo sapiens
LRHVRLTPAQTHVDCLAENGHNVWALRPAVGQCLELQRSAVTSHARRNPRAGALPPRWIEATTAHATWDMPRA

SEQ ID NO: 983405 - protein, 33 aa, Homo sapiens
LRYYPSDTGLHCSSVSVLECGIRTPGCLAIDTV

SEQ ID NO: 983406 - protein, 103 aa, Homo sapiens
HPLRLFSSQIYGNDNHDPNKALYSVLSMSPKIHNTVKLKSYLPMANRTKLSIGSSHHNPHFLHCLLDHSFLSLSDTAREHKLTLLSHDQANTTADSILYPSSL

SEQ ID NO: 983407 - protein, 84 aa, Homo sapiens
  misc_feature (47)..(47): Xaa can be any naturally occurring amino acid
SIVTLLPSYSDPPQIIIMLYPVYSVLSHELLDLPFNKRSYLENPLAXVRDRGRMHWWSERNRTGQGVSQRSSIQCLESMNNIGF

SEQ ID NO: 983408 - protein, 104 aa, Homo sapiens
VYARLALDDRKHNRLKLVKTRQVLHNSYIPQYILSNITLVLDTSPPLDLELQLLTRLALGHCRCKYGSDLQTTVRTYGTALEMFHIVISFSSHTKFNFIANGST

SEQ ID NO: 983409 - protein, 46 aa, Homo sapiens
LNALYFEKERKNKKEQKKEKSTRRRKKEEGTDRGRTKKQHAAERRQ

SEQ ID NO: 983410 - protein, 38 aa, Homo sapiens
MYKLFIVYLTISINICFPDHSINFYICELLSKVCHHMA

SEQ ID NO: 983411 - protein, 69 aa, Homo sapiens
STLLYFTTNIEPRLENLHADQTNDLQCSSNTRDGGRTEMETTSHVTCSKSGHAGMPSYGSRWFQEQVAR

SEQ ID NO: 983412 - protein, 161 aa, Homo sapiens
WEVEFIQARCIPGCAALTLKKLMVFKELKKELISVVIAVKMQARNESVRSHEIVLPPSGTVETDLALTFSLQYPHFLKREGNKLQIMLQRRKRYKNRTILGYKTLAAGSISMDAVMQHPSDRWPGAEPLQQHHGGPRQGGRNLNASLSSQPIDHEDSTMQS

SEQ ID NO: 983413 - protein, 54 aa, Homo sapiens
ARPIRRVCVHKDLQVQRLALWPGFPVAFGQSFISANWIECSWPFQWTQFNALTV

SEQ ID NO: 983414 - protein, 88 aa, Homo sapiens
GLDREQPSRCVAGLEQWLSAIEVDPAIAQACAPPHLIRMLAFAAGHCSPCAPVETLRAMRRSSSISVPPEDSAMTSLATDVLIIGAGL

SEQ ID NO: 983415 - protein, 91 aa, Homo sapiens
AQAGLELPTSGNLPALASQSAGITGMSNRIRPGSAIKGVKLGGLYTLFASHPILPFPLPFLPSTLGPAASGVSRTHPVVLHVRELLHEEAY

SEQ ID NO: 983416 - protein, 46 aa, Homo sapiens
  misc_feature (25)..(25): Xaa can be any naturally occurring amino acid
AGIIGVSHHTQLDKDYWPSLPYIFXESKMFLSLDGKIGIPPSPLFQ

SEQ ID NO: 983417 - protein, 47 aa, Homo sapiens
TTQHRGDLMLQIAACCTLLCCIMLQLLPMHAILLRDHTAPVVRTAGG

SEQ ID NO: 983418 - protein, 55 aa, Homo sapiens
KFVTLTSRDSTVGNNTQTLYTDGDKGFFFYTKYEEAKGGFQFRLCYMGFLDTQAH

SEQ ID NO: 983419 - protein, 42 aa, Homo sapiens
WARSSAYSFFSSSICQPQELVVHLQPIGLYEGILHALVGLAQ

SEQ ID NO: 983420 - protein, 32 aa, Homo sapiens
MGNVRNCKLLWIHDAADMSDQTSVHEDVTKVY

SEQ ID NO: 983421 - protein, 45 aa, Homo sapiens
ASELMTSLNTAALRCRILPVRARMPEARFRIPSEYLDMLVFPSFS

SEQ ID NO: 983422 - protein, 46 aa, Homo sapiens
YSCYLNQDTKNYHAMADIDEWVIQRISTYEIMELQYVDHLLKEDVR

SEQ ID NO: 983423 - protein, 51 aa, Homo sapiens
MDQIRWNEGTDHRPCTNSKIIENRPPSMNPYAYTEPEPTEKVAHEIRFPSL

SEQ ID NO: 983424 - protein, 33 aa, Homo sapiens
LSYSACAGLAGSSVMYSRVARPLPSRNGCISFT

SEQ ID NO: 983425 - protein, 34 aa, Homo sapiens
MLSALAGSGNPGYNPYRRVPGHAVRTVKCRWHQA

SEQ ID NO: 983426 - protein, 114 aa, Homo sapiens
GKRTEGTQRTTCSRPSLEKKKSYSARSEGRQVVSSTEDKHPFYRGSGRQEQHGSKGQAGGHELVTLLSSEDSPEVPLLEEVSLHLNEACSLTLAGQYSTECDGIVLAEGGLTGQ

SEQ ID NO: 983427 - protein, 53 aa, Homo sapiens
AKTFHITNDAPIPIWTFLSRMLTGLNYEARKYHIRYWAAYYLALLRFPHPGNA

SEQ ID NO: 983428 - protein, 47 aa, Homo sapiens
MYRSHMTYHVRSRDMVPRMRRTSRANIHHIKPTECAPLLLHEMAVST

SEQ ID NO: 983429 - protein, 43 aa, Homo sapiens
MQAQSECSILHHAVAAGFYYTCIAPLHSRGALEAAFTVAAYNR

SEQ ID NO: 983430 - protein, 66 aa, Homo sapiens
RESHGGGDPAHVVRHQVVEVHVVGGRQLEGAETDLYKCLDVYALSLIRILHHLVHRQRGGDELHHR

SEQ ID NO: 983431 - protein, 60 aa, Homo sapiens
MPPRESHGVEAHDVAIVLLQITLEHGLGGTDLIQDVYVLQLEERLEQEVGIKNQRSQEVT

SEQ ID NO: 983432 - protein, 167 aa, Homo sapiens
VGVISLHGTEGGEEIRSVIQRGQKVIWEGFQVDLYPTGHRSRTPSNPFSPRSNLCRRRHTSIAGVGGDMTNPSTARHAEERRLSLVAGEPMRLEVLWAPPGNHLRDLGLLQPPNPTWSKGDIMSPTNTVRLRKLIAVMSRCLAAIGECAEFEGVFVGYRNAVAECRE

SEQ ID NO: 983433 - protein, 75 aa, Homo sapiens
ATWWVSLSTEPSALALFVHGIHLVKAISVQYLRRKQLHVVHRTEVSLAAWCHCDIHCPADFSGALCTRSHTCGFP

SEQ ID NO: 983434 - protein, 126 aa, Homo sapiens
SEDEIQLSWSGDLHRLRAYQHNETFRGLTNDTTTPASTMTSVQARASTQPPQALEDSLPENISVSITLTLDPLKPFGGYSRNVTHLYSTILGHQIGLSGREAHEEINITFTLATAWSSDDCALHGH

SEQ ID NO: 983435 - protein, 103 aa, Homo sapiens
SPPRNRTEVVTPLMAAYIQVVEVPVGGGEQFEGAETDVAECLVVDAVGLIRILHQLVHRQRGVVGSTTVSDTLGEGTTLKVFMMRSVNSSRILLMSSVPIPDP

SEQ ID NO: 983436 - protein, 78 aa, Homo sapiens
MYAGAAEHVERRDVPMSERAPVSDDQGDAVDRSGRQQLVLRALQSLPRDGAARHPLQALDGFLELMHVTDAGSAQDHV

SEQ ID NO: 983437 - protein, 135 aa, Homo sapiens
  misc_feature (123)..(123): Xaa can be any naturally occurring amino acid
  misc_feature (131)..(131): Xaa can be any naturally occurring amino acid
VQQQEETPGGRNLRQIAGEAARDPSLRRARTVCGESPQKWSPCDGEHRSACVPVGCSLTGGSQSRRAEPGSFRGCLREGVPCCTCVFVMGVCVCVGGGASVCVSVCVRAQCLSVCRLLSLSHXSLSLSLSXSLLA

SEQ ID NO: 983438 - protein, 107 aa, Homo sapiens
FALEAQTGGAQMAQSRLPAASAPAIKRFSYLSLPSSWDYRRMPTLPANPCIFSKDGVSPRWQDGLISRPGDPPASASQSAGITGVSHPARPYSFTFLINLLSDYSVR

SEQ ID NO: 983439 - protein, 40 aa, Homo sapiens
PVVDELLGRLGDLPAPAAFLSDSFDEGSVSESESGSVERT

SEQ ID NO: 983440 - protein, 36 aa, Homo sapiens
TGESKGRWMAALACSQHLAWGRSVGGRSICRNSHKG

SEQ ID NO: 983441 - protein, 33 aa, Homo sapiens
ILEDPRAGTVPGRADDFSQVNVIQLSQLTRCLL

SEQ ID NO: 983442 - protein, 78 aa, Homo sapiens
RLVFRRIPRLGTDSGDRLGEDSMTKTPKQWQAKAKIDKLGSTETKELLQMQKKATIRVTRRPTEGEEIFTTYSSGQRA

SEQ ID NO: 983443 - protein, 62 aa, Homo sapiens
ELEAKVDALMAEINFMTMFFAGGTLSQMQTHVSDTSDGPLHGQTTRKPGTWIAIHRCSDQGP

SEQ ID NO: 983444 - protein, 40 aa, Homo sapiens
VQAHRSSSWLSLCASGVGIGLGLGGGSSYSYGSGLVCCSV

SEQ ID NO: 983445 - protein, 140 aa, Homo sapiens
YTEGLLVNRPPGDKGAKRYDPGVHLSSSSRVPVLLLSSPEPADDRTNQADTSSINRGVYTRNLTDRAEQNSEGSPGILIHTRPTVAHFTFSSKCTKVQHIGINLHPNMHTKELRNQAIQGLCISPHSSSQNPNRSAQTSS

SEQ ID NO: 983446 - protein, 40 aa, Homo sapiens
LQRYELYYLIRCKQAATLPGLLNGRRRASEIPHAVFAGGK

SEQ ID NO: 983447 - protein, 72 aa, Homo sapiens
AGTSPYCIYPKVSTSKIKADKSTKMRKNQCKNAEISKSQSVSSLNDCNTSPSRAENWAEAEKNELTEVGFKR

SEQ ID NO: 983448 - protein, 40 aa, Homo sapiens
KIKWVDAGAEYVVSPLASSPPWRRLGLIMQRGAKTGHHSL

SEQ ID NO: 983449 - protein, 34 aa, Homo sapiens
MAALKETEARAKYRQIVSAVHYCHQTHIVHRDLK

SEQ ID NO: 983450 - protein, 32 aa, Homo sapiens
MVFIRINIFPIVSIQVLFLLTAVILLICTHIF

SEQ ID NO: 983451 - protein, 58 aa, Homo sapiens
GSEITSDIRMATICTIAILGISYCWLHNSSMQSHHSLYAMLEPCGHSAQGAMVESQRV

SEQ ID NO: 983452 - protein, 63 aa, Homo sapiens
LTHSTASLSFFCRTISSWEIRAVSSAILQGQLILSLFLVPVYGLQHGLLDLFSFLTLLGTAFQ

SEQ ID NO: 983453 - protein, 34 aa, Homo sapiens
MQFFRAITVLHAHTPFVCVEHTEAYFLISVLSFD

SEQ ID NO: 983454 - protein, 33 aa, Homo sapiens
MTGLSLLSSARMRILLFMISALLHLQETCLSAV

SEQ ID NO: 983455 - protein, 91 aa, Homo sapiens
MFLNLSLQYSESALPNNVITKTYPLRGRLNSQLILSRYLRIIQSIKLRQQHRENTFPPTSYCREFALFSLKMIGSCSHRKVVVVISHRQPE

SEQ ID NO: 983456 - protein, 43 aa, Homo sapiens
CTPRQQEGLRPEVEESLGLMIMKLSPRTYRVLATGPVEERGAE

SEQ ID NO: 983457 - protein, 41 aa, Homo sapiens
EVLNEQRTRKKKPAVGRLLVGPGGQERSSVPRPRPTPTRQA

SEQ ID NO: 983458 - protein, 63 aa, Homo sapiens
NLFYLHMLQVSGNRYLHEALLYQTKPQTRSKNCYIIFIFLTSSKHVSDQRVSGINFKCFLLTR

SEQ ID NO: 983459 - protein, 63 aa, Homo sapiens
MSFSILARWRWENTFSDPHDVATLLLLELHEGIEDTKVKWSRKANLSRFTYVAQSNGLTNPLE

SEQ ID NO: 983460 - protein, 75 aa, Homo sapiens
AGEAGRVCPYHPALSERMAWVPAVTVASKRLLVTDEMMKDVNSPYAVGSGVHTNTLEATLSRDFQPCGRGEGATS

SEQ ID NO: 983461 - protein, 61 aa, Homo sapiens
QLPPHGARAQFYQLRKQLPPLGPGHSSTSSGGSSHPKGPGQQFYQLRRQLPPHGARAQFYQ

SEQ ID NO: 983462 - protein, 81 aa, Homo sapiens
  misc_feature (1)..(1): Xaa can be any naturally occurring amino acid
XGHVDQRMAHMGTRPGPAHPRGIAALVIVMPEAPGPRQFHGNLAHFGHLGQRVGDLLGIVHVERQLQPGLGTGAPLAQAFQ

SEQ ID NO: 983463 - protein, 36 aa, Homo sapiens
MRISFAVFIYNSPFGVLRRGISPYTNESVKQLFPPS

SEQ ID NO: 983464 - protein, 81 aa, Homo sapiens
DGIDPRGTGRLQYCNYGSILGFPKAKPYEVKHLARPDCGHTDSKLRSCMNAVAPNPDCSLEVYKPEIISYTVPYGPSTPGS

SEQ ID NO: 983465 - protein, 70 aa, Homo sapiens
SISAEREQIELSWLSVILPVRKKPPSRYHRLKVAVVGDPPTWDEGDVTDTREVSSLQMAKELQPSATAGA

SEQ ID NO: 983466 - protein, 69 aa, Homo sapiens
PARGDYGILDSLQDAVRHRIKLVYSIDNHLHQLHLCFAYIGPRLEIIKDTRLIASRCSNSSMYQRFVES

SEQ ID NO: 983467 - protein, 77 aa, Homo sapiens
  misc_feature (64)..(64): Xaa can be any naturally occurring amino acid
MAYHVLYLAYPFAAGRLCACSSLHGQLLMLVKPAVLNCSRASAGNGRHLCAMPALVHLSVELDXSSSLTLLGYAIAL

SEQ ID NO: 983468 - protein, 38 aa, Homo sapiens
GSVSAIISTNWIECSWPFQWNTVNSPDVMVICTHYLPY

SEQ ID NO: 983469 - protein, 64 aa, Homo sapiens
MAYARCSRAGLDMPPTSTSHDKELNLYSVGNHLKMHTRSVKAHEVSFVSYYASVQILFDMFSTF

SEQ ID NO: 983470 - protein, 57 aa, Homo sapiens
MTACGWWRQFRGQMLLLGLESCVGYYTLRYGISVGERWQMFCFLVLGFSGIVLVAQP

SEQ ID NO: 983471 - protein, 38 aa, Homo sapiens
VEFLRIPSYGPGAVILHFMFTYHPPSIVYSVLLTLGGG

SEQ ID NO: 983472 - protein, 63 aa, Homo sapiens
EQSQRKCHNSQHLYALQVKVKAKSTGPGIHSGSSRQGIHRDIEIHYPACFYLRYGDNWTNTNS

SEQ ID NO: 983473 - protein, 114 aa, Homo sapiens
GTQSTAITAPTDLKFTQVTPTSLSAQSYTTPSVQDSSGYRVRVTPKEKTGPMKEINLAPDSSSVYVSGLMLTTKYEVSVYALKDTMTCRPAHGVVTTLENVSPPRRTRVTDATE

SEQ ID NO: 983474 - protein, 77 aa, Homo sapiens
  misc_feature (46)..(46): Xaa can be any naturally occurring amino acid
VSETKRVPPRVCVRYVCVFVPAQRNPSPGICSFPLWPPPRFPWLPXCPERTNSGPLSWTVAATGSGLSLTLQLSVAF

SEQ ID NO: 983475 - protein, 140 aa, Homo sapiens
YSPGLASTESGTGADADSGRMEPKMELATTEEVLKRLKDYPLSPALSLQSELLPCWIMICISQNMLFPGGLGHAAGCCDDRVENRVVATFRHELICVQQAILLPGDGRLPSIPVFLPLQCVLVLHHAAEVLILMLSVPSL

SEQ ID NO: 983476 - protein, 71 aa, Homo sapiens
VDARPKTRAPGSPHPATAELEVSARTLREELNLARITDDRILCAPSPGDSHVSKLIHRLTQQLSQGSRGQG

SEQ ID NO: 983477 - protein, 121 aa, Homo sapiens
  misc_feature (61)..(61): Xaa can be any naturally occurring amino acid
NWTLTVYVDDDRSTPSKLTLKLVVTARDWAATRGRGATVRPRTLRQGTTASSDGHVGLYTXDDPTDDWERLIFNHDRLEDAKRDFQTQRTPDVSQTRPEDRTRLDLLTDDWTARPRGPGRR

SEQ ID NO: 983478 - protein, 32 aa, Homo sapiens
MPGNGRFSGDRGARTDEIRKLDALALCLNKRK

SEQ ID NO: 983479 - protein, 74 aa, Homo sapiens
RDRLILRVGLEKLYQVYKIKQSYYYNDAISHFLLVGEGREETLTLYRFGYMWQPASMAVEKHGALASLRHSWGS

SEQ ID NO: 983480 - protein, 59 aa, Homo sapiens
TPRFLTMTTFCLKRSCMNDTLAIIYTGAKRNRRPGTVEALVELCYEHDLVAQFTDKEAA

SEQ ID NO: 983481 - protein, 58 aa, Homo sapiens
KTRTPTTVLSGGTPCIRDIADRMQKEITALDAQQHMKIKIINSPQRRKYSDVRSDGST

SEQ ID NO: 983482 - protein, 136 aa, Homo sapiens
SYISNHRASPISQLYDHSQEPTTISYDEQFNLWLERLSSGKDKNKSVLENQDFRCSVRAEVRHLREGPVLPLDAKTLRMLQLPFLTMKFFRDHITMKQILLSRWFGKVSHGHLSVITPPLKFPTRVPRPNLVILAY

SEQ ID NO: 983483 - protein, 64 aa, Homo sapiens
TKFSQVDSLSRLPGIYLRSSVTLLCVLSYSPSTPTLQRESVASTRKSPPYSPISLRYSPVSLMS

SEQ ID NO: 983484 - protein, 46 aa, Homo sapiens
NECKLKEETSGPGEQARAELLSLTQMEREKIDGSLEQLYHSYNRSM

SEQ ID NO: 983485 - protein, 101 aa, Homo sapiens
DSSKEQSPNCSPDEPQEGCAWRWACFLGGVNRITWISEGPRQQSWARWLPGRLHDEAEIRMNSGRRKGATSVSLCTNIRTGFFEETEARSFTSSVMVAEQS

SEQ ID NO: 983486 - protein, 91 aa, Homo sapiens
QGWGMVCGPCLLSGHEHGGASNRSGGIKESWPGCVAAGYQQCKGGDSAVEDVSTRSALAIFKDSCVDGSWKCGLEIKAEAWTGDRNLSLLQ

SEQ ID NO: 983487 - protein, 57 aa, Homo sapiens
SRDYATCLCCSCAAGYTVNVRQCVAEGYPQRVNGTVKGRIFVGSSQVPIVFENTDLH

SEQ ID NO: 983488 - protein, 33 aa, Homo sapiens
ATYANLPTIALENTDSALSYVDIAIPCNNKGAH

SEQ ID NO: 983489 - protein, 37 aa, Homo sapiens
AHRIMLMRDSVQAQETTMSSRKSESRAATFPVSEIPP

SEQ ID NO: 983490 - protein, 62 aa, Homo sapiens
SEYNIMFEPDVCERGTKKLHVIFNYTGMNVADEQGHTLQAMMSLHTYYTLMVRPDNTYEVMH

SEQ ID NO: 983491 - protein, 114 aa, Homo sapiens
RESHGGSSRRKKPQEEETSDRSPARQRGIPTSGVRGRCAGESPQKWSPCYDEHRSACVPVGCSLTGGSQSRRAEPGSFRGCLREGVPCCTCVFVMGVCVCVLEGVRLCVCLCVC

SEQ ID NO: 983492 - protein, 41 aa, Homo sapiens
PREVPVLASQITVITGESHHAWRHIDFINAKYRIFRQATVF

SEQ ID NO: 983493 - protein, 150 aa, Homo sapiens
  misc_feature (144)..(144): Xaa can be any naturally occurring amino acid
LEKSDADSGFLAVRPTSVFPALRRRRRAGRNKKRGWRRLAQEPLGLEVDQFLEDVRLQERTSGGLLSEAPNEKLFFVDTGSKYQAPDIDVQLSSELTDSLRTLKPEDNILRDRFKSLQRSNMIEPRERAKFKRKYKVKLAEKRXVREIQL

SEQ ID NO: 983494 - protein, 127 aa, Homo sapiens
MGHSRGSPTTYPNGKHSDVNHTFMLATTIPSEISSRLLSITLLAPIQLQVTTSRLPLQIKPLLLFPIPSNDTDALFSKTKNLDLLLDNVALIEWDNGTECLQLLRLPFILMIPYTLYCELFIDVLPV

SEQ ID NO: 983495 - protein, 99 aa, Homo sapiens
LTEEQVQLTSNPTSLSVRLLLLDRSLYCFPRRVLFRLGLCKLVSSKLVLLLAQLHFGQDSPKLGLVNAGEEPAGGIGKGLAEKKSLEPAYRATTGCKTT

SEQ ID NO: 983496 - protein, 118 aa, Homo sapiens
GHRRVTRSSPRLLARLQRRLGEGYRQQAAYYAQTPGPGGPQPPPTQQGQQQASGNCHPPPSFSLQPPDTVHPALVGSAGNLFPCGVRPVTPAAGAVWPEVSGSPHAPPEKHSLCPEVK

SEQ ID NO: 983497 - protein, 100 aa, Homo sapiens
SQHIPVLECSLIPTYSGTFTAIPTKPHLLEPPPNAKSFYKKTFLDHSTTTIITIYTKFQTYNQTIHLVRANYCCILYTTCSLRADTKSDMPQHHRNRLTK

SEQ ID NO: 983498 - protein, 70 aa, Homo sapiens
VKVVRRAEAHERRRTLPEEHVELRVSGKLGEYWSSGSGQSPAYSWPGGQGHDCGPWSSTELLERWVSDEG

SEQ ID NO: 983499 - protein, 144 aa, Homo sapiens
MRLNEMKKQIISSNGSIQSIPEIPDDLKQLSKPVCEISQNLFSRWQLPRGAFIDQSQSLNIHIAAANYGKLHYYALLRLEAGFASTGMYYFRTRPAANPLQFTLNKGKLNDNDKVSQAEEEKERNTAAMVCSLENRDECLMCGS

SEQ ID NO: 983500 - protein, 58 aa, Homo sapiens
TGRNRNWLREGEDHQQNKEINLHALLSPSSQGYVPYPNIPREAEVTCSTEMSSYFPLA

SEQ ID NO: 983501 - protein, 59 aa, Homo sapiens
MVARTPGPLVRVIRADCEMGFPGPKGSCWRALTRLESEVYPEPLALSVLLAKMERLGAQ

SEQ ID NO: 983502 - protein, 62 aa, Homo sapiens
CGLLLLVCDEYKVAIKVGGRYLKGDRRRLKASAETVDPDSLWRVLRAGPSIPQHLPTWLAPA

SEQ ID NO: 983503 - protein, 42 aa, Homo sapiens
CTGSLDLASSISQVDRPPDESRLTQSSRYSGNWIPGPEAGQP

SEQ ID NO: 983504 - protein, 50 aa, Homo sapiens
SPLIKRGVSSTQSTPASAARRPSPPDVVTITQRVQSRQAGKGQREYILKG

SEQ ID NO: 983505 - protein, 34 aa, Homo sapiens
VIGIVQQLLSEAESAFLLVVNVWEFDGCLHGEVA

SEQ ID NO: 983506 - protein, 74 aa, Homo sapiens
HSHPDGFGDTVTTTGNGTRPHPSYLNAECTSHLVPGQAYITWLRYYYTMYDVLRLRGAPPTRSSIPRTATRTHR

SEQ ID NO: 983507 - protein, 82 aa, Homo sapiens
HTQQTQIHRGTLETESLPIEKDAGTETRAKLPNMSVYAEKSGHITHSTEARSEGSGIHRTTLYYRLLTFGTSPVQATTHWIK

SEQ ID NO: 983508 - protein, 75 aa, Homo sapiens
PDTYTSRSSRYLPHINSHVYTKREAKRAIIKVVLYNSKTSETTSCPPKSNCYRRLQRRRPPLEHTSIFTALAHAS

SEQ ID NO: 983509 - protein, 72 aa, Homo sapiens
NQYTCIHKKRGKKSLIKVVFTHSKTSENNLILLTKRRNCIRTADGTEDPLNTQRLLHAWDCFKLSKQDTDDF

SEQ ID NO: 983510 - protein, 67 aa, Homo sapiens
MGSLYCHKPCYWNPLRTQGSEHLLRCAATSMTGTPKASVQPLGYRGSHDVGSPAPQTLEGPPCLGLL

SEQ ID NO: 983511 - protein, 162 aa, Homo sapiens
TAQVYSSYHNWDITKCRGAPWQACHAENWALGRRLMVLTAAILITLMGWRYGCFRKSGPCRSVLTDLLSGGLAQLGALISLVTSGVALNDGPLCMFDVSSFNQTQAWKYGYPFKDLHSRNNLYDRSLWNSDCLEPSAAVVWHESLYSDLLCIRLLQLLLVVV

SEQ ID NO: 983512 - protein, 40 aa, Homo sapiens
MTSWKSLKNELSEENEGKEPPRILQTLSPGPPVSATLTWG

SEQ ID NO: 983513 - protein, 57 aa, Homo sapiens
RLRPLSLDLSSPIHDEGMCKRGILHRCMGGRDPQLLSPLALALQVCLWAGERSFSLA

SEQ ID NO: 983514 - protein, 74 aa, Homo sapiens
WIWCTITIQLVLRLCADIMNVIGEPIDERGPIKTKQLAPNSLLQAPRDDMRNAVLSTEILADWLSTVVDSAQLP

SEQ ID NO: 983515 - protein, 33 aa, Homo sapiens
MLRVSHEISKKTIQLASICIRLLGYLMGTHYGG

SEQ ID NO: 983516 - protein, 69 aa, Homo sapiens
DRVTMIDLIERRPCMLLDSSQIHARVSLWKLNGLLITYHLGTTTPSPLCSQQPLGKVGTRDYCAWKNVL

SEQ ID NO: 983517 - protein, 51 aa, Homo sapiens
AEGLLQQAGIKKTKARVGRGVRPGRAIYTMYRLCESVLLVRCSCPQPASSA

SEQ ID NO: 983518 - protein, 31 aa, Homo sapiens
MGAWGLLQRTTIEVSSTLVQQSGQDGASERC

SEQ ID NO: 983519 - protein, 67 aa, Homo sapiens
CFQWLVQSQQDLLLGAPGRGHWWACDATSLCPGLALHHWFWLPSLLCSPWPMLPLRHLAETCTVVER

SEQ ID NO: 983520 - protein, 74 aa, Homo sapiens
EAGVTGAHHHTQIIFVFVVQTEGYHVGQADFKLLASSEHAVSDLQSAGITDASLRTWHVIAASLGLPQIERLCA

SEQ ID NO: 983521 - protein, 106 aa, Homo sapiens
DTGTPSPSLGTVRHTYRRRERDPNTDRANNLTSGITTHQTKASTGMKAAALIHFPELQPITEHWSRDDSDSSGLKSLFTKIGTLGSGAVAHACNPSTLGGRGRRIT

SEQ ID NO: 983522 - protein, 135 aa, Homo sapiens
MLEAWTHGEVLDPCPVQERQGLNPSPVYGACSFASERGKLERDPGLWVPQEVGSGPSVCGKATAAGRADLMGYATQAGPGAAGSSSHCVGLPGDQQLRLLNHNPRGSRCLLTRLAEGGQLSRSPSSCPGRGREME

SEQ ID NO: 983523 - protein, 84 aa, Homo sapiens
MCTRTHTNTHRDAPPQHTHTPKTNTHCTGGNTSPAGSPLKLAGLCVSDEGEPRGERRRPLGTAGGIVCSVITRGSNFVGRLTAH

SEQ ID NO: 983524 - protein, 56 aa, Homo sapiens
RKADHRTIVLIGLLWRRVFNQTHLHHANEGNKLLIGVFIRELTAGKSAWLRPNGEK

SEQ ID NO: 983525 - protein, 54 aa, Homo sapiens
PALAEIEEGLLYRFPAPGPHPALMEGRRSNVKVEAEASQTMRVGLVSSDPGPQT

SEQ ID NO: 983526 - protein, 64 aa, Homo sapiens
MDRGGLPLIADTAARGGGLHVCSTYKGGERRRRIRPIHSASGGLQAQARLSPLAALFKIVLSRV

SEQ ID NO: 983527 - protein, 37 aa, Homo sapiens
AAQVGSERGVYTGSCTEMCSPSPSNVKSLPLAEFKTF

SEQ ID NO: 983528 - protein, 65 aa, Homo sapiens
RGIDSRKGSQSTDEETCHKNKYLVPSDLTVGQFYFFIRKRIHLRAEDALFLFVNKVIPPTSATHG

SEQ ID NO: 983529 - protein, 33 aa, Homo sapiens
RLRRCCQMNICIWSLAGVDGHHVAVNDGMAPLV

SEQ ID NO: 983530 - protein, 57 aa, Homo sapiens
HSSEMESTDETENFNNLTEQVRKHLASERSDIVVGAQAAVNVITAGIPITPPMPTWR

SEQ ID NO: 983531 - protein, 51 aa, Homo sapiens
PRTVIATGNPPIDGKDGAIEFAYSMEEAARKPMELEDGTVDYKEIIRLKNV

SEQ ID NO: 983532 - protein, 39 aa, Homo sapiens
VTEAKVEETIAVRCLDKNLLAAENRELKLVAPTLRSELT

SEQ ID NO: 983533 - protein, 106 aa, Homo sapiens
LEWFWSEGSKLVQPCGWAGVLEAGPGHAQRVVPGPRRASIHSPLPSRPPGGSHLTARSSTLGPLRVGFALARCPSSISARQRGLGHLLRKGAGRATGPRPPEGLGQ

SEQ ID NO: 983534 - protein, 32 aa, Homo sapiens
  misc_feature (19)..(19): Xaa can be any naturally occurring amino acid
MSLHSSLVDRARLCLKKKXKKNKIKICGQKVT

SEQ ID NO: 983535 - protein, 103 aa, Homo sapiens
FLFFFRQSLTLLPRPGCSSTILAHYNLCLPGSSDSPASASQAAGITSVHHHAQLIFVFLEETGFHRVNQDALYLLTLRSARLGLPKCWDYRLEPLHPAPYLFL

SEQ ID NO: 983536 - protein, 33 aa, Homo sapiens
MSSNGMAESLGGSSQTVAQAAMPRLFVVWNILP

SEQ ID NO: 983537 - protein, 40 aa, Homo sapiens
EQLPERLGLQVHATMSSYFYNMVIGGRDKVFYVAQTGLEL

SEQ ID NO: 983538 - protein, 56 aa, Homo sapiens
MLIIASQEEVHMIVGSDSEDSQPGFGVVKLAAAVGDNSYPFRILYSCTVFLEYILA

SEQ ID NO: 983539 - protein, 120 aa, Homo sapiens
GLFNWPVALIDSFPDLLGLAAEDWHCLIASEAPWTITDAELRVTLTVKGKSIPFLINTEATHSTLPYFQGPVSLASITVVSIDGQASKPLKTPQLWCQLGQYSFIYSFLVIPICPTPLLG

SEQ ID NO: 983540 - protein, 57 aa, Homo sapiens
SARTGSAGLLAARVQTRDDCSENIGRSGAEGIGDNNPSRYSGTSCRSIRCVSNRPMY

SEQ ID NO: 983541 - protein, 45 aa, Homo sapiens
RRRVNLVEVRSGPRQQPHHHPRSSIRYAAFQQPQCCVSSSRLLSR

SEQ ID NO: 983542 - protein, 45 aa, Homo sapiens
MGMGVDCTGRTLATGFSSPFKVGCQFLLAEGGDAGQALIAGRVIL

SEQ ID NO: 983543 - protein, 37 aa, Homo sapiens
VWLCRLFPHSCPRGLSGGQCLRFPTPRVQAVGESMNL

SEQ ID NO: 983544 - protein, 81 aa, Homo sapiens
MTPRPPFEDIYQYTDDAESQIEFIKILRYKTCKQLQRKNTFFCCCTYDYPPSGALGKLQAPGFGLGDNGRALLPSHHLYLY

SEQ ID NO: 983545 - protein, 46 aa, Homo sapiens
YREVGVDCDVVSRLFPWIGGRAPAGCVGRHALPRRTFQLTDAAGIW

SEQ ID NO: 983546 - protein, 93 aa, Homo sapiens
NGDALILYGLSRRTAIAVGAATHTHTHTHISLSLSLKHTDLMRTTHDNSKTDIHSHDRDHLPPGPSSNIGGYNFHMRIGQRHKLQNTIYQNQE

SEQ ID NO: 983547 - protein, 177 aa, Homo sapiens
RIPYVSIVIIIQHIQASGSKHSTHQFLNHPRISILINRRDEELFRLIGTNLAGPGSQNISTGYKMKLYFQTNPYFTNMVIVKEFQRNRSDNQEDLWVNPLRYYLRERGSRIKRKKQEMRKRKTRGRCEVVIMEDAPDYNAVEDIFSEISDIDETIHDIKISDFMETTDYFESTDNEI

SEQ ID NO: 983548 - protein, 37 aa, Homo sapiens
VYHNAGMLPVKYRRHVSTVLDSQYREAGALVELYEES

SEQ ID NO: 983549 - protein, 66 aa, Homo sapiens
QKKKCCCTIRLCNTNRYVISVTKDNSKYRFQHAIRGQLKVYLVAVQLFRLGGMGDTNLKQKTINYK

SEQ ID NO: 983550 - protein, 63 aa, Homo sapiens
MCALVCMHITNEQQNYATGFWVSRGKELPFFAEYSSGAMFSARHFMFNIIIYSVKTHNCKFSS

SEQ ID NO: 983551 - protein, 83 aa, Homo sapiens
TPDYHRLHEQKNSTGYTGESSLFAQLQNFLQLNIKALGEGLRASRTDCRVSHLLWWAEIVSFQFSLESFANQPNLVAHACNPN

SEQ ID NO: 983552 - protein, 46 aa, Homo sapiens
MKDASKMGPMGNSTLVHTLAIIYWMSPISIVFPDIPSYVDKHLRAL

SEQ ID NO: 983553 - protein, 43 aa, Homo sapiens
MHDPRPSRASPYGLQVHLVLVLVLAQLDLLGVDLLRQLCQLLP

SEQ ID NO: 983554 - protein, 77 aa, Homo sapiens
  misc_feature (68)..(68): Xaa can be any naturally occurring amino acid
PVILLFAHEKDPHTTSGPQTDQPKNISPISNSVSGLILLSSPTSLTVPQPLCPFHSSISPRSFNFELXFPFSGERQE

SEQ ID NO: 983555 - protein, 58 aa, Homo sapiens
MHCFLPFYWVSLLPSYSLRVLRVSLHISDGSTAPPFFVAPGFPGLPVLIGSTFSHYLV

SEQ ID NO: 983556 - protein, 121 aa, Homo sapiens
CGNRMQGHQLGELLLEELLCLSARACSCCLQSLVLVVLAFFGLGLAVHWELPASFGFSSPASVFELKVASSSASAVSCKKAEEAVLLAGGAGALEACEGIGVLQDELVGVRISMASMESSF

SEQ ID NO: 983557 - protein, 55 aa, Homo sapiens
QFARDNPGGYSIHKEHRIHPFKVYTSGGLTFRVVHPSLIAERFHHLKKEPIRPGQ

SEQ ID NO: 983558 - protein, 34 aa, Homo sapiens
PPYASITSIRPTVILRYAPVSSIGPGFLHTPTVT

SEQ ID NO: 983559 - protein, 50 aa, Homo sapiens
YTRWSLLLKIWHSVYFKTSLVEATWLPAYFTCAGNAPQNLTVAYGSLKPD

SEQ ID NO: 983560 - protein, 78 aa, Homo sapiens
HLYHVCQRLQDHEATSAVRFGRTKVVPSSSYEPHDEDIECIEQQQGTEKRENTGYKTVLHHTEVINTYLSFLLVKGGP

SEQ ID NO: 983561 - protein, 63 aa, Homo sapiens
SGRAADPYYAHTDRRRERNPSSGISDTAEAGQARLVCAVPLNSLCLHPLKRFPERETRHVRQQ

SEQ ID NO: 983562 - protein, 37 aa, Homo sapiens
TCPILADISFSAAIAVHCPTPKRIDRSGGVAQCNCGG

SEQ ID NO: 983563 - protein, 56 aa, Homo sapiens
SQQFISNACQDLLQDLLQFRAVAGMGGLQQRMPGVRAGQRILAAGHMGHDDVQLIA

SEQ ID NO: 983564 - protein, 97 aa, Homo sapiens
THYEELHQQVTRLARLGSFTATQLDAAHGACTLPPCTTVAATSSMAAECRIRCRLRGTANAVDAQYSLRVLPGRLSRRTDVRNASDDAAHAPGTGFG

SEQ ID NO: 983565 - protein, 47 aa, Homo sapiens
MLAVQIGSAPARPAHTKTNCSNRAAALTNAVYDLRLAQYRWLALSHK

SEQ ID NO: 983566 - protein, 39 aa, Homo sapiens
RDSYRFINEPARVTRSAALIVQAGANIANRYACSGNMAI

SEQ ID NO: 983567 - protein, 44 aa, Homo sapiens
LTTAQREAPFDYGLLIYSNGHISDSPRKVLLRAPTGRAATPPCP

SEQ ID NO: 983568 - protein, 33 aa, Homo sapiens
MRRRCAARVASVNATVADLTLARGAITVTCGAV

SEQ ID NO: 983569 - protein, 39 aa, Homo sapiens
SLRCDGANRRPFLFIEQVEVSDQPAEIVGVAAVGLLDRQ

SEQ ID NO: 983570 - protein, 46 aa, Homo sapiens
MLYSYETVKYNTGAGYNYWGTDISMGPFFDQSSGRYLGLQRVFAPE

SEQ ID NO: 983571 - protein, 57 aa, Homo sapiens
AIHSTPLMPATPSSPMRVSMLVQAVAHLMEQVVIVVMKVAGLAVGTAAESLHTQGRT

SEQ ID NO: 983572 - protein, 76 aa, Homo sapiens
LRNSWVILTQSMGRWRRFQAGIAAAEVVQRHADPLARSVFRIFTCRSECRMKIDSVISSTSLRGASLVEASTSETS

SEQ ID NO: 983573 - protein, 58 aa, Homo sapiens
IVCLDQCRSVIRCCMKLNADSNKAMTEVMAKVHEVQYRLPQDAYDPVLVKSAGEATAV

SEQ ID NO: 983574 - protein, 79 aa, Homo sapiens
MSVDLRVHVDSPWSHSGTLGAGADRRCLAGALPLLAALLAEEGIEHGDEQHEQEGILHDGSRRAVDRPQAVHDGQAGQG

SEQ ID NO: 983575 - protein, 46 aa, Homo sapiens
CVIYRASSWCPAEATDCWWGKEAVEKSLLELGPMSGAQKRLMACVL

SEQ ID NO: 983576 - protein, 38 aa, Homo sapiens
KALEGTQEADLDTLRLNYNPTDMKRMNSDTRAFLDTFA

SEQ ID NO: 983577 - protein, 158 aa, Homo sapiens
AGSRSIADSEATSCGSYDGHKSRILRTMRRYSDAMPNQMMQQRRQRRLLQKRKPRKVKTPARVNEEEPAEGQKGEQPSTKAKKPRKPRQKAAAKPRAKKATPEGDAEVEVQNETNADEEEPESDPELHEIDPEALSMYTITKQKRYGKTSEREKKMAE

SEQ ID NO: 983578 - protein, 308 aa, Homo sapiens
MWYEDEKHSLNSSSSLQPTDTSISQQQHIIALPCRIAHPKTKGANAYYSCNATSSTNHSVHIADTPHTPPLHSTSHCIVKHRFILYTTANLGTVHKLIPRQHPNNSKGLSTIGTPALPDPNPARTSIPLTAYWLRAGAYILAQAGLVHQPQWHNTSNGGIQPAQAPPLLSAQDTWTPRWINYPRPIGPFCKAVGLVGTHTLRQQEDFQQHNGFTYMEPRKDPPTCEVSHQHCGNITITTTPIRPYGPFPPLTQHITTTTYDLPRQLKTTNIWNHIIGLTLPTQDNLQRSSGPPAHNLQGLAGNTTITR

SEQ ID NO: 983579 - protein, 349 aa, Homo sapiens
KELQSLTCLNVKRVNGRRRQHISSVMYQRTTWEHGIPTTVTSRDERRQTAINENFQLGVIQTNNMGKGPPLAVTPEMERRRTHITENYELGYSTKKMWGKPPQPLSLLRCRESNAIKTHIARYRTKENMSTSNSDTCYSRDGESKRTQEHISSVLILIVSGKQNTRQKLPNVMEYPPTIATGDGRPNGPISNGATLLQTLTTHKGCFTTMCAQLRNQWNDSSSHDIAKNFQGPFNSPDSITEESCDNMDQHNGTDPQLCAKFPLTTYETPNHDTRHEHSTSKHTTHLVTRAHKSTGHDICPLPYRPAPDAENDYTMSRTTRTKEHNYNIPDTHKLSTIPDPAYLLYNYY

SEQ ID NO: 983580 - protein, 106 aa, Homo sapiens
MDSSQPKWHTTITRIRRHTAENVEEQQYINRIKPTTTYQPNLTTKRKGRRNTPPVQKPPGQPKQGEPKEKEKQAQTSELTRGHKDSQQHRKQQYQDKKQEATTART

SEQ ID NO: 983581 - protein, 77 aa, Homo sapiens
EVITNCMELHTYDPINSMLSIYMDNSRYIDAHVCNYAGNMEANRKEMKLDSASGFSTTSNILYTGAYMRSNSSYRAA

SEQ ID NO: 983582 - protein, 175 aa, Homo sapiens
MTGGAGILMGGNPMRRKRIMALDTTLTGVQLVGDPSVVGPRTVVREPRTHALVGIHTPNSLCRDMGNEYLLCLEPKVCDKFIGSKPFPRWHNIDSMVQEKLTHKPAGMYGEQLLLGRRTIGNWNGLGPGGTASVTRQLEALQGTLGHTTTGRTTSLNPREQRDTTGGTRNRAHIQ

SEQ ID NO: 983583 - protein, 146 aa, Homo sapiens
MIFSVLRLKINIRYPSQDFGTYFSQYCNLAYSGEKQNAFVSSSSVMDPDATGYVKEAYQYGKLDVEHTHYTKTDRQFDRWTITEAILFSHPDITQLHSIGHNRSQTRDVPKGYCLELGASEHNNVPNGTRQLTETVDHAMQVPRED

SEQ ID NO: 983584 - protein, 104 aa, Homo sapiens
MAQLLTWDGVDKRNVRTQIVLNGNNGTDHQESSQGKACWSSRAKSDGRQQTEGGEIGPGALYCKVQLKSPDGMQYGRNRCEHKEGRGITKMVTSRRPEGKDELS

SEQ ID NO: 983585 - protein, 159 aa, Homo sapiens
QKILATGANVIRNQLVELRLTYCGLNGTFVGRAGATGTLERRFKQGDPYNGIWPKKGLILCGKDKTHNFSLVITKTPRVGAPKFFVGATPGLRTRKKDLYIDRGLGTHGYGGNHGQERKRGGNNGDEKGKKFYGLGTWELGKRGPLGNFPFLKIFQNNK

SEQ ID NO: 983586 - protein, 288 aa, Homo sapiens
AESGDAPGYRERAAASVSASDLTHMSNYNYWADCLTTQATQALHYSTEAAFPRLLYHRLTTREGKDTTDYGANILPWRYYYMAPRQHKRHMRPLRITTINTSPANYSTPTRAYTTRRRSSDNNLDITAANTSAAHSPQPQQVNPLTTSGTPAQHIGIPHICYRRYIHTHMQTRTTHTRGAQKLTTFTPYYLLTNYHNNRLKHYTTLATPNNLKPSLAAHHPYAPPYPITHTNYTRPKTPNQTTLRILTKSSHTHTHIIITTRIINPPTPPTTNSPATTSLLTTNLPTN

SEQ ID NO: 983587 - protein, 143 aa, Homo sapiens
HSGTERQTSTHYFRLPCCVAAQPHPSCPIQMLTRLLEFKAGISPVLTEQVIPRITYKPESVMSFELWAPQSHQCRASRKVLGHPSNEEPAYCQENRVRTISLPMTAQTIHHHTRTRPPMNALRQEGLRSLRTPSSRTLTHHYH

SEQ ID NO: 983588 - protein, 67 aa, Homo sapiens
GNYTKIKELRLLTDNKYDYLIGKTTNHWLKYQDNYEYTRHTAVQQLRFYITAAQAVSLIYPLDNCVN

SEQ ID NO: 983589 - protein, 161 aa, Homo sapiens
SRVGDVLASGAWMCSVCAMRTNTMRTYTTGMIVDATVQRSILYICKCITSCSITALTHADGNAHRLRANTLPLRYIYLRSETRTSDSRCHPAHYLTLPTRLDTKSRHINTRDNYYMREHRTVHYYTTRQLSSRTTHCDRKSPQRHTAYSYHHIDEQHDTDH

SEQ ID NO: 983590 - protein, 128 aa, Homo sapiens
MGRKMHAGTTALTQPPRNEHPHSYNLEDMRKRQPHTSVTTQNAATRRHTPTAPQTTTDNTRDKQQPKQRSDPTLQHHHRRGSPPNSNPPPGPTHTRMTATTDDAPAKQNRHHATSIYTSKPARPPYPH

SEQ ID NO: 983591 - protein, 133 aa, Homo sapiens
MHEPYCKPTPSTAATDHMTNSTDKRKHNANQRTTQQKQQKTQTLNRAPKTKHNKQRTITHPHPRNHILNRIKTINDKDQHNHTPNQNTTTHNTFSLTKYKQHPKPAPQHAPSHHTTCQYLTPHHPPILEPSSH

SEQ ID NO: 983592 - protein, 158 aa, Homo sapiens
MVMLLLLLSALAGLFECGSRDNALSYLGNAATKSSECTRDTPDADIHVSRNHGHEHLRQIPNNLMHDLRPAAIQDQTNSSNWNTRHTRPKAAQHTQRTRHHDQNAQPRRNSNNRKGRKDQPQQLTPYNKSTQHTGLAQDLTTHTHDETTAQYDANPAN

SEQ ID NO: 983593 - protein, 363 aa, Homo sapiens
GINPPDLDIMNKPPRNPKEPLIRRVATFSVTWLLASYVRRSATVGAAAWLVHMLADGRSKSVLSTQLSTYSYSVHRGQPGLSKAWIVHIFRIPIPDDNGATLAISNYENMCNALNSLSENQSLLQDSTHLEKHLGYVGLNTRPAPCHSNILILYVEPLPTHLPESHPLTRETSGRIAACNNTPAPCIYMEDTPQDTRPATLPAHLQPPGRYPAYHTTNSRTQTLHPLEHAIPDLCTYPTQPTLYHPPAPSTARYDPIHHTLPPHHTQLIIHPTLPTQTPTLPHSTPSTLTPSTPPITHPQYHLPLTHHKTQHTTPATQKPQLPSTPRHLTYTILTYIHYLTTSNHTPTHTPLHTNYNQIYPPS

SEQ ID NO: 983594 - protein, 193 aa, Homo sapiens
TADGQRQVKPRFPIRGRPGPETESRQLVATRPETRHNVRRYTRPPPSMCDNGIRALDESRTIDRADCRPIGPRFTVHIDGARTHRNTQGRTCETDKGVQTQNIPTLRCARRDIRRQGRRLYLAPPCHDTTYSDANTALHHTNMRLTHLGRTRIPEHHNNHYYTKPASLIARRTHTSTATQTNPHHSEPDSKAD

SEQ ID NO: 983595 - protein, 105 aa, Homo sapiens
GLGVLLREEEWSRGDASGGVDNREYFLEGFFGPICEIDIALNDGENQENGRNEQLEDGKVENNTIIFYDGVNSVSAKGTTKTYEVNPGKRRLENTKRTPRHSQFR

SEQ ID NO: 983596 - protein, 214 aa, Homo sapiens
MHGSTIQGHHLAILPQSLIILQADGPSTVQSISLYGTLGANLATASTQGTFTGAILRIVRMAYKGRFLLQVEAEGSNVGGNKTVLQGAGPRYPTGDENKSTRKYPGLLKSPTTCQEEDTGSLQRERRGNPRAAHNQNPRPPEGDTRTCTHGAQRTGYGATRRPTAHTVPGNVRPRPPHDSNPPINEPHAGGFIINGGTPARNNSGGGPREHRNL

SEQ ID NO: 983597 - protein, 258 aa, Homo sapiens
MHPAMQEAHEAPKDSHILNPRYRLDLHRATQKNATTLNHYEQSVTKTNTVTNARYTPQTSNYSLLTNHETCHNAPTLRERYTNMNAHQLPREHNTKTQKQNAKKGQINTKPYVNSPVTPKELITNTSFVATIQESPRTINQTTPTGINPTDKSVKQEDTPNTQTHSGYTKDMTMATPSPPPTANVPDRPKRTNSRHTNNHRTPISPHQGVHPMSPTHTTKTNESAKLTRRDTSQQQEMDQREQAACHSALADRNPNDT

SEQ ID NO: 983598 - protein, 466 aa, Homo sapiens
MSRIFWKLLPFTWLTIIKLTQFSIALSTSNGLPDTPNHHYDQQITMCILLTHVIYLKQLVNCVAQSHCHCTFLVSPTYSQYSQCTSQPTPPSIPIISLAGKEAHKSLLESVRTLNDTEGINGTQQQLSTWSDDQPLTQTAGDEVHTRGRMDLTADLMTRPEKPNGTTLPKRPHHGRASNKTPPHIATVTTNLRTRPTLPPYNLDPRTKPTHIQSSTMGHRNNQEHHHDHSILRATSTSNLIPQPNSCTCIAQRHPISHHDIGNYITITKTRHKALTAHIGIYPEQSADHLSTQNDHIQLAATNTRAPTQLQNHENNYAPHPQGQPPISEHDTEHTCKHEDTNPPHATNTQPTTHITERLNNTSTQNKNGHNTSRPSTNTGTPQCNDTRTSKHQNRQDTITDNNTQKTSKNKKNKPRHTHKRHQQTISKQRRDDDEHKHTGKVYSCEVGQMTEAQSSTSNVHETHAQ

SEQ ID NO: 983599 - protein, 441 aa, Homo sapiens
MILHLETAFILKEEAPGPFSSHHSPKMVMLLHACFPAHGMASSDDWKRDIDHNNIEARCPQHHIRSKREIKTVKSDIIRKDGTETTQQDPTATKEQWTAANPGPNILQLNGNTRDKTSHRRYTHREQLRARIEGNMTPIPKSTKAESTNTQEKDINKAQQGDKTEKDKRIKHMRNIAQQRQPEHEAYHENTQTSLETHNDTQPIDITTEPHRQSTTTKQGPQMANSQQRDIQNDTKKTTDRDTPYKTQVARNNEHTYQEPLHKQTGRTTQNERDKRNQVTKAPQNTNKHEGTTRRGGKQTQEKQTGQHAHPEQQYQDKQAQTKQTQNTERNDQPENTRTTQDTRRKQDKTERKRAGKHNKQNTQTTRSQRNKERQKQQKHKKYTNKQHNHNHTTQRKKQGTKQDRRSNQQTTSATHDTQTSKPAHNEGDRNGTQRLKRKTH

SEQ ID NO: 983600 - protein, 62 aa, Homo sapiens
MEGHINGEHGRLLERRTARKGPCGDLGQAPRRGPQPTHRESPGKTLAKGTRKRGNAEETQRQ

SEQ ID NO: 983601 - protein, 99 aa, Homo sapiens
GVDEGTGSMLFRASAAWISPFKPISSASGSGIFSHLEHYSITHVYTQESVIMKIQTSSTDIQQQVRLAIFTTGILPLFQPGIQSINNSMFKQQSAQHVG

SEQ ID NO: 983602 - protein, 233 aa, Homo sapiens
MTTFACLTPKQTHNIEKHPTTPQTPPSITDHPTKAQSRNTNTDETQQAESQHVHNVGTTPPEIHLHHTTRDRTSRQQEETTNTQINVHPHEKWRHATRKTKGKREYMTTTAPALHRPLTKARSIRLKQRNNCHGAQHNKDRTTMTLETGNIRPNLQTMYPRAKTLQPAHKAQHPQLVATGMTHTMEQATPQVPGRRDKTEHNQNNQLQRKRPQKQTKKQRKNYTTMELNTNRA

SEQ ID NO: 983603 - protein, 221 aa, Homo sapiens
MLALGHKWLGTPTPSSSMATETVSETPPRIWIQIPGHYKRDRQRKTGGWSLSTFSQRRCLWGPLSTEAPSVQRGEGISAQWRGPRGYNFIIFRNKRCSGQPVKRGHVGSAHKNGVSWRSGSQAGEPRRAGTVLAAWDSPRPSNQTGGKCLVQVSAVGGRLLFLPPQELGADKGPWTLERQAVKETRHCESPRARSPLAHRRPGDWAGQGRADLCPSRGAPA

SEQ ID NO: 983604 - protein, 442 aa, Homo sapiens
PKPLVNTYVYHPMCAASNSTQYHHLSFQHATQYHPFYTCKAVGTPAIKLCQASSTMHQQHILIQILIHSQTTKVNHIFDRHLSVVIPINITGLTPYEQLIYLLTLNLHCDTIPLCTTAWTQQTSFHRPGVWDTAIIIPLSTRHSSILLTTLRIHLTTILNAVTIFHTLRSHYTSHTYMTIEEDMSPTTQVTQTRHAMAHHIPTKGCTQGSTMGPQQHAIRHGHQAAPPTTHRRAHTQAQRINNTIETSRPHGHAHTANKTERSQDNQERGTRTTPINEHIQNMIPTTAHAISQESTNNTRRRATMTPTTPRSYPPSDRRHDQTQTVNSAPPCRITVERRRHATATEHDTSTTRTKTNNPKLQNNHNHAKQGTKTRRTHKQRTEAKQTEHRATHRDQKKTTNKKRRGAPTHQKTRHHKHHRTKPTRRKHQNTQEDKTTQHKKT

SEQ ID NO: 983605 - protein, 336 aa, Homo sapiens
MSDGANGGGCRRDPRSPSGMLVCEGIRICLDTASRELAVSDPALGTLPPAKTYRFIYCSRHRMGRGAHEGVLDFVGLGLPAFPGVACCSEDFCDPGAGHEAVVVSGSLDRDPLRKLSRVLDGWIARSMAPKGKLFGNRSYMNEVLLWAPPASCRGGGARWIAVPLTRGLEGASRPCPTQLPALDYLPRAACSEPFDLTNLEPKAFGCVEDAVCSASTSVPPTVLSMCREAAREPAPLLAPVGCREALGGTAWIKHPAGSVLKAKEGGGGASPLTRPGPGGLTRGGRPGGNIASTGDTFKAPALRIRDGQMAGEGKGRSAVPSRTRKRRTNRKKKPP

SEQ ID NO: 983606 - protein, 506 aa, Homo sapiens
YKVLLLLHIQRISSICLAVRVLTPSNLTLVSWRSLATQHALGKGHGTRLLQHHHIWAPMAHMAHSGQAHQLILPAHQHPLSITLCACSPFSCSLTTFGNNYRTTKYLEEYTQRYNAPYHQLTELETKHGYNQSNTPCEPNHAETRNHRPTKPWRTAPEHWVRTLAHTPAHGQIETPELTYCAQSGAKHCMGSHNYKRHPPAPLHSQTPSDVHGPPHVTTPSTPRATRSNGADAPSATRPLALIARAKQPHNTPVAHTCTTYQTSLPQKSRPEQTQRTDITQQPTARLNKQRIPHNPHAHAEPAAPPSTYLPTNRPPHTTVRTNPGHKEQRDSPPTNATHTPPQHAPTHPSCPHRPPHHVATHTQHPLTRPNPSPHTRHHRPTPHPPTGPHAPHNHTKANMHRRSNTRHPPPTATSNSHTPRQAITSPLSPCAYAPVRARTPPPTPSRIHPAPTSACRHHNNPDPVRPRRQHRPPTTPPPHASSHATRHSAAPPRRRPPPPPPPPHT

SEQ ID NO: 983607 - protein, 104 aa, Homo sapiens
MDAAAPNTDAEEPVYRYILDEKMAGNSKPAIGLVVKAKPMGGHGRFLSRRTTRWVEKRGGAKNLPGGQIGTLVGKGPGGDKTRARGNPPRKRRGWEPPGGRNPG

SEQ ID NO: 983608 - protein, 216 aa, Homo sapiens
MTDNYSTTSTRNTSHTTVPRSQGHTGYLHTHDTQQPQKRQNMHTNHIRDHTGHHSEKVQHDTPPATRHSQTNTTSRQQKTRHNHCNAKDAEQATYHRPTEPKGNKMTKRQTQEARRKNGNEPTTTAPTTTEDTNTRYKHIPKNNTRERTRHGTPNTHKEVENGQHMHTTQEDNGEHSVTKTTKKRNKRKTDTDIRRTTETNKNQEQQQPPARSPKQ

SEQ ID NO: 983609 - protein, 314 aa, Homo sapiens
ADTDHSDASDPAAMAALHVKFFCCVCETCEDELCAVTAESWGSSSVHSELLAKVAWTETRRLEYDDIHPITCHILRAYRHTGQKSYIIHNDMACETVTTDKHGIPNCVQKMEGQTTAMSEKDINATMANWTAKEDTARKHKRVSDEITMEKKTSKTHSTRDKLLHQGEKATTELGKAVDLSGRTQDNQDEAPQYDIHCDKNTGATSRHKKTLKTHEHYAVDSTLRHTTLNNGGTQNWARAHTRRTETGYRDTHQTAGTPKGITYAPAVQPMTPRHRWNATRRTSPHGALPNGHSMNETPNRGEPVSRHEMAHGD

SEQ ID NO: 983610 - protein, 108 aa, Homo sapiens
MKAFGSYSYGACLILQIIHQELFLAMRYSPDSLIRLFINRPTITRDVKIMAEFYAGVPVTPMAPQYYFIVPLPTHRGRGLYLRIDFSTRDNLKHRDYPPACNHSNSLQ

SEQ ID NO: 983611 - protein, 69 aa, Homo sapiens
  misc_feature (65)..(65): Xaa can be any naturally occurring amino acid
ASDEVLNLISYPLTSPSPKRPHNNHPLVEQTTAGTDTSASRRHHDSPYILYYAPHIRSLVSLSRXVEDI

SEQ ID NO: 983612 - protein, 283 aa, Homo sapiens
MTNYKHRRITQPYTKDVRRLTRTGTVPANPYKTDYTITVGKPKTLDGRTLDTRDCDKSGYYHFIHFMASCVARFYLYRLNVPAALKVARIHRPLHYTAKPGCGPDNCAMETANTKWEIREQGRTKGNRQEATERRKGKKHEQTNHKTNGNNRTVAANHGHPMQTPRERPQKIEGQAQRGKQLTLGESPYPNVVGCKGSKRGTWRARQPQQDTTKEERTRYTAQNGHEPTNRAKPVIGQEDTHAGELTQGEPTTEATKGTQKGVGEQADTQPVPEHHVRAQVKT

SEQ ID NO: 983613 - protein, 136 aa, Homo sapiens
AQIPQAIPAMEDSSRGRPLAPSVMAHRVVNCKIQPVETVVVYIKPSLPVLQEVPEMILSQLPIRQGLLELSISQTTNQTNEIHDYLQQLTVARTVPRVFIGRDCIGGMPVILVSFVNQTGGEPDWSAGLESQDCEL

SEQ ID NO: 983614 - protein, 95 aa, Homo sapiens
TGHFEIFTMLLASMILVDIFQVKADVLHMCDNACDDEYLEMYGLDGNTVNTVPQLLIGGISKPSSELRYVCGKMQRAKMWQPRQDSNLSPYEFEG

SEQ ID NO: 983615 - protein, 136 aa, Homo sapiens
TSKNSNTNLSIDPAGGGDTHIYTNTYSRYFRYTLKLLYIYILPGFGIISHIVTYYSGQKRTIWIHRYGLELCISHSGLPSGFTRDEQQPYYYTRRNYDRRHNRRHIYNYRYHNTSTITHRQTKYLADIAHTSTEAI

SEQ ID NO: 983616 - protein, 69 aa, Homo sapiens
  misc_feature (65)..(65): Xaa can be any naturally occurring amino acid
NLYPGGEYAESLDSLSLRCLGSISIVSFHPVVELQSSGMVMQQSISPRTAFASASHGERLPKVNXTYDR

SEQ ID NO: 983617 - protein, 245 aa, Homo sapiens
VNQRNSYTSPRGTKNAVSERLFSAAMLCNCSVGSHSVSGQTAAGLPPKACWLKASTWKMSNFIAGAPCEGRLDTSSGVYGSVKVQMAPFFQRMNPARSRINRAQPRRNSIAPTAMTHAATMRTRVRGSLSTQAEITTPNRIDVSRSAETVAIGAWVIAHRARPYDATVPITGNDAQPPITRDVATKHGTPCHYRPRGKRDAGEQENPQGVAAARRIAHAKTIIQGVTGNHTGVDQRKNKPFLCPA

SEQ ID NO: 983618 - protein, 217 aa, Homo sapiens
HEKVPKVPEEPKKPVSRKQRFLLKVIQDGKNLSLAKVTREAHANLSRTKTFLMLYTNTTEAPPKARVPEATEKELSQEEKGSDNLKNKTEQEDTTQAKRDLKLQTTRRWPTERTTSTHTATRYTTQEQPSNPLTSKAQLHNLAQQKRTRDIKPIKQTDSCNHSNNNERTHNEITTRHIMHTTHPVTTKPATLRTPDEQRYPTRRKEPYQHQNQRNPN

SEQ ID NO: 983619 - protein, 295 aa, Homo sapiens
MRSIIFANYIARDTRRLGATIDVEHSHVRFLVEPGAEPVGLWAVRTPSWEDYFTSQRDNIFRIVYVLIYVFDVEHAAELEQRTCIIYQVPCLSTCHLSIEDSPDRHKIFCGWCTKTVMLVSGGLMRELDFLKSERNDLRSSVSPAWTLCWVCSERPIWDETLYRKPWSSIVYQLIPKRFSKLEMKPRGILAQDHRGQMKFVLVRKSYILQGYVHTTSCKGAAAMSTGLMKMRNDSLTVEVSLSKWRCVQSMKVGFHSWFHRVLLNSSDVGCRSDPWALLIERKLEWECATILVMK

SEQ ID NO: 983620 - protein, 331 aa, Homo sapiens
MHGSYVVLHKYLDLIGYNHCVILIIMVILIIRNSTLLHGGGDRPVQSRFDACMNTVVHVTTHVDYLTVLPYIPPRQMINCREILTARRVEHRGQCTQSKSIIVVNSTFDDLQRHPRKILVATRISDPPMQNFSLKISYIGHMTHSSLETIITYVAFQCRMDNNLAQPNLNNLSYLVFFHIECLGPIESTRHMFRKVPDVRGPTPHVVYCRRRTWVHLKLPVNILLPLREEYTSYVYHFLFPPETSRLECLSLCPGKSVGTQLKDCAEILITDTLSVLTALFIEIITWSKTLTLDVWTRLGRRRPLRPHWRVGKGPNQNKPGSGVPPAGENF

SEQ ID NO: 983621 - protein, 184 aa, Homo sapiens
MEREERMEDRHARQVGVVLKSLGLQHGPAGVLRRTCSRSAHKNCPMPPRMRTTVELSILLSRPHLRNDGSRDLLSIGNGQDRVDYVLLDPLCTTGVPRTHKPDNLVPELPGVPAPRKLTSCAATPWAHRLIDIGERVGAEAFDSNPLSHNSAQRGIGPYGPDVRQPQSMLERAWKWPSGTGLGA

SEQ ID NO: 983622 - protein, 141 aa, Homo sapiens
ALSMAGVLQASRLKQYCTQKHSCMFIAGNIPSKNASHHQQQSSPATMHSQTCSNAWHHVYKQLCNPALFNTTFQHSTATYPNVLCPTLQQQPGWHSLPWPCATIAHLHQSLRPKAKQTYAGCTCCTQHTIGVDRTVQLVEP

SEQ ID NO: 983623 - protein, 452 aa, Homo sapiens
  misc_feature (285)..(285): Xaa can be any naturally occurring amino acid
  misc_feature (400)..(400): Xaa can be any naturally occurring amino acid
  misc_feature (452)..(452): Xaa can be any naturally occurring amino acid
MRRISYLYEFHILKKTTKHNPTRETPSQLCGCRKPHRCFSPHSVDHKQILYSPQRGVRERSLTGEGWAITTHTTVGDLSGRRGEKPQGSVFLHNPPKGKSVVWPLPGGHKGARGQGGHPLWGGLSPLSLCVGPEGPLLWNLHTFSHYFWGAYLWRASKEAPEMIGGARRLNKQQTRRGAPPPNNYVSVTKRGWAHPGGRYTRANEGGRSHNYSDTHLLCTYARAPRQEQAVLLQKSEFVNPEKLFRNDLRDAFYNDVLTKQPIGRVAPTRSISFHQTSGTEAGPXALLKKVISPLQEGGAKRSITGAITHGCSLGYRGGVPPYLRNGAILYNELGHTCAPALFYQTTGSRGPCVGNTHRPSCRGETLSSVTEEPPHLHSRGGGEPNSVSHTPALPINEEXIHGLYTGHNNTPFSAGFSVVNQTPDTYGLAAERLVAPTILSLTYCEPLPDIX

SEQ ID NO: 983624 - protein, 418 aa, Homo sapiens
GTHCYLLTRHVTTLYNFYTTDLLRTYWNYYFPDEDDDFLDYYTFMDRLYLTISISSSHSMDPNSNPLQAPANQSNSCIYFILQQRHYLYAGGARFSHTFIKYAFITSVAAQQYSTSITKGTIRVHHSLADEAFQILHGSNSYAPVSSSTAMATIEALMAKTDAVKATHTGHGHIGQNVVLSLKQASVECSIWPKAQQDLGIIPRRPNRNDRQHRTGTFAYTADTSGYAILNPFQSPCHVHWASSGHIITVDRDRSYQLLELNTRPTAARQTPSEPYQKKNRSWLHDTEHREDKYMDGPTRHHAPQSRTQTNNTWRVPGRDDTHNGLQFTRTRRILTPTDNYNTSPITLNNDIIQDTRTPKQTKHREGPATEHAKRSKPTEEAIKDNKQLRQTTTKKSSPSMSRNSIPHSKIESTTTAT

SEQ ID NO: 983625 - protein, 476 aa, Homo sapiens
RRRVVYAELTESSGCVLTDDRAGETAAPAARRDPTTSTLPLARNAAQHRTDCCTTHMTLLPCQRLTLCTLTGRQLCHSYLSSTAARAGYCRPQRLPPTASAAPTCWHAPSPTHPTHCTANRPANHNGPHAQASTDPAGRHPLQSHMPFPHHSPTTTALHTAPAHTLLPSPPCPDTRPTPSTPAGRPRPPAPRDTSRQSPTSRPADPAHPALNAPHQRTSLAPCLLPAPLPGPACLPPPVGPTPGPYASPPTPPPPSAPTPLAPHPAPPTLHEPPIASAPPPHAPRNTKRPSPPTAAPAPTAAASPPRTRLPLPGPQPHSDNATPAARHAHPDHTRTHRRSNPRPSHYHPHTPRSPPHTQPPADSLTPTLRSSDSHPDPAPTPHHPPSPTPPPHPPPPTPPPTPPTTHHPPPPPHNPPPTPAPRRPRPPPPPTPPPPPHPPPAPHPPAPPPPPPAPPPPHPHPPPPPPPPPPPPPPA

SEQ ID NO: 983626 - protein, 215 aa, Homo sapiens
MQRVRLFYATCFAALVIFSAQLQPCFSWHPDLQQRCCSGRNAQLLKPRTAVLHATPTLSHSLLLRLTHTCGNAPSPSQLHTPLSASTRSCLHTPNTCFQHGTANTPQPTAPAAPLTHPLAYFTNASSAPPHPHCAHTTLSCTPTPCTQSPPNCATTTHHAATQHHTSPARCTQPLCDHRATTYTLLVALKNTSTRSHYFPSILPPPPLPPHICKH

SEQ ID NO: 983627 - protein, 512 aa, Homo sapiens
KDLENLGLTHLIGSPFLRRIYAWRFSLDIRLYHKVKLMAKSTLLYEATRKRTTNYAQHTHSKHNHAAPRTSSTLHHAQLCPNSSNHTRDLRHLYHSNLQRQHSKRSNATHNSYHCRQTHATRSTRKLLSPNLLSSTRTCTPHSLHTASPALSNANPPAPLSPHSLTTCNTHARLAHANFLTRPLPCTTPPPLCLYSTQTTFYPCTHTTRATRTRNTPLTRNPSYYRHGHTPQRQTPFRAATHTRKRKRHRAQGTPRATAGNTSTPKRLESCHGHTTPLRRNAKAYTQQNLGTAHTTQRPPWETPSDNSAQAAPKPAITAQRPRPDATYTALPPKAHTQEDTAPHQPTPALELTAPERLRHETNPAANPFPNTGVNGQQNHLKRTPGAKSQRAFRPSNKDAAAAPQRPAPSTMLSTHGNVAAHHTDPNDGTRDNTANQTLFRSARQPPILPQAHTDTLLPLAPPYASDTHGTHAQPHTLRTLGKSPLAADAPPFVQHAQSPGPSGQPPTFGQR

SEQ ID NO: 983628 - protein, 287 aa, Homo sapiens
MWNSFICGRQVHWCPSSDQSWDRHRYMHKNESRVSSILEQWCRPCSQPMHPKVPWEYSAEQAYVNSSMAPDNTVGMGFPYSNTKTLHPRTSTTLDGVAQYVSPRCTRGRGQLRHAKLCLGPLASMSARRPVDPNNFKPLNVACYPITLDNCLVVACKDLHISVGTVGRHHTWQGDRTTPELCVSRQLTQFPCTRWVSVEPQCRTVATCARSSQWHIVLRNWNPDGQVDKQVPIVFTIRHMVPPRTRTMHTHIPTTVEVVRGEYARKVIWHETSTATYLTRHTIDNRN

SEQ ID NO: 983629 - protein, 111 aa, Homo sapiens
MIKRKVPNGTTPSFHAGSRTNPLSFSGPSEDGSSCWKTQQPLAPCHHSGALWKKGHLKLPVNLGINIFSPSLGSFPVGSVKCCSELLSSSENVTASAFLYCGSKDSSGPVN

SEQ ID NO: 983630 - protein, 297 aa, Homo sapiens
MCQYIPRLDDRDLVIFLMKQVGKQKFKKGNLETKSQWRYNKKKKRKKTVKILLANFGGGFRKTILILRPGFDLGVVTQYVPGPMEFNTFFLHFSDSGVRPQGVKKVSTPPDNKQCSRAGPANCWAASQAEVGVQGGGTSNGDGFTHAVVHNMGLREIHSNLLARVWTEVERPRRKDIKDTNTDNDEVGERGNYQAQLSTCDTRVRVPAPDQQGDGEHEKQTGDPRPRGTVWQNTKCQNGAPTTVWNNRCSRKTMGTQIKMPMSSINRGLGGQAAAQTPRYTVRQIKAPRRHPQGEQQ

SEQ ID NO: 983631 - protein, 145 aa, Homo sapiens
ALSIDTTPNNQQRHLQVHSKWHMFNNRAGIQAIVCTSSMLHTGAIMCTSLVFDTTKIIFQHISLALQHIALPASYIMLASQHIHHTDRHNTQHCIGEDRFLVFIMQFFQYIAMHAHATAKAGHHHNTMRNTPNMQNSLKWMRYIV

SEQ ID NO: 983632 - protein, 110 aa, Homo sapiens
MSPIRKINPLIKLINPRHSSRLPTPIQHLPHDETIGSLLGACHESSKSAQDYSLPMHYSPDASNPPLHLIAHITSQDVELMAEIIRYSFGAKDASIILYLALRYTSAEGQ

SEQ ID NO: 983633 - protein, 30 aa, Homo sapiens
MSTRHAGRAKRDYADLRKRNKEHKDRGPTG

SEQ ID NO: 983634 - protein, 82 aa, Homo sapiens
IMTLGEVSQTRTGVLLPCHVNITTCRYDLTALTFKVHICTCSRKCWHLFTFHHMITVSCIRRDLTNLRCAVSHSYESYQLVH

SEQ ID NO: 983635 - protein, 434 aa, Homo sapiens
PTRRSPSPSLRPPRISAFTLTCSHYLCPPLSLIQQLELNYTRVTICPHALKSSNIWTRAHSAKTEPGVPRTTRDDIASEYRKSGRPRTDKGAALHQQEHTHKYQHPHGAERRHTNTAKRHRQQTAQNKRRETAAGADNTTTTPHGTHKQDPQQHTGAPPNEGRQQTSTHDENPTRNKPTKATHRTQHTTQRPSSHHTSHTHNGQPRNRHHTTHTQHRARDKRAPHAAHRTPRDKQPPQPHERKETPRGRTDASTKPRGNQNPPGPTRQRRRDRDQRTTATHETRRHNIASSSHNAQRDQQQTKRPPTAGERSMATEQNSKAGDETARHPESGNNRTHNKSTEERNRGDKGTQSKRRKSTAPPPQRTPTADRDTQHPRRTQPPPHRQNHHKQTQHNPPSPPTQPPAAAHPQHNAHHTDKRRTQPSKPNNTRSAHA

SEQ ID NO: 983636 - protein, 301 aa, Homo sapiens
  misc_feature (68)..(68): Xaa can be any naturally occurring amino acid
ERVGAVSAGSSGNGGAEAANGDRDPELPAAARKDGAILGDTHAWVGVKRPCEARSQGRTDVKYSNQHXLCAHQEEKLVACAVPRVPVCPYGLGAIQICTCPRVKGDMGHEYESMQEYFRLEPHVTGESHERGPDANYFDGCRPMVVQEAPLSSNFTSFNDLPASPTIGQWSTQPNPQCGSLAPNRMTWTQALAMSIRLTPKMTSPFNEESPRQRRGTEDLPIPCSAVPTCTNRGRGSGWHNRATKTSSNVLTEWGTYHRGNGFFPRREPKVTLASEEDGNRPDGPFGIRDGTGRNGCGQNE

SEQ ID NO: 983637 - protein, 256 aa, Homo sapiens
  misc_feature (42)..(42): Xaa can be any naturally occurring amino acid
  misc_feature (139)..(139): Xaa can be any naturally occurring amino acid
  misc_feature (166)..(166): Xaa can be any naturally occurring amino acid
  misc_feature (185)..(185): Xaa can be any naturally occurring amino acid
  misc_feature (192)..(192): Xaa can be any naturally occurring amino acid
  misc_feature (212)..(212): Xaa can be any naturally occurring amino acid
  misc_feature (221)..(221): Xaa can be any naturally occurring amino acid
  misc_feature (234)..(234): Xaa can be any naturally occurring amino acid
DLPVGNLLLLIVAILVSRGYRIAKRSKGIATSDFPALSAGPXMSAKDTYSGITHLLVSTRNAYYYSYKPICMPLTIPKSTLYPFDHAYIIYPTRAPVHFYDILQSITDLHMLNLVDIPTIPRNNSNTSACLHILPDRLXGALSYIYTQTQALFSFVPLVGHLLSSXHSRPHVEVPTEIRQDKLQXPYLGTFXKPLEISGPVLTRLIRVEATXHRKHSVYRXGSATSSLCAVFYXTIDVICHFKASVLLYRSILSLH

SEQ ID NO: 983638 - protein, 304 aa, Homo sapiens
MTIRGKRCRWHDWVLSSQTAICAECFESRGPLYKSCDEAGLSVTDSGVRRGRDSQQGMRDHEEESQGALREHCLKEAEDVGLRERRGQKAKMEKRHRQTEEARSWKAAEDWEYQRAISEELDPGVVNDMTSIYGSLVQLLPNDSLRGSLDGSNLLRRNGSRGKSPGCRVLHPRKNTALKRGGPQGRLAMGTEDTRARVKTLGVALDHTAHKHNNCRGQPPGDPKEQVGGAPKVKTGARAASTTGNLSCSHNRGEQRTRRVLENAQSDTRELYGTVTGESVTAVNRRSGALTRRLRADSTGQSRQ

SEQ ID NO: 983639 - protein, 327 aa, Homo sapiens
WLMNYNVEHALALLSARLPFTLLICALHGPCPETYHLATKRFFCVPLQQGSVLALAAPCSTPLTATNTTSPALLTSEQQRNFNCTTATLGKHTHWRHELLARLTLRLPYTGNASTATHCLTQHNSSLLNYTKEQALSSSTLTASAALLLQQHASMPAYYPSSNSTSYCNTRKPQRNSRAYTHTTRSAGTPAHPTNCSPCDLHAHAQRTPGYAITHSNGHNALSPSEQVHPAGAQRALALGRKALKTPHVHTLYLNLELTHVSQAELITALSTFNKPFYVGNPTGPLYTSPPPQRAYATIHDARGSPAVRRPAHSEQHEAPQQLPSAH

SEQ ID NO: 983640 - protein, 156 aa, Homo sapiens
  misc_feature (74)..(74): Xaa can be any naturally occurring amino acid
  misc_feature (124)..(124): Xaa can be any naturally occurring amino acid
  misc_feature (137)..(137): Xaa can be any naturally occurring amino acid
MRSWAVPVPYSVVVFERRSKVTNSHSRVSVSEEDASLISPEYIIEGSTELSLDYIGLLDDSIKLCSHRKLDSDXWSRLILYNQYHGETQVSRTHLEDYHGLSTGDAKQWYYGDPPRPKGRKGGXSTMEFRMEEIHGXYVVIIGGPDPNVVVGMPEL

SEQ ID NO: 983641 - protein, 118 aa, Homo sapiens
LVTDGTLHDPSYFSTPTGSESEDATELSSSHNSVISVTLSAAICAGSPIFLYLIPHGLSENRVVPYSLGNVDVLRKPMKTFGIHYDMPAETYDDPKRSASGFISVGAATHHIFISRAE

SEQ ID NO: 983642 - protein, 171 aa, Homo sapiens
LVLDRERRPFFLFFHLFSFYWVWDPGQGQGGTRSGGFPLVFSDYSPEAPWRLLWNVFPTRGRGFGGLSAFFLWGRPSALWVMCNKSLWPLKLSPLWPCEPFRTRVLGNWVSDFQRGAEGKQGPTFQAWGPLGRATRKNRGTPRVLKKAGEERREEVNSEKLVGDKKRGALT

SEQ ID NO: 983643 - protein, 128 aa, Homo sapiens
MPEEFIFLELGVQPPASRTPLVRYQLAGMNLSSKQWMEPSCWWVFRGSRYSRMGRPLNKTQALCYPGTVPTGYVVCRNSTSKILQRERELSKEQLVAFLENVLETSWETNGRTFFTVPWNTMLIAWIW

SEQ ID NO: 983644 - protein, 103 aa, Homo sapiens
MKPAAVDVESTDCAVTRAGGACAYSAMTDGSDRGRTTDERSRSERCDVMSCESAEVQRRDSHLARNLGKQTRQPKHEHVCQHCNTRELVRGGNQVRPGGGRYA

SEQ ID NO: 983645 - protein, 316 aa, Homo sapiens
MRRRGRGGRTAGSKAEHEAWTNKKTRHTEPRPRADTARRGERRQETERHAGARQSNEAASIQHHERTEPRNPRNASQPRDLVRMRFSGDQSGSREASRAERRRDSTRDAAARPPQPRAAARGRTQAPTTELEAPTAAGGGRHDGAHRRTARSRQHHYTNTHNTKKQERQARGTGKDCAAGQELRHSPAHTRPDTGARQRHTATGELRSRIDAGGSGRDDNEWTRMRARGDTRARGTHRNGRQTAQADEADDTRAPTTPHDDSPPHTAAATHTHTTHATRRTDERRREPQAGRRRAGREAPATDGAQPTDSASEQST

SEQ ID NO: 983646 - protein, 595 aa, Homo sapiens
NKARRDRIQPEGAFYKLLELEQLNTRWHLDEPGRRLTRLLIDTMHTDTTRLLTLTLSALHCHVLQSTSTPRLSTALDGADSDTHSAYCALRTALLPTAHLRTLTLNRYLTSQKPPIDDHSHLAHSMVINELPEEPIKASILFLPQTERRRNESKTNFIVDCITRKLLSICLCHSATPTFLLSYSPPTANACMLLYTTFPPPLNTSPLTPRLDPPPHFFTHCPPFPLAPHSASRTWRAARLPALSSWAHRASSRPLLGSRTTRALVLTHGRKARPVSAGPEKVVLAPRAPVRSPPLRRAPSPPVVLTTPASCIFVFVFSSPHLLLRLPPPAPLPHLSTRLRTHQHATTQTTHLPPLYNLLLSFSLLYVTAPPYSAPHTTPDASPDLHLPLLLPSQPGLPRRPPLLPPYHHNPRSSSALSPTLRPPLRRGLPPRGPRRAVPGAARVVVTLPLVPSRLPRPPPLLSAFSRPVPLSPGRLLTLPPPPRPPPPPAPAARVGCCGAWESAGERGRVAARSALFALLSRSLLSVTRSLAVAPARALSSRPPVLFASPPFVSCLSRLSRAVGGRLRCAVAALAVCSSSVPAAMPVCTAARLFL

SEQ ID NO: 983647 - protein, 338 aa, Homo sapiens
MTSIQRERGEATRIYVLVAAYLRKRWSVVPYAPRYMRSLVKKRLDIVNTQGELAILIQNRNAPRSVHHGKDLAMKSSIGYPRQCIVRALSEYNQKTWLNEGNDGLTGTNLIVAVFDAPYKARLKELERGFLNSVVIGTMMHVRQKQKAERDNGAWVQAKAPALIQPERSSTVMLEEPDGERRLKLVENYSLWIPWANRRGYHRKILRGPPGAYDKLVAPCMWSKKVVEFPCPKRNSSHTQGGVGGKILSDAPCNYPVRSPAEGTTLLLVTLSAKGGHLIKAVGKALTNTTTLGEPREEVTGHQMTSFSLRLEFIYYLSPTLHKKNDTPIAHKENSEQN

SEQ ID NO: 983648 - protein, 131 aa, Homo sapiens
SRPGVLVEVTSSLNPAWQSLMHRGDAQGIEGELESNYFLNYHPTIGGLSECVLIGARADNVGALEMHVMSMPRLPQCRFGGEVHVVLGCQSKRAPMIAQGHPRAAVENDPALYKLLCHIRGNVAIGSDHTE

SEQ ID NO: 983649 - protein, 119 aa, Homo sapiens
MTPVTETQNSTPKKHECAPQHGQQTDRRHTACLSYNTKKQSKAHTHNKNNLTPSHPPLNNTIHNHTTPTLYHTPHLSIPKIQKTLHLTPHISTYSTHTLHHNTSQHTPYTINPLHYKPT

SEQ ID NO: 983650 - protein, 161 aa, Homo sapiens
TILSQPDRRRHGSGMHAPEKACCPTRCVPPDRRHTYPRLLAAQYDLLTDRCRSFESSKIWTRTGSLPSLCEHDRSVGTLRRYTIGDCSEDTVVCAYGVGAPLLENLYYKSSRDLRSLKSSWNMLDQFSVNEEAGRMFRKGHSLQGVHYGSGVNGLLIPIPD

SEQ ID NO: 983651 - protein, 66 aa, Homo sapiens
EKRRQGWGPQNGRAQVRWLIEVVVDALPVLEIKVMKPHGCGGKRLRHVDAEEDECRMIPTIRKNLR

SEQ ID NO: 983652 - protein, 152 aa, Homo sapiens
MERNKAWMIETSMGNRSALMGGQEYNNDLSWKKTYRLRAHSASSYSCVIAFLYRCHLKHRNDVPGGVELAPGGNLIDLPPDENLTQNSIRHIWDGSLGRLKLGISLVLKFCVAFQKQFASRPNSCDGERGYLEGVGALSKRRRLMPVLTYPE

SEQ ID NO: 983653 - protein, 186 aa, Homo sapiens
VSGKRYSKWVAVAVVLHGGNVRVPGPLSRERERRCPSKGPGLGMAEESGEDETVRDPRTEYSSRSLTVIDTRTPHFRIPLLDWIRKTEMRNRKKLSTKAKAAKIGGIIVSEYDVNRAYNTRGPTVEMMIVNGISPSFDLLQAVYDRWMALALPMPVPCLSAMRIVLACSMNLPYGGIQQIFGISLV

SEQ ID NO: 983654 - protein, 126 aa, Homo sapiens
MPKNCESACFVSGELVVWDKFSALVTGCPEIDSVLLEGTVGMTPAFGLQAAWEQGEAHDLLTFPHLLANCMVQQKQPESPWEYNSIGPDTTPPSPTAVTASHTQGEAELSHAYPCPYRVVFLYTPW

SEQ ID NO: 983655 - protein, 134 aa, Homo sapiens
ALHPWRLPVRHGLLRIGRVCPHYVEVPFRWCHFCLAVRPRGLACDDAKNLHAFDQDITLLFSGCHVQGTDKFIPWLLYALLRLRTASLAGTILYAIVKPLTLLKREVNKSRFLLRELGTGTLSIEAPLKRHFRI

SEQ ID NO: 983656 - protein, 348 aa, Homo sapiens
MCDLSKSLFVSTCERSPPTTSQELSHRKGAVGISPERHDEAQPQHPQRRKRERVIHNKVDVGAQAGRGDLLPKHTLRNQQKGRELCGARAHVGALPQQRVPRRTEQDAHKKSQTQRAMGHRGKEQTNQHEKQKRTNTNPPQITQRLHEADIHRYEGREIHKKGKKPPKNRTTYTSGRKTYTTRGEQRTGRIPLTHKRNIWGRSRQDIHKKNTTNSKHEGAHKNTSGANGRRTWFHHTMDDPMSENYCDHTHGSKRGTERENSSRIKQKRHTNVVQVNTHKTQTGDKTYDNDTGSKTTDHKHLTQTVRYHHESKRKVIKSTATYSTRQDDSSMSKAVTTEQVGLLYDRQ

SEQ ID NO: 983657 - protein, 304 aa, Homo sapiens
GQCDLQDIDWPPFSHSPSEVSYTRSMPFGNIHNKFKLNYKPEEEEQPDLRKDNNRLGGQGYGAPLNFYERLRDKETPSGFTVEDVIQTGEGNQVTPFILDRGLLWHGDEESLRRVQGHAMNPNQFSDRHGGRYKRQLTSNKTELNHENLRGGDDREPNRGAQQTGFATGRGRSGVTRDSPQMGPVGSAGGGYAQLREAHHKLTGTRTKEKEIGIVYDGNDTGRRGQTEQRGTMPVQKRPVTKGVPGDGPNRTRGPWNGKETRDLVRGEEQSAPKNGKYGTQQQSKKPHTKAAVKGRQKKNEKRN

SEQ ID NO: 983658 - protein, 178 aa, Homo sapiens
MSYKRQTTIWHTIEQTSEKVTKDNRTNEHTDHREQNTEATYTKTNTPSQHHKTTRTDNNTTRPTNTANLAHNEEEHPDSTKAADAKTSNSTPPDRRARQSQQQQTRMCSQTTGTATTTKQANKHATTHRQTKSTPADDQPTYNTNNEQHNEEDATKHNETTRSEDPKQTNHQDRSKQN

SEQ ID NO: 983659 - protein, 373 aa, Homo sapiens
MPDPPTSPQDIFTSTCTYITRTPSTDTFHQLDPRSHLTTIKLPGNEHHHDSPFHAHSETHHQVISYLVAAILSRTTNRSRMSPYYVHEQSHLSYLHHAPTPCNKPHQRPLHIPFTSPSAKPTPYAKRHGHPMLHTTRSPINMTTPVHHRPRQQTPQTHSPTTTTTTTTRRRRPTRPRPTSVPNHHKPTHHPATHTPRGHQTLSHPRTTHHPTHRTTHTTQSTNPAIPQDTPQAAVTTNSPTWHNEATAEHSTPDTARDTTRKHHRGKATQANPPRSRQNRPNTGKQINTQHTHTQHHTRITNQTEHIRKHKKPQTQMEQPHAGNDAPHTKDTDTSGRHGDPHTRRGRAKSQNRITTDDAAHNNNYTVNRSNRP

SEQ ID NO: 983660 - protein, 267 aa, Homo sapiens
MATRGTTPIGKPNRSGMEDTKRQQTPWEQRISTIHMTPTNMGTWGDSRDKEKHHMGNGTIDTHNQRKTPAPNHKQTMARQWNHYPHIEIDKQRQHKPRTSREHRSNNGKNSIAHTYAIEPAALHEKNVKRINKHKQTQDEHITEETTSHNQRPHTPGTSQKAPPQTTTTGEQNTDAPNSRSHMHEAQTDHATRPRRHAGHTARSTAADQTNTRHDHHQPKDKGNTTTRRPRPQLNKTPHTQTTRLANQHNETDRKTRHHTRNAEEQR

SEQ ID NO: 983661 - protein, 590 aa, Homo sapiens
KPTPPYYQTTLAKPFTQNKVEAIEIENMDAKDHQYRKGKAGKIHNRSNQSSARHSTPSSPFMRSIDTKNQQHTLMHRQQTEQRKRRHQNTPRSEHTYQATPAINKKQQPQNVSRYAKEIRCGTASNIRAHDRPAPHTPNPDDPIGPHIRTRTNEHHAKRTILTSVTHTIRQNNVQDTQHAHNPRSSTNTSTHPDGDEEETTHVGYTAHTQRRHRDQRKRRHNAQTNNDNRRDKQRDHQSVTRHANNRDNKRTNSYTNTQTKTRETETPSHNNSNKDDQDTNNSRQQAQRRDDRITQKRDKNTRREDPPTSERKPATHEDRREKERPTTSNRHAATDSTRQRTTERVRKKYSSTRSHTTRNQPRGDAQPKQASEMRRTRRPPRSNMTREYTKDSERENTTDEGLTRPDTQKATTGDTTSKMENDTTQRRENERQQSHGNPKTTKGPHYDETPKRAQHTQRSETHDVGQDTSSEQENRTTDQTDDQTTKHTVKPPKDRDTNTTKAPRTHDSTQITNDRRRNHTRQNPHTRHDEPHPQTRSRATLTGTNRDTPTHAHTSRHTTKTRNSTARLEQQARKRNSQKRDSRAHERTT

SEQ ID NO: 983662 - protein, 433 aa, Homo sapiens
PPSSRDCDPLGILSLTLLPQALLGLGGTVGMNLAIARNRPGKRDLLQLTNGRCAGKGTNNVGHTADTNKTKTNKNNNTKNKKTKKQKQQRERGERQNYHREREAPKNDATTHRRSSWRSQERSLTRQSEAELENMKRHDYGAGAGVAHNPTPGRECERENTDADPSEAPLRSRKREEEPEQERGESRKNKSKGGKQQTPKQEDTRRKSTLRAGEKTHSKRQSRGRPSEGGEQTGREAIMRKEEDTAGQLASENDPRRSVIDAERQMRRKRGAEGGENRRQLNKGQERRGQTRKKRKTARAETHSGKRGGGGKVEEWQGGTEEGVAWTGRTGGEEEDASKGGQEEEQEAKRQKEGEAGGGGEEERKEAGERRKAKIEEKRTREAAGRVAESEKKQTKRRWGGETTERDRRRGEGEDGGRANEQKKKSSGAGDNG

SEQ ID NO: 983663 - protein, 129 aa, Homo sapiens
PPGTRPMHWTDATPLTRESWNTPCPRGSRRHRDTPDHLEDLTPRLVQGIERWIPDGGPGPRHAAVLDSSAEETGTRAVAEAEARPQSPCHIEGGLLPAHGSTHIEQPTYHHDTHPCTTSDRRVDETQCR

SEQ ID NO: 983664 - protein, 497 aa, Homo sapiens
KATLELTHNRGTEDDADPEITTMAISDPRGFGHIGIADLMYTVACKRFEELGVTFVKKPDDGKLKGLAFIQDPDGSWIEIDESKQNGHLTCSASENSPYADSQQERKQCAFKISTYQQALSGLTWINCTRIHTIITIQIHNYTPFTIYRTVLVTPNCTVPSWVFTARSIYILNVPSEIKIVVNHTITYRLITNETRNPYQKGQTSRTYQFVDTTHNEKYTISHYPNNVLTLMGNWIRVYQTHKKDIRHHDDHTTRSHNRDAMEQRASRDPRDDAKHHTSTTPGAGETSKKSNRDQKADHMDRKRNKDRWNQPIKREHRQRVEHEHRYNPRVRSQKTSDIYRKLNYAGKTMNRGMNDITESKNSVTRKQHTPRRRGNHERGEERKRKMGELGAEEEQERRKKRKRREEGKREEEEKKRKERKTRHIAEGTTEATREDHADDDDEEVKQKQRKKTEKSVRERQKTGAQRREEEASRSDQGKKLRTMSLRDSWERSKDRK

SEQ ID NO: 983665 - protein, 74 aa, Homo sapiens
YCAYCHTSLCRCEAVVGLALLVSFSNTYGYHYEYDLYAYSNATTNRPNNYITTSDYDLQITIFESSQATHITNY

SEQ ID NO: 983666 - protein, 394 aa, Homo sapiens
TTPGMVSTNMTSTSLKVYTQKQQVFHRTHLRYQPSTMTVNPQSVPEHICMLPSVNNPPTTHAILQANSNRIDNILHHWAAYVRKVIVINSWRVISYSYTLDAKMYYSRRGIRYRTIDEHDAIIEGNPWTNGMAHNRMHACPINIINQDLLIAPTTNILIIENRYKKAMHYKIQSINSTYVKDTYKVHQEIGTQTLTHPALSHQTAHPHGNSPITIHTAPQKDLIITQTATDKDTDTGAKYRPRHKDNKHNHTRTTKHRQHEDTHKTEGTKHNTTGHNSTETTNTKPPRRYTNAGINTTHTKRQSNNTRQTTIHQIRKRTKQKTEAKKEERKHNSQKNEKEQAKKKPDKRQTNKKEKRDNEAGREQATDKQQETEKQEEKNRNQASKQPKHCEEK

SEQ ID NO: 983667 - protein, 187 aa, Homo sapiens
MNWLNLTSKLVLWDITLRMDVEETAAKCTGLCAKVQYLCGTPAAPERIFTRSAKNVQGTHWETVTVIKGKLNGSGGSIYTRTRKVMVHQRILQMETDFVELIELCSIHMGLTAQESDLGQHDTTLAIRVQRDTPATALTQGYVEYKNNKEPYYRGQWTNKITMPYSQALPHVQCSGHLSTGPYVSDR

SEQ ID NO: 983668 - protein, 144 aa, Homo sapiens
MKDIQSTTVKATHYYGRTERKTARLYHRTQIRETTRAPAITNAHNANTRRARSTPDTPRGRRHYHEAPEPSANKENELTTHETDEWTIVCDTTNEGRHQERHRQENTLTKHPTNSAQGSNRQKRQTIPATSEQPIKQRKQEEPT

SEQ ID NO: 983669 - protein, 70 aa, Homo sapiens
YRCPPSLRSPGSTGRHLCLVGSRSAASRPASRPAAPPSGTKHEQITHNRIYKNYKQKRQHTLYKITYTWE

SEQ ID NO: 983670 - protein, 70 aa, Homo sapiens
GECTWMLLGSRWHSSSWLMCTVWLPAHPFCLEYDNSCYRVGTSPSPIYLLGFERCIYRHKKGEEKPKALL

SEQ ID NO: 983671 - protein, 129 aa, Homo sapiens
MTVAQLLHDLTLSRCYHTGYCGACWHREKPGKLAKTEIEKLQMKRDELAVISYKRSCMKMNNTYVTVMRVMDNALEKVELSWVDEFTCLEDLKLFREDVAEKKARNMLRKSLKEEGWNQMVNNLLTLIQ

SEQ ID NO: 983672 - protein, 105 aa, Homo sapiens
  misc_feature (22)..(22): Xaa can be any naturally occurring amino acid
MLADDRGTRSRALSTAYPDSQXVASLSTDRYPKQMLRCLATHQTGACDPGLQSNYRSYTPRRHMKSDRLERHSCAYQRAVTCSKLIQESEVAARVCSQSRPARVP

SEQ ID NO: 983673 - protein, 83 aa, Homo sapiens
VRVLLVRNLDIVMLAAVISRLLHTRTSSRTSNIKRSSPTRMSRRTDDTTVAQICHEPNEPLNYNHNCVQKYRPIRIDGGVKSR

SEQ ID NO: 983674 - protein, 118 aa, Homo sapiens
  misc_feature (2)..(2): Xaa can be any naturally occurring amino acid
MXVLESVYREGATTDLINPGSALYLLTMTRRLRPHHINLQYCQQCSSPSRNPGIRPFFRHRLLKVSNAQSVVQSQLECMECNSQRPQCIDKTIMYRGTSNRMLAQHVGEWEYMYAKVY

SEQ ID NO: 983675 - protein, 350 aa, Homo sapiens
  misc_feature (81)..(81): Xaa can be any naturally occurring amino acid
  misc_feature (168)..(168): Xaa can be any naturally occurring amino acid
MTEGHVCSCAVVGYMCLYYLVTGSMKGSSSVLNAIGVSLRRLSEMIHGPQSIQCVPYSETDSTATAWIDVARETRCTNDAXHFCVEMCGDDDSHEDARMGIIRQHRVRSWRGGMCRAPRELSRPEAHVAIQYTRYNVWGVMSDVTRRSHMGIHSTPYGDYSWSLNRTXPNFVFEPYLGTLDRAEIEVTHNTQISHTSLKEYDTWTTIHFALAPFLLSPGLRSWPRHLHVCNLLATLRASKNALEALTPNDQANGGPHRALGELQSGEQHQIVQIRSRSCGPNLGHLGGPPAEYLDYVNSCHALKGTPTRGISPLANLDKKRLRTGTWAGFVAGWSTECARDLKPRGNLGQ

SEQ ID NO: 983676 - protein, 107 aa, Homo sapiens
MAIVGLDGRQMARDCRTTTCWCPEACFHSYASMPNVHDVGYRIEPMQLCVVFVQELHADSALELPVSVKAHWSRSCGSQRIGQSTKSRRDTTYCVIVVGPHRPEIEL

SEQ ID NO: 983677 - protein, 151 aa, Homo sapiens
DQDDHQTQTTPYSGALSSEYPNESHMKSAKPSFYYQRLLINVAPLTSPTLSTTSMNDHRDYSMTIIDPSHNMIDLHSMQMTRNRYLTLTVPLPEWGVRDIDLQAYATSSQYARMGPLYAPILAIGRSTQTLIITKTPLTLTYESILWNKYS

SEQ ID NO: 983678 - protein, 248 aa, Homo sapiens
  misc_feature (236)..(236): Xaa can be any naturally occurring amino acid
ILLPIQQFVTCLRDFYSSLITTPFTHALHNCSILPKGDNGSLQEVSAAVHKYRSRISQRAIRTYTRSVTTLVDETIVHTTRRAPCTYKGPHIRNIKTRDTRITVNDTMPWITNLVPCEYSSFERACLTRALQVSVTSTVSSPCLHHLPWMGSCLSLLYTLKKLMPSRRPMLKAVTYLRSQLNRVLQTLILYPHESVLCNPGPNTWRSCVNHFEPIPYTNSNLLGLIATSRHSPIDXRLGLICVRKWSC

SEQ ID NO: 983679 - protein, 181 aa, Homo sapiens
MFGACSSWPPVPTTGLREPGRWLYECSCAPGVLGRGLPEKGGGPCVIDGSPLPSTEAPAWMIEGPGLPLLPAGGPPLGLLKANFRGDRGQQVEPQTHGEKEGGLQWDSERFRWRLPSRVQSNKNWRRPGTHGRSRGKRGTCWHTPGSYECWAADSGLTGQNPLTPKDPLAGKVTQTGDKRK

SEQ ID NO: 983680 - protein, 130 aa, Homo sapiens
MGQRRDTVEDRRGSRDQQPKEGPTKKEPSTMVGATPKRGRHPGGAPIHRGSSYPPPPNRGRNNLLRRRPKQDAEEPRRRGQIFTPTKGVVEVARRGSPSSRHTKWWRKKRPTKNTKQDGGEENVRTEELV

SEQ ID NO: 983681 - protein, 141 aa, Homo sapiens
PARIATWLSDKNHWGDEMITFNTFFSEHGRCQNSVPRAVLCIRMEHPQSIDLTTIRTGTITVIISPPCNVNAIIRQAMKMLTITMPEGITTLAREIIDLAVGAKFRKPELTTWPPVLSGASMAISIHAFCVSEPAYWGSLP

SEQ ID NO: 983682 - protein, 115 aa, Homo sapiens
MPFSYHSQEKLVNTSISDAQEIEIRRESILGRHHPSPHRPPIPYASFTVTDEVQRIPHPFTIKLNWRNQVVAEAYEYTDYGRTNRSTPYILPPVIPSNQATCDLLDVDDSSSTPD

SEQ ID NO: 983683 - protein, 187 aa, Homo sapiens
  misc_feature (74)..(74): Xaa can be any naturally occurring amino acid
MARQRSGPLTTQCNPRAPRKCSPVPKRGPPLTKIAGARTGKNTQIPVILPRCNTTASTRCTQDVAGHQYTSDTXHTTAYKQHTPREAPTMASPQVNRSPPQERAVSSRQDAMSGQPHGSVLMPHAKVVSTTKPDLKYVAQTIAVTHPTQHDSSENTDDHQQLCTQSQVDSTTHDMRRITTRTMHKQQ

SEQ ID NO: 983684 - protein, 106 aa, Homo sapiens
MQEVSSQPEAHHRSSSKEQPKRKYIQGTADDEIVTGSLFYSSYKPQSTFESPFTISEDIYGLNIFCSHRLPRTSRHYWLNFPHYLLHPPTNISLYIQNITLVRSRR

SEQ ID NO: 983685 - protein, 69 aa, Homo sapiens
AGLVHIPRPQQPSKMGKGAALPGPPTLVIATPSLSRATTVLDGGRSELTCTVWPSITYNSVITAEHKKK

SEQ ID NO: 983686 - protein, 209 aa, Homo sapiens
MVAWRPHSRKTFCSITWIPVKASQGRGAFRPGPRIGAEVVTVVVALFIAAQAALAPHWWPVAILGPPACSETSDGGNGLQETLVALYPTGTKTSDPRREDLKVDNSQVHGARDKDTLEGGAPGRPMAGLPPPFKQTGTRRPTENSSATRREHNNSVRDTRRSPAQTKETSNTMCDQRPLSSPNNERDAKRMGHPPNNVSELTQTSRPRI

SEQ ID NO: 983687 - protein, 180 aa, Homo sapiens
MTQDKTRSEQERDRGIDWIDAKRQENRLSRIEQATREESMRITENKWEASTSAIPKMTAQSTWPDEPRRATNTTITSKHYAPDRGLKQQDGTDYEIASIWENHEDNCKRALDEYKEITAHTKLPRRQEAQGKALGEAHNSGKRRNMGTNGQHKRHMEHEDICQPATTQGYDTDPIHPANT

SEQ ID NO: 983688 - protein, 157 aa, Homo sapiens
MGKCRGTSVLLGNDSATLPMSTQKWHDRHSIKKSRQFECISAHNRPNTRYRRCFSMQIRQSCVYIKVMISHSQHRAQIPDQLGTRVIRGGPSMSHRNGKQRVTKALIAIPKVTGMLYAPVFNLMERIALKDFMRFALRHIAVQADTVVEIASRKGVE

SEQ ID NO: 983689 - protein, 155 aa, Homo sapiens
MGVLRAPCQLLWSNYDSDTHPKLKGLSNPREQTKEDTPIAIAKAPKVCGGHLTNTSEKKHPKVLPIGSTQVDPTEYGNGTKGSIRDWTLHLAMQWDIEDLRKHRKAHDYGGRFGGHTHKGAPSKNNSIGANTSGNRLRYNEGTPPIPYQDRRYAT

SEQ ID NO: 983690 - protein, 435 aa, Homo sapiens
  misc_feature (97)..(97): Xaa can be any naturally occurring amino acid
  misc_feature (195)..(195): Xaa can be any naturally occurring amino acid
FIELQREESDKLSEAVQAQEGREGWATPLKSALTNRGWLCVLPVACGRWCVCFPRRYATTEVPPCEAYRWRHSINRGGAGMPVVTAVHTYLSVVFQXACAYGVLCYSPRDRWWVTTSRGYTNNLQLDSGQRTNRGGSPSESSRPTISQPSRQHESYRAQSSHRPFTAAKQALLLELPPMGSEVLSIKILETIPRXQCAKYHGTPTVMELTAHPQPELQCPSLAYSRGEVTARAITVSMVSNFQATIVPYLLKLVRRSARVYGALGPDVINLDADAQDTLQEGTIPRLTTLFTASRVQIPTNHDSGRPYPVCTHKCLPQGMMRAPPEANGTATGGNRFRGTQAPSEELNSKGHTVVAPPRRRHGRKKTSAGANRRRGRKRRKQGRETQQEQNEGAEANDPRKTDSPSKAIAHKGGHNEGSRETAGHSRGKRKRRDT

SEQ ID NO: 983691 - protein, 227 aa, Homo sapiens
GRVGRPTRPAPQCVNNWLAKGLGAQSLIGCLQCRARVPHSDLSSVQTLLDVEPQVDLQPGMLEQGFGSVYRSRLRYVAFSRKLPLIYRFEAKRGKSKRDVNNCRSVHRYFAHRSMGPYESIVWAAWTPWYIARESVPLSSTFPCIVLGIKWHVVVHLGRRTALIRRVLSNSFGDFLLSVPGERCAPTGLWPVARRSLGFISPFDAPQGQIRNHGDTGYFQRHKATGP

SEQ ID NO: 983692 - protein, 396 aa, Homo sapiens
MDVSLWLPRLGLAIGSISTHWQPPPPGFERYYLPTAYLSSWGPLVRATSAQHNLGYFKKQGFLQCCGSGVVLKHPNRQGDSARVSASQRCLRIPVVVSQRVRVAGIILYTSYAFTFGGLHNCETCVQKAKAYLKAKGYSQAGQSGSQISSREVEDGAINTAGESTKGAHGGIPGPEGYTGGIKKGGPRVGIKKVKYKELKNTRDPPHDPGKCGTDSRRTIILGTREKPKRQNKGRKQQVKDFPKQREGEPIMVSTTRGQKNITKHGKVPTKGDKDKENPKGGTEEDTNSKRQGRPTLGEKDNPKIHSTTQKGLTPPRVSSGIKKCDKGFTARNRKQRHRGPKCKKEREHHTEADRRKSGREDKRDPEWIYTEKDTDRKTEPEHDETKQAVSALPRP

SEQ ID NO: 983693 - protein, 117 aa, Homo sapiens
  misc_feature (60)..(60): Xaa can be any naturally occurring amino acid
MHELRPPPLYIYCNAGAAVHKNSRSIQKEHLMTYEVKRTPRIGSNNCAPNDRKRKPPVYXRSLELACGIQHTTEADREGVYLTSLNGRRLKEQTGDVTHIMWREKTRDLVKEHRLLG

SEQ ID NO: 983694 - protein, 76 aa, Homo sapiens
MVPYCMQTTDTLYGICWKDHSVKEAMSEHCIESTKSTKTLVSMPQRTSDDTQAKAVGEDWLMWSSEHSYLSDWASG

SEQ ID NO: 983695 - protein, 230 aa, Homo sapiens
TALSMDLDLERGPPGPRRPPRGPPLSSSIGLALLLLLLALLFWLYIIMSNWTGGALLVLYAFALMLVIIILIIFIFRRDLLCPLGALCLLLLMITLLLIALWNLHGQALYLGIVLFIFGCLLVLGLWIYLLEILWRLGATIWQLLAFFLAFFLDIILLIIALYLQQNWWTLLVDLLWLLLFLAILIWMYYHGQRHSDEHHHDDSLPHPQQATDDSSNQSDSNSNEGRHLL

SEQ ID NO: 983696 - protein, 106 aa, Homo sapiens
MCTIRAKQSYSRLVDNPRMHDRSSIVPNNASFCIRSRFPVLKSTMKDPYVSSLILIYLGLIGLTWRIRPNSVNVNQDGVKPVQAILGLSCRRPRPGRGRETPPISY

SEQ ID NO: 983697 - protein, 133 aa, Homo sapiens
MCVYIIVVCVVCVCRVCSAERRVRGVSLRHSVVVHTPRRGCCESRAQKWRRVTHSRAASHWWGDDLSQTLLLWGYLQEPEQSSLLVVAPLKRPLLLVKRNSRPERRTITHKGGPPARSHTTKENTPQGRINHF

SEQ ID NO: 983698 - protein, 268 aa, Homo sapiens
MRDINILADLNGLGKGLYRPDSRRLTCQLQGMEGAECSDQQVGEGRQRPQRPGDRVMGRTRSGMWQEEVTGPRIQTFQIPEAMTKRKQKDHDSHNMTINSTTMDPLSTTGNHNRQSQRRHGTKWHRKEEAMAWTPTEMSQHTGKGEQLPDTHDKDNNIGMDNLMTTQMHQKDTEPEQEDNAEGTRQQTRKPPGPDKQHMGTGMKENEKGGGDNPVTETRSSTQRTRGHKERLKDSDIGSEREKQHRHRTSQRTHQAQLQRKMKDERNN

SEQ ID NO: 983699 - protein, 130 aa, Homo sapiens
MESRSVAQAGWSAVARISAHCRLHLPGSRHSPASASWVAGTSGACHRVWLIFGYFFLGGERGIKRCLARSGPPIFRDPRCILPALGPPHRCVGFTGRVSHQCPGHLIFINSGKFCGTDDTVYRGFCHFKF

SEQ ID NO: 983700 - protein, 199 aa, Homo sapiens
YCVRFGVWLVLGIGRRSWCCGPRAGRADCRLWRISEWVQPNDSVEEAQRSIRGRGVLVSWPSRRSIRIYSSRDGALGPPEISDRDAVVFRVLNPRCGYTKKPPINKPMARHLVSPFSMGNGFVNKHNIVAVSIVVFTFVDPRGWRALEGRNGSSSWITLTKHPTVSRLSIGTHRDCVYTAVSYVPHEPRVYVYTLRARR

SEQ ID NO: 983701 - protein, 121 aa, Homo sapiens
GARGGAVYAGPLVGLSMRWIPPREARRSLEEAASDMRRAVYRIACAYNLPVALREFSIVKPIRPGASFGVGVYLGAERRRRSVMSVKKVVNRYSQTCIHTKNILTPIEGPRTSAENATWST

SEQ ID NO: 983702 - protein, 352 aa, Homo sapiens
GRVVSRTRGSSHASGDKPGPGRQDWASHGDPRWAAGIVKPEALQNQLDLAGELCGSGSPYLVRIPMILLSVLLPLRPTTPPAVWDIADALDQHSYTEWLNLIFKVVTLIGDRAPIGGSIESGILQHRLPSPGITSIPSYYSRDLVPGSPSGTTAIDHRSSPLDHNDGPVFTQVATRDRSRWVRVMPSLAYSTNLIGSDGIVRTSAYFATFPLNQVLAGHNKLERTGLDDDSTSAHMEPTSTPPTGTNRQEPTMLSTSPHKATPKAPSQNQPSPQPSHEGTRGHTGNRGKGAQAPSDTNTGTQGQGQPRDPGRHHHSQQSHAQPPREPTTPHTRKAAPSTHEPGPQVTSNPQQ

SEQ ID NO: 983703 - protein, 192 aa, Homo sapiens
MCATLSIEKGVSCECESFLLTRGETARIISWRCNPTQCGDPIAPAPLYISQSVGSPPKGNYFIGANGAPHTQAQTVVLCSPSHFGRDCLTLCGPPYKILHIIPRHNHKGGTSLGGAHWLYAQNTGCSPLGSLGGSFQGKAHGGLVFLPLFSYPYFLPCPSHGEALGVARARPLIDILSPSRYRALRSCGGLI

SEQ ID NO: 983704 - protein, 497 aa, Homo sapiens
MREFRTKTLQRGNTVEDWLRNLCTNDIYHGMRNIWKTSSKLLMHLRSNPVKQDGEHSNVDQLTLRSDVRRRKGPLTMATQYQEVVTRTVEHSRQERRCSEVSPGCVNCVMVAIEESRAMCISQESVRKQGVQKSTISCARDRRTRDGGYYMGIPNVRASKRCSAVTLGAGSTNNAGKPFRGITNLTLPSERQERMSKRCRPRQWSQPITDHALLGLPTSFSTEPANLEAQKKAGTLYELSPTQTECGSPDNHWVNLNNRCQLTSYHVPLRTNVELRGHDPFDVQPDSSVRLRHRAGTHLCMWHPEVIKRECALAMSQSVAHLQDLRIHMAIKEAYNKHPLRRGDEPYNNLYAREKRALMAYTASPTRLTFYAPNVDLIGFTGEIVAMNLRRTVACETDNTNARLQPKKTDTIGKNAAGYRPATQDKTSPKREPKVRYDGQNRVTSAQRLAAYRFKFIYDQRAGVKGTHDVIGGSERDTETKGDKPDHRVAPAGRPIK

SEQ ID NO: 983705 - protein, 52 aa, Homo sapiens
MRQNTADTRKTYHKNRSDRTNAPDKNNITRSPKQTSSAATRKEHTTTAPQPL

SEQ ID NO: 983706 - protein, 208 aa, Homo sapiens
MAPWNTRTIHAGTRENSIFTLIHLDYTTPWLIWYNEQYPWLEETVHIQCTYTNSHGGTNTLHANLSFLTHKDNRNNYMGPHHNTNLATPDPPRTAQQKLREDHTRRTPNKPPRKHNTPDNSNTGPPPTHRHRRRPAHSQKARGPHRTRGTRKRLQTPQRPRKDQTTNRQTKKNEPRPYRGDRTAETDPQHEQREEKQRPTPKTHTTDA

SEQ ID NO: 983707 - protein, 361 aa, Homo sapiens
KRETGGKEESSLMDLARRLHGPRLLPRAQTPWGGPSTAWRAARYQTGMTHQASGRPWERDHAMSHSHAACTHTWRRGPMPRTTDLRTLLGESPLRRTLALATHAKEPHNSIDPNDELEEHTPEPPHGQRQSESKPASPTRPTLTSPSREGNTISPTMRLGRVPQGTTPERPQSQAPSRNSPHGDHPGDTPSHRQSTGTTPCRQRGSPRWPQQAPQAAARGAHHHTDRPGPGTSRRPREGTRLRKLSSMTPILTPETPPTHRGHLVQRHNFPARQTPRPKGHHTIGRAMGQEHRGKHGYTTGRPAEAPPGEQRDPGPKHDRRGVYNGGRRPHPATCDAAMEKATSTPPHKTLVTSATNPRTH

SEQ ID NO: 983708 - protein, 133 aa, Homo sapiens
GQDEDEEEKEKCGRREGERADASIDRGGLTWMMSSGCPGDACGDGSGGAKSPQGSGKEGAVLANGAVRGDTECKERRGSEDEALRMDSRGMRWHFEGPKVGGTYRLLQTVIGIELPEIAGLKTKAIWRRMQGK

SEQ ID NO: 983709 - protein, 111 aa, Homo sapiens
MLNRPQSQSTFFEPTGGGEPNSIPNTYSDLSGHPEVYTFLILTRLRIISILELNNRKTDLGFIGMARELDINGLPRALRVFTPNIYLRYELNIQQHTYFNSEQIYTHSTRG

SEQ ID NO: 983710 - protein, 38 aa, Homo sapiens
MRAATINETTTTQQGRPTQAAAAQRHHDTRARPQTTTG

SEQ ID NO: 983711 - protein, 36 aa, Homo sapiens
TRGSTHASPLPRPSSATSLKEGWVLGLYRINTNLDG

SEQ ID NO: 983712 - protein, 90 aa, Homo sapiens
EPGSSAREHTLTDIGAGGGTSPRSPSRADSECVPDQWLEPCNVTAYNMIYADSDIGLIGILRISELIAYLIGPRYPENDVTPGQCKSLAI

SEQ ID NO: 983713 - protein, 193 aa, Homo sapiens
MWPQPAPHTPKNRTKHKKTGSFSGYNSCAEKNSRKPWAKPRVVNLFVVSSFLTSNFNREVVHPDHFKREACCSQEAALQGMCPRGSRARARPPLKGRIPGRGNVAWVDRYLQGPVECGQPLRLPTDNGCQRVTGKKTLEVPWISFLFTSSNATDLSPRYQAHRKIRCVEDPQNSAPWPVPSPSWSVFPSGKPG

SEQ ID NO: 983714 - protein, 300 aa, Homo sapiens
EEEEEEAFYEDLDDILESITNRMIKQCAGKICNWIKSSQHFIIEQPPVIGNQHNINIVCFSCAWAVLCRFSISNTISPEVVSVSNRFEDILSLFMCYKKLSDILNDKKRVKPRTKMANKTSDSLQSMKFVSSLLTALFRDSIQSHQESLSVLRSSNEFMRYAVNVDSAAKYRQLKETGHVVALMAKPRKDLSETLRHNSSLAIGDTLQFLLQWKESGKKEKGKSIYTACARKAKNKKNIQMAVKQNKRAQIQKKNTSTGRFHRTQEGNSRKTESQSNHKTETGAGKDDGPAAPIDKKGTR

SEQ ID NO: 983715 - protein, 353 aa, Homo sapiens
MGQWKKTHINIVVIGHVDSGKSTTYWTTLIYKCGGIDEQEPLKNIEKEAAEYAATRAPFTATAWRSLRLTLQQLQPSAHPLRLISPFCIIFPLHDEHSSTHPRQSYPTACTYSIIALGPPSWNHPGQQPSITPKHKTLAPLTNGPQTSINGPAHLPAIRTTPLPPLDSGPLALEPVLPRIRIPTQANTPICWLTSFPTHPTPLARTHQNHPSHPNLPHFDPPTNSPLPPNNHTQPQTTMVPQLVIPPTQQPNTPLINLTRSYPTSRAFIYTPQTIHNLVRTPYNTHTPISHAPPQNHPHLIPPHSPPQPYTLLTLTFKHYPNAAQPTTYSQAHNTNHADHKMTFLNTLTTPLH

SEQ ID NO: 983716 - protein, 77 aa, Homo sapiens
MSLIWGKPIPRPPVSTIVNPCQCCTIAGTRTRGFMNAWKDDQLGFTDNLSAFVPCARFPEAQTFLQFVQAPGRSGPV

SEQ ID NO: 983717 - protein, 205 aa, Homo sapiens
PLKNLAVAMVRRPDRSYRYCNQSRPIPKVSLAAEVSLMPTFHFGPEAEKGEKWMTFRFVPMVSDEYEQLFSEALEAVRICANNWYMDKVVAKDGFHIRVRLHPFQYIRDQQDVVLCCALIRLQTGSAMVPLDISHQAHCAARLHIGLRLSCSIRTRLQTIRRDHVIEALRRVQVSSFLVAMNIHISKKVGLHQVQLLDESDDLVS

SEQ ID NO: 983718 - protein, 339 aa, Homo sapiens
SYTKLGNPTRSEDLWDYGPFRDVPAYRSGYFKSYIMNNNSPFPEPITSMTRDHMNDLSLAENIAVEENVDCTSTQRAVLRRGLSHSYDYQRTSQIDGISSILCLLRPIGFLLLPRMFHYRDEIRQMLLPATRPYWDDSVEMEIRASLPFFGGWKTHYIVGYNLPSYEYLFIICGEQYALKMTLWHHVCRGTGDRFSDVVKIILPEGAKNIEDLIVPYEITPCPNELPTPIWTHLGALSLLPTEDLVNSAPGLVAPYPSPGAMRQSLLVVRLKLPSSRFTRSADSSPDTPNSKRTYKEVCRTKNPQSHTVDNTTAPGNAVRPYTKDYSKQARANTSDGGG

SEQ ID NO: 983719 - protein, 281 aa, Homo sapiens
MAGGLHGRAGPRASPRTRAQHGGAAGAFLQSLRTLFDYPVTDQAARLLCTAAEIESRWQGTDARELPRGVLGGLRQVSPAIGYLTFERFVAGLRTFPAERRRLPPGDPYAAPPARPVDVAAAPSQPPVVRSGSSEAADGSGRGMPLPWAVPRPLWTVPSAAGQHHEMQLCRRLTRRPRPRIPERVPDRGPDTLLSGPLQRYAGTLTGPEGDYREFPVAPVSQGPSQSPSQPLILRYHQLTTIIRRSVTMYICFLTSRKTPLCARSLNPRDKHPAISALTPS

SEQ ID NO: 983720 - protein, 326 aa, Homo sapiens
MCVCVSYIISSEDEDKRRTPQECVRNRSRERRSPLSTTPHMWGLLPRGNPILVNQSGPRLIHYRNFSEHTLRAPFFSQVVVFTPEKAGRHTRFLSIPTQVFHGNTFGCGQLMEARWCANSQSTGGPIRRGRLYWGPWNVFPGEHLPLNPLGNPACASPLGRGHISRCLPGHCCAPQVPSLVTTPLLLLPCQPPIFSPANTALTPKVSERHLPRTFSFLRVKLFVGHGVPTKRSWGKNLISSGQHEEVIQKPFTVYSVKKARRYFMISHMERDPQWWSRQQHAEDTHDRVNFCHTDTRILRSFLSLLVLILFSLSAHHTKKHKHTMR

SEQ ID NO: 983721 - protein, 150 aa, Homo sapiens
MSSGACIITKINLSWILPSVIGGFWKAPRKELGMGSLKEVHWPFRDHLWRVWAHYLVGGGGVHPVGPQRDSPQFRDFPRGNSLPQNSGELRSEQQEKTGIDGNSKLPRCNLDKNPQRELAQNRDKSVDRYRHRGRDHVQEEYPKGAGTQG

SEQ ID NO: 983722 - protein, 139 aa, Homo sapiens
MIPSEGVVHDEQHETRYVRTRLDAEDDQPPRDGKTNDTKATHHIKAIGPSRQNKETYRGRNKKKTEEGKGDRQNTKMRPIENKPPNRKARESTNEPQTETMRQNGSDTWRTNKNTSPHERGGNQGQNAPKTKCDRTAHQ

SEQ ID NO: 983723 - protein, 33 aa, Homo sapiens
GRVGRGRVGRPTRSEEYARYDSDVGEYRAVTEL

SEQ ID NO: 983724 - protein, 360 aa, Homo sapiens
MLELAMVLEFTQEDTTFPCTTTTHTTREHMTTQHLHEYPKVSHTAPHTRRLTAERKLGTLYAYKPRTNTPKASHRYPRNVLPERHTIPDGAPTDQRPTPPGRHNNNVGNIPKQAKDYENLPNHIIPLQMSHQTQDTATPSTWAYTDNRSPLAHRPAEQEHVPWPTDTRYDQDMDPHNCTTTHRGLTHKTIYKTTHQPRTIIIHDHKRGPAPPASTAAQDRGTTLQEPVDNAPPGSTNAAPTAERNQHQDHRNTRLETGTPATHRPHKRPHQANRENTPRSEKDTNHTPHERLNETTGHAPNEDEETPHHDTYQTISPHNRHTTRPTIKTEHNGPPKKEQTHTKITEETNNADNNQHKANK

SEQ ID NO: 983725 - protein, 372 aa, Homo sapiens
MWSLGAGGGSSRWPGGGGLKMDAWEVEHVECSWWCLCVARGLSDWGAVSAHSVEMPERVPAETSVAALCGAGGELGGLGAGRPDVMALPAWAPAGSATCCCPATMFHRAPGGPFGPLRACWVHPASLPGLEVLWSPRAAAAVASPGLGLQCGALPNCRRATVAEAAENLNGQESPAPYPINGFQAWLLQPCRMGMGMYSGAASERRSREMLLPLGGRSPPSTVTIFSIIIYMKAQVAPRIRPGNMEGKSGNRSIEVWQGRELSLAIGRRHTEYRKRDTGAHSGAATTGPVERRQAEQNTQQAKVGPRNRETRRNTQYAEGSDKQDTMKKRKRTERRGSKRARWTTTQEKRAHETEGRQEGRGTGEGASSRLA

SEQ ID NO: 983726 - protein, 291 aa, Homo sapiens
GRGLVCGPLFGSSRIAEDDGSCGHLLAWTRPADSGLLCCAPGSLDREEGLGQSRTRPHRNPKSRRDPSQGEHERGRSGRGAPAPAPAAMEKGPHGYGYHLHGEKGKWASNIRLGGARPPAEKAGLSSAGDRTGRTVKGEQRGRRRPTSEVVSTIPRRTQTPCDLAWEVTNPEDGEPDCETGYGATRSREEADARPREGSLGARPTPRPGRPARRMTGGGRGHNEKMNPSGRLDKELHPGRQHDDDLYDHSRLLVTSEKERGHPGGNRASNPGTEEDVTRRAVHSGQRTHDP

SEQ ID NO: 983727 - protein, 62 aa, Homo sapiens
MTGTRLDARTAHLLGATRHTQRPDESKMTSLEAAKTQDIEKQATTAGYTTSGEDEKRERKGG

SEQ ID NO: 983728 - protein, 162 aa, Homo sapiens
MAALELTLLLVTEVPPPPVLTPLQGTLHQLQTAAAMYLGQATNAPPATGAQGPRKRSMRSMRRRPARTLIEPIRLGGISSTEELDLKVLQFKNQKLAERLETNAQDLLKMNSENELSKEEKRQATDDATILIDQSLLEPRLAETVKALLRCHESQRELVFRD

SEQ ID NO: 983729 - protein, 223 aa, Homo sapiens
MVYSCPYYLCTILIDKEHRLPSTRPTSDDTYYTWIVGRGAARAETWPGLEQGSRELLQDPESSPETTNSYEYRLYETVQKLTLYGIYDIDNKNARELRDDDFLEEVLECTTEDQIVSSQVLDSPLDAENLENLDWDGETITVSAQELKDNRVVTMEVEGQKPKSERTSWEHSDTIYLEGTYRQGMIGKVEAGLYQNHEVKQESTLNPTMDTVTQEYPRISAIS

SEQ ID NO: 983730 - protein, 142 aa, Homo sapiens
MRGQLITRTRGRGRRVYQTRGGDRGRNRPTQERTQLEKKRNTITRRGRETPKRERHNTPHHTRHYKNNYTKEEKYINNYHNNSTYITCVYNTKLRKTNVTAQTKKKHINNNTTHTYDLNPNTKYILHTQESNKNETTQKTNK

SEQ ID NO: 983731 - protein, 211 aa, Homo sapiens
EGPTDPRLQKPTDSTGLLPGLPSPDLLRRPLPPPAPSGDASTTDKRSPYDTSSAWRTVNWAQGRRRAVFKLVVDEVDISLVQNAEVIPNCLEEAIAISSTNCIDEDDDTSKQGLIEGKVTIRHQAIQEAIGAELPEMIGKSRPGKPDQYNSVSACMHALWQPIYLYYYIWNKKREDVAMGMIGSEKKKYKTRNEYETYKRDREEIDRRETR

SEQ ID NO: 983732 - protein, 138 aa, Homo sapiens
MTYAGHKKFMMCHYIEDISELYYREYQSYEHIKSAHTDKSEEQSSTHIILLVTQSMLCHIGELYIRTKIIDTDISFTYEYHLYSDTVKLRITFKVNSRLGYNNKLTTIQQRNSHTNSTIKTHSTKEIDKTINHAQHYR

SEQ ID NO: 983733 - protein, 396 aa, Homo sapiens
MSGPYSWLSNTYLYFITWLSRTLDTTQTTTKNKHKQHNKTKQKKQHTTKQNRREKPWRRHAILQHTGKNRTQHAQQSRAAPPRPPDPETAQVAADPPRAADSKTEHRGGESVECKTTRNEIPYRDDKEEKVSEPIVTSHHPDKHIAQGGHIKNDQTDKDSYCIRTHEVANKRIDRTHTSPTNHHIATNRKEKSILHIYSFLPKKPGHTSNTTCTKQGRTHGTTRSEEDSPPQTPPDLGEVGKTRKEEKRGGHTAPTAPVTGSKAPDSQPNDRSGRATRATASAASTQGKAARRTARNGGSKGKHRSSKRGRREARRGREAESARPSARRYARAQQGTRQPRQTTRRIAERRGRSGMADRETGGETPTGSRIERDKEERTGREQRRSAQGDKRKEDR

SEQ ID NO: 983734 - protein, 39 aa, Homo sapiens
ELATKLSRRLQMEGEGWSAMTPEQPGSERGSGGGGGGTR

SEQ ID NO: 983735 - protein, 104 aa, Homo sapiens
MTLDLQGFPIDPGMYILPEAAGWTVRRSFIKDYPQVSIRRPRSNRDYRGALSLFRTGLDTGMWWGDNSYNGEKWNPPKSNLGPRTITKGLGGTKQSSKKGGCNT

SEQ ID NO: 983736 - protein, 285 aa, Homo sapiens
MVPLSSRHGTHERKGCSAQRMSQAEGILGIYELHHVTHPHHLWHEGEEAFTIEDTRPLAVGQEIKCQLAPPCSHMHACMSVHHASVQRGRVEAYKAQAQMDQRSHRSSVPPKGHPCAFETNHALNPFLHLPAVRCGAFGNRPTYSRKATLSERTRGFGSQYMYLGGLEESRGEIGNVTSVSRVPNRRTPFSGWAPFMAEISWIHGPTPLDQIKRRPRKLDQCLTPKVRRPETAGEGDVTLVQGICPCWHALVNTRWNNREKATELDPTLTKRNSLGMDHHRWFPI

SEQ ID NO: 983737 - protein, 104 aa, Homo sapiens
MAERRYFLATRASGRQGAKSSKKWGEGKRKWLGLNWHCACHKVLCIPQPSALPSEATPQGHRPYLPPTISNVALTPGYLWPGNEQGPVSEPRSETKTLVISTSS

SEQ ID NO: 983738 - protein, 148 aa, Homo sapiens
GGGKNYKTLFCVSPPSSLFVFSPSSVKKRVVCATTKNHLCAPPPQKFVCVGREVCAPPRREEKWMCVSLSLCVCVDTLSRAVVQFLFVCVCVSRARAPRCAIKVLLYYIFSPTHTYIFFSLPLHLIFSIYKRVCLSLCVCSTPIDIAS

SEQ ID NO: 983739 - protein, 556 aa, Homo sapiens
MVELKPYRGKQGQNNSISEVEKSKNSAVGITHAGYNVHLSSGLLFRAPSSPDQSALCHSSPHLRDNTIPQFNSGPLSESFIILSQQINHNPIIYTPFVDSMYYNTPEKRRHTQCSQLLPITHSGASTHSVSQNSNTAQHNDRASQRGANKKCGPPLHKVVTQWLNPKLNATRDSPRDTMGSPPNWNKAHNPLLICAVPPVDKRAYCYHKRSRYKEYPNVQHLLTQTSGGEKKHRTICPGRKDTPNENPAHHNNTHSRPTTQRRTQLPKHRPRTLDNNKRKTPPLKPHHRKKPPKQRRNIHEATRSTRQRPTHPDTPRRHNHTGRRPLASTPQARRGPHTHTTRADTIHTPTHHDTTSSSTTPSTIPHTTPYTDTHKTSTSRTNTPQAQTNQKQNHETTNTTQHAHRQAITEQQSPPHPPPHTNTPHAAHNTHEQRLENSTRPRQLPTAQNAKPDNDNNHTTKPHTSDTPKPDATHTHKHNVDTQQTTQQTTTPTTHSRSENRANNPHTRYELSSNRYRDNNTNTTQTELGRNTHTAHNDTIEEKERQHNNNNDTHK

SEQ ID NO: 983740 - protein, 443 aa, Homo sapiens
MLNDMKKDESQRGPAAVQQHVHVPYTRTSDILFADIDGLYPAVILPAGAQELADACSPRLLLPAFDPLGRSIPTSLLRFTDPAAHLLLTASRGLPASPPAHLAVLLHSSIGRSPIVSARPPSLSRAPPRHRTSRSALALLPRSPTPPPPRRLPGGAPWLPPPSRCHPLSAPAALRTALSHPPRPLRHPLARDPCRPTSPCDTPRSPTRLRSPHHDKPPPLPPRPSTTPTDSLSRTARDPPHDAHMPDSPSPSYACTPPPPHAPQERPRPTPPPPPQPRPKSHPVTLTPTATPPRPHTAHPPPPPPPPPATARPPSTPPHSPHLVTDNTTERHTPSPTARTAPAPNATRPNHYAHHTDNRTRNRNGNRPTTPARRPYPPQQTPSTARDPSALYGTTNKTHKHNAGHTQAQHATPPTRHQQPDEHIPTTRPTHRQSRQHTPSTRK

SEQ ID NO: 983741 - protein, 234 aa, Homo sapiens
MRPRTNPLQKNAGIKQSTYGQHYNECAEHNKRVRPKTTQSTETKQKRRQTIQHVKHTNNSYSLNQRWHPPKYRATDKWSHTNTKTNLTGAYEQASTEHNQAPYTTARTTQMMYPTTEHTGKEHTLPGNDYTPKKKTNNKKAFYGSNTEKYATSTLKLKATKRGTTTQTQPIMSQSRAHHQTVAKDITLARNNTPRDQPPHTTTHTRSTKNPEKHRNTNDAESAHTPTAETLSHT

SEQ ID NO: 983742 - protein, 99 aa, Homo sapiens
MTHHTSDKQASAQVRNTASPKTTSEKRYPARRGGKGEPRHKQRSTNQKKTATPDNRSTSAPRDTEDDNQNLECRKQPRTDEPNATKSHAGSTNQHDATL

SEQ ID NO: 983743 - protein, 103 aa, Homo sapiens
SGENIFLETPPTENWSRVKPLFLLEWVFSGSQKCFFSSGGSGSGRGPTLGGWCTVNFRVNHSTRSPPFRSAPDKDWGRVTPRFLGPHQTAFTAMTNIMGHFHQ

SEQ ID NO: 983744 - protein, 257 aa, Homo sapiens
NPFSVKNRKIGRAMVVLACRPSYLVGGGKIVRARNLRLECSGVISAHCNPDSWASNDPPTSGTQCSWDCRVTAPPMPRLISSVFTIEMASSDKDWPRNGLAAPATHPDPPASDLLRCWHNTARPNAAKDIAEILPKKHYTDPRWRDTHTNRRAKAHTNTSQTATAHHAPAQNHRMTPQHTKQTQTPPRQAPEQADKAPPAQKQSEQRQKTRHTHQNNNQQRHNTTHTRKPSTKPTHEHEAQTRKTKPNKRNTKKRNT

SEQ ID NO: 983745 - protein, 197 aa, Homo sapiens
MDEQSKAMQGPPVPQFQPQTALRPDTGLYYISQLLEYTQNHWSRTIQLKLTRRSPALLRCELPSIAYTPHRLHHYWDSHCDCHKALLTALAFTPHTSHPFFTPHLQPHSHTVPHTIFTAIHPTCTHSMTLNTLTYPDETLRHSTRPWRGTPLFPRHPAFQRTLLSPPHPNKRRALRSPRAPKPGSRAPLISTYQAIM

SEQ ID NO: 983746 - protein, 192 aa, Homo sapiens
MKTPPQPSFTRPARTTPRANPPSQQTALSPPTRPGPAPPISTSKTTTHTETTHKTRAANPHTAPPTTTHTSPHTTHNRAGNKKLRKPPHHQERSPKKDFPVGHADNQTLCSKDPKTIQLTHDKEQNTYTNPLPTNNLPEERLQTTHRATNSELSRHTRHTNRDNRPHHRGTPNPSPYTPGPPRFPAAQPYDA

SEQ ID NO: 983747 - protein, 184 aa, Homo sapiens
MRHRASNAQLYIGLRPQRLIPLAAYRANNCALRTNIRFGHLRLSPTTRSANTTQFDPSCRFSHTGSGNLWRKTHEYQTTHLADKQSDHLCDQTLATQDLEKQPPQTVPFGHFFAQGRRFHLWDTYCDEVSHVMHKPQRNDYWVHQQTIRDKPVHSTSWLAPPYDTSYLPRATYRSAKPQNKNMG

SEQ ID NO: 983748 - protein, 217 aa, Homo sapiens
HASPSPGPAGPAAHATAPLQAPSPAPYLVIRGGKRAGRAKRCAADREKPETGRRACARVTHASRRRHPRAGQPTHAASITALGNNGTRAREVLAADAAPGGTACRLLSRLLAGRPMNSASAWTRHSANPSRITGPSTQHPGAHSSHRRLSNHSAFLSHKQPATRYQQYHLTENAPQTHQDCPLTTPTKLHNRYNQPTRKPLHADTSIINNTHTPKRH

SEQ ID NO: 983749 - protein, 385 aa, Homo sapiens
KDYVSKCHAMHRANIFQLKVDIILHKHFSVKMSLPHSQRQQQATQALQAAIDNKALGLQQLSKLLASQRASSRTSSGTSIMLATHSRTKQGPSQNFPREILYSQCSHGDHISSKQNLSSSIYMLHHKTYMHSPKLSQGHKGTYGQQASKTMPNSHAQANSPTIRHNEHHQLAHLHPTPRANKRSYQKAPLKQQPSLNLCSSQSTGSMPSGYQPDEYTDTPPLANTTTSIQAFMAHTQRSSQAEQQLIPSRGQGLPQGNTNSAARPTNQPTDLHRLAARTLTITSITTHQKKGKSTKKHRKISKPKRPTDPTHTTTRQSTQQTAATEASEKGETQTQNTQTTQKTQNPRPRETQVSTNKLTPRPHKHPTHTNTQQKTQTTKTHTQT

SEQ ID NO: 983750 - protein, 138 aa, Homo sapiens
MATSGDPTRPADAKGVKPTALGCTQGERRKQPPREKDAPPPERGNQLGRSERHSKIGIPTPTKRRATRGKPPGAHALPREANKGSAKKHTRGGQQEHEAQHQIGQLNKKNTRQKTESTKRKQQRRTRETHTKIRQNET

SEQ ID NO: 983751 - protein, 245 aa, Homo sapiens
MWEDNTPAWKSTPQEATHIRRPTDGRPLPQQLSRGYYPRGAGNSPNTPSQIITASADTGKNSTQMKTTRQSGRPSHQHYKTTTKGRYPLQNTQHNSHGYSHPTNNSAAQIDPPTSRPIKRRPPTTRSRGMHNAEKSSPPSTSRQHNERNYEYAQRTHRYAQRVIQDTTRRQLNVAPPLEDKKRNTTIEHTQPNKSAIETENRYAQHRITHNEAFYDQPEHRSYTRTEASSKTRRNQTPTQVNNNT

SEQ ID NO: 983752 - protein, 474 aa, Homo sapiens
STLNASFYFSGIKPLCGTHSGSLSPLHGEPRGWWVSLTKGGSGKPPVYRETWGELQLFLSRRSRGAQVYRDRLYKNVASQRVALGKVVPRVWQCVSPGLEGVSSSLDYQPFSERASIGHRCARRTRKCPSVPPVGVPGNEEAYTQRHRKPARGARVHTFARGGTRWWALAPRPLGVPPQGYASCARTGGGTRCETTLVAPQRDMTGAPQPRYMRRCEPNPITLWDDTFISTPRTAMRWRQCGVRFPPEVSQKPKCALLEHPVGYASRGPRDTGGLDAISCATVGPDIISFQKNKPLRSPAGRKRGAPPQRGNGNTPPQVEPPPRENAPLTGRGHAGTTGGTHRHRPPRGGTLGQRRSQWILWNPKERGPKFVGAEPAANYSTTLNPTRDIGPPRKSIRGGHGGPTEPPAHKVAVNPRAPGNDHAARTPYGGNNSGVYPIPGGQHGHHEDPRDHGTYYNERRGVDHPTEQHKRDD

SEQ ID NO: 983753 - protein, 137 aa, Homo sapiens
MRVENVVHYNILKNNTYYAEGTSNRVTPTYMGDQAQNSPHRPATTKPLTDPHQPQTHKRVGENQRSGNTPKHEARNHREARAKIQWGEIQKHTRRVLQRRAHPRRRRHTQHKHETTGRRAPAQPAEKERIYPPTQQG

SEQ ID NO: 983754 - protein, 338 aa, Homo sapiens
MLAATGDGVGAGEQDDASPFCCRNLSSDRRTGSGAQETAAPGPVQIRPQRSRESYGAGTHKGQPGAEATEAMPAEPSETVQATGQPSGMQARPRGAKHAPTRTKQASEAEDRIDRGSQTRVTRGALHSMHCMDKQTRMDYPCMGNGIPQDHIRPPLQHLTTNRQRAQLSLFDARWSTRRLHDPTQPAMAHPTMMPSRYQREMLKDSNPRANTHQAYQSGWADDASRQGSWEPSKLHRTKAKATRMTGAPSDGQHGQMEPQVDPLSKGRRRTRRDGEHHIHSTPTRRHIPQRLGNQAPRKESPTSPREADDETAKTKEQQRHQAPAPQGRKDRHRKRTE

SEQ ID NO: 983755 - protein, 218 aa, Homo sapiens
MKEEEREQKKPTHEGPTKTKREPKEQRTGEETKSKRTNSTTHKRGRRRERDTRQDKGHTRREKMRQETETETHRGARRAPHQRKPHSHTGKETKTTPRTGEKAGRKPRSVHTQQGDDESARKTDNTEGPGCNAKARRTREDTEGAEARRCQTQNEQQEKKNVQTRRTDIARTGEKRRRGRASATSNDMQRGTRGDRGRQRQRRRRRETTKARHEIAET

SEQ ID NO: 983756 - protein, 150 aa, Homo sapiens
MGPLFMNGLHCMRMDTEIGHSEHEKYARHPPHTGWMGYPAGFATVCQQDEEVKSTLSMLPMMLPGMADCSPRCLVSGGLLRYHHGKPPALPHAHGVSITAQRHSGTDSDYEKTAEGQAEIANDVNHQNTIQTEDNALDPGSNTPASGYEA

SEQ ID NO: 983757 - protein, 421 aa, Homo sapiens
MVERGHTVAAKDEAASFDLRRFLTQTAGWMARAVCIGSVDCGIVIRPSIIWMQGYTQMPHEDLRQTVLRDINTRTQDAMPHMSQCHQGMLAFHGPSALSSYGGRRDHFPTDQTTTTRTAKYLGPYRVDLLYLKLSRDLPSRYKSGSLGYPSTKPSEAHVTRTPDRHVHAMREAALMLEGQRQYTISGISLFTSLLHEEVVLGLTLSLTETTHTGLGQLDRLTIHRTTARTPTSRDPNTLPHALPYPRCTSGAHHNYQTDPTPYHPSNSGRHHRRGVPKPAPPWRYLDAGRTKRRRTGAAPEQRHTHTAGPGARTTKESPLPANQAQSQAHKHTRDHPPATRSAHHTAKTRAPTTHGPERHHRAPPNQAHGNPRDTSYGRPTTPGTHYHQRHNHEHAPQAHTQQTNKTIRTPQRTHQARPRH

SEQ ID NO: 983758 - protein, 253 aa, Homo sapiens
  misc_feature (39)..(39): Xaa can be any naturally occurring amino acid
MAGRISHKTDERSRKESLHGHGRACLEECAHTRGPSLAXNKLPWRGHVSINKSWNTWHRRTAGKPVCVYSHRESWSKVHAHLFGEHTMWNATLWLEALIEVVWERKVRVLERRFAMGKTKPKGGHRMLVTRHMSELKYTKVRNGFKSICDIWDPEGVAIWIPLRGLWVVSFWLGEIKDIGVLEELYGEKGHYGVTTSLTAEKGIELVAATKVNHPENLKAPQLGHTRSYTIVVGNVTSNQIGRPLGVRELGLG

SEQ ID NO: 983759 - protein, 137 aa, Homo sapiens
MPRPAPRSFPEHGLSGSHLHRDEASEVLAAAGSGAGDHQFAPMRMDSASWVWEFASRGPVLKRRQPEDEQLLLGTGNEPSQLLSPCGLSCRGHMTSHGADSRSEWSRRTCELVNCGSDTYRAADVSLWTTNQLPGMN

SEQ ID NO: 983760 - protein, 172 aa, Homo sapiens
QVSGRLPLKSQEWERKRLSINDCQSLETTLVFGAQSTHILRHHESIRCVLAVDIKNQLKRTYDDRRRVWRNGSSVASILEFIAMRLIRIKTVKTCTRATVGESDTCVYHPCDGKIMRPSARYLVVEHNHSRVTTQGSTMKHIIVNRDTEYTRGSDAREHEPSAMIRGCLLLD

SEQ ID NO: 983761 - protein, 109 aa, Homo sapiens
MVTTMLEPSANMTLGFTDGKSPVKDGHCRWKHAALRLWDWILSTYSSNLTSPWAGDLQGCSQKMWGDVSSSRIGQNDRRSVSKTRNVGHLMFKTTVNRRITFKRPKRLR

SEQ ID NO: 983762 - protein, 185 aa, Homo sapiens
MPRGEGAPRNSASQVPPHVGTSLETKVGLTNLAKIQIFQGGDGDSPQRVPPRGGGGKYKPLRDICALWTEKFLNAFTKVAPWCSPHANLAKAVNYMSREQDRKMNHTKRRHRYEAAEKQRQRDHIQEKTDGRHKKTASNPAMRHDQAKGEISAKPSRGVRKKDTSAIGEETTRGHGPTLHRDRQG

SEQ ID NO: 983763 - protein, 153 aa, Homo sapiens
MNHPICVGSHKVASTQWAVEVFQPVSSAKESHPGRELYTITCVGTPTPDFEKVHRDVEIDNNKIWLKNRTGTPVAVSISEGNDTTKRGNGDRNRQDRKKKKKNKTKNEAHNEHKLTAEIHKKRNTKQESERTNKDNRNRHAPRDNTAREKNPN

SEQ ID NO: 983764 - protein, 261 aa, Homo sapiens
VREGGKRTAAGRLGAAAALGGAGLAGGRLSGTHSPCALALGASPSLASLVSWEPRGPGCWDLVLCGLPYEALVAVPRVALPRGACAAPRRLHCAPCPPGPAAGVSCCAHSCAVRPPVRRLRREDTGSAQRVRPLRALTRGPGASSVRQLGSTESALVMSPECPGAERRAAHQFAGARGPVRPYQPGQVGERGCQRGPGVEVSRGLPSRARGTRAPAFPVPGLPRLLARRLLQRAQSRDSASGNLPAEPGVNAAKPDPGLHF

SEQ ID NO: 983765 - protein, 275 aa, Homo sapiens
MWYVVYIFSETDKRRTQEGGLVREKGFSTTHVGLARGNPFQHKRASYHARSLREILRAYLSEALLHQKQRGINPYSYQAQPTLGYAKVEPVCANSQYQGGHTPGANMGLGLGSREYITLEPVEDQVGITIGGATNGVVTQAGVHLKKQLGGTDTQLRAHLVSPTLGSAERELDAKHQRGSIANEMITPQGYHSNRGATPGVRPPQGADEKHTPFDCGNTEEKPKHPVVKPRQKGPREPQHTAEVAAHKKHHVSVKSHQQDPTQDRCSTSERNEWS

SEQ ID NO: 983766 - protein, 378 aa, Homo sapiens
HTCQSVSMPPAPVVLSAMAAFFRGQTSRSRPTRPAPPLHAASHPACTGMCDATHPSSDTHATRVPVAMPRNCNTVYDNTQHRVIHKLLPQVTTTATPLATLEDSDARTQTDNLPLATLHEVPQTPFTSTREWLDSQAEKLKELDKEIRPFRQQLGRKQTAMTEQPWQSLQNRVTELESVDKSGGNVARNTGLLESQLSRHDQIRSVHDIRLADMAPALPGPADRQLQRSAHLATIATYKRRNAARPATPEHPDPYTAQPFYTGYLAYTMRAHAHPDPRRLGAQRPTAPLNTRPHVLATNAARHPNTANANTTTTPAALRPPPPTEAIAPPPPAGTRTPPNTIPTNTTTPIYTALLTTHHNTSSTPQPHPPPPNHSPPT

SEQ ID NO: 983767 - protein, 189 aa, Homo sapiens
LVLDRERAPFFFLVGNRVWLGGTGWDVAVDVWISGSLATSAWLGVQRDSTGAQPPGVAGDYRHCATTPGLILGILECKTMGVPPLLGQGWVLELLDLGDPPGLGLPKWLGDYRVCGRHWDPGQERKQSFKPLWILWPYQGFSPRQILLWKRYYFPTILHYFPKGGLVFVVNVERFINFGDWREILFSWR

SEQ ID NO: 983768 - protein, 341 aa, Homo sapiens
DGCVCKQSYMEALQEFGPISYVVVMPKKRQALVELDDVLGACNSSELRSRQPKYTLLVTQAICTISLVTSYQKIIADPGDSDDSRSVNSVLHFTILNPIYINTPRIVLYNTTLYILSGPCPENCHFPGKNGRSGASVAILTSVSKDASSEDPRASSSNRGLDHLILGLYAHTAQIDIRQQPTTAGTVYNDMTHGILYATNTKTPTFSRWNKCRPLWQTTPPDNTASRQHHLLASARIKTRHDLIGTAPHCRRTHQDHSTIGINGHYRERQTRTAITSTTKVKPKDTETKTQQRESNTTRAHRTQPLRYENAQGTEPPSTVDTHTARQQATDQHQQPTAQRS

SEQ ID NO: 983769 - protein, 128 aa, Homo sapiens
LPPEQPGVVKTTPSELPWERTRFISTIVVIGLRRFGDVHHYWASDLSVRCASDRRKNSLEENFRGIGASVSLVPHGHKASLHRYALACLGIERDKAARRESSGKSTSLISSYGGKNLETRDKVCDDWT

SEQ ID NO: 983770 - protein, 101 aa, Homo sapiens
MKVICRYVVHTSNPRQQSRSNHLYYTLIKKKAYRSFITRTILFPLGSKIIKQFVIVGKPHGPLERDFARILQSNLHNTFKQVISNPFMAFPFEPLSRGKAH

SEQ ID NO: 983771 - protein, 68 aa, Homo sapiens
  misc_feature (58)..(58): Xaa can be any naturally occurring amino acid
LCRKYGDLIDKQDSYSMGGSGGMGYPRIEWRMVEEGGDVWVVAQNRMTLIQLKDTVSXGNGEFVVRRQ

SEQ ID NO: 983772 - protein, 440 aa, Homo sapiens
VRPSGGGEHVSEEPEIGPEYPPGPAAIAGAVAQQSHRTKHVGTGLVSISRISVSRCNTEPNGPYTCALAYWPHKDPVIRDEKEALYALTVLEMCNEPRVGRSSTAQVANISYILNELIKVSPQQYLESPGPQEQVTRHSVIRHTLSVGQSGIPEDITDTRRLSDAEETKELYNTDPTLPGGYKSIPQHRPWPKSSIILMLMKNSPRLLTRASKEQAPRGPSGLQNRVTSTEIRARRHTHTHSEQGDPRRDTSEGRKQRKTMIHGHRNDQSRSMHPQDHRQRPRPNQKTRQSEIDTQRKRETTPDTHGTRTPPDGPRQHRRNSDGRVDNTTGAGRENERDRQHTTANRGRGRGKTRDTKNKRRKRRLPPPKHEGNRKKGGQAEQKQQTGEDRENTANTAKARQGACSSSTRRQENSNARTAARGTATRPGRTGPKSGQTTQ

SEQ ID NO: 983773 - protein, 309 aa, Homo sapiens
RDAWVDHASESAEPGRTRLSRVSNLYLRTFSPALSRDHAPIAPQRMVSGWDAHCTLGAHDEWQGTVYTACHTLTSRSISRDTCAGLSPAARPGAPELQGVPSDSMEKTTHPEAHVDTQDTKYISWKGCFIAELWWMRGASLDKHLDTDWTSCGPEARDWLAMTPKTSMAATNTKFQVAHWLGLCLALVTRALTQSLYNVIKIRFQSFPGMSALSRTVTPAQRYHGIPPGLYGQILQEDGSDQLPVATGTRSSSRLHSIGLSQPLPKAIAHSPHRCPAPRSTEETAVRPPRHIPMHLRHSVARTPNLPPY

SEQ ID NO: 983774 - protein, 174 aa, Homo sapiens
ERIAGSAMSSEPARTTTEHPSHQASVGLLETPRDAVSGSPSASAGQRGPKPIAHSPDEDLLGRRVRASQGPRSTKEFCTYANVRGSKGALAYQDTPSMMAGPRHLSPATSHDWWTGEIVSQWEGDEDHHNKTDDPSPNPKNEKLQAGGGSYIYLRLVDHGYQWHESWSGHVIRS

SEQ ID NO: 983775 - protein, 395 aa, Homo sapiens
MCEYSDGQAEKWGDDCHWPEAGASGPKGSEAHFSETEWACDSAEEDRPGHRAAPPLLMVMSIHEKVASTSAVLKAGQTECFWQKEQHKQRSGNPRCLQFEGGERTPHYHPRHRKAVHLRHQGQDTWLGLQTLARMSRRTRGPVERAASRERRRKAEGRSRSQPPTPTSYPKDRGRRNDGRRKPEDRMKSKRRKLRHENNTPREGIHIQERSLRTNPRGSSHIRVAYTEDVRNTDQDGKSESEITEQKKPEAAEKEITAIAGEHRIEGNVISQQNDEQYEGETAGRWGQREAKIKGGGTTENGKQDIKTTTNKHTTDQGEEERNNGRGGVQETEKPREEWAVRGGRGTRESENEDEEHAEEGRGEEIGEREREGRKRAKNAETDGKRTNRKTKADA

SEQ ID NO: 983776 - protein, 164 aa, Homo sapiens
TWRKTHPGLTLKKPGRVGFKEKRQHPVHMATALAKTHSSGAKPQPRPGPYQGVRVKEPSEENCVRRKRGHASSGAATLHHTGGGAAHHQHPWTDHTPSRWGPSCLDMEGSVICSDRGGWPDVPVWFSQPHPGTTVQTARESPWVALHQSMCAYEACQDDPHTRD

SEQ ID NO: 983777 - protein, 405 aa, Homo sapiens
ISVDPRCRVRRERRCWVVGRRRAGCVCVSDDPRYGVRPERVCGDLSRTVSEPPLEDVVFTAALRIRRLVSAHRASRPALCPPGSHLGTPRPLVLPLLAMVSALARPRCSDSPVQVPCPFGWETCIIGLKTSLRFIPAPARAQTAAAVRRRDGRARGVVSVLAPIQRERTAQPSALHTDSAGRARSTTDRTAGQTGCSPAMEANTAAGGRDGAGVQSDRLGIGNDTGDSAPRGKPEHGKDPGTATTERRGPEYSRDGDWRQYVKPNELKAEHGGTTGPTRIHENTEEEDRKSQRNHKDNRKKTEPEQEKNKRETEKSNRQKREHEQQENNKTTKHEQGATEKNHESAEREERKRREKDKTINRQNRRKSNDKNEQQNERQKIDESEHTRRDDKTDAHKRHDTRDQL

SEQ ID NO: 983778 - protein, 47 aa, Homo sapiens
SDHLIRLLGSQSAVDYRREPPCAANRRINSPFEVLVDIDSRTVGQNI

SEQ ID NO: 983779 - protein, 42 aa, Homo sapiens
MGRASVDIGGGVVGVMSKKILLIYSACSGVGLMTGCGSRDIR

SEQ ID NO: 983780 - protein, 74 aa, Homo sapiens
SGCKVSRCCSHAIQSGLVIASYEWTNDPPLVLKEAASGTCDTTMCLTVPLPPAQEPRTCATIKALSGTCRPATQ

SEQ ID NO: 983781 - protein, 78 aa, Homo sapiens
LAVRDTCIQRTLASRDTCIQRTLRIQRTLGIQRTLGIQRHLASRGTWHPEDTWHPEDTWHPETLRIQRTLGIQRGNEL

SEQ ID NO: 983782 - protein, 64 aa, Homo sapiens
LSVPSVPKIKKYYSHTDIPAYPGEPRIPEPLVPMCSGMRSFSRRTGAGTIGAAELLTLSEYLEE

SEQ ID NO: 983783 - protein, 74 aa, Homo sapiens
MAMRALGFLCGEQIKGSKVRSGDKCEEALINIQPRHNKSLGQNNSRGMVRFSIYQNEDIGRNIKDESLSPGRVH

SEQ ID NO: 983784 - protein, 164 aa, Homo sapiens
MAVKAIPLAVCWIVIIVLLLPASLEVMPALNWSPSAPVFSGSQNGDLVSSCCGHTTAPEPSRATKSHATSIKTVRAMLSPLVLHAVTTCPNRRTCLVPCDGTWPVMYFIGLKHRPLMGPSCPDKTSRSLPVCMDHTTISKASCAPCRGRSHRSQSNRHNRRNWV

SEQ ID NO: 983785 - protein, 95 aa, Homo sapiens
RMWQDWAHLHSPALKRMWHQALLRSGDRVRMDPPCTNTTAASTYLNNPYGSLAVWANAPWLTPVIPALWDAEAGGSPEVQEFETSLVNMVKPCLY

SEQ ID NO: 983786 - protein, 193 aa, Homo sapiens
LDGSSRMQVSKQSRMTIAQKTMGRENPGDTHRVQKWHRAFPRKKRKKAATCKQELPKLMDLHGKGPTVEKPFKCQECGKSFRVSSDLIKHHRIHTGEKPYKCQQCDRRYRWSSDLNKHFMTHQGIKPYRCSWCGKSYSHNTNLHTHHRIHTGEKPFKCDDCGKRFIQNSHLINHQRTHTGEQPYTCSLLQRTL

SEQ ID NO: 983787 - protein, 30 aa, Homo sapiens
MAICESSSYCSLSCLVAIRINCANRVKRLC

SEQ ID NO: 983788 - protein, 40 aa, Homo sapiens
KSARYPVRWPNTVRWPNTCRWPNTVRWPNTVRWPNRCVGP

SEQ ID NO: 983789 - protein, 108 aa, Homo sapiens
TINTRLTDRWSYQTTYLTRSSSYIRREQMSRTTSEVDAHNCSCHKLESKTTSRWRREPGMATKFQVQGLQCSFLSKPEEGLFKVVVTFGRNVVVLKILLSVDDNGYRL

SEQ ID NO: 983790 - protein, 107 aa, Homo sapiens
MGFVFVMESRSVTQAGVQWRDLGLLQPLPSGFKLFSCLSLLSSWDYRRLPPHPANFCIFSRDQFSPRWPGWFRTPDLVILPPWPPKVLGLQHWREPPHPAHNLLFVW

SEQ ID NO: 983791 - protein, 83 aa, Homo sapiens
LPSTQSCDEKVWCLIVAGGGGDDLIAMLVDSASLCCRQRAIVPLVCFSTLSRSCVPPRVTGADDLQYPVMNVSTFLDCVKGDP

SEQ ID NO: 983792 - protein, 33 aa, Homo sapiens
KAHTPSDVESIGRILPLLISSLPHDNIHAPSHG

SEQ ID NO: 983793 - protein, 67 aa, Homo sapiens
DVYSATAVHASLDKYLSRLWAPLLTSRYLLSWSHGRRVFTTAVHASLYKFLSTREHCADLQIIVKLE

SEQ ID NO: 983794 - protein, 63 aa, Homo sapiens
VFSYMRCMAPWTSSWRDVSTVADLQISLSGAMVDVYSPPAVHASLYKFLSRREHVLTSKYRYS

SEQ ID NO: 983795 - protein, 38 aa, Homo sapiens
MHVLMYGKKPRKMNSKFGSCGELMNGEKGNGTLNDRIR

SEQ ID NO: 983796 - protein, 55 aa, Homo sapiens
VYNVGTHSNPVEDINWMQLYTDPDEFRANHQPLDVKSNKIHVVHSGLTFNDRIRR

SEQ ID NO: 983797 - protein, 89 aa, Homo sapiens
IHIMPRTHITLRHFKYLICYPDYYLDYSYISLPPFFPITKPPLRPPLDIPPPEPTSIRHLYSLLWRLIMHPLPSHGNLIILTPLNDRIR

SEQ ID NO: 983798 - protein, 37 aa, Homo sapiens
MLYTYSQEAARASYMWALNAHMSDDILNSRPTKIFDE

SEQ ID NO: 983799 - protein, 132 aa, Homo sapiens
YRGPLRGIVVHVYYEPSGRFISQCGDLTYYPPVRCNAPIGTTVLALSPFRQFQRYHTISAGNPRSSLLLLMGLSFQTSLLDITLHLESIMREFLTFARSGPVNSSRRYQLYTYSQVVYVSSYTLGPYRHMSD

SEQ ID NO: 983800 - protein, 33 aa, Homo sapiens
RGIAHAQRLTELTFHAEGPQLTTSTGAVQIEWL

SEQ ID NO: 983801 - protein, 77 aa, Homo sapiens
MAPSVIIFPYRSRLFSQLLRAPFYRLYILLPSSTPDPSILAVNSCITYSQAAARASYMWALNAHMSDDNLNSGRRKS

SEQ ID NO: 983802 - protein, 157 aa, Homo sapiens
MFEVLLDLNSVYEAYNEIVHLVEESGHLDCLEEDYVYLSVAVDVACYAADLVQFEPVHLFDGEKGDTVGVLGYLHHVLQQKHYYYFQLDPQGLARQASPEQVVVFAVLGVPRPVPCGPGPVNSSCRYQLYTYSQAAVRASYMWALNAHMSDDNLNSG

SEQ ID NO: 983803 - protein, 41 aa, Homo sapiens
MRLPGPLVLRVRFAPSSPYLAIKPSAELLGLFAELLSGNRT

SEQ ID NO: 983804 - protein, 43 aa, Homo sapiens
MQVLLWYRVGCRVCSIPVERNAQTSNFGADGSSLVGFPSFYSD

SEQ ID NO: 983805 - protein, 43 aa, Homo sapiens
MVIGNSSCRYQLYIYSQAVHVLATCGPLSPIMSDDNLNSWPTK

SEQ ID NO: 983806 - protein, 54 aa, Homo sapiens
MAPAVAWRPCVVPSIQADPSIQVAVNSCYTYSSGGRTLPSNMWALNVPYEDDNL

SEQ ID NO: 983807 - protein, 57 aa, Homo sapiens
MTCSMDRNPNEMFKFNEENYGVMTTYDSSLSSYTVPLEQDNSEEFQTEESCVLAKFE

SEQ ID NO: 983808 - protein, 42 aa, Homo sapiens
SRISSRCIGGADGIRITEFCHRFLEGKIKPHLMSQELPVRRG

SEQ ID NO: 983809 - protein, 64 aa, Homo sapiens
QYPSMHACLPVDVYSTLLVHASLNKFRRKMSTDADLPNIVKAGARSTCIHHCDALPPCNKYRRP

SEQ ID NO: 983810 - protein, 46 aa, Homo sapiens
THSIQRPKSSKQNNIIFLNKVHATVIGYKGCDLLAILGMNNSGVPS

SEQ ID NO: 983811 - protein, 56 aa, Homo sapiens
RGSRTVVHTCTVVHTWSLYRGGRSIGGDEQQCRYEQQCKYEQQCMYEQQCRYEQQC

SEQ ID NO: 983812 - protein, 47 aa, Homo sapiens
SHTQYYGNTTVIGVLDIYGFEIFDNNSFNNFCINYCKCETAVSSPLS

SEQ ID NO: 983813 - protein, 47 aa, Homo sapiens
YTSARPTFVTVNDYGSCPQGIQATGCIEVRGEGSVLDQKARGADEER

SEQ ID NO: 983814 - protein, 66 aa, Homo sapiens
RAGNDSNIDSSRPCSPDTHARSAAGDPGGQLHLLYLSWPPFLSGLPRGLPAFTGALFQAVPVRRPG

SEQ ID NO: 983815 - protein, 38 aa, Homo sapiens
AIHYALHCCGLAGVRGHSLSQSICPNEGRTRKPSPVKS

SEQ ID NO: 983816 - protein, 91 aa, Homo sapiens
MTHSCAGCSICVIFETILSEFKTQIGTNWTGRGSDTKKRIPGEGGSCCVRAIVESHQFHSDATPCILSHFLAPAFLQELSGVNMTKEQHFP

SEQ ID NO: 983817 - protein, 87 aa, Homo sapiens
ATSDRVITHSERVPTILTEFPTTDRVLTSERVTHTLTEYLTSELSSPRIRSDGDGRLRWSTERYRDLIPEKPVRRTGKKYSFLSEGQ

SEQ ID NO: 983818 - protein, 35 aa, Homo sapiens
AVLEDPKYALTFRIEYKYNIKYAWTSRANGTRSEV

SEQ ID NO: 983819 - protein, 118 aa, Homo sapiens
LSIGRLVSTPTRWRAPSGSSTHCPALPGLPGALQAGMEREQWRGTVPRFCAMKYDDHLHKFHENDKGAAAGDLWHVIPRALPRDSDGCASTPTGSVHLIHYDSPEESLMNNAESAASG

SEQ ID NO: 983820 - protein, 98 aa, Homo sapiens
WWEAPLISLVIRPKNDVSSEFYAPLVRALQQLEPVYNSLAKKYNGAIQGSVLYALMYVTDNDVPSDRYKVEGFPTIYFAPSGDKKNPVKFEGGDRDLE

SEQ ID NO: 983821 - protein, 55 aa, Homo sapiens
AADSELVLNVKTAIELREVKHCLQTVWNKPTVKPLSCDICNDVVTAAGDMPSPLH

SEQ ID NO: 983822 - protein, 37 aa, Homo sapiens
ESYNQKYVDEATKKEIKDIHIQYDRTLLIADPRRCRV

SEQ ID NO: 983823 - protein, 47 aa, Homo sapiens
SCHDLGHGCVWLRAVLSAHLHGGSSGLMLACRFETEKNNGAGYFFGA

SEQ ID NO: 983824 - protein, 83 aa, Homo sapiens
PSIDCTCDTYEVPNNQHVKVRFKLLLPAGALALHAGTCPMDYVEINGEKYCGARSQSVVPSNRNKITVRFHSDQSYTCPGFFA

SEQ ID NO: 983825 - protein, 48 aa, Homo sapiens
TIKVSARQTLCSTHAHTKDNEMQNGGCQALEEVEGSESQCLMGTELLH

SEQ ID NO: 983826 - protein, 145 aa, Homo sapiens
AEVIQRIQCTPQQQHGLTMYWNHLHSSHGTGKLINEQQWVLKAAPKWRFGFQPPSDSPVRRSKLQMGRRQGAQVAPVSGGCASSPPSQPSALCQSDTLKCLGLCFSVWFGKQQLHRELGVLLLPFHRGTATTSSSRDAPELGGHT

SEQ ID NO: 983827 - protein, 71 aa, Homo sapiens
ISSATPKTGMRLQGECANNTPGIFTSLETSIFKKCKKDRINSHLFAILIEQLQAICLNMAGRSPLSFLLHS

SEQ ID NO: 983828 - protein, 42 aa, Homo sapiens
VTLAGSFVIPFVGGVQEGWRLILGAFPGSSVLGISAPLGRAR

SEQ ID NO: 983829 - protein, 132 aa, Homo sapiens
  misc_feature (2)..(2): Xaa can be any naturally occurring amino acid
SXSRGSLSCQRVETGLELVYRTEVVKNNLNPGVGGYKVSLSTLCRCEETRPLKCLVLGLRLSMESTTSSDEFSTTFEEMLKAFEEGAVPKCACVNTKYKHEETQFITNSESGRPCADLKFHMGATPSLDYIM

SEQ ID NO: 983830 - protein, 69 aa, Homo sapiens
FELAVQRKIAPLRSSLSDKAIPCLKAIRKKDRAKLDERGKWVGIEYRRTIICPRKVPLFPHLSLLWRRS

SEQ ID NO: 983831 - protein, 113 aa, Homo sapiens
VPCTQSWPVPDFTRILRVCSVVMSRTPRSYELSATEWSREYSRLTLVLCTATGLLLEIYGRQRKAASSIDGFVWEHPADQPTAQGLVSHHLASGESQLVDQALVPDNLRQALQ

SEQ ID NO: 983832 - protein, 97 aa, Homo sapiens
MQTLLLCHTPRHSVAHGLEAPEDRCSDSTQDYCISIVPHREKSSARRGPKNDRTMSTPTKTQLCTAQINHSPTTGQLLTHPIQTAHKSAPSRLHLLL

SEQ ID NO: 983833 - protein, 68 aa, Homo sapiens
TLVDPAPPDGGGDEDLPPNPFFAKWAIIEESAKNNSLIIPTIIATITLRNLYFYLRLIYSTYYTTPIY

SEQ ID NO: 983834 - protein, 72 aa, Homo sapiens
MADEISSKSPVAVQSTKVILLYSRDHSVAESLNYVASWNMSMLQTRYLVKSVQATTDNKELKTVTFSKLLLP

SEQ ID NO: 983835 - protein, 107 aa, Homo sapiens
MARTSVQGAYCVLSAYCVVTNRYDQFYDDESDPYEELKAAENKKKEAGDGRRWGTWGQERSSGREPNQLQRGSANSCARSPKKDCKTPLTPSVGVFDKKDGDARRPM

SEQ ID NO: 983836 - protein, 81 aa, Homo sapiens
TCVHGPLELYQAHHDLEIGRSINGLSTETSPPITFSIKWLYRIFVHEVIALLGPTINYYHFTLKLFDQVLTTNSSYSLLLL

SEQ ID NO: 983837 - protein, 117 aa, Homo sapiens
LFLGSRAGFTALTYADEALGSGLVSAGLFPDNRGHAVMLPERWRPEISSMSPVAVHSTHVLLLYFREHSVAESLNYVASWNMSRLQTRDLVKSVQATTENKELKTVTFSKLLLPRLE

SEQ ID NO: 983838 - protein, 138 aa, Homo sapiens
IGAFCVRRSCSVLAQAHTTVDELARREDVRHYLQGLQQYLQELLLKATNEKLSVYAALQRQLLSPGTVLILLEAQACSGFLLDPVRNRWLTFNEAVKEVVVSPELHHKLLSAERAVTGYKDPYTGQQISLFQATQKAP

SEQ ID NO: 983839 - protein, 31 aa, Homo sapiens
MKKEAGGGGVGGPGAKSAVQAAAQTNSNAAD

SEQ ID NO: 983840 - protein, 110 aa, Homo sapiens
PRRDRKNPLTPSVGVVDKTEETQPPVALKTEGMKTSLEEDLINNFRVKGTSFDEKTRKGDHLVNEDSKSHLTTQGEGGEFTVDRPIIDRTIRGRGGLGRRSRRPWTQNAP

SEQ ID NO: 983841 - protein, 85 aa, Homo sapiens
MRVLRSPRSAGSLPNMAGPAGMGTCAHLRLLRQHVLGLPLLPLEHRAILPIVDMFTIAGLFHPEQRGTGDMNLPACKQRLWTFGL

SEQ ID NO: 983842 - protein, 49 aa, Homo sapiens
LRPSAGAYELVYAEYRDIELMVMDIRNAYAVLKYIIREELREALIAQAG

SEQ ID NO: 983843 - protein, 33 aa, Homo sapiens
MLKYKWANCDSSCFHINPSHTRTCDPYQAYLDY

SEQ ID NO: 983844 - protein, 93 aa, Homo sapiens
MARTGAGDKDDITEPAVLRSVPLTSLHLRPSMAQNSVVYNYCIPAIVKLLNQPNQWPLVKATIGLIRNLDLCPANHAPVQEASGHPTEAERAY

SEQ ID NO: 983845 - protein, 169 aa, Homo sapiens
DIRRVLVVTNRFDQLFDDRIGPLRGAEVQQQNTKKEAGGDGVGGPGAKSAAQAVDQIKSNAEGKQLRTESQKDRKNPLTPSFGVVDKTEETQPPVVLKKEGLKTELEEDLINNFQGRRGQYLIEDQKGDHLVNEDTKSHFEDRGEGGAFKVDETIIDRPIEVVVTWQRR

SEQ ID NO: 983846 - protein, 54 aa, Homo sapiens
SWAYELRIISNGPLGIGEALGTVVRGLPAARFCVSYRQLLPVASPRTLWCLQVP

SEQ ID NO: 983847 - protein, 101 aa, Homo sapiens
SGHKSFYAQVPETMPVAPWFMHEASSTEPQSACHLARDSVGLDDPVPPVASVHGDDRELGQDDGPTDSGCHLLGALNTQTDVGIVIPDSDKCLELLLPRLE

SEQ ID NO: 983848 - protein, 67 aa, Homo sapiens
MARYSVPAPIKKKSCFTCLPHTARWSMACIWHTGVCKMSAQLVAGLEVMCVAVTCRTIATRMRFLDS

SEQ ID NO: 983849 - protein, 114 aa, Homo sapiens
DGLCVASRTHYLCLSTETTRSALLIHDQMVDRGDIMCVLDDGMPLYRTPHEWGRLIIECTSRLVLETGLRSADNLSLLGKPLPERTEVEETDEMDQVELVDFDPNQERRRHYNG

SEQ ID NO: 983850 - protein, 50 aa, Homo sapiens
REIGRRGGFRAWLTREGGSSGAAFFTLEAVDARQQLGEGRGHLLFRYAGK

SEQ ID NO: 983851 - protein, 43 aa, Homo sapiens
KVRSRGPRTFQRMGSSLMFLEAILEEGDGRLCTRCHGTCTTKA

SEQ ID NO: 983852 - protein, 84 aa, Homo sapiens
DPTPLTEVKYVLDLLATSILLPPTVCQSNPCPAGTGVSGERQLQVHHDELWTVCWGSQIAALFRLPRRGADRGGSGGGGGVGCS

SEQ ID NO: 983853 - protein, 57 aa, Homo sapiens
TINAALSDFSAIFIGNLCAMRARWRKKRMLRLKRKRRKMRQRSKKPLACCAVGALDA

SEQ ID NO: 983854 - protein, 59 aa, Homo sapiens
RARTLTHKPRQATSHCMQQLEIRKNAVNKLLPNQSLPSDDATRTLLMRAQTSRLVLGPF

SEQ ID NO: 983855 - protein, 86 aa, Homo sapiens
  misc_feature (64)..(64): Xaa can be any naturally occurring amino acid
  misc_feature (71)..(71): Xaa can be any naturally occurring amino acid
  misc_feature (84)..(84): Xaa can be any naturally occurring amino acid
SSPDHYLIFHREGASSSCQAALTLLGSSSPPAAAFQSAKIAGVSHRAGLIFGSIPCEMMVCPPXAFGTFTXRLCSAGESAPLAXIL

SEQ ID NO: 983856 - protein, 48 aa, Homo sapiens
RWSTRRDDRVSTCIINSKEGDNTCVRQDGLDFLHLMICLPRPPKVLGL

SEQ ID NO: 983857 - protein, 39 aa, Homo sapiens
NNKLIRELMDEVTRLRDLLYAQGHVSDVAKTLGVQKDPQ

SEQ ID NO: 983858 - protein, 104 aa, Homo sapiens
MDTLVLPSQLVIWARMSAIDSWRGPADLRASNSIGQTMIWALWACRPFTSSSLVLLHEEQSPPVRAFDLCLQLRSCDIGVINDLGEPMDVFLHRLAHGQLCLIL

SEQ ID NO: 983859 - protein, 98 aa, Homo sapiens
DSRSQVYPPVSSSQSVGITGFSLCTGPGLRFLTTCFRILDVPGGSPVETGKSLQVIRGCISERWFSVCIGGSIVVSLSSFQQMWITKLEYDESGPSIV

SEQ ID NO: 983860 - protein, 78 aa, Homo sapiens
GTALIFITTSLDIACNLQTHPDIIREGSVMLQGDVHTVKGGLKLNPNFLEDFEKEPLGPALAHELRYPGGDCSSDIWI

SEQ ID NO: 983861 - protein, 77 aa, Homo sapiens
MAVWLLRACVLLSYCYNHSKSPAGTLLTSMAHLKLLKRSVEAAMRSRKQGLDYVHNLRVAEVLNDPENMEKRRSRES

SEQ ID NO: 983862 - protein, 69 aa, Homo sapiens
ARGLKKSLQDVAVEQTVQSLMSSLKKQCHYRVQKVPSGEVLCDKTPTVGSSQHRRQAQGLTELRCITLS

SEQ ID NO: 983863 - protein, 70 aa, Homo sapiens
VRLEYSLPVIGQTEGGQQSDEECGEVDVPAVLTGRVVIGERRWVVVAGTPSDHRLQSETSGYSPRGLHGS

SEQ ID NO: 983864 - protein, 73 aa, Homo sapiens
MSGTDDIGFRVETPNALAPFLGDEHLTPIIPILVIIAIISLLLPLIALAARITVNISGGHLLVHLIGRATLTI

SEQ ID NO: 983865 - protein, 102 aa, Homo sapiens
RHAPRSDYAARSDYAPLSSTSTRLGLHRSTLTFGPPPHGFNGQSPHMRRQGPLHINHDDPSLLPNVPYFDFPAGLMPPLAKLVDHEYKPLDPKDSRVDRRSS

SEQ ID NO: 983866 - protein, 54 aa, Homo sapiens
MAVCLKMVMKYKNQIIRYFKLFNGYIFHSEKSARSEEALCDMYPSQLSDFSAPT

SEQ ID NO: 983867 - protein, 67 aa, Homo sapiens
ARADYAARSDYADRYDYADPCDYAVLSDYTEKHGSMLQITDSSRVDKIAKNNSTELFGCPVIGMSPL

SEQ ID NO: 983868 - protein, 37 aa, Homo sapiens
RFEWRRPQDYGTSFVISMAVIGTRAVQSLIGPICFTT

SEQ ID NO: 983869 - protein, 88 aa, Homo sapiens
MPPPPNDRPFLPSLDCTAVISAHCNLPAWGSHDSPASAYRGPGIPGSATTPDWFLYFWGKRTFAALTGLVSSSWPRVICLPGPPEVLG

SEQ ID NO: 983870 - protein, 35 aa, Homo sapiens
VRWRLSGSFIRKASDVSEVRMVLGEKEIDRQDYQL

SEQ ID NO: 983871 - protein, 74 aa, Homo sapiens
TPSTTRLDLTTRLNLKSLAALTPRKRVSLSFEASKPGIDFSTPAMKVLDGIFLQKKTVLSPLKVCCFLEPRSQI

SEQ ID NO: 983872 - protein, 77 aa, Homo sapiens
DYAGRSDYAARSTTGYGPCPQAHPQAEGAYCCSGLMETLRSSSPPIMMSSVWDWRPFGSACSLPGSAPSAPASRVVR

SEQ ID NO: 983873 - protein, 51 aa, Homo sapiens
SCGRVDGKGSDAASMPAIFQPQAFCPRRMGAFCRAFSTRSLYVPSSRRDHT

SEQ ID NO: 983874 - protein, 90 aa, Homo sapiens
LTTRRLTHCYDSSRSPTITSVRDQHFNLASHSIPEATPDPHDWISLIHLLFTPFPCISFFPIPHPEHAGFIDGSSTRPNRHIPANAGYAI

SEQ ID NO: 983875 - protein, 90 aa, Homo sapiens
IWLQLSLGRNENKVESTSSANEDDAWWRGSWMAELDVEPNDRDLRGVLLQAQCTQSSREGSLSSCSLPAGSALHRGSNAWNISSSSSSSG

SEQ ID NO: 983876 - protein, 41 aa, Homo sapiens
MRRLLLQWVNVRIEYWPRGMCTHSHAKPQRKWNKAFEKEIV

SEQ ID NO: 983877 - protein, 33 aa, Homo sapiens
MTIANRDGTRYVQRGEYRTNPEDIYASNPTDDD

SEQ ID NO: 983878 - protein, 76 aa, Homo sapiens
RSVWDRYVNSTMSFLCASALPMAYVHHSFWVLTLCCESGGSALNCLPVVQCSVKAGAARWTRWDPEASPVLPRAHH

SEQ ID NO: 983879 - protein, 46 aa, Homo sapiens
FVLIAKLALKFLIFNMRLHDEGIVLKRILGGHLDPPLLIYSLALLS

SEQ ID NO: 983880 - protein, 67 aa, Homo sapiens
SSVVTGKMHPHSMAEMENITNGFTEDRLYDMRGHNSSDLTADPEPYSNPTTTMLMTSSYLSDSGSTV

SEQ ID NO: 983881 - protein, 36 aa, Homo sapiens
PVKSGRASSPTAYPYYASAFSMIAGALHLQTSSILH

SEQ ID NO: 983882 - protein, 86 aa, Homo sapiens
MHGILPSILVMHTGGSSCSRCLDCPSEAVHVLLVSMVNWHSCVASLLLRPPSAVMRGVNAAVVVLDSGMSFGQWSRFTCLVPDLHM

SEQ ID NO: 983883 - protein, 37 aa, Homo sapiens
LVTRARTYRTYDYELKTLTIQTQSQDDTMALQSGLEG

SEQ ID NO: 983884 - protein, 106 aa, Homo sapiens
IELATRSSLQPERRLIRSYKRHSEKGPSSPQDNIAAAFSPAPLAKPSLLMCDMGSCFVDTIPIDQVLRVSLWCWKPCQALYCTVSLNPHKNPGVSADITASISEEK

SEQ ID NO: 983885 - protein, 48 aa, Homo sapiens
ARTHQLGLRSLEEEGQKLPHTADEQRWEDTVEKDQELTQESPPAMTRE

SEQ ID NO: 983886 - protein, 74 aa, Homo sapiens
HTYVKPRSLGLDAFKTPEITANTPYGRRSEEDINAKMQARLEKGGLFANVEANFMNYGTNCYRMYDQESIHDFW

SEQ ID NO: 983887 - protein, 114 aa, Homo sapiens
PLDDEVLNTILLFLFPDADPEKPLDGTTSTDNSNPPSESEDYNLYNQVKSAPSDSLTYILALRLWMINFYHGGLKGVAHLWQEFVLEMRFRRENDFLIPGLASGPPDLRCCLLH

SEQ ID NO: 983888 - protein, 46 aa, Homo sapiens
AFIRESLKEDPIEKFENLVERYNPFAKTMRGNTIFRQARNHKLGLV

SEQ ID NO: 983889 - protein, 46 aa, Homo sapiens
TSSIADNLIKSDIPTVINVFLFLGGLLEFLEGCDDQGRGRRHHLNL

SEQ ID NO: 983890 - protein, 97 aa, Homo sapiens
TEVVPLVLEVSIACRFERMTSILKNVPLWVKGYPTATHATDKSFGKEESVDVAAFLVVSFKEISRATLTFSNHHTDHSAAINSEARLSSSNKDSLKT

SEQ ID NO: 983891 - protein, 31 aa, Homo sapiens
MGYRRNEESLREVRGGLPGRITQDGQRYQCP

SEQ ID NO: 983892 - protein, 93 aa, Homo sapiens
SALHNRMDRMELRTCHHLLALFRQDSAARAHLSKASSILSQSCVVISLAPFPSPGEIHTPHSETSDFAGTSCFLMGSTQFQGRDDILEALWRG

SEQ ID NO: 983893 - protein, 107 aa, Homo sapiens
LHLQTMLITHNVLSRPIPYETAGSADEATASQQPPQAQLHRYNGLYRPSYCLPAFSAGPELSQGDLTRPSSCFCAASPGPAPAWWRPLEAQPVPAVSLYRPNVCLTA

SEQ ID NO: 983894 - protein, 36 aa, Homo sapiens
MERLATSGMYDFIFVAPVVPDYCHCCLGLLLLLKLL

SEQ ID NO: 983895 - protein, 50 aa, Homo sapiens
VSAAQGEDDEEAVRERSSQNLYFCLAFRIQAQHLGVCPGEEENQATKGDG

SEQ ID NO: 983896 - protein, 57 aa, Homo sapiens
TPELARGPDLAPISLYKTKLMTHNGLSRPIPYGTLGSEDDPTATQQLPQAQVHRYKR

SEQ ID NO: 983897 - protein, 38 aa, Homo sapiens
TVVHTCTVVHTWSLYRGNAGDCNGYGDISWYEQQCSVT

SEQ ID NO: 983898 - protein, 44 aa, Homo sapiens
QADLATSSLWFRCRRHVSHRCSTERLPPVDEGRREYLLPQLTVA

SEQ ID NO: 983899 - protein, 84 aa, Homo sapiens
THKPTLTHSGSTALVQRSESASPCEGSITSSSVPRMMSTGDVILDTFSMLREGRGAGGDFAPLQSPHSAKSVGQAQAPPSPEGH

SEQ ID NO: 983900 - protein, 49 aa, Homo sapiens
CCSYLRTPPPLVPPPDTATRYEQQCTPDTATRYEQHVQCMNNSAVWYLS

SEQ ID NO: 983901 - protein, 32 aa, Homo sapiens
LLFIPSRCIGGGGMNNSAGITNSASYNNSAGI

SEQ ID NO: 983902 - protein, 50 aa, Homo sapiens
CHTPDTASRYEQQCRYEQQCRYNNSTGINNSAGINNSAGINNSAGMTQQC

SEQ ID NO: 983903 - protein, 46 aa, Homo sapiens
NGISNTFSLCAWSVLASPFICRVIPLLASISLSLYFPMGYLLSLLS

SEQ ID NO: 983904 - protein, 51 aa, Homo sapiens
DPLTHKPPLTHKPPLTHNPPLTHKPPLTDELPLYIGVICGGLWVKGVCGGY

SEQ ID NO: 983905 - protein, 38 aa, Homo sapiens
YIDIHVLRGGRSTLVYQPVGPQPNPSTNLYLRNEAVIP

SEQ ID NO: 983906 - protein, 99 aa, Homo sapiens
MAWTLKTRKDYRRKNHYTSSIKKKMTNVAEAKKVMKRNFNVNTKITFTDEGELVQQWPQMQNSFITDAEEDDDTGGINLHTAKERLQEEDKFDQEEYRI

SEQ ID NO: 983907 - protein, 59 aa, Homo sapiens
PVVTQPNIYRSPKTYHTVLLDLTSVVTTTETRSHSPPSFTSSITTTEITSHSTPVRLSG

SEQ ID NO: 983908 - protein, 34 aa, Homo sapiens
PRTHRTGPDKSNLVPLPEVLMVQVKKDLKTGHSK

SEQ ID NO: 983909 - protein, 56 aa, Homo sapiens
MTSSSYSGITPGLFSSDSRGVGLVLQTTAIPYAMRSTEALLENPWCHHHQCTVERR

SEQ ID NO: 983910 - protein, 37 aa, Homo sapiens
MIRNPVRNFKGKFHNCPEPLMSCKMKEEDVLKFLAAG

SEQ ID NO: 983911 - protein, 46 aa, Homo sapiens
AILREVLSTEGAETMALRQKREGQARLAVIQTPAPPRLFSEPSGPE

SEQ ID NO: 983912 - protein, 48 aa, Homo sapiens
IQPKTPKNGGKAKAQHSTQRKLPSQKMTKEIQVTVIWYLACKIFSWWM

SEQ ID NO: 983913 - protein, 53 aa, Homo sapiens
THTTSPHPLLHQPQDVKMTGSPGLALALYSSRHTLQPSRTHWMTRLIYTKIPD

SEQ ID NO: 983914 - protein, 34 aa, Homo sapiens
LVITNISLPEHIAKTKAAIHCKTGKGRTGVRLSG

SEQ ID NO: 983915 - protein, 53 aa, Homo sapiens
DLHSRSSSQLGDHSRFVNCVRFSPDGNRFATASADGQIYIYNGKTGEKVFGGA

SEQ ID NO: 983916 - protein, 52 aa, Homo sapiens
THLHGKLTGVKCIDETMKLAGMHYLHVTLKPAIEEICQSHKPCEIDPVRLSG

SEQ ID NO: 983917 - protein, 78 aa, Homo sapiens
QGRAAARELLLQKQYAAVVLQDTWSNKTLNLEVLLVLGFLPSLFKGFLTTYWRTSSSLEEIEKFADSASSFGAQAARP

SEQ ID NO: 983918 - protein, 106 aa, Homo sapiens
RSLCRIPTPSCGGGRIAIPGLAGAGNSVLLVCNLHPERVTPQSLFILFGVYCYVQRVKILFIKKENALVQIADDNQAQLAMSHLNGHKLHGKPIRITLSKHQNVQL

SEQ ID NO: 983919 - protein, 80 aa, Homo sapiens
EIPTQGSAITGDYFRIQYFSTPGDAHFYCIFSPTAVVNAIIIVVMWVWKTLNVMTDLKIAQREDRNITGEGSKTEGQLAE

SEQ ID NO: 983920 - protein, 42 aa, Homo sapiens
NSGCELRQLLHKDKSKRSAVASSVVKQKLSGGILKKQQSPLS

SEQ ID NO: 983921 - protein, 109 aa, Homo sapiens
TQVRAREERLRHVQLENKAKKPALVAMSSILLDVYPWDDETDMAQLEACVRSIQLEVWSGGLPSWCPCGYGFRKLQISVCGGGRQGGDRLAGRTEITRFEEHVQSVHIA

SEQ ID NO: 983922 - protein, 55 aa, Homo sapiens
QIGFFFVLYTVGCLARDPRVTDAHSVPALAAWDMGTARSPHPTCELLVAGLSPVS

SEQ ID NO: 983923 - protein, 84 aa, Homo sapiens
  misc_feature (71)..(71): Xaa can be any naturally occurring amino acid
QDPNSSASCDASSWHRDYGSSTCTTEQQIQDKVATFRLMLLDKDVNPGGQEDTPWSEASASRETHQLAGVXRTLEVRNSWVLRS

SEQ ID NO: 983924 - protein, 38 aa, Homo sapiens
DFRGTPTPAQGAELYEKRFGFFQKNAGDEAVNFIMAIK

SEQ ID NO: 983925 - protein, 79 aa, Homo sapiens
MVRHPLPISLKSQEPAMSSAPPLLVPLLMVASKYLYDEGEEEDVFNDEWGAAGGVAVPTLNALERGFLSAMDWHLYTDP

SEQ ID NO: 983926 - protein, 116 aa, Homo sapiens
NSGFDTRSNLNKFYNPVLISDTMLQVTISFLKGYSSFVKGSMRVVLPLAGANFYSQLTHGGNGTHLVSPVKSIWGWTMEGARIVVLLVGYIHILVEGWTGEGRMEPPIQTEYLRSG

SEQ ID NO: 983927 - protein, 43 aa, Homo sapiens
RLRGPPSEPNEAYRNKLKYLFFLRKRMNTNPSRGPYPTAHWVP

SEQ ID NO: 983928 - protein, 73 aa, Homo sapiens
RVPTCMTTGCAALGKFDKFRGVEFVCWPLAEESDNVDSADAEEDDSDVWWGGADTDYADGSEDQVVEVAEEEE

SEQ ID NO: 983929 - protein, 119 aa, Homo sapiens
  misc_feature (11)..(11): Xaa can be any naturally occurring amino acid
IRVIPFVEPHXGYSGLQNWVKKNGLSTRSRPGLTNNQLFFLGFAQVWCSARTPESSHDGLITDPHSPSRFRVIGLPLQFQGVLRTLPLPTWLTHEPASQVRSLLRGRSGRRAIDEVGIG

SEQ ID NO: 983930 - protein, 56 aa, Homo sapiens
STRRGGGMTEFAQDAVLIQVKLQQNVTGEVKPVTSVPLSCMFFDCIYTRDEIDWGR

SEQ ID NO: 983931 - protein, 37 aa, Homo sapiens
  misc_feature (7)..(7): Xaa can be any naturally occurring amino acid
PADYGEXGRSQEVGESCRTSDGDIVGIACARVGWVLG

SEQ ID NO: 983932 - protein, 33 aa, Homo sapiens
DFHLNGFDHNFCLKGSKEKHFCARVHHAASGRV

SEQ ID NO: 983933 - protein, 85 aa, Homo sapiens
LYFSGVRKDAGWQWYNEKISPKEKENKPVPAAPRQEPDIMQKLAALQTATKRALYEAILYPGVDNFVKYFRLQNYWTQQAGLFTM

SEQ ID NO: 983934 - protein, 76 aa, Homo sapiens
  misc_feature (4)..(4): Xaa can be any naturally occurring amino acid
SARXSARRTADVHFRSFGSESNIATLMDQLIYNLLLEEQTPPNKITVVGVSAGCLACAISILMKDLADELALVDVI

SEQ ID NO: 983935 - protein, 34 aa, Homo sapiens
SSLAQHYSPPQMTPIVERADAGPERKHLPRMFSL

SEQ ID NO: 983936 - protein, 32 aa, Homo sapiens
MREVAYVAMTPLDGQFPNGPELDFGAYRALMA

SEQ ID NO: 983937 - protein, 79 aa, Homo sapiens
YGENELSYDRLTLSIWADMYMFSDDGDKASMQESQAHHAVEGSAKNYRHHVKRTVEVTLTPLKMENESQSKNALKESSP

SEQ ID NO: 983938 - protein, 37 aa, Homo sapiens
TFYTGNKYYVVNGKNLGSLFKRNKDYNLKGKNPGEPF

SEQ ID NO: 983939 - protein, 42 aa, Homo sapiens
TFYTGNRYYLVNGKNPGGLFNTKTRNPSYRKNHMDTFKRKQR

SEQ ID NO: 983940 - protein, 50 aa, Homo sapiens
MVVVARRPYTLGLCVVYMPRMLRSVRIRNAIAIRMGTMRSRRLAMRGLPG

SEQ ID NO: 983941 - protein, 47 aa, Homo sapiens
HPLSVLFLSVQLGHDAVPPTLVGLGSQQHMRTAWSSGAEEGLPCVDC

SEQ ID NO: 983942 - protein, 47 aa, Homo sapiens
VHSTSLRGSPGVVYGYVTSCDGQKSSGTEVRPQPMPPSPAPAMRWIA

SEQ ID NO: 983943 - protein, 50 aa, Homo sapiens
TPSNTQQPSQLYNKAASQHRCHVVVNSTFASPHAIAQTLMRVMGKERGWY

SEQ ID NO: 983944 - protein, 57 aa, Homo sapiens
AGLLNLCVSEQVQVARRSRYARRSRYARRSRYATTGPGMPRRSRLPEGPGMPEGPGM

SEQ ID NO: 983945 - protein, 71 aa, Homo sapiens
FLTGHGFPWLSWHWAVLFVSPGPGRRGLEAFYEVAEPDTREWYLSELPHITYDLLSLVHEPLGYSADSREA

SEQ ID NO: 983946 - protein, 59 aa, Homo sapiens
LNDSIAGAHITDDARVHLEAVRRRKVSDGCCPFWILRAAGTRDVTIHDAQRARSIAPEI

SEQ ID NO: 983947 - protein, 47 aa, Homo sapiens
MGPLASHGSRTSEEEPPQGGGGGATSVAVTIALHHRYLLLMPKLDLS

SEQ ID NO: 983948 - protein, 33 aa, Homo sapiens
MICTDVCLQIGYPTDMHQIPHTIINGIQKESMD

SEQ ID NO: 983949 - protein, 67 aa, Homo sapiens
RTDKVEEDMKQLYDQIAQLPVDPRVTLRLVVPGSQCGSLIGKGGCEIKEIRESTGARVQVGGDVLAT

SEQ ID NO: 983950 - protein, 128 aa, Homo sapiens
TYRILCHPLVSHPTCVSYPFVCHPLRIVDHEVLMVFGMRSLDGLVMMATYEYTRLRMVCTCRSSWWSMEKVVFLVPHHRCLVCGSSWVTGQFEGTEAFQLSTFFLGVHRASSICRSVLVDVSLRKGGW

SEQ ID NO: 983951 - protein, 68 aa, Homo sapiens
AAGLYEGAETAPVQNEGLGWRCCCPQMMVMPMSFSSFGRGYRELARCLGLMLSSEFAAPVSVPVQEIL

SEQ ID NO: 983952 - protein, 42 aa, Homo sapiens
  misc_feature (31)..(31): Xaa can be any naturally occurring amino acid
TRRTQTSQIMPMRDIALGNKTKPFVGVKMVXAHQSDPVLRLG

SEQ ID NO: 983953 - protein, 50 aa, Homo sapiens
MDFNLLNNTNTLIGGCTIGDVRDPIIESRKPVKLICDSSNRIALVIPTGN

SEQ ID NO: 983954 - protein, 72 aa, Homo sapiens
VVFRALWGLPSPPRQSPFRIRRTNLPLSTISEALMWATMSAPTTLSKPYWQPPGGPPSREKTKIRALSAEQG

SEQ ID NO: 983955 - protein, 86 aa, Homo sapiens
TVKRVTSYSAMHFATYRTKLMLMSRNDAATQHKNAQNNLQQLFHEEYVVREDSLGLAIGTHGSNIQQARKVPGVTAIELDKDTGTY

SEQ ID NO: 983956 - protein, 75 aa, Homo sapiens
AADVSVTHRPPLSPKSGAEVEAGDAAEPGAGRRAAASRIQKRIRKGLEEKERKFRKGKEDNDEGPPGGGEEGGSK

SEQ ID NO: 983957 - protein, 71 aa, Homo sapiens
DLDIPKLVWVGDGQELRQQAAQRTVQRQGFRPLRIHSAKQTQIATGFGTLGEALGQAESPRGEGDLAATIL

SEQ ID NO: 983958 - protein, 58 aa, Homo sapiens
VALELPSRSTEQVSLCEVISVVVIERREAGSDCVPGLSGGDHRRSSYEYCVVCDRLSG

SEQ ID NO: 983959 - protein, 55 aa, Homo sapiens
MIVTVSAVQPMLGRADAAGLDHSFPHSTQTGEEEARAVHRLEAFMQLRALEHLLS

SEQ ID NO: 983960 - protein, 37 aa, Homo sapiens
RTPLYHRTGLYTYYNDRRTSCKSCRCPRAHNALQTSS

SEQ ID NO: 983961 - protein, 120 aa, Homo sapiens
LDDPFFWYTGAVCAAYLELSVHTGAIGCVTGAVCPASPGARPCATPWSPLLCRRHLEPVLCRRHLEPSCAHLEPVLWRRHLEPVLCHTWSPSSASVTWSPSCAIPGARPGPSFTCDKSRG

SEQ ID NO: 983962 - protein, 60 aa, Homo sapiens
IDQSRHGATSKRFTCDLCLIFLLLQLQTLRIRFFLHLALMAQRFPKEMALRPRESAALDA

SEQ ID NO: 983963 - protein, 34 aa, Homo sapiens
YLGFLHSETAKSVTCTYYPCPQNKMFLATLAKDL

SEQ ID NO: 983964 - protein, 120 aa, Homo sapiens
LPTQGELLKSFHRPPRLGTGSVTPDPSVLALHTGGFPLSRVGKTPCTPRGAESLAMCPIHMPAPTPPPEMQMLGKWHAQSEHGPWRYGKDISTHTNPKGVDPSARPDGTQAGGTASSPHE

SEQ ID NO: 983965 - protein, 37 aa, Homo sapiens
LHNAARMSQVQRVHSQAANVQRAGVPVGGSAGCQKLS

SEQ ID NO: 983966 - protein, 67 aa, Homo sapiens
YSTRIPRYSTVVNMYELDAIAAVTSYVDVPVHAMDQLIFRSVSNCGLPSHSRASPQLGFNYVRGLYG

SEQ ID NO: 983967 - protein, 91 aa, Homo sapiens
GRGVDVRPGGLTWRPRCGQVGILVSLHDQRLYVLRDGVMIGESPLKADALPAFQGTTLFVMGQGYSDTPSPLDANQRLHQWTAYPLLGQDR

SEQ ID NO: 983968 - protein, 32 aa, Homo sapiens
ILTFHISIKAYLNPVTDLSSEHPYAACYYSQG

SEQ ID NO: 983969 - protein, 55 aa, Homo sapiens
SPLAQPNTQTETTDTWGLLNGGQVERRDEKQKKLTIAVLGLNIGVMQGVLKRATL

SEQ ID NO: 983970 - protein, 61 aa, Homo sapiens
TEGGSVAQTVVSMKNTYEVVNPLFEKRPKNFGIGQDIQPKRDLTRFVKWPRYISVAAALDA

SEQ ID NO: 983971 - protein, 100 aa, Homo sapiens
PGHVCTIYFVDASVHYAVADLRRYLWRQLQAAAVCILGLLIFRSIRMPANVNNRYLRTIASMRKFKALISIARRSVMMIIAIGSIYRARVIITSGRRPMA

SEQ ID NO: 983972 - protein, 85 aa, Homo sapiens
VVSTGSPVIARGPHFIDEIAERYREKDLAQDCILRPLHLMTLFLACFDFWGSSVPSGFACFTSYASHIAILLSCNGLFDYFFILC

SEQ ID NO: 983973 - protein, 36 aa, Homo sapiens
CPAFGLADSQTISRFLRIAQHKIILKPTSIMRAPVR

SEQ ID NO: 983974 - protein, 63 aa, Homo sapiens
MPRYSTVIGHVLLLFVRKNRNDDTALFCSAKVSLSLTPCNPVLCINEDLATRRGLVAQKVRDL

SEQ ID NO: 983975 - protein, 113 aa, Homo sapiens
FLATTRLQQELDDLLWTWTTSAERVTLEKKQKKFDQLRGGGEDHLCQDMQRSATGLRREAREKETKALSLARALEEAMEQKAEMEGFNKQFPQGDGGHLMSSKDDVGKSCPQA

SEQ ID NO: 983976 - protein, 66 aa, Homo sapiens
IPPAIYNYLAIYNYLNISFAFKQLSKGEISQGTYASYKTAYVLDVLFSRSNDWLNRMDTLGCVTSC

SEQ ID NO: 983977 - protein, 81 aa, Homo sapiens
NENEGSGHSVPSPMLEGQSTLELSHTGLQHKIHSSLFTDDEMGSNVPQLIRTNPSIILKTYKSTNACNICNLPNTITYMRF

SEQ ID NO: 983978 - protein, 56 aa, Homo sapiens
LLQPDLFGHTSGSHEALGVVQPKCIPPCPLSRQDLGCLCRERFSAVCYGSVSTPDE

SEQ ID NO: 983979 - protein, 43 aa, Homo sapiens
MTVGYIGVICGENAISGAPIIRVNKSVANSLRLVMGITSEEDY

SEQ ID NO: 983980 - protein, 91 aa, Homo sapiens
AQYSKLGGYGIIRLTLILNPLIKDIAYTFLDTYPYEAYLIISSICLEQTDLYSLIAYSSVSHIALVVTAILIETPLCFTEQQHFRHHRPTG

SEQ ID NO: 983981 - protein, 73 aa, Homo sapiens
LEDPRLDAIQVTTPNYYPSCTIVRAHGIPLVVIIGEQELKQGVIKIRSVACTEEVAIKRENFVAEIQNADCHL

SEQ ID NO: 983982 - protein, 71 aa, Homo sapiens
SWMIGAVPKSINRSVIVGLMISTKSVVRDMRGDITHTYKYPERASEEREAFTRANHLNKLSEKEETGMSMR

SEQ ID NO: 983983 - protein, 59 aa, Homo sapiens
TSKKSQRVIRVCFNVAFGDMAGSFTYSLPPRFLLHHPQPRGLPMLLSSASSMLLKLLKL

SEQ ID NO: 983984 - protein, 106 aa, Homo sapiens
PFLKNHSPSSLFWALCLASRSTLFPLFSLFALFLLPSLNTSFIFSIPHTVLYPPAFLAKTIKTISPHCFYQHKPSISSISFPWSSGSQEITPAFQNLVLRLVRNQN

SEQ ID NO: 983985 - protein, 71 aa, Homo sapiens
TAVAMIADSVNVAVELEKVVSHSLPVGDTVDEGGSIIAHVVNEPARVVDGVHSTVAWSVLVAPRGEEILSV

SEQ ID NO: 983986 - protein, 81 aa, Homo sapiens
MGKYPNSNHTRIFNDSSVYPTQRAWRLSEFLPCMPIPSQVLPHHRPPAHTVSELAARAISTDGFSVSLATLDVATLCPDSS

SEQ ID NO: 983987 - protein, 70 aa, Homo sapiens
MSRLSHRGIIANKHFLGSLGPWLSRGICDISWHHLSPAFSKYLCQADVIPARNRMNSLKVHLGHSPFGGQ

SEQ ID NO: 983988 - protein, 102 aa, Homo sapiens
TITCSLYSLRKTELKSIIEYSSVSHIALVRNRDSHLKCPCSIIGAFILIIAHGRYILITILPSKHNLLNAVTCRIIILSSRTSPSTPTNSSQMTSSKPRLPE

SEQ ID NO: 983989 - protein, 107 aa, Homo sapiens
LGIRLVARSRGRLQWQGLSKVSDLPMHILCMEQSRAITIGFHDMRDISIKLSAFLRAYWASATSDSHNPPDTLGNGYYPYTINKSSCITRVSAGSVSPQNSTEVREP

SEQ ID NO: 983990 - protein, 133 aa, Homo sapiens
MTSGCLTKAGFMISTLTLSASSQVHACVLQLPFHQQVWKNPTFFLRVISDTASLCYSILRYLSLTASTFCSFCVVEISPPRAGARLAVELDIRPSSGRRNWKDCREQEGRLRGTQSWGEETAPPQKLAWATRG

SEQ ID NO: 983991 - protein, 126 aa, Homo sapiens
VHSLWKPLTVLSQQVYRGNSSKQPARLHRQSAYLCNPGLRSKALPYRGQQPRPTYFSIGAGAEDSKTGSAYDGQLCGKTCPIQTGNRSKRACKRVNSPTGKIHSRYGAGAGQAHDDRTTLGPGDPG

SEQ ID NO: 983992 - protein, 37 aa, Homo sapiens
YARITRVGTRTTVLYGILLVQLYPYYVEYYAGTLNPT

SEQ ID NO: 983993 - protein, 171 aa, Homo sapiens
DVIGYSFRRQTLEFERVRVRELCSWLQMTACLSAQNMRRAHLQTRDCKEKPQRSHHLDRVFGKVLMASTSYLPSQVTEMFNQGRAFATVRLPFCGHKNICSLATIQKIPRLLVGAADGYLYMYNLDPQEGGECALMKQHRLDGSLETTNEILDSASHECPLVTQTYGAAAG

SEQ ID NO: 983994 - protein, 37 aa, Homo sapiens
PGLLRSGVGYRNWGSGMSDGAHETQTLSPAVPDLSKP

SEQ ID NO: 983995 - protein, 69 aa, Homo sapiens
KFNTSCCCKNFSARSKNALFETFNWALSMGGTVPVSEGLEHSDLLMAKENSYDAWLMLVEKDGESHHGA

SEQ ID NO: 983996 - protein, 67 aa, Homo sapiens
LWSLYEFPPGSPGLSKVRALHGVSHCVPVTIVYLIFYPLYCTIPTLYSVVYRLRALRCGMGITAFCL

SEQ ID NO: 983997 - protein, 77 aa, Homo sapiens
MLSCYQTASHATEKSCERMSVWQTSLSFKKLPQLSVIFNHHHPDESVAIVNVGVRPSTSKKIVSIFEAVMYLSIIHN

SEQ ID NO: 983998 - protein, 66 aa, Homo sapiens
CAQPVGRWAGLQGREAICLNSSTGELRARVPFDYWHTFMELQYMCALSTNYIIHPGSICAYRYYFM

SEQ ID NO: 983999 - protein, 64 aa, Homo sapiens
TQLKMHPVYEVEAFTFQDLVGHWSEFCQFWWVFSLIFDSFTKDSITNGRPKDNALYVDVTKKAD

SEQ ID NO: 984000 - protein, 35 aa, Homo sapiens
VVRSVRKEKVDLYNQLEEEEEEGGVICSSCDVLES

SEQ ID NO: 984001 - protein, 44 aa, Homo sapiens
MSNNKDVAPKADFLHPHVFIMTLQRDWNYLHRIGPTGAPGKNRA

SEQ ID NO: 984002 - protein, 114 aa, Homo sapiens
MVPARLANVCVLVAGGAEDITWSAALTHFCHVVPSLTQGPKEQAFWAKKENALSLAHNFIQHLKPFVHTTTNFIPDCYTPPQNNLNRPRRKPGNSNHLTSRELRFSGGQLTKLS

SEQ ID NO: 984003 - protein, 56 aa, Homo sapiens
SYRTLGISQEQIRSPGVFNHFDKDHGGRWGREFKAASLAGQKWKKNRQGEGEFNRI

SEQ ID NO: 984004 - protein, 42 aa, Homo sapiens
RAMCSRYSVWIGARVGVCTCVSVCAQVDECVDEVHVWAHIME

SEQ ID NO: 984005 - protein, 109 aa, Homo sapiens
YPHARHRPLSTQTHRPQHLDLSAPRPQHLDLSAYRPLRTQTSAPRPQYPDLSAHRLLSTQTSHITYTQTLHTPHTQTSHNTHTYRPHTHTAHRPHTPHTHRPHTHVHLI

SEQ ID NO: 984006 - protein, 113 aa, Homo sapiens
  misc_feature (29)..(29): Xaa can be any naturally occurring amino acid
SLPHAKGVEAYIQGARQEERTKASRHPGXQKDVPSSHRRLLQGLYFPVIQHVINYDMPEEIENYVHRIGRTGRSGNTGIATTFINKACDESVLMDLKALLLEAKQKVPPVLQV

SEQ ID NO: 984007 - protein, 48 aa, Homo sapiens
SLRRDRVASRDSSIISKSTDAAHPEAVLPEVGEGDRRRISNTEPEGFM

SEQ ID NO: 984008 - protein, 70 aa, Homo sapiens
MQYTGGADRQHWVGVQVYADVHVTLHDGVEGSFVDATGLHAQEGRLEQCLRAAEPLIANGDDLAVRQLVT

SEQ ID NO: 984009 - protein, 46 aa, Homo sapiens
YLLKLVTEVICSQTGRCRYCRTILEYSMVAPMNLVPQDLDGRVVVA

SEQ ID NO: 984010 - protein, 67 aa, Homo sapiens
TTQYDLYLCEGFSEALKQCKFYHGLELPAPEEVGADYGGQYLHHTYYPYADRPDHNTRIVPSIAGHW

SEQ ID NO: 984011 - protein, 106 aa, Homo sapiens
  misc_feature (63)..(63): Xaa can be any naturally occurring amino acid
YLEIPVVDDQVYAAPTVWKSLPFCLILTVSGIRYAEAGAVVTLYPALWEAEVGRSAEVQEFEXSLANMENPVSTKNALGMVVRACNPSYSDAEVGESLEPERRRLQ

SEQ ID NO: 984012 - protein, 40 aa, Homo sapiens
NTSTYDTQRLGEERRFQRWDDWWKCWADWKAGLVEGTSFS

SEQ ID NO: 984013 - protein, 37 aa, Homo sapiens
MSQAWIGAYDRRVYTSAVHASVYKCVDTVSTVLELQI

SEQ ID NO: 984014 - protein, 75 aa, Homo sapiens
TLSYCKYALFYRGVHIVCQVLRVYPKGSRGPNSSYPPSGGTVRDRKGTQYPSTADSEVSDALPVCQQRLRDRGVP

SEQ ID NO: 984015 - protein, 38 aa, Homo sapiens
MSLRLLSQLCLQPRCFDSNTFSLQPMKLDKDAITTDVV

SEQ ID NO: 984016 - protein, 47 aa, Homo sapiens
MSVLPFSNHRGSELEEPWSPHPTPAFPLQVIGPNLSSLSYMGGYQSV

SEQ ID NO: 984017 - protein, 121 aa, Homo sapiens
LLRSHYVSGSTDDITKTSVIKPDGHSGQCDTDDIRVVSVEPFVTMGQVTALLISIVWTLPVLPELDDLTVAGLIMGTGIESSSHKYLPVTTTSGTAYELVLADGSFVRCISVPKLRPEQAR

SEQ ID NO: 984018 - protein, 104 aa, Homo sapiens
FQMQEYRASFNTSKGSWRALGPRVQGLPHQPGYDVEELTGQVRPSSNRIMSLVDPNHERACEPSKAFIDFMWRENTQTRTRLDQVIASFKVSAGDRNFITAEGA

SEQ ID NO: 984019 - protein, 40 aa, Homo sapiens
MWLVSSSTVACTEATGSSRVSRWIFGKTANAPVPGSYSIL

SEQ ID NO: 984020 - protein, 46 aa, Homo sapiens
CSGLRRVSRSPIGGGLGQGLSASIRLLPDSPPTLLIRNAAYTRVVV

SEQ ID NO: 984021 - protein, 35 aa, Homo sapiens
GAVTVIPGLDAGKTLGRRKGRHMGIGKRKGAANAR

SEQ ID NO: 984022 - protein, 30 aa, Homo sapiens
MCIRYLLFGFNFIFWLAGIAVLAIGLWLRF

SEQ ID NO: 984023 - protein, 52 aa, Homo sapiens
TGGDLTAVVIVLHDRSDNAECLTFLTRQMIRQIRLARCVGRGISRILRRHWR

SEQ ID NO: 984024 - protein, 149 aa, Homo sapiens
CSGLDQWPDIFYRTLHLKTRECTFFSAPHGTYSKIDHIIESKTLLSKCKRAEFITVSQTTAQIILELKIKKLTQNHTTTWKLNNLLLNDSWVNNEIKAEIKKFFETNENKETMYQNLWDMAKAVLRGKFIALNAYIKKLERSQIDTLTS

SEQ ID NO: 984025 - protein, 64 aa, Homo sapiens
MHETLKRQLSDQQLVWTSGSGEARGEPLYQADSDGAILTPPVAGALISEPPWMASCMRGALPPV

SEQ ID NO: 984026 - protein, 74 aa, Homo sapiens
TVRCTPRSGCTGLYQYPATQNLSIILNYPHRMNNSNSTVQAAGVVPPAGGSYKLPVEYKLTGEVHAVRVGTSAI

SEQ ID NO: 984027 - protein, 42 aa, Homo sapiens
VESKIRMVLMSHHLIISFNVSTDRESWANGTDDASVPGSDAL

SEQ ID NO: 984028 - protein, 97 aa, Homo sapiens
MSDKPGRRHDIKYNHGAATRMGPGRIESQRTAKAKMTDVDRLTVMNAKKLRNRIILNEVYKLQLAALLRASPKYRGSRSWRPLRAPGLGLPWAHIME

SEQ ID NO: 984029 - protein, 33 aa, Homo sapiens
RQWVQLPDGATPLTSLQLPLKINNCWLSAVAYA

SEQ ID NO: 984030 - protein, 36 aa, Homo sapiens
PSARVQIPLDGGETTRLVGYDLFHWACLNERAAQLP

SEQ ID NO: 984031 - protein, 118 aa, Homo sapiens
MSTSTVMLECQRQAYYSTAFSAEHRKAITPGAIAVQRGKDPQYARSRPTFIFLFTVLDLSLSPSLLPPPLSLAPYLSQTSEVLLSLCLCHTEISKQGPTLTPKLECSGVISGSLQPPS

SEQ ID NO: 984032 - protein, 44 aa, Homo sapiens
VCRDGRERFPSPCTRRIMSEQCHFWDASQLLCRLDHKSREWRTR

SEQ ID NO: 984033 - protein, 46 aa, Homo sapiens
TAASSFILPAKIRVVRKKSARALTVLPQTQKDPLRHFYQGQEVQAP

SEQ ID NO: 984034 - protein, 70 aa, Homo sapiens
MLSPKRQQLNQQNCIAEHYEPTDENSKDLAELHIPLEEPDAVIAKPRSTTPALAQAIYRHAEETMMNATK

SEQ ID NO: 984035 - protein, 77 aa, Homo sapiens
RVPFNLSMGTGITIGYTRARHQIQLLFVGDFTKTVKIMSNLYPADRTIHGILGLDYMYFINETLRNLVFLLFVTYHL

SEQ ID NO: 984036 - protein, 155 aa, Homo sapiens
MNSLRFLLPSITTAETTSHRTSSFTCSITTTKTTSHSTSIFTFLNNHRDQLTQFSQRHFCNHHHRDHLMTVLPRYSFFDSHQHEHLKEYSQLHFFYHYHGEHSTEYSQLQLLVSLAKQEHSRSTPSLTSVITTTKTTSNSIQGFTFSITPTETTS

SEQ ID NO: 984037 - protein, 55 aa, Homo sapiens
NISDDVVVCKLGSREARGEAESGGSQEPRSSRLQGSYDHMTAFLSGQQSETLCLY

SEQ ID NO: 984038 - protein, 76 aa, Homo sapiens
KAGHHYICVICVGDAVGGSALLIGVVGARLEWSKAQQESCEEQKLLQVNQLGLSLYRQAVFWTVWGDPSSMSTVSG

SEQ ID NO: 984039 - protein, 89 aa, Homo sapiens
GHPCLTRNKGHPFSPKRQDQATRKIMRFLQSWRHRMRALKQNQELEGLPHAGTGHMSWAPFFLTSLGAPRAVLTGRGLSEAGVAPVGSF

SEQ ID NO: 984040 - protein, 38 aa, Homo sapiens
LTYTILEKLPHASQTNIKKSPGKVKEVNCKRKMKTVKE

SEQ ID NO: 984041 - protein, 75 aa, Homo sapiens
AVAKQTTRSGQAKQRAGKSRNSVPKEVGNYVTVQIALNYQHSLRESRSAAPKIKDAVPYTHFTVMKTEKTVFSVN

SEQ ID NO: 984042 - protein, 132 aa, Homo sapiens
HWHQSLSAQPAHLNGGGGGLRTLCILFSRGSVYICLVILNLGSPPEYPSNKDVCHRVGQSGGHSGCTGSIRLLAGLSLSGSGTPYVPPAGPVSLEAFGCLSMSVLPLSVCLSGGLCICLPGVGLSPLWLCLP

SEQ ID NO: 984043 - protein, 89 aa, Homo sapiens
DRHGDTVCDIDPQNDLTFLRSRVHKNDIMVAPDKDYLTDSDSESTRISHSLGSLCHSFNLMPPKNVNDNHVSGLEHGRRLEPTHTNPVI

SEQ ID NO: 984044 - protein, 67 aa, Homo sapiens
MMVAPDNRLSPDCDSRLQPHKPLSWLPVSFLNLLPPKNVNVNHVGGLAHGSRLESTHTNPVTVYGRA

SEQ ID NO: 984045 - protein, 54 aa, Homo sapiens
MCAHSIIAQTFEAVVRFKKATATLSWVRQDPFKLYAACLLVVVIETLHYFNHEF

SEQ ID NO: 984046 - protein, 39 aa, Homo sapiens
YRAASPLVEVDICTTLQEQIYTLAKKGAGSFTDLVYLLR

SEQ ID NO: 984047 - protein, 45 aa, Homo sapiens
EVGLPYRRSVPTWSKLTSDDVQGADLQTAKKGRTPSQIGVILRDS

SEQ ID NO: 984048 - protein, 53 aa, Homo sapiens
QVTRCRRSSSPPIPTHLYITDEVNDPSLTIKVGVAPSGTEPYEYTALPADYIF

SEQ ID NO: 984049 - protein, 75 aa, Homo sapiens
FSFTSSSTTTETFTQYSWLLFFNRHLQDHLNQSSQIHLVIATTKTTSHSTPRFTSVIASTETTSHSTPSWAHIME

SEQ ID NO: 984050 - protein, 109 aa, Homo sapiens
MECNWNGIEWNRMESNPFEWNGMEGNGMESTAVYRKEWNGMEWNGMQWNGMALNQTELECNVIECNGVQWNGLEWNGINPSDMERNGMNSNGMEWNGMEWKQHEWNGTE

SEQ ID NO: 984051 - protein, 72 aa, Homo sapiens
CTIDCPSSSPKAHDILMPSCMTELGYQMSYCLPKLSKRTQTLASWALCRLFSTRDDEGLIRIYGAAGTQQTG

SEQ ID NO: 984052 - protein, 61 aa, Homo sapiens
EPVMSHLISVCTGGYILAVQLIEQGCELAVVQSPGAYPVHGLHYHVHDVVHLQLLSTEGFR

SEQ ID NO: 984053 - protein, 139 aa, Homo sapiens
RGHDGFIRNMFVIAIVDHGKSRLMYLPWCAWRDVIASRPGRARTRFTDIRTRDDRDRCITIKVNLASSLFYQVSLDNLTLNCHQAQLGRLPASSSTSLTPPGMSTSPSEVIVAPRGTDGASLVVDVVSGVCVRTETVLR

SEQ ID NO: 984054 - protein, 46 aa, Homo sapiens
MIEEVKLGGLCEVVLVVVIKEVKLGVLWDVVSMVVIEEVKLGELWD

SEQ ID NO: 984055 - protein, 62 aa, Homo sapiens
MWLIEEYALSDLTVCCVIRIYVACHNLCLIGKYNESVRYVFSQAVDNECEAYYTKRRRLRTA

SEQ ID NO: 984056 - protein, 73 aa, Homo sapiens
MRQTPNDLTGEHSCIYAEHAHMIRMKLTSGRLAAAFWIDCRRRFLALLSYQFSTFLSFPGSEHHSEQEHGEAS

SEQ ID NO: 984057 - protein, 66 aa, Homo sapiens
CLFQLYTASPDMMPMLEWPGRVVHLLNDQHMGVVTAAVSLITCLCTKNPDDFETCVSLAVSRRRLL

SEQ ID NO: 984058 - protein, 32 aa, Homo sapiens
KLVGTRVFFWIGKHANEEEKKRRSNHCTVNTQ

SEQ ID NO: 984059 - protein, 34 aa, Homo sapiens
MPHRDITMKVYAMCFVRRLPNVCEAYYTKRRRLH

SEQ ID NO: 984060 - protein, 35 aa, Homo sapiens
GVPEEITGADEKVHLRDKKSQNDDFSKLVAGRCQD

SEQ ID NO: 984061 - protein, 56 aa, Homo sapiens
CFDGAGRHSLLRSNDGNEYVLPSQRRSGNEHMDPGYLFRTSPLIQHESVSQTPKRH

SEQ ID NO: 984062 - protein, 110 aa, Homo sapiens
MLIREYWLREQREVLAGLFTLAKIRKAGRDLLMACMRRTHGVCTKATPCCGGWSALGVLDEGKMKLDYILGPEDRGFLQRDSLKTQVFKTGLGQSPSTTLAVMNPQRRRL

SEQ ID NO: 984063 - protein, 72 aa, Homo sapiens
TEPARFTKITIALSPLSYRKVTPIALIPIVVIIEIIRLVIQTNSPGRTPNREHNCRPPTHAANWKRRRLRTG

SEQ ID NO: 984064 - protein, 63 aa, Homo sapiens
MPVAEWTKVFAQPNLAEMIQKGEQLFLEPELVIPHRQQRIFTAPKYTGSFLSPWTTAVTDASF

SEQ ID NO: 984065 - protein, 62 aa, Homo sapiens
MPVARSWVCRISYVDPCGAPSRNLVSTYELKLIGESGLRNNREVWRVKFTLAKIRKDDRELL

SEQ ID NO: 984066 - protein, 80 aa, Homo sapiens
MLYRVIHNQERGYYEDAKTAASGIPYHSEVPVSLKEAVCEVALDYKKKKHVFKLRLNDGNEHLFQAKDDEEMNTWIQAIS

SEQ ID NO: 984067 - protein, 59 aa, Homo sapiens
VDLRLQAYALHPPPILQTGHPLGRGSRKLLGGVTIAQGGVLPNIQAVLLPKKTSAVAYA

SEQ ID NO: 984068 - protein, 39 aa, Homo sapiens
MPSSVSTCWPQYLVHLHDLMWRVARVAVCLGTLCLGLSL

SEQ ID NO: 984069 - protein, 118 aa, Homo sapiens
VVYSHYILRANAYDHCASLYNVDGHVLRFTMIVGCLVYLSEAESEAALVVAIKMIKDTVLRDQVRSFTVVSGYHSVKRLVLISHCWVVISRSLLTYSAVGITRGGYRMISTAVGVDAM

SEQ ID NO: 984070 - protein, 39 aa, Homo sapiens
LSVTLTMKPDFSQLQRKIYGYETPGDQLHINWDNNMDRL

SEQ ID NO: 984071 - protein, 127 aa, Homo sapiens
MVAQIEYYAACSGDCPDLEPKNQELGEKLSKDPNIGIAKRDATCQCCSLFSYEVRVCSTIYLFSANKKLNPKKYEGGRALSDSIMLSTKRIYKHLFEFKKNKPINDIFKHIACIKNTCEEKRHHSKC

SEQ ID NO: 984072 - protein, 40 aa, Homo sapiens
RIPESLYQGEECNGKKRKEVLWGRVCRERAVIGVDFANRR

SEQ ID NO: 984073 - protein, 41 aa, Homo sapiens
RRSEDTGRIGGGRPLRPSAQLREGRTWSGREEGDTRLASHH

SEQ ID NO: 984074 - protein, 73 aa, Homo sapiens
QYPSMHECMQDDVYTHYCGACIPEQVPSDDVSTVLTSKYRKLEPGRRVFTNAVHASLYKFRRHVSTVLTSKYR

SEQ ID NO: 984075 - protein, 51 aa, Homo sapiens
AAQWLLCVSSRSDLLVPDKDTEDCSAWKQDPSRRAAPPEPHGGLRPREKAL

SEQ ID NO: 984076 - protein, 105 aa, Homo sapiens
MDRALPEESGVWSFRGSRMSFRASWAWPCAGLRFESSCDSQSKTIVQTCALSGTGGLDLPGAAALECCNLSLSVSSLTGMALGMSCLLANTMCSASRSSSSSVDL

SEQ ID NO: 984077 - protein, 49 aa, Homo sapiens
IRQVVLIIGCCLANGICVGTVWNNDGFCWRHWSLFELLVCCWQAIKAWA

SEQ ID NO: 984078 - protein, 93 aa, Homo sapiens
YVDLARRKQKTDSVGQTDAQLFTGYQQQRIAELEAAAFGCRLDELDAGWAVELWQGLIGLVKAVVSTAGLAAAAAGWKPAVGTEHSLERKGQC

SEQ ID NO: 984079 - protein, 94 aa, Homo sapiens
MPAPIPSPIHPLQPIPGIHSRSLGISGDYNFCSSDREVTPAGSNRAVLTTFVGSMIPFSTIFTEISSHSIITNCLRNFALFSQLSEILQAPAFL

SEQ ID NO: 984080 - protein, 85 aa, Homo sapiens
YGGTGAATSLVPGERPQCGVTDCRNGLVRALVCVWAMLAPKRGCLSCFPVAGPALVDMEGERYSLKVGLAQALLAVTQNQGCLKV

SEQ ID NO: 984081 - protein, 39 aa, Homo sapiens
YRTFRSLAGTGVVVEGEQVDAIRDKRIILGVAEGLQALC

SEQ ID NO: 984082 - protein, 59 aa, Homo sapiens
MAAASTELQDVILISVGTFSLLSVLAGCCFFLVLNYGGLIYYWFHTTTKPSLLLDRRVI

SEQ ID NO: 984083 - protein, 37 aa, Homo sapiens
AFTCPAYAVTEHCNLPQSHASWCELVLVGWKCELQPV

SEQ ID NO: 984084 - protein, 64 aa, Homo sapiens
YLATTRFLPTTREKTQVTELNRECNEPAGPDVTSSSKAKLAGVSLRARDWLSKIETGDAISSTC

SEQ ID NO: 984085 - protein, 34 aa, Homo sapiens
MLPDSCGRPGPVRGGAELAHTVHGLGLDQKDLGP

SEQ ID NO: 984086 - protein, 55 aa, Homo sapiens
MSGCPVALLDLDAGVLENIFGVGLSSLVAFLGYLLLLQGFFTDIWVFQFCLVIAS

SEQ ID NO: 984087 - protein, 61 aa, Homo sapiens
MRPGACPRPMLTDPRLLYIGGLGYCSGRIDNVIRRSAIATAGKHSPAFYILRPEAYGCCYG

SEQ ID NO: 984088 - protein, 60 aa, Homo sapiens
AVVTGWSEECRHRWCQKPHRYRAGTVALREIRRYQKYSELLIRKLPEQRLVREIAQDFKT

SEQ ID NO: 984089 - protein, 65 aa, Homo sapiens
  misc_feature (61)..(61): Xaa can be any naturally occurring amino acid
KEPLPVEHQIPLYLAHISSLYPIVCSSHSCYSWTTAGNITEISVTRYITNDDGHHFLADYXFNSV

SEQ ID NO: 984090 - protein, 119 aa, Homo sapiens
SLPVGTWRQLVARGLTNKFDALKDDDMWGPDQNEENSYQQDGSRSPDLTYTTRKCPNPDYRLPVTPIPVKGNGKVGRPTASKASQEKTPSPIEEHEEPDSPPEKNTSTSPPPEKSGDEG

SEQ ID NO: 984091 - protein, 40 aa, Homo sapiens
MMRHRPPHIPPYKSPNFEMYEGYRSPWEWVEAAKGYTCTL

SEQ ID NO: 984092 - protein, 93 aa, Homo sapiens
PRLLELIGLASPVASESPSPLVAQVAVNATTSCGVVSCCPSLSVISAALHSVGEVLLVGEHHEDSIPELVLRQYPHELLTGLVHTLSVFAVPL

SEQ ID NO: 984093 - protein, 36 aa, Homo sapiens
MCKLLVDLAVWRALSPGGEFWRTCEVDAVVMDLRQA

SEQ ID NO: 984094 - protein, 48 aa, Homo sapiens
GRKSPGHRWRQEAPPLQEGCEAYLVGLFEDTKLCAIHAKRVTIMPKDI

SEQ ID NO: 984095 - protein, 44 aa, Homo sapiens
IGIATAWAPSAIFLGHEHAEIYTVLNPGEVLPTAFEASEKCAWV

SEQ ID NO: 984096 - protein, 41 aa, Homo sapiens
PIPRLYARTPSSSYQRPHPVVPPPPYQGLLPEFVLQKCAWV

SEQ ID NO: 984097 - protein, 42 aa, Homo sapiens
DSPPSTTPRRPHTECEHPVSGPAALMCVSREQPKTRRLVHAG

SEQ ID NO: 984098 - protein, 33 aa, Homo sapiens
FTYLRGLGFAGGLVCFVGLFAMKVDMRGRSDAL

SEQ ID NO: 984099 - protein, 31 aa, Homo sapiens
MSRPPLLLCPIITFPYHTFNNQCNRVQFHLL

SEQ ID NO: 984100 - protein, 49 aa, Homo sapiens
SPPMLTPRGSRLSLLITDPVRLLKIFLILPSSQVCHFTPFYHPKQSVDT

SEQ ID NO: 984101 - protein, 97 aa, Homo sapiens
MHTIGLPAPSKGRRACAGSVRYLGVRSCLECLRPPWGCDSVVTLALWAWELSGTCREKAQCLCPSAWLCPCLGGALQCQSGSTNAPMVACETAVCQP

SEQ ID NO: 984102 - protein, 72 aa, Homo sapiens
EYVHEHPGARMCSLTHTRALRHHAPATLVGQRGRCRGTRRMSSYLGCESCLYSQASSFISSNDKFLLHKHGI

SEQ ID NO: 984103 - protein, 61 aa, Homo sapiens
LIASLPDEALVYAVSPGSLEELVGGTGSIPTCYILTANPDFGYYLHYKHVSVFWQHSVILA

SEQ ID NO: 984104 - protein, 53 aa, Homo sapiens
ERTTLHSYHARGDERSTNPISKNHRGGVKKELNSVMNRGQHATINQVDQRDNS

SEQ ID NO: 984105 - protein, 74 aa, Homo sapiens
FSYVIWSRAGLADEFTPALSCSPKHARLRERSGSVAPGASYRPHTVHGLRLGLFQVGEGGESGIRGSPEVRLGA

SEQ ID NO: 984106 - protein, 46 aa, Homo sapiens
SSTHPATGCRDLNRYLMKMLTERGYSFTTTAEREIVRDIKEKCAWV

SEQ ID NO: 984107 - protein, 48 aa, Homo sapiens
MSSLSQSLLTGSFPEPSGVVGYLEQSGGSVRKEGAGTRGREGSQKCAW

SEQ ID NO: 984108 - protein, 36 aa, Homo sapiens
YTHTHTQHTTMYFLYSFTQQLSTRNIFVVGPEVRLV

SEQ ID NO: 984109 - protein, 52 aa, Homo sapiens
WSAVSGGGRCIEGDGDLPLPDDYELFCRDLKEVVQKPEQFLLSTMLVVTKSP

SEQ ID NO: 984110 - protein, 88 aa, Homo sapiens
MASDYHSCQAADRVLLQVDCTMLTCCYCTSSVLMENPGNSWCYFRTERSHCGTALQDSVAFSQHVTRPLLSDPDARCTGLIDGFWLRT

SEQ ID NO: 984111 - protein, 35 aa, Homo sapiens
MLLLTPQLLLLLLQPQLRLKPRKSRSDSQSAHTDA

SEQ ID NO: 984112 - protein, 43 aa, Homo sapiens
ALQLATKVAREELLLATGGVKKPHRWRAWYSGSPLRFCRYHEV

SEQ ID NO: 984113 - protein, 45 aa, Homo sapiens
SREQPGNRNGLNDRPAIILVLIALPYPDASLDISRRGRTIPRLTD

SEQ ID NO: 984114 - protein, 70 aa, Homo sapiens
AALSKTAVAPIERSQAVAAGPARQQADRRLLAVQGASWTVLSCIPEVAGRAVLLRGATLCNVHSLASPLK

SEQ ID NO: 984115 - protein, 55 aa, Homo sapiens
MNPLSSWCIGVRSAPFCSLYCSVKSAHASLKDLSDILWTSAPLSRTDFEALWSPI

SEQ ID NO: 984116 - protein, 44 aa, Homo sapiens
ASRRDMRQTVAYAVIKNVEKKSARRRSRSPCRRRNARNAGAFCE

SEQ ID NO: 984117 - protein, 44 aa, Homo sapiens
THTGRPARALPWKSALPEGPSAQLGHSWALPPYLLQCPGRSRVR

SEQ ID NO: 984118 - protein, 36 aa, Homo sapiens
LQDPPLYTFSPACGEGEDKPCSGRAGSCQCGRSLLI

SEQ ID NO: 984119 - protein, 72 aa, Homo sapiens
MGAGSPRQLSASRVGAESFAFRSAGAREMLVTGPVSRWLAPICGRREGSLPSLSRRGGPGSAPAVAMQPRGV

SEQ ID NO: 984120 - protein, 35 aa, Homo sapiens
FQIASARTARLRGEDASAGQASRVGSEECICTSMP

SEQ ID NO: 984121 - protein, 37 aa, Homo sapiens
MDWPPPYSFRTRRCRCHNMGGLGELANLLLLVCSRDE

SEQ ID NO: 984122 - protein, 106 aa, Homo sapiens
NNLRKTGSLCKTCEPEEDGTIDFPEFLTMMATKGKGTDSEEEIREPFRVFDKDGNGYISAAELRHVMTNLGEKLTDEEVDEMIREADIDGDGQVNYEEFVQMMTAK

SEQ ID NO: 984123 - protein, 45 aa, Homo sapiens
GKTTARKSPILGLAVSGGKTTFKKTRSLGAGGSGGENNLGENLEF

SEQ ID NO: 984124 - protein, 43 aa, Homo sapiens
MTMVAIIITGYGNDGFDDRMRDGIGMGGHGYGGAGDACSGFHG

SEQ ID NO: 984125 - protein, 46 aa, Homo sapiens
GGARPILAVVGLGDSNQFFRDVYGEDFEGQSPNVHPWMCGNGYRSS

SEQ ID NO: 984126 - protein, 139 aa, Homo sapiens
GRPTALSGQVGRSERTSHCSVDCYHRVFSGIFRVIPWKYLPRMSWYGNSPSIRLYSDLMSRRSVSLRDTMMRIRVRSFVPAPLMALLSLSAKKAGVFLRHFTTASMPSSRSPDISRQMLFSMSRPVILWYSLKTATKWE

SEQ ID NO: 984127 - protein, 39 aa, Homo sapiens
RRGPMSQHKTQQKTQSKTNIEEMDCGTDEEEETVPLLEP

SEQ ID NO: 984128 - protein, 31 aa, Homo sapiens
MHPPFTTPPKLHFHAVSFPKHGSPELPFARP

SEQ ID NO: 984129 - protein, 35 aa, Homo sapiens
RLEKGERQTELKRKSLNTDETTIGSPDTRVLSLVC

SEQ ID NO: 984130 - protein, 129 aa, Homo sapiens
MKQDKIYQIPGCSILYVKILDDGIDDERLRREKTPVGTITSAKVMMEGGRSKGFGLVCFSSPEEATKAVTEMNGRIVATKPLYVALAQRKEERQAHLTNQYMQRMASVRAVPNPVIKPQQPAPPSGYFM

SEQ ID NO: 984131 - protein, 105 aa, Homo sapiens
DVYRIPKARKGGRVGARAVVVLQWRTAGYTCGMECAEPLSCMIRALRVSSPPGSGLTAPGDRELNELVDDFLLLGMLLPKAGHLPPQSLILMLHGQELGVHALLL

SEQ ID NO: 984132 - protein, 63 aa, Homo sapiens
RFEKGSPLRGSMEAAYAMSAPPGESPEDRPQGCAWTTCLCLAEPLGGGRGGRGRRISLLALVA

SEQ ID NO: 984133 - protein, 62 aa, Homo sapiens
LEVSPPLEKGPCMRIAAGYLSDRAMAKAVLSIFGNPRHCLLLFMMAGMTVAMYRFRVTVTSD

SEQ ID NO: 984134 - protein, 54 aa, Homo sapiens
MRYHNSHVNSDHPCAALDDQRLGAYVDQAQASSVFLASYIRMTVRLCIPPFSEA

SEQ ID NO: 984135 - protein, 54 aa, Homo sapiens
  misc_feature (44)..(44): Xaa can be any naturally occurring amino acid
MGKVVLHTFCPRCVPVVTYNCVTLFVQIVRLMEQGHSLTGKGNXEDWRVDDVAV

SEQ ID NO: 984136 - protein, 69 aa, Homo sapiens
GSERGPTGSIDTKSEGKMRCLLCQRERARSVERASTPYGIDSDSLGMECIISCKVPLRSLAINTVYYRQ

SEQ ID NO: 984137 - protein, 71 aa, Homo sapiens
RSCFPWCSRLWEVVTVEASLFHHAAYAFTTFTVRLLGSLSQEADNAAGLNGAVFRPEVPLRRDLPLLLFRT

SEQ ID NO: 984138 - protein, 46 aa, Homo sapiens
MASSIDCFQNIKLAINLLAKLQKHIQNPSAAQLVHFLFGPLDLIVN

SEQ ID NO: 984139 - protein, 105 aa, Homo sapiens
NGSKRCGNGQTELTRKFEQINNIGSSRSRCSSLCEINLDDGIDYERLRKEFSPFGTITSAKVLMDGGRSKWFGFVCFSSPEEAIIAVTEINGIIVVTKPLYVSFA

SEQ ID NO: 984140 - protein, 50 aa, Homo sapiens
AIVRWLVSGHHFRRLLLGVASSRSPLNISSICLSCKQCPWIYPQSTFSSI

SEQ ID NO: 984141 - protein, 36 aa, Homo sapiens
GSKRGVIVHILSLTFRFQQRSAHSYKHSHIWISQGC

SEQ ID NO: 984142 - protein, 102 aa, Homo sapiens
MRHVSALVVGVARQNSNEDVKPVGDYENDCAGKASGGLDATGCYYDELTVADLTSMHTDAIYGLVSRTADWTLVTTLLPHTGLVQWTRGMAYDVLVTGGLRH

SEQ ID NO: 984143 - protein, 49 aa, Homo sapiens
LVDNGSGNIGETPVPGLISDGAILTPAVDGALYRADLVASCYARSLAAG

SEQ ID NO: 984144 - protein, 70 aa, Homo sapiens
SPNGMDGKSRQCQKMKLNPNSRYLMHLCASFDLAWCWANYSRGPERCAGTWVGCAAGMVTLQHQCCSGDP

SEQ ID NO: 984145 - protein, 50 aa, Homo sapiens
SDYRCWIQMALREIRSIPEDPASVREIRKLPLQRLVREIAQDLKTDMGPG

SEQ ID NO: 984146 - protein, 83 aa, Homo sapiens
AVLTVPVYNDHMTLSDKALMNGPESSVRAVSSSQWPGQSYTIENHEQLEADPWPRTVCHWHHDPMDLLTMAWGLLYDVDRACA

SEQ ID NO: 984147 - protein, 46 aa, Homo sapiens
MSTDLVKESGPVLDSSYISSFTSSDVNFNQVGTLRRSGTADLRAGV

SEQ ID NO: 984148 - protein, 47 aa, Homo sapiens
FIDTTSKLGHGRFQRMEEKKACMGPREESTDIATGRRSLMPGPRFRS

SEQ ID NO: 984149 - protein, 40 aa, Homo sapiens
EDPRNPYRYTSYVHNISRTLPCKPLHNIIYVTNDHETKPG

SEQ ID NO: 984150 - protein, 36 aa, Homo sapiens
MGFLASVRCLTRVCIRWMLMTNQEEEYHARHFKRWS

SEQ ID NO: 984151 - protein, 93 aa, Homo sapiens
IEHELGSVTFRRLRSIRGLQTACHNTWRHYGGRQRPQPSSSQQHHSSQAPQLQGCTPALYWPHRLQGSKKHLTSATSTGIGTQLHHSLEMRPE

SEQ ID NO: 984152 - protein, 86 aa, Homo sapiens
GLLRSLYRKPHVLSKNTNGQELAERPLTSPEAVSAQQETPHVHANTSCRTGAARREDRGKPSRGNGSSARAGFRPLGDETADLSKP

SEQ ID NO: 984153 - protein, 39 aa, Homo sapiens
DLEDPRKPYRSSFLGTHMTHSPLIALHNIFCHQDLSKPW

SEQ ID NO: 984154 - protein, 80 aa, Homo sapiens
MSPEEEYTDGLPSHGVGGTCLRQHGPALSKSQYSPAIEGHGNNIHGLAKAINQMAAALFTIHKGSIEDRLKEFLTLGLQR

SEQ ID NO: 984155 - protein, 49 aa, Homo sapiens
YQENRGSLVVTNGGVEHDLDQIDYIDMLHRRGRGGRGETAQGTRPEQAR

SEQ ID NO: 984156 - protein, 38 aa, Homo sapiens
MSQPNKDSGVEGKGSHTKESKVSSATLVYKVRDPVGTM

SEQ ID NO: 984157 - protein, 53 aa, Homo sapiens
HGEYGLGAVADGVSCNPIVTVFLWVTYDALSPELYTTYFVTKTLASQETLASQ

SEQ ID NO: 984158 - protein, 113 aa, Homo sapiens
AAAVAVDLRIPRVARLPLVRACLALLFVSWDYPRKGSLSVSWCWVPRGACCSERPDDLGGECVPCFLLPRVSVLFMSPVHFYGVLHVIARGVSDRFPYLVCTGTASLGRVESV

SEQ ID NO: 984159 - protein, 40 aa, Homo sapiens
NLHRYITIIKDLSKPGDLSKPGDLSKPGDLSKPGDLSNPG

SEQ ID NO: 984160 - protein, 45 aa, Homo sapiens
PWLLRSPGLLRSPGLLRSPGFLRSLHLSCLFTVPDLSKPGDLSKP

SEQ ID NO: 984161 - protein, 70 aa, Homo sapiens
WISVAHGVADAQLDAPFRVEEVVSMAQLLPMARPGCAVMDRTSVGAAFFFPSEGSNLTPAHHFQDFRFKT

SEQ ID NO: 984162 - protein, 43 aa, Homo sapiens
DVRTPRMQGSDLVSMETGEEKLPPQSEYGRVVACTLIEVSVHS

SEQ ID NO: 984163 - protein, 47 aa, Homo sapiens
RTFGEKRGQLDYQSLLVRLGLIRQKVRERLHNEECQKMDLWIAVHLG

SEQ ID NO: 984164 - protein, 36 aa, Homo sapiens
RQSEEEEEEEKHPPKPAEPEKNRINKAVSEEQQPAL

SEQ ID NO: 984165 - protein, 41 aa, Homo sapiens
SRDPGPYLRGLSQTGQVEPAVPRTVTLCGAWVRQTRLDPEY

SEQ ID NO: 984166 - protein, 117 aa, Homo sapiens
ASTSQVAGITVAAAPHLANLLNFFVEMRSCYVEQAGLEFLASSNPPASAFASAGIIGMSHHAQPAESFFFLATSASGFQAIPRASPSRVAGITGLCHHPRLILVFSLLKFFKQSLDT

SEQ ID NO: 984167 - protein, 92 aa, Homo sapiens
VTASDEVDVLMVAARDQSYQMVGIVGCVTRVVHKDVVSAMGSQERWVMTSLVLQVLGTPPGVIAHVSVDCQAGDVKSLNDVAVPFLAVLNVV

SEQ ID NO: 984168 - protein, 64 aa, Homo sapiens
PGHRTSLHIIMSTPDSSWILLTWPIQPHQQRRTRDSTLPQLGQCGTQHHAALLPSGQISSTVHL

SEQ ID NO: 984169 - protein, 50 aa, Homo sapiens
IPPVKAGPTGFLFYTLMLSPGDNLPAVLFYSKQGVTSYYFWVVCKGLGAF

SEQ ID NO: 984170 - protein, 94 aa, Homo sapiens
YAWRKSKLSDPGGPVALSREERWRGPLLPPNAYQVGPTASAPPWTSGGWSTLLEICFDERPLCRAAALREKHFYQRQHRLPEPSATVAHSPASV

SEQ ID NO: 984171 - protein, 110 aa, Homo sapiens
DLEDPYAWRKPTFPIPRSVEPECAESAEGLLSPCSGRETGLQVPKVAFLVALPKLLFLLQPSCVVTKCPGSLLSGVQGPLRQHPRDLTFLCVSSLSGPAFRYSLTIDVFE

SEQ ID NO: 984172 - protein, 40 aa, Homo sapiens
MVNCYPKSIYLCRPIIIFSDMVLARKYLHVRNWYVGGYLS

SEQ ID NO: 984173 - protein, 105 aa, Homo sapiens
MWLQLRPCPLSMAFSREGQGFLYSYPIHPFIATLSLISLSLSLSHTHTHTHTHTHSLVCLAQLPPLCMPFLECLVSLRLPTHGCKTQYTHTDPLGFKLTLSPLLH

SEQ ID NO: 984174 - protein, 104 aa, Homo sapiens
SSRSYSCDMWDADAKVRSMAKPVPARLEGERLLFDRPRIWRRAGAGGGAVCRRPRAGRRMDRGDGGGVTAPPRTGEELAAIARTAYSPDPMLPALSHVRNWYGG

SEQ ID NO: 984175 - protein, 93 aa, Homo sapiens
PPHPHAKTHTSFSYPYTHTHTHTHSRYSPTLTAHAHSKYSPTLTAPCRHIHPLIYHHPDSSHKTMEIHSKPHASGYSSIAIAVVYPKTTIIPP

SEQ ID NO: 984176 - protein, 49 aa, Homo sapiens
  misc_feature (3)..(3): Xaa can be any naturally occurring amino acid
VQXRSGPISRAELSRRTHLSKASITSLAAELAARGLVREGSPDRNWYGG

SEQ ID NO: 984177 - protein, 77 aa, Homo sapiens
RAVQLRLDEMRRRDVAGVRFDHRPQFARSRDVVVRDVEQAQAFLQIDRPAHAFRCRQLPGPHDSLPLFAGVRNWYGG

SEQ ID NO: 984178 - protein, 43 aa, Homo sapiens
YLTSALASSGLLRTDSASALAVPVLSTAMLRALQLQKSLGELS

SEQ ID NO: 984179 - protein, 44 aa, Homo sapiens
QVTTDTGSGDTEGMPVSFPFSSGMTLPTACAAPVRRDDVLESPA

SEQ ID NO: 984180 - protein, 61 aa, Homo sapiens
SVGMQPALLTAARASNSTKVDKTSRCLHGPIPHIAHMFLALKKWQGPKEFVTKRYAPLTPR

SEQ ID NO: 984181 - protein, 105 aa, Homo sapiens
GIVPTGTWGLDQETHSAYRAWRVDELSVVDYGLASLGGQYGDDAHEAPATCPVLTNVPSRMSLCGKLSAYERAQRPVVPVTRHIVPCQCQCACRSHICSRHLWEK

SEQ ID NO: 984182 - protein, 37 aa, Homo sapiens
PKILLDCLQKHIPNIVKIHEKFFNRQLLWGPERKYSP

SEQ ID NO: 984183 - protein, 53 aa, Homo sapiens
VHGYSHYNLMAMEILEIPFDTYTYTGTTYLIPQSRMWIMSLYVSDIIIYQKFN

SEQ ID NO: 984184 - protein, 56 aa, Homo sapiens
LYHNKVQLTPTGGLGLNLALNPFEYYILFFALSLITQKPLPSGLHVRTGDCAYCIL

SEQ ID NO: 984185 - protein, 60 aa, Homo sapiens
LYNAVLTDFYQATTLSLQVLGTLVMLGLGSSTHNACSRSSVVVAKTKSACLSIITQISTT

SEQ ID NO: 984186 - protein, 76 aa, Homo sapiens
RHAGVAVGCGSSLLPSFPHNLVPSLICSSCTSLLRTWPGAVAHVCNPGTLGGQGGQITWGQEFETSLANMVKLHLY

SEQ ID NO: 984187 - protein, 58 aa, Homo sapiens
  misc_feature (1)..(1): Xaa can be any naturally occurring amino acid
XPSEHCLLAGSHRGCMLPSVLRYSSFWSPLVAPVGALLVVKHPFVVLHQAAQLLGQLR

SEQ ID NO: 984188 - protein, 38 aa, Homo sapiens
LILNIVVLTPINGRLCNRGVVAGLFGCTIRCRSSRSTV

SEQ ID NO: 984189 - protein, 95 aa, Homo sapiens
SFAQRCRCYVGHICQSLESAKAGIRVPRTHQWVLCKPERTVLQIRDWSASCVAAEYWSQEPAMRFLRTECCFRAGSSISAQEKVIFPEDVSPKDQ

SEQ ID NO: 984190 - protein, 42 aa, Homo sapiens
GLESDGVGPSMSCAGDAGFPVRHISAPSPWGGASALGSSLFT

SEQ ID NO: 984191 - protein, 150 aa, Homo sapiens
SFALRCLWFGDVRASSDNPHAGMPRDGWYCTRWLLCVPGRWRGRCRGVRVCHETFIKVKFIHDQTSPNPKYRGFFHGVREIVREQGLKGTYHGLTATVLNQGSNQAIRFFVIDLPAHWYRGDNPNKPMNPLITGVFGAIAGAASVFGNTP

SEQ ID NO: 984192 - protein, 79 aa, Homo sapiens
TLEDPDWIVLLIVRVHCVRQALVYSRGLLDLLASDGSRRVVPLESWRFPMITRSPTAPVRDRCVPQHSSTEVCSAALDA

SEQ ID NO: 984193 - protein, 122 aa, Homo sapiens
SQSGELSKPSDALLLAVAIAAHVALVFAGIRSFWISEVAPVGALLVVKHPFVVLHQAAQLLGQLQSQVLLGSGLSAVLTTVCVGWSREAISSSLMIILLMMECTVGRSSSNMSDSVSMLMES

SEQ ID NO: 984194 - protein, 58 aa, Homo sapiens
MPLDFCWSSLRRSPARSVGRPRDDWVPRSSVGWAASGLLLLVRGCALLRCPPRGLALS

SEQ ID NO: 984195 - protein, 100 aa, Homo sapiens
HLHNKTSCPRVHTFEQEYKRSETESIRQDKEIKGMQIRKHEVKLSLSAHDRIKYIENPKLQKWHQRNLRTDKFTELAGYKINMQKSAAFLYTNNELAEQE

SEQ ID NO: 984196 - protein, 58 aa, Homo sapiens
FFRPGLALAIVTEEETEAVYWMLPPTATEGPEHQILCLWLLLEGPGCMRVLRLGLTYW

SEQ ID NO: 984197 - protein, 56 aa, Homo sapiens
STGSRHRPHHRDLRERSPTHSCWQYAVVSYVLGIDLQYWAVSIGNVDGHLYPQAIL

SEQ ID NO: 984198 - protein, 77 aa, Homo sapiens
GGLRKLTITAEGEGEAGTSGHVGAGETERVKWEGCTLLNNQIPQALTQYHENSKGEVGPHEPITSHQVPPTTLGITI

SEQ ID NO: 984199 - protein, 64 aa, Homo sapiens
MSSSNIDDFQYPAARRVGAGNTRRLRKMAIQPVNNRQRLAERLTVVREQRRHQSDRVHSPICQL

SEQ ID NO: 984200 - protein, 150 aa, Homo sapiens
  misc_feature (139)..(140): Xaa can be any naturally occurring amino acid
RSATDADEDNSGWLGVGKDDADHSKPGAWRPGPSPLINQYSLTVGLDLTPHDTKSLLKCVESLSFIVRDAAHITPDNFELCVKTLRIFVQASLNGGCKSQEKRGKSHKYDSKGNRFKKKSKEGSMLRRPRTSSQHASRXXQSDDDEDEGE

SEQ ID NO: 984201 - protein, 87 aa, Homo sapiens
LGIDHLLKRSVYQVVHNLHLALAMRTDVSPSHASMPHDELSMVVIDVSCELSVITKAVRILPFPPEFLGSKTLVMALVNHGMYTKPA

SEQ ID NO: 984202 - protein, 102 aa, Homo sapiens
MRLMSRCVLLETTGPVCRLVPRFVDCEILLEAGTIKLSLEVTWSPFDKDDQPSAASSVNKASTVTKRFSTYSQSPPDTPSLREQAFYNMLRRPEELENGHSM

SEQ ID NO: 984203 - protein, 34 aa, Homo sapiens
MPAIILDPHRPPIPTTSYYITDEGPRSLPYHQYQ

SEQ ID NO: 984204 - protein, 33 aa, Homo sapiens
SCKALSYSSPAQAVSCHRGSSLSDLFYHGMARS

SEQ ID NO: 984205 - protein, 40 aa, Homo sapiens
GRGLWSCTNCLDSPSLVVASIHEAVLRDETMSVIYKWMPS

SEQ ID NO: 984206 - protein, 59 aa, Homo sapiens
RLLTVSTELVQVRLAAGVIKNVEQDPGERYLEVSTGSRVTELVQGGMHRSGEYTSSWRH

SEQ ID NO: 984207 - protein, 118 aa, Homo sapiens
HFVGSNSPGGLHGSWLQPHVGLLFHSAPLHQRLLPQALGQRMRGHAGRGCRRCSLGQDVSGIQTPSFPIHVSRIFFHNPLAHGRQLGAGCTVQLWSPAPSSLHAWSPSACQLEAWGIV

SEQ ID NO: 984208 - protein, 33 aa, Homo sapiens
CLESPARSLRTSTLKRQLSDQRLGGLPVAANLG

SEQ ID NO: 984209 - protein, 71 aa, Homo sapiens
VFTMLAAIILGPHRPPIPTRLQIRDEVNDSLRFSIEINVATKVVLKPTSTPTYGGLIFNSYILPPVIPRTR

SEQ ID NO: 984210 - protein, 34 aa, Homo sapiens
RVVYKPDTVAFVPKLVGSGDNSAESQDANYALDS

SEQ ID NO: 984211 - protein, 56 aa, Homo sapiens
ALLLLRMPRKEVCLGGLRSNGRLRLQNQPAEEALVVWPCASASSCEVSHVPYVWAF

SEQ ID NO: 984212 - protein, 41 aa, Homo sapiens
LRGGRDKGGLTPVYGSRNPLESEARDLVACPDLACNGHLLP

SEQ ID NO: 984213 - protein, 104 aa, Homo sapiens
MLRCSPSYKLLLACAVWPPAPWVVFSGVRSVSLAGLSHGRGIEEILSDLPLRANPGLPPELIWVAGAGHVESALHVPWVKLHLAQGRPSDFQLVTHVLNPLTRA

SEQ ID NO: 984214 - protein, 61 aa, Homo sapiens
HLLGRPASFSSSSFIFPQKIRVRSGRSIARVLTVLKQTQNDPLRKFYKGKKYKPLDISSRR

SEQ ID NO: 984215 - protein, 55 aa, Homo sapiens
TASDGEEVAGVGLWDTVQASWTGGGRGRRHWLRVALCREYGLSAPHTSEVGFGDA

SEQ ID NO: 984216 - protein, 34 aa, Homo sapiens
RRGELETATTFKEAAGRLRMNVEKKIDNYTEFCL

SEQ ID NO: 984217 - protein, 41 aa, Homo sapiens
MLLLSDDDSGVGGGGKAGGTSLSVWRSSRRGSGCTAAGPPA

SEQ ID NO: 984218 - protein, 77 aa, Homo sapiens
MTRTEKVHALNDVTAVLNTRCDVLYYEGTHVVTLYVGLSSSGIASLRSSVQRANSGKVVLNLRFPQQDFLSEQIWLL

SEQ ID NO: 984219 - protein, 66 aa, Homo sapiens
TISACSGHFYALELIQQLRLQDCGDVLRVGMMHYNTQQEIDMLFEVLASEKVAEHHTQKDFCGTEL

SEQ ID NO: 984220 - protein, 113 aa, Homo sapiens
MVYTPHTHSQALTKHIAYLISICLRQQHSPRSNSHFSSKTPEASPRAVILIIAHGAYIPHYYFWLGKLQITETPLTGRIINPSLKGLHNSNSQLISFLDELLRQASVNPEALP

SEQ ID NO: 984221 - protein, 40 aa, Homo sapiens
SYTPHIRMNPVYIKSTTKIELNLNPPNACFNANPIASMTF

SEQ ID NO: 984222 - protein, 49 aa, Homo sapiens
MPTPSLYYPYGLYNKLHLNRSLHTLHSTPPESFTRRSSFLIIAHGAIHP

SEQ ID NO: 984223 - protein, 44 aa, Homo sapiens
STRHRFEVLKAAKNKKKKKPAGRVGAWGQERSQAAGQNNSNAAG

SEQ ID NO: 984224 - protein, 45 aa, Homo sapiens
SPASLVATLHPSTDKQLEKRSTYSTGRHVSLVKTDSTQNQQSKCD

SEQ ID NO: 984225 - protein, 30 aa, Homo sapiens
MGPFEELIVGTWKQEDIVSGRLCSRVICLF

SEQ ID NO: 984226 - protein, 58 aa, Homo sapiens
HLVVVKNAPSAIWPGTVALREILPLPEVHRAADQKAAFSCVWCCEIAMDFNDLTCDQC

SEQ ID NO: 984227 - protein, 168 aa, Homo sapiens
PGLLVAAVCCVLHIAIVHGWSGLCPISLVASGDGVRVMTAVPGANVCSSCPTGLASSSGQMEAAKVPLRLSLKFEVWCRHAGVTPGALKTPEGRLHALSETRLCFISRASLAEPLFVENDSSSSGLEDATANVSPMACSPRKQAAGPGRDFAHAGTEGSWGWASGDCC

SEQ ID NO: 984228 - protein, 76 aa, Homo sapiens
PYEQGAVIIGFPLMIKECPSPLLTTRTQPYSALIPSTDVIIENHHAYYSSSHIGPVHSTAKHVNSYWQCHPYCMLA

SEQ ID NO: 984229 - protein, 41 aa, Homo sapiens
SDYTVSVKSVRPFLCQFVNLLLQVVRCQLTPKWGRCVDRVK

SEQ ID NO: 984230 - protein, 81 aa, Homo sapiens
MAEKYHNVGLSKCEIKVAMSKENISKQQAGSDLGGGLAGRARGRGGDHQSGYGKVSTRGGPQHSYKPYYIIPFATYTQQVV

SEQ ID NO: 984231 - protein, 89 aa, Homo sapiens
TRSHYSLSLSHSYPNIKENMLLSVTSRPGYFDYGGTIETTRSHMCHWLSRWHHLAQATVHLNSSSEDAMAKDQLEQNQAYTSRLDEQRV

SEQ ID NO: 984232 - protein, 59 aa, Homo sapiens
PIFGETTAPACFDRDVQGKLQVKDKCPRGPGLAELHLVFDLPLSDGHSQLTIHTPGKHP

SEQ ID NO: 984233 - protein, 116 aa, Homo sapiens
MYSFSPGNCTADKAQQNAAHDVLQFLNGMNKTGCFLGMLHVHTMYYIAPNKSKELDFPALACTHLAIDYTTGKQESVYVGWIPELQLTREGRRISSLTGSQGIVILGEHMLIRFTE

SEQ ID NO: 984234 - protein, 33 aa, Homo sapiens
MIPAISCTYWWHELLSISQRAVMALSYLTARYF

SEQ ID NO: 984235 - protein, 55 aa, Homo sapiens
NDAVAPSGAGGVLRADQIVNQNLPPPPPAPGSPAHNTLQQQAPAAKPGKNLYMAI

SEQ ID NO: 984236 - protein, 35 aa, Homo sapiens
STVEHGMHRLHICVAVPLIVVYLTGSTEYDMAHKC

SEQ ID NO: 984237 - protein, 59 aa, Homo sapiens
FLHTFFPGLKLCATFEMKGLSCLPSLPPGHVSLIIFTSTAWRDHTRSIPTTVIKFNCTA

SEQ ID NO: 984238 - protein, 83 aa, Homo sapiens
GGGERGTKYPTCQDEELELYDLDKTRKSKLHKIIRSTKYPEYLTSPTSPCALVHIKCLEGYTTNWYPWLLYGEESSVFRAVAV

SEQ ID NO: 984239 - protein, 115 aa, Homo sapiens
YNVSSIYEYCNVMVKWSIIKHKLQMEIIKLSGVGHLNNNVKCLGISQRNLGLLIWISTGRDGLCSGRFLDAADRWLDFSTAAPPPWSAVSLLPSLGTGMGRGAEDLLKTASTRSQ

SEQ ID NO: 984240 - protein, 52 aa, Homo sapiens
MTLLSVALAHNIRLVSAWVLCVRLSSPACECARLNGIAEYRVVLHWILPEAL

SEQ ID NO: 984241 - protein, 88 aa, Homo sapiens
GQCYNRELVFTGRRCLLGSNVMAGVVVTLTEKIPLQHSSYSAKVKLDSLGVDAYDILYQSRVFIMNQYIINYCVGNVVSTVKRPKAGL

SEQ ID NO: 984242 - protein, 72 aa, Homo sapiens
QEDPFEAEFENSPGNISETLTLLKKKKGSWMRVDKPVVPAIQEAEVGGPREPEESEAVVTYDCAIILHPGQE

SEQ ID NO: 984243 - protein, 93 aa, Homo sapiens
MTESPGCSNRETNTRIPWYQCYVLMGWRGIIQGPPGPGLIACCVMAQSFAKTGCNEHGREESKCLLPHNHMSKAEVKYSSGELIPPLPLFQSL

SEQ ID NO: 984244 - protein, 103 aa, Homo sapiens
GEEGGKAGTRRHSVCREVLTNRLSFLLGLKKKKFVINILLIGNRCTRRNLIVFIWRLGIFSLISYAQLYLGNAMRHQNEHAVSKNRLSGRKKYEQEEAPEADP

SEQ ID NO: 984245 - protein, 60 aa, Homo sapiens
GAGEVQAAAAGVSSGRSAGQLLEERKKRETHDALALECSRNWVLLLTKERDGMLWLQSVR

SEQ ID NO: 984246 - protein, 72 aa, Homo sapiens
PIVRSTSPYMDRSLEVDQDSTLASIWRSRTVLTVSTELVQGVHAPARGEYTVDHGSSLNRYFGGQHVCSLCL

SEQ ID NO: 984247 - protein, 37 aa, Homo sapiens
FTLFFRCNIISKSNIKRGKHMDFLSDFEMMLQRKKSM

SEQ ID NO: 984248 - protein, 73 aa, Homo sapiens
MYLGIPGPEHRRLLLTQMLPRHVARHRARAHSIQIMKVEEIAASKCRLSGVMLLHDSQIMFPLPDRVLRRRLR

SEQ ID NO: 984249 - protein, 73 aa, Homo sapiens
RTVAMHVIYAADGSGHTERTLKWAKIEPHCLGKRLTLAKRRDNRLFVEAVLWIARTGSPWGDLPERFRNWYGG

SEQ ID NO: 984250 - protein, 71 aa, Homo sapiens
AGRSEDPVRGIGALVVFPLQMIFLVVKRGVGLVLSAKLLGTCRGRTFVITVGGIGFSASVSPCYFSYPAVR

SEQ ID NO: 984251 - protein, 49 aa, Homo sapiens
  misc_feature (36)..(36): Xaa can be any naturally occurring amino acid
  misc_feature (43)..(43): Xaa can be any naturally occurring amino acid
EWRARVQWVDITHLEKNATLLFPESIPCGHPRPGAXSSTMFLXHTAMTF

SEQ ID NO: 984252 - protein, 40 aa, Homo sapiens
GYPLYMLRTLDIRGQHRVGAVGGAWIAAVPPRYGKELLRR

SEQ ID NO: 984253 - protein, 40 aa, Homo sapiens
ELCWSESRVIPFVGGAHAEEEERHGRRRLRTCVEHGAVLR

SEQ ID NO: 984254 - protein, 52 aa, Homo sapiens
KVDIISSIHLSKVLTILLTDIKKSFISGPRFVHSGIVTLEQETAFPLLVRRG

SEQ ID NO: 984255 - protein, 120 aa, Homo sapiens
VVVLRIPVRCTVPGVPLMHAIGSHGVGGADRGLACGACRTMQLPDGFGSDQSEIVYRGAGSIRDAGGAFVPERAALKRNDMSEHRVENNWQLCKNTMKKTSFIMRRRLQRLQKEIERRRL

SEQ ID NO: 984256 - protein, 42 aa, Homo sapiens
PSSPRYTPALAQGERKEQSNTQSPTDFDSLEIQGQYSDIHNA

SEQ ID NO: 984257 - protein, 31 aa, Homo sapiens
MDAGMLWDLNEGKHLYTARWWGHHQTRCASV

SEQ ID NO: 984258 - protein, 89 aa, Homo sapiens
MTVLRWRTERRLVTDTLSANNAVQSVEACGYKTMLSLDCRRKLVTGRLDRPLTACRTGKHYDDPRKTCNYTHVLDLTFGFRSVLLLTTY

SEQ ID NO: 984259 - protein, 62 aa, Homo sapiens
MSDRWDTGMCQHAWLILEFSRDGVSPCGQAGLELLTSGDPALFPECTDYRHEPLQPTKTDII

SEQ ID NO: 984260 - protein, 63 aa, Homo sapiens
GNASDGGEIPSSVPMKVRGPVRRQGQVRVQSKDTDSIFRLQSAAPATEDTDVKSHAAGSKQHE

SEQ ID NO: 984261 - protein, 69 aa, Homo sapiens
TTGGEGGGRLFCRRLVAVGLRDWYLVVLVVTGRTGRDRGLVGVARGGAVGDWSRDLVVVVVVSVWTVVL

SEQ ID NO: 984262 - protein, 67 aa, Homo sapiens
DAACQTVEYDISTLLTLFSDSARLHQVKRQPCGHTKPVAGLFTRTRVKIHTHTHTRMDIYPTPAFVL

SEQ ID NO: 984263 - protein, 73 aa, Homo sapiens
MKAGYTDVAPTSADGWINRRGSYIHERMNKQTWALHPRTDGSTDVEPTSTDGMDNIDMAATSTDVTGDNQNVA

SEQ ID NO: 984264 - protein, 68 aa, Homo sapiens
TTSPARMRFSDLYMASLSCLLNYRVDFRRATHAVRRCSDEAPLWMDQLCTGCMKRSEKRTRRLEKYVG

SEQ ID NO: 984265 - protein, 99 aa, Homo sapiens
WAQQGCIAATHVRLLPNEMWICVCARSVGSIPALCWICVPMEEGGGVSPPSTALKSSQDNYMADMDELSSQVDEKRKVSVCRLLTMAGRYSCSAPFRVP

SEQ ID NO: 984266 - protein, 148 aa, Homo sapiens
LDDPGLLWLLVIDWCVFMVFLSGELEPRAGIPEICGLELECALGKTHKGGDCSSGPQRLVSFRLIRDLHQHLRERDSEDYISMSSYEGSEIYLPEVVKPPRNPELVARLEKIKIQLANEEYKRITRNVTCQDTRHGGTLSNQVGGRVP

SEQ ID NO: 984267 - protein, 64 aa, Homo sapiens
ESGKKTGMEPEEYDSDILRTLAEAYKIRLTETSHLNPNRLLCAHRETGALIELRVHISDLDLSK

SEQ ID NO: 984268 - protein, 37 aa, Homo sapiens
QYRTSTKSHYPPRPLDYYLPAPASRRLTLYPHSCELT

SEQ ID NO: 984269 - protein, 135 aa, Homo sapiens
VSGLYKPWVFTAQSSQREAHVTPFAVCVSSLSLVCECFGQPTVDKVVAEEPQRELRPLLPRNVARLLYKSVPDHISNQQVKAINQGLRADLLPRMIVLLVLTSGRNSTAFLCFFTSSGVEDLRTFMSSNPLITPS

SEQ ID NO: 984270 - protein, 104 aa, Homo sapiens
MGDCFNKSVSQVNGSGEAVLVKRDKLGLGMVAHAYILELWEAEAGRSLEVRSSKPAWPTWFSRNPVSTKNTKKLAGRGGAYLESQLFGRLRNGYHVQGRQKCAW

SEQ ID NO: 984271 - protein, 38 aa, Homo sapiens
ESKQCPESIQCPESKQCPESKQCLVVMKWARAYIILRA

SEQ ID NO: 984272 - protein, 33 aa, Homo sapiens
SYAVLTTQPRVLTLTTPVAEEGIARLILVKTDP

SEQ ID NO: 984273 - protein, 88 aa, Homo sapiens
STAQCVDTVRVQQCIPLRGQHSLYCSHYQKQLAISRVYTAIHIHAYNGDFYVGRVLKILSSDTFELKYDSIWISNFSFTLVRVDKMQS

SEQ ID NO: 984274 - protein, 70 aa, Homo sapiens
MHRLVNSRPYYSYKHCAVGCQAFRDPGELYPNIGLLGHGRSYNSHAGCPNGKRTRNKMYSGTVGVQSASL

SEQ ID NO: 984275 - protein, 87 aa, Homo sapiens
DTSMTRETPRRTTYHLQNQSTPHTGITHTDTSRPRAPLTQTPPDPEHASHRDPITRKPPRPETPLTQTPPEAEHSLNRDPSHGKTTR

SEQ ID NO: 984276 - protein, 113 aa, Homo sapiens
YSEDSPVTCFGLTTIVTEHVTPITDVTVRGSLWLQKTVDAVDCRRKLVQGDLDSTLTACRTGKIDDPVHIVLTHVLDLTLVSDCFLLHLLVTLTVTDYLLTATYIRTVFTDAG

SEQ ID NO: 984277 - protein, 47 aa, Homo sapiens
MLGWTLWLAAVPNTNTHWYWGETVTSTSAKSLVYGIRGGCDGVLLLA

SEQ ID NO: 984278 - protein, 125 aa, Homo sapiens
SLPASVQLEQPLEHPCDGRASHVDDLPHLLLVCEQIGQKIRKITDCFHCHVFPSLACMDVMALPRCPAAAATCRARSCRSSSGTHERFLSHVLVPEIAAPAACHWHVQVHNNEGRATLALNHRTP

SEQ ID NO: 984279 - protein, 53 aa, Homo sapiens
  misc_feature (31)..(31): Xaa can be any naturally occurring amino acid
SNIEDTKALLRIEQVKERGRQLQEANRESTXQRGGPYYSTPYTHAKPPATVTH

SEQ ID NO: 984280 - protein, 63 aa, Homo sapiens
VVASICNQSQQQYTFLLVILPCSTSLIHQILLESYFLVLVRNFHRNRVGGHNQVGVRKQVVRP

SEQ ID NO: 984281 - protein, 44 aa, Homo sapiens
RGMEYLESKCYAYTGTWLLGTAWLTEKNVLTISDFGMYRAGSRW

SEQ ID NO: 984282 - protein, 43 aa, Homo sapiens
ATNDVHDRGSLWLQTNVEPVDCRRNMVKGDSKYSAGLYGRVKL

SEQ ID NO: 984283 - protein, 60 aa, Homo sapiens
MLDEVSAREPRPTLADCKYLGWLEEQLQARAETLVWLCTNETRSTHTLDLYQAALGGPRP

SEQ ID NO: 984284 - protein, 120 aa, Homo sapiens
MSRYTVEKHRRDTHTHTHTHAHTHALISPKVVCHVLIARGRAVEVCHQDLGPLIRNAVSPPGGVRAGDRVRRLVASYMICGHTIILFRASVSSLRASSFFQFLKPSDEMSGKLYPPVPRY

SEQ ID NO: 984285 - protein, 46 aa, Homo sapiens
  misc_feature (39)..(39): Xaa can be any naturally occurring amino acid
YSHTAGGAGSDQACRCPPALPGYSHMCRCALAAAVTSTXHNVSLSD

SEQ ID NO: 984286 - protein, 82 aa, Homo sapiens
LIPSNYVQVYLEKHTQEHTHTHTHTRTQHALISPKVVCHVLIARGRAVEVCHKSVASSSKLYITLEEIRARGQSQGDLCIAT

SEQ ID NO: 984287 - protein, 48 aa, Homo sapiens
MTVTRPVDTPCGYQLTLFDAVRLPSDKLVTRDDLERTSDVLVRTGTNY

SEQ ID NO: 984288 - protein, 39 aa, Homo sapiens
MRCSIGGVITNDALPCCWLQIHIVHDLCQPCPPAGVSQL

SEQ ID NO: 984289 - protein, 115 aa, Homo sapiens
PGRGSHGYPQAEKQRVERASSTPWEEEESHRPYSRGKTKRGGVLLSVVKANKPFKSVPYLCLSLLVDKLDLFLQSSLLYVVLFTVYEENPVSHRHTAPMTDHLPKVRFQVIQLIS

SEQ ID NO: 984290 - protein, 41 aa, Homo sapiens
PPWLLRTGPGTVPLEVPQVKAKRTDDGKGLGMQLEVGPLGP

SEQ ID NO: 984291 - protein, 42 aa, Homo sapiens
DEDVVVGFVKCVGPPGESGELLWRLLKGCDGGGEVGKAVHGG

SEQ ID NO: 984292 - protein, 70 aa, Homo sapiens
MLYPWECFVFCLLIFGNFTNQIHTWSAHCTLGMHAVVTILQDWYVILPRTDHRIHHVSPHENYFCITRGW

SEQ ID NO: 984293 - protein, 135 aa, Homo sapiens
MPQGHDGGHDNMDIDQVDELMQDIADQQRTCSRRFQQTISTTCSGSEYEFDEELSSWLALEELEQEELDQNLLELSGTRNSTSTKSSLYSPTIKTRQEERRGGRRHEGIGELGWIHVMGSSAGLGPDRLRWPAQR

SEQ ID NO: 984294 - protein, 110 aa, Homo sapiens
LLCESHIKNIFTETSKLEFDQTRVPGPRQVDAENSPSHIIWEEDSDSDSTSNPEGSAQCPLWCQGAHQQLVTLANKLNDTEHKPEEQKTEANIATEVSSKEQGEVNKSKQ

SEQ ID NO: 984295 - protein, 103 aa, Homo sapiens
SDLFELGELWAPLTWAVAFRCDTLSIVLRHGLTIFTAGASFRERLQRPPAHRITSSDPWVPDPQFPDGRLGLLSGDCLGTCHVVCLRLDPRTPHDSSGTSGTL

SEQ ID NO: 984296 - protein, 56 aa, Homo sapiens
ILKALVCFSDLYMASLSCLLNYRVDFTLFDPRRTPLQHEAPLWMDQLCTGCMKTPF

SEQ ID NO: 984297 - protein, 97 aa, Homo sapiens
ALLADMSARRLYHRSSRSLVADIQLLKTKVTVKTKGRHTLIRVHEESYFEVWLVKAHGVSKPHDQNQSISSSFLASIIATTSQLLLSIFIERWQLKP

SEQ ID NO: 984298 - protein, 77 aa, Homo sapiens
MASLDPAPASQRSLQALKFLKSSSPGPGHASLQTLQAQLLHLGGPSRPSLCLPSVSRVRHLAHRRFFTPSIWLTVEP

SEQ ID NO: 984299 - protein, 43 aa, Homo sapiens
MHQFLNFSPIEAPSEPAAFAAHPSEQSLVVTQEGSTESQSLRL

SEQ ID NO: 984300 - protein, 49 aa, Homo sapiens
KVDKGERPTELKRKFEQMKQDRITRYHGLLYLICEEILTDWYCMYETSP

SEQ ID NO: 984301 - protein, 121 aa, Homo sapiens
LSCLRELSYMSYLSPSSGIVLQWHNLVGLPPPSSDPLTHLLAEFLLVAANSMPISSRSCPSSVTAFLSRSIRTLLLPPVSRFRFFSSARTSITLQLAEPRSSQSPNALGREKPCHGPESPD

SEQ ID NO: 984302 - protein, 100 aa, Homo sapiens
PRCVRDGARGWQTVPCTEFRHTMWPFCSSSIQLLQKALSGPRTGPRGVDCRWDLREGIIITCPLTLFPCDHWCALFTYGWCMSPTFSRDGLWALWYTSFP

SEQ ID NO: 984303 - protein, 137 aa, Homo sapiens
NALEGGDDSQNELQSSFSFPAEELCVEAGVVERKIYLHPLYLEKEPAYRSQGQHSPLLWGQYTVERQKRLLPTGRKAGNWEEDGWLASFSLEPAGSIQEVVDSCLKKIAPRLGLRVKGHPRCTVTHLAFCRALGTEL

SEQ ID NO: 984304 - protein, 37 aa, Homo sapiens
PPPPGSVSSAFLVRACAWSIAWSNSLDTERFGRHHAS

SEQ ID NO: 984305 - protein, 41 aa, Homo sapiens
LTPWAHAEAGPMSRCCAGRSSWEMGVRVIPNNEAPSRSAPG

SEQ ID NO: 984306 - protein, 79 aa, Homo sapiens
LLASVNRFHARVCADGLCEHIVVKNAWTTERFGRHQPLEARTGRAGEKPGAGTSMSTGAIATEVSCPQDPEWFEKCAGG

SEQ ID NO: 984307 - protein, 73 aa, Homo sapiens
CVLGRRLGMHRGVLDGMLMALAQTEGAVRHDLYSYRLETSHGSRACQSHDTAWLLVDEIYRQWSLERRQKSRC

SEQ ID NO: 984308 - protein, 52 aa, Homo sapiens
MKHRCQFREAMLAAFQAARGVHGEGAKDSPFDGFRGESKKLRDVMGHGNTLE

SEQ ID NO: 984309 - protein, 73 aa, Homo sapiens
RLCQWHYRRIHKKQYLIIPYHHKPPSASLTSTSTYANSTPLHSHALSFFKNRKNTNDSLNIQNPPHFSPQSSP

SEQ ID NO: 984310 - protein, 55 aa, Homo sapiens
MAYKDSTVVISFLGFRSIEGKFLGCIRHHGIINLMFNVFLSNLNQEFLTEVIPSL

SEQ ID NO: 984311 - protein, 93 aa, Homo sapiens
PSDRVLTITHLLRVEGRVSRHSGGVLRLSSARVVERGVSTHSRRCLDDYHPAEVMERGREHTLREGVLETYPSARVVGQGECSTTLWAGVYEA

SEQ ID NO: 984312 - protein, 96 aa, Homo sapiens
MGIGMSIGIATPGYGSIWWPGALYRPRQQNRIIEAMIPGEAVAEEHLGSGYRKDDDYRGGGDRYEDRYDRRDDRSWSSRDDYSRDDYRRDDRGPPQ

SEQ ID NO: 984313 - protein, 99 aa, Homo sapiens
MSEQTVVTKSSRDPACFASSPRMIPRSSRLGGLQGYHEYAWLSVGHLEELELVVKKLARSFNHMDGFPENTLWLYVQYVLQVCHIQSFQCFLQAAEAAL

SEQ ID NO: 984314 - protein, 134 aa, Homo sapiens
DEQAAKDSVAVTTTTQSSYYLSPDPASVQQPILQNKFRAHTAVTIIHCCYPSQGRSRLVPVTKLSQVSWLLSFARYALLSCSSQSVPAENTSQIQSLLYSWPFCAAPVALQIKARAFMVTVSSPQAPDLSPHIP

SEQ ID NO: 984315 - protein, 68 aa, Homo sapiens
MVMLKSSILGGEMGGSLEAGVQDHTGQSGTTPSLLKVEKIQPGVVVGACNPSYLEDSGTRTVGTQEAE

SEQ ID NO: 984316 - protein, 48 aa, Homo sapiens
MGAYNRGDHYSDCQRQASRKVALAYYEYTGGKYCKKFDTIQSCLLNQS

SEQ ID NO: 984317 - protein, 49 aa, Homo sapiens
RIYALTVGSRLWLPEEASARMQMDAAASRDYGREYLYLVYSKDRQAVCA

SEQ ID NO: 984318 - protein, 43 aa, Homo sapiens
MSAKLVSNSWPQMIHPPRPPKCWDHRHESPRQAWEPFLEEVLV

SEQ ID NO: 984319 - protein, 97 aa, Homo sapiens
RRGGDGGVSSPRFIAIICHQHNKICLGNLVVVVTLYKKSYLLTQEKELVTFEDEVDQIKEADKNSILHVKAEVHKSLDSYAASLAKAIGAEAKINLF

SEQ ID NO: 984320 - protein, 45 aa, Homo sapiens
MRRRRVTYALENERVFTCLQDEIIDKSYTPSKDRDMPRNWARKGQ

SEQ ID NO: 984321 - protein, 67 aa, Homo sapiens
MQFPARLNQTTYTDTDRGYPTVYALQSSGSTTYCFMPIVLELFPLTIFEIRARIYPYSTPISRYDDG

SEQ ID NO: 984322 - protein, 68 aa, Homo sapiens
MLIEAVVSCHEGSTEDSTKAKKLQHLSNLRAHSIDTSDSDDKRQIGDSAGYIERGQHFLDQSSASSKF

SEQ ID NO: 984323 - protein, 62 aa, Homo sapiens
VLRGSPALTESLGRSECEIERLERLTAALDRLRQLRPGTEVSAVVSPLRPRQEELGLCAHEY

SEQ ID NO: 984324 - protein, 143 aa, Homo sapiens
EPRRKVVDPLSKKDRYDVKPHAMYNHKKYWKARSYSRDQGTKIASDGLKGRVFEVSLADLQNDEVAFRKFKLITEDVQSKNCLTNFHGMDLTRDKMCSMVKKWQTMIEAHVDVKTTDGYLLRLYCVGFTKKRNNQIRKTSYAQ

SEQ ID NO: 984325 - protein, 32 aa, Homo sapiens
RSNYELFNLLQVSKVNSLWHVGTRSEVGTRSE

SEQ ID NO: 984326 - protein, 48 aa, Homo sapiens
LTVGLGVNSVRGKNSVRGENSVRGGNSVRGENSVRGGNSVRVENSVRG

SEQ ID NO: 984327 - protein, 111 aa, Homo sapiens
SEGEMRAGTIIEVQGDQGLSLDKHGETPTLLKIQNRQGSWREPESQLLERPRPENRWTQAVEGAVSRDRATALQPGRHNKTPSEKKKMKKEGAREEEKMHRNGSMVRMQNP

SEQ ID NO: 984328 - protein, 49 aa, Homo sapiens
MPKRVTKAAAAEDGDELTTEPEARKSKTAATKTDKVAAVEGPALYEDPP

SEQ ID NO: 984329 - protein, 57 aa, Homo sapiens
QVEQNSAEALRSRPIYDRWRDRKCNRPACKKDMCFDDRQCGRMEQAQALEINRTESV

SEQ ID NO: 984330 - protein, 85 aa, Homo sapiens
MKEMGRRSFEHIQRIDRDVSGTLRKHIFFRDRCGTKQRELLHILLAYEEHNPEAGYCRDLRHIDDLLLLYLAEEDALSALAQLLS

SEQ ID NO: 984331 - protein, 122 aa, Homo sapiens
PQRERIYPPGQDPAWKHSSNYSSAGAFNNVHASALNRAEELPDLRPEQRDVYTLTARMSLASEGTDSLTHACICTHTDSDLLTAGIELHPSVLSTNYRAPKLRERRSRDGKDLTDGKSSSSP

SEQ ID NO: 984332 - protein, 60 aa, Homo sapiens
VTYDASRSAYRNAIACVPHRRRHHVLAELTRVVNPAIDLCTIVMSDKYERVIYLGFMAVK

SEQ ID NO: 984333 - protein, 97 aa, Homo sapiens
MSQIYQSRPSILQKEETDELKRVDDPGLMLMVFKLPILLTNHHYLQPSLFVYPEESLVIESSTLLSALLIKCLEKEVAALRRYTPPDDADVVSARQP

SEQ ID NO: 984334 - protein, 69 aa, Homo sapiens
RRADTLYVDYRHMGFEELLDEEQYGGSEYLKTPGGAYNVDAYAQSVYSLEFSARKALRLPLRLNVYNEE

SEQ ID NO: 984335 - protein, 30 aa, Homo sapiens
MLLSEDYNGPRLVWVLSAPREVATAIQWGH

SEQ ID NO: 984336 - protein, 52 aa, Homo sapiens
MAVVSTKRMSYRNICNTLTRISWTVDSRCDTHTHFKAHTTYSLKYLKKQNHD

SEQ ID NO: 984337 - protein, 51 aa, Homo sapiens
MVGHGSVLQSLCHMEDGVELLGLHSEVGAGPVCTPAGPARAPFQTTTDRAS

SEQ ID NO: 984338 - protein, 32 aa, Homo sapiens
MEPSEVPTPKRPRGLTKWEAKTRVLPRPVVPP

SEQ ID NO: 984339 - protein, 63 aa, Homo sapiens
DNVDICNLSEYSSVPAMSQDKSLLDGEGPQAVGGQDVAFSLKLPPSERGLAAPRTGRANRMDS

SEQ ID NO: 984340 - protein, 33 aa, Homo sapiens
SCAWSSRGPEVDTGRAGTRATSRYDHIYNVIVT

SEQ ID NO: 984341 - protein, 69 aa, Homo sapiens
VAVLEDPERWKAKQEQAFTVEEQDHEKKGKVPHTFKQPDLTLTHSLSQEEHRGNAANPFMRTLPPWSHL

SEQ ID NO: 984342 - protein, 73 aa, Homo sapiens
MRSRGYPSGCNVSLRERNIKQGSRTPLYPQSSGGKKKGKMKNARPSNGQKTYSWRLQGDGSRTLEARSTWLAH

SEQ ID NO: 984343 - protein, 70 aa, Homo sapiens
CKRERKDREAYLDGWMLSRLCSPQCPVSVHEAIYAYALQVFPRQERVCVLRCRVTSEKNHVHSVSPCEAL

SEQ ID NO: 984344 - protein, 35 aa, Homo sapiens
  misc_feature (2)..(2): Xaa can be any naturally occurring amino acid
MXKVPRQLFRPRTRVGPHHYASRLIREKHPQLVRR

SEQ ID NO: 984345 - protein, 59 aa, Homo sapiens
  misc_feature (58)..(58): Xaa can be any naturally occurring amino acid
MPHCQRRMPPERQRNRKRQSDIPHGVVAQQRVVMDILRCPDQPGQITLPIKDACHPQXG

SEQ ID NO: 984346 - protein, 68 aa, Homo sapiens
  misc_feature (1)..(1): Xaa can be any naturally occurring amino acid
XATSMVNTGPCRTSSGRMPPERQRNRKRQSLIIPHGVVAQKRGGHGTSCDAQDQPGQITLPIKDACPP

SEQ ID NO: 984347 - protein, 36 aa, Homo sapiens
  misc_feature (35)..(35): Xaa can be any naturally occurring amino acid
HTNPRRARKSPRSRRAQEPHPPIRSEVSPLQNRDXR

SEQ ID NO: 984348 - protein, 111 aa, Homo sapiens
ALGLSSSFSISKEVWRGDVVDPEGFYGTFDVHLGFGRPPGKIYEDMKKPLYTHMDLPPIASAIPAYSRRGDIVIGDRAACVAIQKGLQASRSDIKLFKHNDMVNPSATRVP

SEQ ID NO: 984349 - protein, 77 aa, Homo sapiens
MSVPVKAINEASNLLGQWIIQNWHEESNQLVICLKEETLNRLWTITLLDACSHPEEEVEPILQKIYIPIAETLFRGS

SEQ ID NO: 984350 - protein, 39 aa, Homo sapiens
LLYPWLMGLSASLVSPNLTLDGFTDGQRACKLAIRESIE

SEQ ID NO: 984351 - protein, 89 aa, Homo sapiens
ASLLLYVDARLGQARSSTVFVILTGAYCCPTEQLLLGFLGGQRVVSVSSSGSVRAMMATSSSQSYDDRQLPYSWLRVQGSTFASFNGHT

SEQ ID NO: 984352 - protein, 55 aa, Homo sapiens
DLVRCFYQSNTPPFVASRTRRSNKTLNLWELYGPKVFYTYTIILTGYIYNRHNYG

SEQ ID NO: 984353 - protein, 80 aa, Homo sapiens
RVGEAEDAPGHDITEHSALIHEHYTREAPSLMHLTVDTCLQIGRMSLTAYTSTSMGVTGSTMGVKITRVTVRCANYDTVR

SEQ ID NO: 984354 - protein, 116 aa, Homo sapiens
  misc_feature (112)..(112): Xaa can be any naturally occurring amino acid
STSVGPPYEATQAWPGRSDPFSSYVYGFELRTRQLCRQVLMFHCFPDEPDMGSAPVLVRRLLLEYRPSPLGYSLLHAAHEQAIDRAGKVQSRPPLEFIYNAFELAPDPRRYXAIET

SEQ ID NO: 984355 - protein, 126 aa, Homo sapiens
KARKGVWSGKRNPNSASVDAYTKSDAVTVPARLYLNHGDNLKTESVVHQKLIMQLIPQSVCLTTLGPLFLELKDGQFHFTNKDLESLRGLYRIMGYGFAGCVHFSQSAPCEVRVLMLLYSSTKTIF

SEQ ID NO: 984356 - protein, 43 aa, Homo sapiens
RLRTREDSSLFHAKQEVVSIIPVYQKQVSQLSVEKRASQSAVL

SEQ ID NO: 984357 - protein, 34 aa, Homo sapiens
MSGRGLGGEVDPRLQASREHIFPQVVSSLHSDMR

SEQ ID NO: 984358 - protein, 65 aa, Homo sapiens
EDPFLATTRSTGFLAVDLLCAMSGLPCCSAGPDAGSAGEHLRRGLSSLVAFLGYLLLLKGFFTGS

SEQ ID NO: 984359 - protein, 124 aa, Homo sapiens
ASHLACVASCYNDCFVCHPYWLATFSAICCDASATVPLWGRRASRTGSDHLRDKDGLWAVLAWISILAIRKQSVERSFSKIIGKSMAGNYFTRYNYEEVEAEGANKMMKDLEVLMMDRSFVVKQ

SEQ ID NO: 984360 - protein, 46 aa, Homo sapiens
RFERIPAFHLVLRLSIQHLVPITVSINAELRPYCLARQEQKYQQAP

SEQ ID NO: 984361 - protein, 87 aa, Homo sapiens
RSDKGALDDDDSGPRFRQQTGKQGLVEEDKVVCPLFPIASHWDFLLIIVPSEPTRLLLDWVTHFYDDTFRNTSGNMVKVDRGSPRDG

SEQ ID NO: 984362 - protein, 88 aa, Homo sapiens
GRKRGPPWEINPLSSCSLLHEKDPPTISAPQTNQPKEHLTNFKSDLLSLAAEDCCCQMTLEAPWTITDAQLWITLTVEDRNIRSLSPS

SEQ ID NO: 984363 - protein, 35 aa, Homo sapiens
VTTDYQTADTHYLTTYMTLGARHSPTSDHYSTQAH

SEQ ID NO: 984364 - protein, 64 aa, Homo sapiens
MPCSPSLLKSADARSYHLKHRRSKRCSAAENHDHCNSTPRAIRAETHVSKEINKILKHIHVSTQ

SEQ ID NO: 984365 - protein, 46 aa, Homo sapiens
SDLLLRSTSKRVGFEAVPNAAFLYCLSCHFWSRREAAAYWLAGDPS

SEQ ID NO: 984366 - protein, 45 aa, Homo sapiens
GRQALAKALGRSTCLQARGTEVSPKRDTVCMEDSARRSHLGYELN

SEQ ID NO: 984367 - protein, 116 aa, Homo sapiens
QGQQSVRKGWPSCGTSRHTGDPGERPQQRVCHHHKRNTPVTHQMQRGTEKSQERQTNKHAFCFLFLNETAPSRQKHNLAAWCSRQSEAERWQAGISGANRHSSSSSSTSRELRDLG

SEQ ID NO: 984368 - protein, 62 aa, Homo sapiens
VIIMTCSRDGEYVHRIGRTGRLETITGIATSFINNACDESVLMDLKALLLEAQAEGAARAAG

SEQ ID NO: 984369 - protein, 86 aa, Homo sapiens
KILYELALSSARVLSIGTITHHSACCQGARTTKREHAASAVVHALGDPPSAVLSRADLPPDEQKLCATPATSDCRAAEIFPKLVPP

SEQ ID NO: 984370 - protein, 47 aa, Homo sapiens
MIPDSAPFEVLKAAENKKKEAAGAALGAWGQERSSGRGPDQTPSAAG

SEQ ID NO: 984371 - protein, 76 aa, Homo sapiens
MEDSAQEIATCNSRNGNPAPKITWYRNGQRLEVPVEMNPEGYMTSRTVREASGLLSLTSTLYLRLRKDDRDASFHC

SEQ ID NO: 984372 - protein, 38 aa, Homo sapiens
  misc_feature (36)..(36): Xaa can be any naturally occurring amino acid
MGRERVDNHVKAEKDSNPTLCPLQVFPILPAPYPQXPA

SEQ ID NO: 984373 - protein, 35 aa, Homo sapiens
MAYDLLSQLVSFRCSQKDPEALEVQAPSMHRDPCR

SEQ ID NO: 984374 - protein, 41 aa, Homo sapiens
TGDSFMKQISSFTVRNLGGIQAGFEYKRAIVDCIISIIEEN

SEQ ID NO: 984375 - protein, 42 aa, Homo sapiens
SYGSSDNSMSFDPSSSSKTRTLVYPCIEERQPLQLHGHIGIR

SEQ ID NO: 984376 - protein, 36 aa, Homo sapiens
MAQDAGRQCQLRTLDIDDLLGEGLVTGACVQAIATA

SEQ ID NO: 984377 - protein, 77 aa, Homo sapiens
LIDQNRRLDLYSVLRRLCYDALGKAENEGSPSTGQHEIYRIYLILPISDKLSFTNKDANICFQTVFSNIHNIPGQDI

SEQ ID NO: 984378 - protein, 115 aa, Homo sapiens
MASIRSCVETLRALGMHAGLRRRARVLLCLDPGVQLQAPPPSDPEAQAPASPPSDPGVQAPALFPQTQESRPPSLIPQTWEFRPPSLLSQTQESRPPVLPPSDPGVQAPILPLSD

SEQ ID NO: 984379 - protein, 131 aa, Homo sapiens
SLGQNRDGPFISSTERRASAHGHQSWCHPAPWGSNACATRAPCVQVGLLARKVSWAIVNEMVQRTREALGIKSMIVWPGCNSSTFGGRGRRITRSGVRDQPAQHGETAFLLKIQQMLGVVVHACNPSYSGD

SEQ ID NO: 984380 - protein, 67 aa, Homo sapiens
AGTALWDALAQAGAGARRMGEKPLYYGYSGAELVFASELKGLMPIPGFGRNLNRNALASFMRHNYIP

SEQ ID NO: 984381 - protein, 110 aa, Homo sapiens
SSFLSSWGRSPCWCMAGLKLLILLIHPPQPPNDAGDYRRVPPLPVPIIHFYLEWTTRSEHGFKLAAIGFLGLTSSLASPRGIPTGIYINMRVTRDIALFYDVLFLCMFSG

SEQ ID NO: 984382 - protein, 52 aa, Homo sapiens
MQSLANFSINEMTENTLTGRAVQLLRSYMSSLTHYTSNEKPIHGPVTTNAVL

SEQ ID NO: 984383 - protein, 41 aa, Homo sapiens
PTTGRLQKVFGEAINIKKDVYEQTNNVHSCCDEVRIHNASW

SEQ ID NO: 984384 - protein, 57 aa, Homo sapiens
RTETGDSRLFLAYLAGAEQQQTVWWSSTGQQHKGDGSARRLDLFSKWEGVIRLHRQG

SEQ ID NO: 984385 - protein, 60 aa, Homo sapiens
SYRRQGDSSNTWPASSNPVDATDHLLWTLDLHIGRCGSMTAWLGGQHTGVDGSACAVADD

SEQ ID NO: 984386 - protein, 41 aa, Homo sapiens
MGYCCNSWVANLQTDTGNIADTLQEARMQSFLCDIKHFRVV

SEQ ID NO: 984387 - protein, 75 aa, Homo sapiens
PTGGRLAVDVVIVVLNTTVLLSCAGSATIRQRPSPETARTVAGAGRQAPGQLRRRVPGRDLRLVPEPVLQRDPVR

SEQ ID NO: 984388 - protein, 95 aa, Homo sapiens
LRTPGVCLPTPTYPHHSVTLHILRHSLPPHIPHHLRTRRNTRASPPYPHIYLITSVHPHTTASAPYPRTQLVTIRTPEHTSVTSVPPQESTLIIR

SEQ ID NO: 984389 - protein, 66 aa, Homo sapiens
GAVQPGDALYVETPYGFLTLERFAPGGDLWLLASGTGLSAYLSILRDPAVWRAYRRIVLVHGVRTA

SEQ ID NO: 984390 - protein, 98 aa, Homo sapiens
ACTWQEDDEDSKQYIYATSLYRKKRSRDTLVPENCWFQLGHSMNPRAMKNRSRIALLRKRRFQLYRSRNPRAGKNRSRIPLLRKRRFQLYRSMNSRAR

SEQ ID NO: 984391 - protein, 121 aa, Homo sapiens
PVPALERWQTATAAQGEAPHQERGQHRKVPLQGKRLGVGQQVVARFGHEDRHGVQEQHQAGAEQGDDQIGHRGQQPTADTRVFSLRHKGFLIETGITGGISLAGNTGFVISINRIARHRGG

SEQ ID NO: 984392 - protein, 37 aa, Homo sapiens
ESVALGFTLVFRPRGLMRGGPARLRLFTPFTAVHALK

SEQ ID NO: 984393 - protein, 34 aa, Homo sapiens
PSRRKAIVRATAPRTDQIGALRSIVTCKAVATFH

SEQ ID NO: 984394 - protein, 100 aa, Homo sapiens
MSCTIRPSARILPSFTKKSFTGLAFSHFITVSPSVLPVAATAFRKVVVAEESPACSIDGFFFIFSSKRAAHWRDASSWSQYQAVVRYMPCAAGRPSAWMS

SEQ ID NO: 984395 - protein, 36 aa, Homo sapiens
RYLGSSSFVVYNGQITPMAPPASTAPASGYRCCRRT

SEQ ID NO: 984396 - protein, 81 aa, Homo sapiens
QTCWAQARVALKSRAGIHGGALADNGQGFRRRVDPGNLVMSGEAGNGTRLTTINALDPIYFTFDASEALYLKAMRAGEPSA

SEQ ID NO: 984397 - protein, 40 aa, Homo sapiens
VGTCTFRHMTNVRVHWMTSMFEGLDDDAETRKMVGANIAM

SEQ ID NO: 984398 - protein, 73 aa, Homo sapiens
IPQVKTPLLLMLGQEDRRAPFTQAMEYYRALKTRNVPGRLLLYPKSTHALSEVAALTDSSMNAALWLHTHLGS

SEQ ID NO: 984399 - protein, 45 aa, Homo sapiens
MLRANAADLRRDQGVQTPSVAQNGRSSLDLDFQYEYRHVKACASR

SEQ ID NO: 984400 - protein, 80 aa, Homo sapiens
MRRTCVRVQVNFWNFCFISGINLSVQVSALDYFNPVCMYACMYVCIYYETEFCSCCPELECNDAGSTHCNLHLLESSDSF

SEQ ID NO: 984401 - protein, 63 aa, Homo sapiens
YSLEKGGLLGPETSVLGWHSDFTWSSATSTGSSWHLIDQQHVPDLSEDLLDEHRADIPTDMRQ

SEQ ID NO: 984402 - protein, 36 aa, Homo sapiens
RAEQIRRLGMRGLGRWLLGVGRLLLLSSMTRLRVMS

SEQ ID NO: 984403 - protein, 30 aa, Homo sapiens
MWLNNPALLILLLALFSRSAELIVPFPLRL

SEQ ID NO: 984404 - protein, 51 aa, Homo sapiens
DPASELHQGFMDGKQACVLMIIALCSSDMQSVPHCASSNSSSSDAVCCWSH

SEQ ID NO: 984405 - protein, 58 aa, Homo sapiens
CQLFSIFKMSHNEIMLFSNEEQAPYGNDSAKCQPGQDQRPVISEIQASSLDLNAPRMK

SEQ ID NO: 984406 - protein, 33 aa, Homo sapiens
GTPHLIIYYVWMKALRDLNRKGNRVKTCKAKIE

SEQ ID NO: 984407 - protein, 50 aa, Homo sapiens
PGSPDVVTFVRAVGQRRRGVSASDVAKVRKDVGAAKAPVRKAALPAGGKP

SEQ ID NO: 984408 - protein, 35 aa, Homo sapiens
TRQRCKRLASWAREGKTLLLRVAVDGGGCSGFQYR

SEQ ID NO: 984409 - protein, 87 aa, Homo sapiens
LQDSEEPYPTFTPGSHQADPCALPQDPPPGLPPGPPPRGAPPRLPPPAPRRYSSNSSWDDVPTFGAVPLDRAPPGLFASSLLPKPGV

SEQ ID NO: 984410 - protein, 152 aa, Homo sapiens
MGIDGQYSHRYYGRSVDPSLIEGICLMSTDLAACMFVCDRHSATLLIGEYPGVKSRFAPQSSAMDWHANKLFAGMQDHVTSKWLSVFCLHYYEVDEKPASTPWGSKDAFWACLMSEFGGSGTGGWVHGVSFSANGSRLGWVSHESTVSVADA

SEQ ID NO: 984411 - protein, 95 aa, Homo sapiens
NPSNMQVVDGRLCLTGYLGEQQSVQSGREGDSSFVRALSQKEMEGKIHRTAGEDHVPGNEGHEEPIIGDSELGPRSRVSQKACPSPIACDIYCAY

SEQ ID NO: 984412 - protein, 85 aa, Homo sapiens
MVLTPTLVILRHYSRTYVCEGVPRYENKLVVWEVEHDSFLYVTVESENDWWVSKHIKKPIGPDVLSLDWHPKQEYCWQEDHVIFK

SEQ ID NO: 984413 - protein, 39 aa, Homo sapiens
PSPESRTLPQSNLLGLLPSLIYTNPPNLSINLALFVHLQ

SEQ ID NO: 984414 - protein, 58 aa, Homo sapiens
CPSLKIDSGTAGSLEIDRLQLYDIWRSDHGAHVSTELCTEKAYTAVVEYTSTRLQTKR

SEQ ID NO: 984415 - protein, 42 aa, Homo sapiens
MRGGLKREPTNKVFDPLSTQRLVLCESTCYVLVLRNIGTDAR

SEQ ID NO: 984416 - protein, 98 aa, Homo sapiens
DSTRNTTLERPPVLSASEITCRDAVCSSVIPYMSLYSLMAAPVVNDSSRISSGCADVPELAAWHIVLVCCIVDVRPLVRCYDLACVCPGRTYRHEVNR

SEQ ID NO: 984417 - protein, 101 aa, Homo sapiens
LSPVATEVARVSILRRLRVQTPPRCATSPPTCWVALGGNSSPSAKAIKKIWDSVGLEADEDGFNRVISELTGKTLMEEVMAQGMGKLASVPAGGAVAGLCC

SEQ ID NO: 984418 - protein, 104 aa, Homo sapiens
AAPFILISVCISNSPSPSLSKSVSLYLAHSLINTLPIQLLFLFPTQGTHPDGQHSIHTLHFILSHHFTFGHLSVQSSEHFIRHATIRYSHRHTSVSYTHSTGVP

SEQ ID NO: 984419 - protein, 40 aa, Homo sapiens
TEETGLIHSQRKPWRLHAGHRLYSPPGNSPERPQVLAASE

SEQ ID NO: 984420 - protein, 125 aa, Homo sapiens
GTTVASSGQSDNLARQIQRKGREHPDFKPHSGLGEVAHACNPSTLGGRGRQITRSGVRDQPGQHGETLSLLKIQRISWAWWRMPIIPATWGARGRRIDLKLGGGGCSEARSSHWIPAWATERDSI

SEQ ID NO: 984421 - protein, 89 aa, Homo sapiens
LESGKETLQRTDPRKTHMTHHPIYDHEATLRSRALSFYPAEITLTWQRHGEDQTEDTELAETRPAGDGTFQMWAAVVGPSEEAQRCTCH

SEQ ID NO: 984422 - protein, 95 aa, Homo sapiens
ITHHTHSFGGISSSVTATYTLIFNYENLGTSSNPPATPQTCPLYLQNGAKIPLQTHRPSPSLLSAPQCKPALPSPGLMSQLAVPQYYPPPSSCTT

SEQ ID NO: 984423 - protein, 53 aa, Homo sapiens
MNESEDVFSLIETHEAPPVKLLGYNTDTETAEKRLSHQTLRVAGKAANAVALQ

SEQ ID NO: 984424 - protein, 117 aa, Homo sapiens
MIVKKEEGSRIEIVMISCYKVWVGMLLPRAKALVALSTAEAQASGIYMPGLNKLQDKHRTSQNSPVSQDPQHVCQALGSLTNRLQDTAIELGRTNYFSTKQEPYLGIAEHAVRDSDE

SEQ ID NO: 984425 - protein, 37 aa, Homo sapiens
VVNTLSTRLQGERALEVSAVLTCRRNLSREACAGVVN

SEQ ID NO: 984426 - protein, 40 aa, Homo sapiens
  misc_feature (8)..(8): Xaa can be any naturally occurring amino acid
YPTHEGHXVSLLPAESDNDVPSSLVSGLSVRRRGIRRGRA

SEQ ID NO: 984427 - protein, 63 aa, Homo sapiens
LEAHKSQSQEIEEAAVLVPPTTLKGSSSLLADNSPGPFTVLAQPTPVTITYQLHTHPTKLKAY

SEQ ID NO: 984428 - protein, 35 aa, Homo sapiens
VVAQCVTVCSGLQNKSCNMELRTGPRTLSWPWSNL

SEQ ID NO: 984429 - protein, 48 aa, Homo sapiens
MQTPNNTPANTPTNTPANMKLVPVANNRLFDMSAGVLVGVLADILLGV

SEQ ID NO: 984430 - protein, 63 aa, Homo sapiens
PHLLLTKFQKAGDSQDVITITGHARWLMPVIPALWEAEAGRITQGREFETSLTNMEKPRLYYK

SEQ ID NO: 984431 - protein, 46 aa, Homo sapiens
DPKAKHPDIHFTSIYSVSLHFPSAIDQTPLASHAQATAAVSYKEQL

SEQ ID NO: 984432 - protein, 67 aa, Homo sapiens
CGYPVLSTWTSASCLLKGPYVGGAQSWQVQSPYYSSSRGQGPEQWLWSFQPELGCLPSGSHESCMGT

SEQ ID NO: 984433 - protein, 39 aa, Homo sapiens
QADMGQSGKGGEQDLTCLPNLFCPQVESVDCRIPTQQPV

SEQ ID NO: 984434 - protein, 53 aa, Homo sapiens
EEEGKKLHCGNVSILLMSCLGMMRRTLPADGCVCSIQLTGCLGGFQAVARALR

SEQ ID NO: 984435 - protein, 178 aa, Homo sapiens
AERLDDIENWLKKRDGTRLPPPHRDGRSCRVLGEESSEVAVIGFYKDVKISSAKQFTPAAEDIDDIPFGITSNSDVYSKYQLDNDGVVLFTKFDDGRNNFAGEVTKENLLDFIKHNQLPLVIEYTRARQPRSIKEVKSTTHILLYLPKSVSDYDGKLSQLQTAAESFKGKILYIFIDL

SEQ ID NO: 984436 - protein, 155 aa, Homo sapiens
MAKMIQTASTSHSVGITGMSHMPGPPYRSLRVIYHTPEEDEGKLPIHGTMLSSFYSQYHNDFLLDFISSQMCAVQGDREEKRMVGGKGGEHSSWSVCKGIPGIWFHLRFPSIFPLKPRVQGVSHTGLLADPGHSNRCSCLTAFCSQTPSQIATRH

SEQ ID NO: 984437 - protein, 47 aa, Homo sapiens
MVRLAAPPYSHGRPRSLHTSQVGGTKKGEGGARHSSSFKYQTIINKV

SEQ ID NO: 984438 - protein, 77 aa, Homo sapiens
MKTEELLKQVDDLNVELSQLHVAKVTCAVRPPSSLRSESVRKSIARVLTDINQTQKEHLRKFYKGKKYKPLRLCDQA

SEQ ID NO: 984439 - protein, 76 aa, Homo sapiens
VSIILSPGSGSGSLYSLNVHISVKDIYHYSRIDITDIIYQSTNTNMPIIWRSYCGIGIGLPKPLGWAPWLITCNLS

SEQ ID NO: 984440 - protein, 85 aa, Homo sapiens
ASELISDLQSYGRSDMLLKTNAACGPCSTTDVTMYSIKAAINNKISRILRRPPTGVADYEVHSPVTHARDTTRGLHLRRRPMHGL

SEQ ID NO: 984441 - protein, 51 aa, Homo sapiens
DLRASEYRYTVRYDIVTRHYYPGRQGETCTHKKITQSIGVVSCVLATCCYA

SEQ ID NO: 984442 - protein, 81 aa, Homo sapiens
LTKCIWQLLSRAPWLVLERASRQVSPLYTSEIHTPNSFCDRILLYVSDAQILAPEAWALLSSPASFSCCSRNPFPSEHAGT

SEQ ID NO: 984443 - protein, 111 aa, Homo sapiens
MVGYNQPHRLVVTAILIQPPLTLHRRCPSHNLPTGYTSSLLFMQQTPPHDLHSPVASYSSLTAFKLYSHYQLFDAFQHASLTLALPPHINLRGQLSVLVTTWLLITYHSPT

SEQ ID NO: 984444 - protein, 107 aa, Homo sapiens
TVRRDPLRVEYVNPRTCKMRGLSQCGVDGAGPRMCDIGVRSEAGAPVTVAMGSEASVMKTEGDCPIPSLCVDGQAVGQTGTGGRFVPCFDSLVELHQWPTPLWDRTC

SEQ ID NO: 984445 - protein, 140 aa, Homo sapiens
PSAHMCHLPFLLQNQLQFCMEQLPLSLWEDSSGGLRPVGARAVWSAMLSGQQQQGVVIRTGEKGPTPAVLSPLPWVQALPPHRQPSPDGAPSCLQGLTPFRGVLAALRVTSSSLGLLGPALYEESCDECYWLTATDDSLS

SEQ ID NO: 984446 - protein, 51 aa, Homo sapiens
LTDRDTSVDTPVCYHTQLLTPYDSPIGQLVTRTTSTRTSDVLVRDGYTHYD

SEQ ID NO: 984447 - protein, 117 aa, Homo sapiens
ALLRTVFGRFFLRWVRGLAGSGVKLQTFVVSVYTLLRRRVWRLFLSSLVGSLVLYGFKTRSHYHCGGEHSQTHVGFLTTVFLTRHDALTTWTADPRPVRHPTRTLPGYPTLELRTSW

SEQ ID NO: 984448 - protein, 43 aa, Homo sapiens
QGRVAQLVGEDEAFGFAHLAQAAQVRILMAAAGGGLDEAPAII

SEQ ID NO: 984449 - protein, 71 aa, Homo sapiens
LSYDRELGFTDDVNIRKHVFTIEKSLKGILCDLEDKGNIQNIHKTTTERISYEYRCKNPPQNTSKPNPATI

SEQ ID NO: 984450 - protein, 52 aa, Homo sapiens
YSPCPYTEHYQTDLPSCQLPLCYRGPSLGVTQHAAEDNGIRIPTLVIANCPP

SEQ ID NO: 984451 - protein, 57 aa, Homo sapiens
  misc_feature (1)..(1): Xaa can be any naturally occurring amino acid
  misc_feature (44)..(44): Xaa can be any naturally occurring amino acid
XYNGKRSGLAVGRDKRVMAPIVLGYKSSSWRRTITLNPGFSDLXNSSCPSPSHTVQR

SEQ ID NO: 984452 - protein, 132 aa, Homo sapiens
MVQEWDVLKRYLKMWKRLWNWVIGRGWNSFEGSEKDRKMWKSLDLSRDLSTWLCQKLLTTDLDRGECTSRVGRDTDCCRTWTSRGNCTLTCGTGPEDAADNGPGRRDMHLQLLDGTRASSTGTDRGLPLDVD

SEQ ID NO: 984453 - protein, 112 aa, Homo sapiens
SDGLLRAFSPLRTLDLNSGHADDTLGSDFPPVAAVLDVMYESPFTLLSCVSDTYVRYWDLRTSVRKCVMEWEEPHDSTLYCLQDKMATTLLATGSSYYGVVRVVGTGVKRAC

SEQ ID NO: 984454 - protein, 69 aa, Homo sapiens
TEYMVTRPVRDDLTKHVQYSPAQWPDCRPGAGAFVHDPSTDTDHHTHPLIALSKGVVIQQACRGGQETE

SEQ ID NO: 984455 - protein, 45 aa, Homo sapiens
VAGTSHPENVGLNSGQLMTHLVSDFPPGAAVLHVMYESPFTLLYC

SEQ ID NO: 984456 - protein, 108 aa, Homo sapiens
RLYQADTHRFSIDALMVPAGLSHAKPSIVEDVHENLKNPNYTSTFYDGTRTPSKNTSAVFEALMPIFFSGGPPVSRQCGKAEVVFNTVVTGGQTCSFAPYAPGRNDDH

SEQ ID NO: 984457 - protein, 66 aa, Homo sapiens
LLEDLLHMLGSDNLRCHHSRLTREPEELVVCHSSWEISIHKLAAADAAEEGAVLPPEVPVAAAAEQ

SEQ ID NO: 984458 - protein, 71 aa, Homo sapiens
RRCHEQGIRTHHDEEVPGLRHAELPWEDGSMYQVSEGIEHRVQQQHPQPPGHVMPCTTSGLCGKYRAAGKD

SEQ ID NO: 984459 - protein, 59 aa, Homo sapiens
MRQIPITADSSTETNVSGFLRGYSHGVPSKILITPKKTVTLQGRDLVDTTYILEQQAKT

SEQ ID NO: 984460 - protein, 40 aa, Homo sapiens
GHGYYQDLELLVGTMAVLEGPFPGGRPMIHTLKSTLPTSF

SEQ ID NO: 984461 - protein, 103 aa, Homo sapiens
SRSVPVTNTKYSLDCSACQTSFHSKIMPGCYPPSCSYYHHYSTTQYQLLHRFHESCQHSVLLTLFNTSQWVLFLLLQPLHLLLLSAPFHIINMLHEFAILSNI

SEQ ID NO: 984462 - protein, 47 aa, Homo sapiens
MPGLQSLFFTSPQFSLEMKSRSVAQAGVQWRDLGSLHAPPPGFTPFS

SEQ ID NO: 984463 - protein, 55 aa, Homo sapiens
GHDIDADRAERVCEAMDKSENLLNTQLEVGDEGEAPEWHTDFYNSQSSCWEQQGK

SEQ ID NO: 984464 - protein, 36 aa, Homo sapiens
MHSDGRSRGIPVGSFMVFNPAYGIAVYEPAALTCTH

SEQ ID NO: 984465 - protein, 132 aa, Homo sapiens
GVVIQRIPAETVGPGREEAAGKGDVQRRDHLFSFEQVVNTVTTLVENKKAQLVVIAHDVNPIELVVFFRALCRKMGVPYCIIKGKARLGRLVHRKTYTTVAFTQVNSEDKGALAKLGGSYQDQGQGRIRGGS

SEQ ID NO: 984466 - protein, 49 aa, Homo sapiens
RRKGRLSGLLSANDYDYNTTVSNHLFTAERHIYVLRPWLDASGLTFSRY

SEQ ID NO: 984467 - protein, 46 aa, Homo sapiens
MQFPVRLNQTTYNVMQIGEYDYGLNALKSVEQTDSFIATIVSLAVT

SEQ ID NO: 984468 - protein, 71 aa, Homo sapiens
MLTIATEPSCTGARAIRCCHMLAAGSSVKAGRIGDGGQSSGWAGVTGLHQHLLVVQRDVRKRLCGQVHVGL

SEQ ID NO: 984469 - protein, 38 aa, Homo sapiens
AARYLSDLLYSRRRFSHLFTLARGTSPQLGAEGLQGWV

SEQ ID NO: 984470 - protein, 51 aa, Homo sapiens
LGGSLIRELGERVAHASGAGGKKQAAHVCSYNSWPLQSSYLSLLSSWDYRS

SEQ ID NO: 984471 - protein, 45 aa, Homo sapiens
VIEDPIQAGRWGLNSLASALEEMGKSEMLVAAGVVAVVVSTGGIG

SEQ ID NO: 984472 - protein, 61 aa, Homo sapiens
DVHRTAFQHDLVIGHFTIVDKATRRVDALVYDWSIAFAWFKLDQLAVLDKVALANLINLLV

SEQ ID NO: 984473 - protein, 73 aa, Homo sapiens
YSVVTTIITPPSPLTVVTTIITTTFTITVVSTIITITFTITVVTTIITITFTTTVVTTITATFTITGIASIIK

SEQ ID NO: 984474 - protein, 67 aa, Homo sapiens
YKQSTFRIRYLLLGTVPKSYQPPSSFDYFPKPGSTHKPGSTHKPGSTHKPGSTPKARVTQKPRVNPK

SEQ ID NO: 984475 - protein, 33 aa, Homo sapiens
VACTLTDALWVDRGYWLTVACRVDRGLWVEAWL

SEQ ID NO: 984476 - protein, 69 aa, Homo sapiens
IILIIIIYHIAHSSIIYQLLLGISTLQIKSDHYRRSAAKDSFSIIIQISTLRNFRRGKKVEDSVIGNSI

SEQ ID NO: 984477 - protein, 96 aa, Homo sapiens
APVLLLKGGDEGYCPNILPGSRYAAAHPWQGKGHWGKRLALSSLGDMEEGVRGIPQPRWLYLSDPYPACNPHSSTLYNPKRLKNSLGYRIFKKQEL

SEQ ID NO: 984478 - protein, 90 aa, Homo sapiens
VNCAVVPVLEEQRTQSLVSVEVSMNAKIRVADLGRKKAKVDEYPFCGHMVSDEYEQLSSEALEAVRICANKYMVESCGKDGFHIRASVCE

SEQ ID NO: 984479 - protein, 112 aa, Homo sapiens
QRTSPMEKRTPAPEPEPCEGTELPAKRLRSSEEPTEKEPPGQLQVKAQTLARMTVPKQTLTPYLLPEDLEAQFLPRLQPRVLEDTGPSALTESDDGYHSTNNQGAANAAETG

SEQ ID NO: 984480 - protein, 63 aa, Homo sapiens
MEAILAAPAIRRQEGLGGPELAQGVDAVWDLQDGHESSLSIRLYPMDHGGIVHQDGDVTHPSP

SEQ ID NO: 984481 - protein, 124 aa, Homo sapiens
SRRIPLHCSDGDSALMATAVTRDALPPSAGFCSVVHVPFLAVVPAASLWVWPGLRVFRMWAVLPAWFPFPGTCHCLPVSLRGHFWEVRPWPPGPLFRSEALTCLGSGSSGERPCPPQDIPSEAV

SEQ ID NO: 984482 - protein, 42 aa, Homo sapiens
LEDPVHCFGCPETHDLQFLWGWEGCGRDWCLTSNGCLPHSLS

SEQ ID NO: 984483 - protein, 30 aa, Homo sapiens
MQKTTRTLSISGRAATGRPASYSVRIRMTM

SEQ ID NO: 984484 - protein, 101 aa, Homo sapiens
SRKSSFMFSTAQALKKATLLTVILAPSDWLTPSKPSKGSSSILDHPFLLYSCCSALLKEIHPTEKELLHNNDLQSQGRPLVLLSNPFLTDPLFPRLIPTLQ

SEQ ID NO: 984485 - protein, 64 aa, Homo sapiens
YALENGGRGSITEQLLKTRADVTLGGGAKSFNQLAKSGEWQGKSLKDQAAAQGYQWVSNADELQ

SEQ ID NO: 984486 - protein, 49 aa, Homo sapiens
LWVDQTLGESQVKREYNVKLVEQRAYRETPVVAVTCGRDSPFNKKSLLA

SEQ ID NO: 984487 - protein, 81 aa, Homo sapiens
SLSVSGKDTKTQQYGSCGGGRSASLKSPLQTWSPTMVGGRTGRPGLLCDYSGKKDMRDSGSPQAEEATAHGVRNWTQSPQV

SEQ ID NO: 984488 - protein, 35 aa, Homo sapiens
ADGCGLRAVVTCCDRDPLFALYENFHTNKSRGTQH

SEQ ID NO: 984489 - protein, 50 aa, Homo sapiens
WTIWRSIRKNFDEAANVFEFYTAEENQLQLIVCLHNWGPSYVTWTYGGSD

SEQ ID NO: 984490 - protein, 81 aa, Homo sapiens
IARNCEALASSGSVLWTSCARAFRLMVDYVLPVPVSCTGLHGAQLPYTLLCAYWLPCCCALLPGYATMQERHSKLLGPVAA

SEQ ID NO: 984491 - protein, 95 aa, Homo sapiens
MNWELLLWMLVLCALLLLLVQLLRFLRCLTGHLTLLLAACQGRRPDWALTDMVVWVTGCLEWQLVRSWLTSCLNYEFLLCCLPVKLDQLDPGARK

SEQ ID NO: 984492 - protein, 35 aa, Homo sapiens
PQLEEGAEASAASEEEAGPQAIRALSTPSRGRRVA

SEQ ID NO: 984493 - protein, 34 aa, Homo sapiens
MLPSQADVNFVNAKLLVKEAGLTVSTSHSPAAPG

SEQ ID NO: 984494 - protein, 67 aa, Homo sapiens
MVNLMDRDGHGKLSLAGVHHPVEPGSGSYLSDLPESFEPWTSQGSMSAYDMRIGIESAGFQPQLEAV

SEQ ID NO: 984495 - protein, 102 aa, Homo sapiens
GVEQFTSLCNFKEALDVRLDVYSLGRCGCSVVKGSPSGPMRNFSQFQASSERRTEDSNTDELVRSVLTENVVNHKVGELVLQVGEDRMLVLPIHLTFLDKGE

SEQ ID NO: 984496 - protein, 96 aa, Homo sapiens
  misc_feature (53)..(53): Xaa can be any naturally occurring amino acid
SIGRRKATQAVLMPGVPTGQEVGPADRSISHSLTKLVKLYGTIFNWPYEENQXAYGRIHRTERSDRERGWGGGYSPFLSGLRYRQPGLQVLVVTSQ

SEQ ID NO: 984497 - protein, 70 aa, Homo sapiens
MWWWVRGAVAALIMASQTGVQCAFNVGIEANPRPSLLLGRARPRDGCLAHLTALEMFASGVCGVRFPLGP

SEQ ID NO: 984498 - protein, 89 aa, Homo sapiens
GFYLLSSLTDAAGQQQFIAPPPSRCHPLTGGETHHPFPEPASFTVSVRNLWQVRMYLVRGSHPNPTVTFRASSPRFSRILFTTAGMPAP

SEQ ID NO: 984499 - protein, 50 aa, Homo sapiens
LISTAPVAEYQLHTRPGLPLGPISVLISVLMVLLQVGQALPSGSSICIST

SEQ ID NO: 984500 - protein, 76 aa, Homo sapiens
LKTAPWCQQRFKRKGRMSYHVALHTALCTSAYNCSYCGKSFSRPNHLNSHVREVHSDENGPSYVRNVRQLFAMKDR

SEQ ID NO: 984501 - protein, 72 aa, Homo sapiens
PELHHITGRATSRVYDTAKGMLTRPQEHRYIVVSWMIAQTVTAVAGVVSYPFDMVRRCMMMQSGRLRSSHHV

SEQ ID NO: 984502 - protein, 86 aa, Homo sapiens
HRLRVVTGYCKNKSYAKSRFCRVVPDAKIRIVDLGADTREIVDEFLCFVAIMVSDEYEQLSSGALEAVRICANSYMVKSCGRDGFH

SEQ ID NO: 984503 - protein, 80 aa, Homo sapiens
SSDCARVDEAGVILCNGDSVGYMLSSLAEPWKVQPSDQVGKVIFEQILQIRLTDTLGRLSHILEMDHFALVVHEQIQYHS

SEQ ID NO: 984504 - protein, 72 aa, Homo sapiens
PPHTLSRIREVAVRRVSVTLGRHRWASLVVTFRAPKNTLMSLSPTQSTRGSSSRGPGPMVSGGSVAIGTVRS

SEQ ID NO: 984505 - protein, 91 aa, Homo sapiens
TDRLRRRPMVYTEDDGGIEALCSDTRPLSNLVQTRDAYTEILDGKTPLASWVRSPPSYSVLYPSSDPKSSHLKGQAVPASKTGILEESMCP

SEQ ID NO: 984506 - protein, 70 aa, Homo sapiens
ACGPHCSAVLWLRECDPHSVVERHNMPDVEVMDVAKELLLQAVTISSTEKEKVLIEGSINSVRAHSVSGY

SEQ ID NO: 984507 - protein, 72 aa, Homo sapiens
MTGTLWPYLSAVRATLQCCPLPGELLLPVLWNDTTSRKWKSGVAKSSCYNLVTIRQEGEGIRFCIEGSINSV

SEQ ID NO: 984508 - protein, 41 aa, Homo sapiens
ELPLSGGVGGAAEKPVPVRLGVRLWVWRADIWCEMRAQCVR

SEQ ID NO: 984509 - protein, 77 aa, Homo sapiens
QTAARELKLQCEGLRQELQLAGAPVAPPSVQTPPGRFRILPCEKLNEPRKCFLEVAHEQPGNLNAWANLAHVYCRTR

SEQ ID NO: 984510 - protein, 118 aa, Homo sapiens
PQTAPGSPPLSRSSRTGFFFSDQCLWKTSQIPQRGLDGSRTMPRMHTPKYHDLPSCPEGLVAQDQDAAPAPQPQRFVSVLRACLAHEIARTLIRSHRHRNLPWACYRLNAQPHARTTV

SEQ ID NO: 984511 - protein, 60 aa, Homo sapiens
MCKYDLLGLRVQMEEPLGSSMREHSSPPIEDIKGPYVSIHSSGFRDYMVKPELLRAHSVR

SEQ ID NO: 984512 - protein, 54 aa, Homo sapiens
LKLRPVKAAGLRWSPSGKAAREIRRCRWSPHPSRIVGRQIGQLVTHSAYSFFTE

SEQ ID NO: 984513 - protein, 81 aa, Homo sapiens
MPYPKSRYAAEVVLMPRFAFVDLGRLKVKVDKFPALWAHSVRLISAAVLLKPCEAVRIRATSYIVKSCGRDGFHIRAQSVH

SEQ ID NO: 984514 - protein, 59 aa, Homo sapiens
IPLLAAGLSPYPTPGLSSRALPWKPVLPEGPSAQLVAQRGLCHHYLVHVSTVRILVTGV

SEQ ID NO: 984515 - protein, 51 aa, Homo sapiens
MGHRRLMMEFDARWVIYFNKPDIDAWELRKGIITLVILCDGSRAQESLMLL

SEQ ID NO: 984516 - protein, 104 aa, Homo sapiens
SQLRPHKAPWMLRGEHRAPQSTSRCVHRTGVAEDRSSSCPHGTYPWLWERSTTHGLVSMGQRFKESSHGQSTHPCRRTVSESYLCDRRDPSLLTTTHTGPLDRV

SEQ ID NO: 984517 - protein, 38 aa, Homo sapiens
RSHRKVAGSCRRLKALEALQTTRLTEQNASCLDDFCIA

SEQ ID NO: 984518 - protein, 185 aa, Homo sapiens
MRILRVTENVFFRGGGSRWVIFVNKSSLFGAVRRLEKEVGGMEMAHEGMIWSLAWHPLGHILCSGSNDHTSKFWTRNRPGDQMRDRYNLNLLPGMSEDGVEYDDLEPNSLAVIPGMGIPEQLKLAMEQGTDGEDESNELEMTIPGLDRGMEEVMQKDQKKSTQKKVPYAKPIPAQFQQARLRNKV

SEQ ID NO: 984519 - protein, 37 aa, Homo sapiens
WKDRCPPEQRAAWNVARTRTRGRCGEWHVDRGRSSVT

SEQ ID NO: 984520 - protein, 57 aa, Homo sapiens
MVTGCNTSSLLLLTSTSGLLCRFHILVRNSSPGRVQPAKCVPHGTQVGSREWHSSRV

SEQ ID NO: 984521 - protein, 58 aa, Homo sapiens
MPKPTDRFHTHTYPYLPILTEVHGDAHPLEYSLGYVANSSSSWDTSVTSGPCAESPGT

SEQ ID NO: 984522 - protein, 70 aa, Homo sapiens
MTGTLLALAECRAGHIAGCLCLENFSSQVVERHNKPEVEVRSSKELLCQPVTISRNEKDKVLIEGSINSV

SEQ ID NO: 984523 - protein, 82 aa, Homo sapiens
GASGCGSDSASPKAAAGSSSLYSLYTFSSSSSSVFSPGRYTQALQGSTCRVVWKQKSQLLSSSSADGVSLSLIYLLLLCPLL

SEQ ID NO: 984524 - protein, 77 aa, Homo sapiens
LNVRSSRDEQDYMAQHIISRVKLTCLTDGAKPSSRSHIEWVNNANARVNSSFTIDYEEPDIDRIKRATLAYATLWHA

SEQ ID NO: 984525 - protein, 50 aa, Homo sapiens
MIFWRTTEDGRAPGSSRDHISSPYERHHRDPTFPSSSSGFRDFLLKPELL

SEQ ID NO: 984526 - protein, 81 aa, Homo sapiens
DRRPHSPPKGGRPSHAIHSPHQKRSSDEDDKPTHKPYTNDGSDVTRERTYQGHHTPPVQRRLRHGIIIFINSEVYNFAGYF

SEQ ID NO: 984527 - protein, 103 aa, Homo sapiens
MKAAMTTWTSISDELMQGVADQQELAEEITTAITKPVGLGEESDENELMAELEELEQEELDKNLLELSGPETVPLPDVPSIALPSKPAKKKEEEDDDLKELAN

SEQ ID NO: 984528 - protein, 49 aa, Homo sapiens
RKPNPAGFCSDILLSAIPREKSQRGGESLHLGGQRADYGNLCPYPHWAC

SEQ ID NO: 984529 - protein, 57 aa, Homo sapiens
DSSGELGVMGDKGERGENSVSVRSVGSTKRGRAEVYYMWYRGGQVCDDDVAQILDAT

SEQ ID NO: 984530 - protein, 37 aa, Homo sapiens
GAKDLVRDDGSAVIWVTFKHDGSTRSSPCETGMREYR

SEQ ID NO: 984531 - protein, 105 aa, Homo sapiens
ARPRMMLADQARDGKREVVRGETWQRGLTQTPPAYTGKTHKVHRTETSPCTSPIASCVTMGRTLWLYGKDQGEAALVDMVNDGVEDLRCKYVSLIYTNYEAGQDD

SEQ ID NO: 984532 - protein, 36 aa, Homo sapiens
  misc_feature (25)..(25): Xaa can be any naturally occurring amino acid
MIAEASGEKVQLLGMTSYFSWWEPXALSWDTDARIS

SEQ ID NO: 984533 - protein, 87 aa, Homo sapiens
ERAGAFGGPGSRRRSNSILALGYYPELAPQIGRRAQRWGSVTREEGLARSTSLESSDCKSLDRSTVASGRRKTRVTWMGCRSPKVSP

SEQ ID NO: 984534 - protein, 38 aa, Homo sapiens
DWPTLRARTVSAMRGHIAECWLSGLEELLLATLLELTQ

SEQ ID NO: 984535 - protein, 157 aa, Homo sapiens
MRKLSAVVVSLQSAIMIIYRDLIQPQIEMFSYIYKIREIADGSCLEVPWRMVSRTEGNIDDSLIGGNASAEGPEGEGTESTVITGVDIVMNHHLQETSFAKEAYKKYIKDYMKSIKGKLEEQRPERVKPFMTGAAEQIKHILANFKNYQFFIGENMN

SEQ ID NO: 984536 - protein, 75 aa, Homo sapiens
RYELTLYSTQRTKSRNMSRIPFLSISVLKQKPNLGSGTLVARQTQLRLGYILASNAIAVVRVGMAAAPLLEQQGK

SEQ ID NO: 984537 - protein, 107 aa, Homo sapiens
MSPSGPISPTARLGRQSLVSLFSKGEADTLSSGKRNPGLVALANNKKVGKSSGKAVAMGIFHVNHVKRSRWPLSVGDHTNSSYVSTSSHHTQVTRVELDEISNLASL

SEQ ID NO: 984538 - protein, 36 aa, Homo sapiens
DHTLTSALFCMVSRTQATTACRLLRNATACKKRACA

SEQ ID NO: 984539 - protein, 156 aa, Homo sapiens
MLGGHACPRCPLQSVQVFGRKKTVTVVAHCKCGNGLIKVNGLALDDDEPAHAYSTMLAGASSCFSARSEFVGVDIRCPCPGWVVNVAQIYANSVSPSSKALVAYYQDICWMQVPRTGAQRTSSSSMTVPCLVADPSSAAKSNKCLQALLPVLGTRN

SEQ ID NO: 984540 - protein, 33 aa, Homo sapiens
RITHFTSPLCLVVRLVSTPEDWKGALEGQVHGA

SEQ ID NO: 984541 - protein, 85 aa, Homo sapiens
GNRVSLGRPGGSAGARSGLTATFTSGVQAVLRDSASQVAETYGQHVMAPDIIMCILSKEGGRPGWARRVSNSGPRVIGPPGPPKG

SEQ ID NO: 984542 - protein, 62 aa, Homo sapiens
GVITQEERSPLLIRDVAEHEAPNVVGMQQTTKAMTTARRTRTPCRKGLLTLPGSMDHAECAV

SEQ ID NO: 984543 - protein, 52 aa, Homo sapiens
ILPRIARDTSDDPLKTEPSLSPGSPPQSSCQSGCGRVSLAGDLRQREPLSIS

SEQ ID NO: 984544 - protein, 36 aa, Homo sapiens
LQRAEIALLHFSLGDSKTPSHNKETTINKKKEPFKR

SEQ ID NO: 984545 - protein, 44 aa, Homo sapiens
EPINESGDTANRITPHICGLSTRGVFLQIRKHASGSVGSHTFRS

SEQ ID NO: 984546 - protein, 47 aa, Homo sapiens
SISVPLMCFSLIPNFHCVVSKFSVWPWLQTLSALVPSNTVTRAAGKD

SEQ ID NO: 984547 - protein, 66 aa, Homo sapiens
HHYKVSWDVIISLSPKDEATMAHEMPSGDTSSFVPTAPNLLETSLAQELMLSFLKHVLGMTTLWKW

SEQ ID NO: 984548 - protein, 45 aa, Homo sapiens
VLFEDPFQAGTRDGYEEDEEDVAVQPVRGTPLSYPSPGVRSSLAE

SEQ ID NO: 984549 - protein, 43 aa, Homo sapiens
MPIQRVFPRMNITDESSEIKEVLFKSRYRDLFSSTNRFQEAGT

SEQ ID NO: 984550 - protein, 72 aa, Homo sapiens
RGPSSGRNEEHSVERRSIGGDEEHLLEEEEHLVERRSVSGAEEHRAEDEEERLAETRSSVWQRRGVVSGRDE

SEQ ID NO: 984551 - protein, 82 aa, Homo sapiens
SYEQLLLTDDHRVSETCVVAAWIPSLPDEKCYLEEAPLVRSEITTRPLMPPRGLQPVSMPLTSRIATWLRGETSGFPKQELE

SEQ ID NO: 984552 - protein, 49 aa, Homo sapiens
VEDPLGRTICQMVRARGGKELRARPTCPEKLLDRTPPGDLYPDVAEAEG

SEQ ID NO: 984553 - protein, 41 aa, Homo sapiens
RYIFEDTVNHKYKILLLPPCATDHAPLTISLKPNHGKPRST

SEQ ID NO: 984554 - protein, 37 aa, Homo sapiens
GLEVDAVFTTAVHASLYKYRRHVSTVRGPPNIVKLEP

SEQ ID NO: 984555 - protein, 42 aa, Homo sapiens
MQQCCARPHKVDGRVVEPKRAVSREDTVKPGAHLTVKNIFVG

SEQ ID NO: 984556 - protein, 104 aa, Homo sapiens
EASRGSHAQAGTRTSGLKHQKQMATKAKIDKWDLIKLKSFCTAKETTIRVNRQPTEWEKILAISSSDKGLISRIYNELKQIYQKKTNSPIKQWVKDMNRHFSKT

SEQ ID NO: 984557 - protein, 67 aa, Homo sapiens
RTSSEFHESSWEWGIVERSFSLFYFILLYLFLRQGLALSPKLECSGTVSAHCSLNLLGSSNPPASAS

SEQ ID NO: 984558 - protein, 47 aa, Homo sapiens
  misc_feature (46)..(46): Xaa can be any naturally occurring amino acid
DYSCSSMLCCDGTFLLTQSGKVLACGLYEIQYSWRLTSVACTGNYXT

SEQ ID NO: 984559 - protein, 151 aa, Homo sapiens
MLARKLELLTSGDLPMSAFQSAGITGVSHCAWPKILVFFFFLKMNLGSYGPGKSAGANSGTLHPLRISDFKQFLRPQPLPSSRGIPGARHHAQLIFLCILSKEGVFPVWLRRVLKRVYLIIHPLWPPKGVGFPGCTHYSGPKFLLTFFWAG

SEQ ID NO: 984560 - protein, 69 aa, Homo sapiens
VWCENDGHLNCFVSAAEGVFLSLIQKTFLSTNEKCGTDGAGSNAETATSVDAVAKAPCAWCARHAGVTP

SEQ ID NO: 984561 - protein, 86 aa, Homo sapiens
LGTLRILRADSQRRTAEWGEDETEADAPCQPILGERWSQEDTLEDGARVLRDEPELGTWDREKSAQSRRQEKGGRRSRWMDRNPAG

SEQ ID NO: 984562 - protein, 50 aa, Homo sapiens
MFGPSADYFQELSTSGTIGHCRWLSNGVTLETPYPGWPTLLFWPGVRRLV

SEQ ID NO: 984563 - protein, 50 aa, Homo sapiens
MFGPSADYFQESAPQGLLENVVLSMGHLEDSVPRLANSSLLALGYVWLVA

SEQ ID NO: 984564 - protein, 62 aa, Homo sapiens
  misc_feature (19)..(19): Xaa can be any naturally occurring amino acid
MGRDEDELSQPPSLGSGDXEDSSKDRCRVLRDELTWYVGRESQHESTQEKGEESVDDRNPAA

SEQ ID NO: 984565 - protein, 90 aa, Homo sapiens
MSTALSSMNMAGSELLSLLWLRGSVGRLEGRTWIPRELLARIKIVTIASTGSFSRTITRQRIRRAALTWQGRVFSGCPNQSDRPTFHVRV

SEQ ID NO: 984566 - protein, 67 aa, Homo sapiens
TPEGENNLRGTRLQLHGRFQGSNITPALRHGTELRYLGTHQDAGALQYCVVNILSVTSAIVVITSGI

SEQ ID NO: 984567 - protein, 34 aa, Homo sapiens
LRDSIRITSQYEPPGLLSAEIRREITSNITTECH

SEQ ID NO: 984568 - protein, 90 aa, Homo sapiens
ELTLEDKRLWKTACGHFGPCSESQTWVGMGGQGNGIDLTLSTLSWGAGPAVTPLELGMALGGGSGSLAPAAPSLHLASKADGTCVDISGT

SEQ ID NO: 984569 - protein, 87 aa, Homo sapiens
EENSERISQMSSNKSMVAHTSAFSTEELRTLLSTSQSQGNTWMYYVTCGTVTQRYFVYPALGQDRYIQLRSSAWHRDAFYHYSSVCK

SEQ ID NO: 984570 - protein, 35 aa, Homo sapiens
HDAKMAEQTKRYAQHNNTESNLEPDIKNAPGGIRD

SEQ ID NO: 984571 - protein, 44 aa, Homo sapiens
MIMCCLSGPADLAYSAFVQLVGMCIPDGDLDSCPARHRYNPEHA

SEQ ID NO: 984572 - protein, 100 aa, Homo sapiens
RHQCLDSVSTHGRGGRRPWSRADSRILLRAPRQQEPIHPPARGLCLEVTLKTAVDGPDLEIAHGAGAALALANRKRECGNAHYQRADFVLAANSYDLAIK

SEQ ID NO: 984573 - protein, 81 aa, Homo sapiens
RPPFFKQKGYLWVHITEKSRGYSSFRHGGIQGTNAVIRIQVSPYLGSAFPGTGFILYMVGPVSWRFSSYKAKAPSVKKGRP

SEQ ID NO: 984574 - protein, 37 aa, Homo sapiens
LSNYRVTSPSTHAVRRCSTRQASRWTSSAPASMKTPF

SEQ ID NO: 984575 - protein, 77 aa, Homo sapiens
MTPSEIQLKDSSKFPNVPQYPISLTHQKGLQPIVNKLWSCSLLRPTHSPYNTPILPVKKSDGSYRLVHKLQAISQAV

SEQ ID NO: 984576 - protein, 58 aa, Homo sapiens
KLPVEWREGPFSVKHTFAEWTDMPGSYGSTGFLTVGFIDKESIDQDFSWRLVAHGDVR

SEQ ID NO: 984577 - protein, 66 aa, Homo sapiens
DQEVAGLWDAKGGTGQEQPGAALALRKLTWAEEPGMLLGVERVDHMTGLPNRGKLTTERWTAELVD

SEQ ID NO: 984578 - protein, 96 aa, Homo sapiens
  misc_feature (22)..(22): Xaa can be any naturally occurring amino acid
TLMPPSFKKCTITNSKLHEEEXPQNMTHHQETISHYPKQLLKIQGSLKLIKAAKQEARSDQQSDLAPTPGPQSTPRNTVSQSISGDPEIHRRAISE

SEQ ID NO: 984579 - protein, 42 aa, Homo sapiens
  misc_feature (39)..(39): Xaa can be any naturally occurring amino acid
KLAGGGDTNRGGQLSRIQWGGSLETRKSRRQGAMFTPLXSGL

SEQ ID NO: 984580 - protein, 91 aa, Homo sapiens
MQMDSSSRLPRNIPCNESGGEEESLCEERERAPGSEVSLSKSHGSPQPSWLIPEKVFIGEAKENNSIMAENLWTLGDGVCGNGWVRSQGRQ

SEQ ID NO: 984581 - protein, 53 aa, Homo sapiens
  misc_feature (38)..(38): Xaa can be any naturally occurring amino acid
MEYNGAISTRGKLHLPGSSDSLSELRLQAVRHHAQLIXVFSEKRRFTTLVSLV

SEQ ID NO: 984582 - protein, 68 aa, Homo sapiens
HQYQSFGEIPDMLMKTEEHVAPVSKTESYLYSIKAAITNKIRQNTEESNNGVAHMKSFPWSSRERQGR

SEQ ID NO: 984583 - protein, 96 aa, Homo sapiens
LILSLLGILITRYHHATQNSTKIATLRSLQYRHIAHVVTAILIQPPKKLHQAQSFYIIAQGLTFLITILTSKLKLRTHSQTHHNPLSRHSNSTPTK

SEQ ID NO: 984584 - protein, 66 aa, Homo sapiens
DPFTVPKSEREDEDDNVEGSVPGTSQKEIGKIDKGRWLRSKEENGSDLESWTYMDACFTEQQEKTE

SEQ ID NO: 984585 - protein, 40 aa, Homo sapiens
GLSDSLHSAMCVIEMEGWRGTEVVQAKRALQTGVEAERAV

SEQ ID NO: 984586 - protein, 42 aa, Homo sapiens
MRIGLHEHVWDLPKLCSSLNQALTSLIARLDAWSEQQGKTGR

SEQ ID NO: 984587 - protein, 115 aa, Homo sapiens
MTQSDRCVHMLVLSPAQETVVVSVGLSALPKDTGVVCSRSISCAQKTVVVEHRTYKTLHRVTGVLCADPQPSPGNRCVVHTYSDYNTGIQGVISVWVLRPAQVTGVVCAGPQPCP

SEQ ID NO: 984588 - protein, 44 aa, Homo sapiens
MVPFLWLSPGGVTLDPWWEHEHSSSGRDTFQNFSFTSSRVSEPF

SEQ ID NO: 984589 - protein, 41 aa, Homo sapiens
EKTPDIHYIGDHLQGGTARLARLASTSSKQLLVASRVTKSG

SEQ ID NO: 984590 - protein, 66 aa, Homo sapiens
HTASHETLERTSSTLTSTDTSEPRFENTSMLTGCVMFQTQDVRYLPMDQELGSICCCPSPGSSRER

SEQ ID NO: 984591 - protein, 46 aa, Homo sapiens
TDRLMPSWGRHRSHNSRRIWFTAKKSQLRLEQFPGMSAQQSMQYSD

SEQ ID NO: 984592 - protein, 45 aa, Homo sapiens
MPALPLDIAPDRCRIWPCIPVLQNKYVFPKCVERCSDAAVTAMPH

SEQ ID NO: 984593 - protein, 63 aa, Homo sapiens
HQYYESSKYRGRSNETWQLSSRFGQYRRIPLIRKSETLQNPKLFDARNHDHSNGNCSWTFSKF

SEQ ID NO: 984594 - protein, 70 aa, Homo sapiens
EHHSTQALARRGGDLQGAGLQSASGSGVINSHFWLGPSEPRVDSWGFHAPYQVPTAWVMAQGMEPYLRGQ

SEQ ID NO: 984595 - protein, 81 aa, Homo sapiens
SQAGTTSFIYLSCIVLFGACIEGVVLRDKFGEALQENLVIGMLAWPSPWVIVIGSFFSTCGAGLQSLTGAPRLLQAIARDG

SEQ ID NO: 984596 - protein, 118 aa, Homo sapiens
MYILAEEPGMVRNVSAAALPSCPLHATGPSPTWWGALSTCPSWSICPPSEAGSSPYFLTFVWLVLLENSPCGLCSAPLSQPREGGMLVPKRRGDFPRTIQGVGSRVGLEPSPIREIAF

SEQ ID NO: 984597 - protein, 64 aa, Homo sapiens
ISGSDDGGGGMRRWKSTVGTAGTHSGRGTDHIVADVGGSPAEVLDDFRHLHPFDTELREAALAI

SEQ ID NO: 984598 - protein, 83 aa, Homo sapiens
PGDNPRTRAYNRAMTRLQHLFWLPKQSPECENFLDVGLGRECTSTQGVLKRESGSDSDLFHSPSADMDSIIFPQPEAAHLACD

SEQ ID NO: 984599 - protein, 42 aa, Homo sapiens
  misc_feature (26)..(26): Xaa can be any naturally occurring amino acid
PGLSGVIRCTAKRTWVIDQTEILSRXVNADDIHESSRVGYIS

SEQ ID NO: 984600 - protein, 126 aa, Homo sapiens
VVPWMYGKQTNLELEVEPARCDRIVSIIVKKLETDERLLCIDKQRTWFPEMKSTPEDAVNIVEKTTDLEYYINLVDQAVAKLERIQSNSKRSSTMRKHVNQTASNAKENVSHVLKSQNTAAIITAD

SEQ ID NO: 984601 - protein, 39 aa, Homo sapiens
VDTLPGLMITSAASTMYSTFSHNELYTFCTGTHGPACVP

SEQ ID NO: 984602 - protein, 115 aa, Homo sapiens
  misc_feature (35)..(35): Xaa can be any naturally occurring amino acid
LCTSDRRLQTCCICCRKLMGMVLGPELQLLDKYRXVAALEEVLQAEQEFLANAKESPQEEEIDPFDVDSGREFGNPNRPVASTRLPSDTDDSDALRTQVLAPSAEEPSSSCCEEE

SEQ ID NO: 984603 - protein, 34 aa, Homo sapiens
  misc_feature (23)..(23): Xaa can be any naturally occurring amino acid
RRPFLSSLPFFELSHTSNFHINXLKLYANLPTLQ

SEQ ID NO: 984604 - protein, 81 aa, Homo sapiens
CAPGRPFPQWAACGVFSTAEGVQSIHTTQCTEPSSGWADPGGPDLEAGVSLTRHVTQDVVSRTLTTSGTLSTHMFQQFFQT

SEQ ID NO: 984605 - protein, 40 aa, Homo sapiens
VNEEELTDSRQVPWDDRGSDYGQPLILTFRVPPGDSPLPC

SEQ ID NO: 984606 - protein, 47 aa, Homo sapiens
WTRMGWGYRRHPNGYLVLELSVQEALSGTSCLLGPRPVLTVLALLLA

SEQ ID NO: 984607 - protein, 108 aa, Homo sapiens
RQAGLGQTVVTRHGFTLTNIWDYGSRFVSSEWTLWLFTRLGHIQSIDNMEWRGSLAMSWFTHSSDQQGNKGPREEKAVPGQTWDLNPARALTPSPPVPSLPPCPALGP

SEQ ID NO: 984608 - protein, 84 aa, Homo sapiens
DVQVVGCLAGTRWCCDYLWAAGDTTAAGAGVVTLNVAGYGLTHDLGPGRLTARPGDPNAVGGTLTCLDWVVVTLVADGWTLTDR

SEQ ID NO: 984609 - protein, 133 aa, Homo sapiens
MAARKPLKSSRRYGSPGIGRCNKSSRLLLSGSPAPDPFPQYPLPASLINPSVAAHHDPIRIQLKDSSKFLSVPQYPISLTHQKGLQPIVNKLCSCSLLRPTHSPYNTPILPVKKSDGSYRLVHNLQAISQAVL

SEQ ID NO: 984610 - protein, 109 aa, Homo sapiens
DASAINCARIEFWILTHLSVVVVARALCKAEVFAGPPKWEEGAPPEGESKDLLQPVEVVVSSCVTGLPSMLLCRAARLLKCSWPEELPIEAEEGLHLCAQAFAILLQPP

SEQ ID NO: 984611 - protein, 31 aa, Homo sapiens
MSLHNNELPYFHRTQSHVSSAVWVRSAVPGY

SEQ ID NO: 984612 - protein, 68 aa, Homo sapiens
RGIRTAWVSSADVPTDDAVTGTGGTGVNLSSATLCVPTTKTLGTVTPVSLLRAFIQLILQTLGQCYLR

SEQ ID NO: 984613 - protein, 48 aa, Homo sapiens
MMLLKGLAEVYFQNGKFRKPLWLRLYREWTGWEPGKEVAAVFHAREDG

SEQ ID NO: 984614 - protein, 67 aa, Homo sapiens
CRGSRHRRLYHHGDTGDGESVLRYPGEGAMRNGYHHPRKAAARANYPLPTREGSAANSHYRTLSSAL

SEQ ID NO: 984615 - protein, 91 aa, Homo sapiens
CESAMVAMCKADGREPTVAGPNWKTALCIFIVDGVLLLLRGGSQGPGPNVATSSPNRERFPRCRGSQSGPSSSLTVCLAVCKEASGVGLGL

SEQ ID NO: 984616 - protein, 104 aa, Homo sapiens
MTQCSRSVELLICSCVRASPPSGCSQLAFNFSWSPGRSPGMDCTSQLCERRLSSSNLSRLCGDHCGALLNLLSTVLVYLLSVLPSQLVILGPDVCHDLGEVLRF

SEQ ID NO: 984617 - protein, 115 aa, Homo sapiens
YSLEARSPAPRLLSCDNSVEDWITEECSVQPAELSSTSQVHKEYSKCLRHSYCCIRSPTGGTHGYLKNSAMRSNTRYYTGTQVSGQTGLPGAECRNLEPERWGVAWPRFLIVMIR

SEQ ID NO: 984618 - protein, 68 aa, Homo sapiens
CFMIGSMLFSISLYFISDLKLLMQFMNLRNKNVKNPDKEDEISEELKEKAKIEDKKKDEEQEDPQGIP

SEQ ID NO: 984619 - protein, 44 aa, Homo sapiens
LPQPVDQALAYSYSVYFELLHQHLQQHYTKRLTVSIGYFKKQEL

SEQ ID NO: 984620 - protein, 46 aa, Homo sapiens
ARPEDPFLKGVCCSLSASIYKRFEIINAIMNLEEEDAGTGFKKQEL

SEQ ID NO: 984621 - protein, 140 aa, Homo sapiens
ESTVIYAETDVLWNSQIPLLICSDIWTSWLYEDHYKTNIQYIESHPDYALEDLRLDEPFPELREHFQSYNLDHMEQKDHSHTPWIVIIAKLFSTVDSETNGRIPETYNDQEDFRDLIRQGILENENGAPEDEENLQEAGT

SEQ ID NO: 984622 - protein, 71 aa, Homo sapiens
QFLLLKACGSEVQICITFWSETHEDLWKLNLLRLKNFHPAGKISQWELKEQVLDSVVFFTKSNQCFKKQEL

SEQ ID NO: 984623 - protein, 70 aa, Homo sapiens
ARLEDPPVLLLERKYAVLYQPLFYKRFEIINAIMNLRKKNVNGIPDEEDEISEELKEAGLEELVSRSRNW

SEQ ID NO: 984624 - protein, 34 aa, Homo sapiens
MIPRSCFLKGRPRGSEEVEVTRVPRGTGFKKQEL

SEQ ID NO: 984625 - protein, 59 aa, Homo sapiens
MTSNYIYILKPWHKTKERTYRHKDRKKTERKKGKEKKERKEKTEQTEQRDRKAKNQNRQ

SEQ ID NO: 984626 - protein, 47 aa, Homo sapiens
PQFLLLERTLVGEIEIQKAPCEKDLNARFLSGEEAAEHKVVVDVQAR

SEQ ID NO: 984627 - protein, 39 aa, Homo sapiens
TGALTYRYCVAIGAGGLYYGVGGAGRRRLSEGEWEDECS

SEQ ID NO: 984628 - protein, 32 aa, Homo sapiens
LPLFLVHSVCERTARLSRSHRVILKIVNVYQL

SEQ ID NO: 984629 - protein, 52 aa, Homo sapiens
RRSRGSRQLSDPSSTSQVPCLKTSPSPERSLLLKYARTPTLDPDTMHARKGQ

SEQ ID NO: 984630 - protein, 37 aa, Homo sapiens
NDKVSVVTPIYLADVILRNSSRMKYLCPRSRVVLSGL

SEQ ID NO: 984631 - protein, 70 aa, Homo sapiens
GIPYCYQRTLFVKNPSNIIVQTVSGAKAHCHLWDGSRTYIPSDKFTYNIYASMNGFRFSSCQCNSNRCQT

SEQ ID NO: 984632 - protein, 36 aa, Homo sapiens
DGTCSFYTVRSMPASQSEEGAPGLTYPSIKVYNFTA

SEQ ID NO: 984633 - protein, 105 aa, Homo sapiens
MCTLPRGRWQSCSLCRSICEGRSRPRLWGKKTKGLLRFPPVGATEDRAREGGTAGGSTGGRRLRGTIPARPSIPSSQQTARQWPTRPSSALWGHDLRRVGAPSPC

SEQ ID NO: 984634 - protein, 98 aa, Homo sapiens
QRWSSAFYFSEKQKLNFKISGELSWRWFGEEASITRSGGGFMPPGDRAELHTVGFGGSKMSRGSCKDKKEKGCVAFLSFPFFFSKDGVSPRREVGVQS

SEQ ID NO: 984635 - protein, 58 aa, Homo sapiens
  misc_feature (9)..(9): Xaa can be any naturally occurring amino acid
IEQCAQLLXYLLLNQDRSLQALILLYGIYQMIDFSLHMWQICVNRLHHLVTHEIPHHF

SEQ ID NO: 984636 - protein, 35 aa, Homo sapiens
MSSSDLLGFHFLLLSWSSTTLHTSCWSRSTGPYIA

SEQ ID NO: 984637 - protein, 73 aa, Homo sapiens
VDSEDPLLSQSDSKSKLTKDFSALEIQLQDTQELLQEENRQKLSLSTNAQCRCEDEEEFLPVSSWRMEEEANA

SEQ ID NO: 984638 - protein, 48 aa, Homo sapiens
NDCPQLAAGAQVKTVSMEVNILKKTLDGVSANDLTDVPRFHVSMMCMN

SEQ ID NO: 984639 - protein, 38 aa, Homo sapiens
SDLEDLRIRWTQIEPDSSSMFRQVDVLWVVELARRINP

SEQ ID NO: 984640 - protein, 96 aa, Homo sapiens
QKIQITGHCELYSCMCISVTIVSMTKVTDVIFVFLKNNWLYIQVFFISFCARSTFSTLPIKSGHLLSVRQTHGNVQVFQPKPVMHGNQCKVQFQCM

SEQ ID NO: 984641 - protein, 41 aa, Homo sapiens
MPLGCIPMRRKDCVKNYPTFHSVIVIATVAWAMARRGSKIA

SEQ ID NO: 984642 - protein, 117 aa, Homo sapiens
SRGSYARSELGIKENWVQRAGRTQRRVWQRGELGPKGTQCPNVHQRWFMGVPVAPRVLLGLQGRPGVFPGITGEAGEFPGTGGQLSSASRQLVCGRMHQPNKFAHVHDRGYRKLDIR

SEQ ID NO: 984643 - protein, 56 aa, Homo sapiens
EGAVVYLQEELRLWSGQVGLLFPLRLGCCGMLLIPHYVLRVVELSGTVCLLQFTTA

SEQ ID NO: 984644 - protein, 68 aa, Homo sapiens
  misc_feature (3)..(3): Xaa can be any naturally occurring amino acid
  misc_feature (65)..(65): Xaa can be any naturally occurring amino acid
EVXEGGVSGIQVKGRAPGLWWAGRGMEDRVRGIQVTWQSSLCLNDASLIIAWACDDQTLWMTDEXEWS

SEQ ID NO: 984645 - protein, 40 aa, Homo sapiens
LSVLRIIVDERFYPVTLDVLHQIFSKFGTVLKIITFTKNK

SEQ ID NO: 984646 - protein, 33 aa, Homo sapiens
MLRWDPGCLYASPLGCRLSFGSDQAAVTQFSFI

SEQ ID NO: 984647 - protein, 40 aa, Homo sapiens
SELHDGGARSTGMKCSCFTPSSRRMPSGDTWTTVAVVPDV

SEQ ID NO: 984648 - protein, 69 aa, Homo sapiens
LNALYIRKRGQHSYLESEGNTHTWKSRTTLILVKPRTTLILGNRGQHSYLATEDNTHTWKPRTTLILGN

SEQ ID NO: 984649 - protein, 106 aa, Homo sapiens
  misc_feature (52)..(52): Xaa can be any naturally occurring amino acid
SLSASSAGPARDALCISTVILMLQSVTTAAHLAWCIQPATLNHSCANSFPHXAAIIAHFPPSVPASSCVPPVQHHSMQCKHPHSGTSTLVPCWSQQLHAMCPLHGS

SEQ ID NO: 984650 - protein, 34 aa, Homo sapiens
DSESSSAECTPAFRFIGVTGVPFRDIFPARNSTK

SEQ ID NO: 984651 - protein, 155 aa, Homo sapiens
MAFVAWVEEVVDMTGVTAADWLLGAWSAGAAPCDAHCSPVSCAVHVQSGPPAHPVLRCLAGPMMLHELAVAHVSQQALQCHPHRLAQRVRGRCFRWTPVPQCIGGFVQILVDISWKLLLILVCLGFLHPEEKPIGPCLELQHVDPPAGALRNPLE

SEQ ID NO: 984652 - protein, 53 aa, Homo sapiens
FENIVAEAAAGAEGLGVATGVKRWWMTVVTCCRSGSGELELSELLPVSAHCYH

SEQ ID NO: 984653 - protein, 122 aa, Homo sapiens
MDDGMTAAALTPASWSEELLPGVTTAPQSAGQARSSHDPQTTQSSEAGWSRLSCMSWLWIMFPTQALQATLNDKARRVLWTLIPLAPSAPGIGAVVQDYLVDFPDMLLILESVSGSCIPNTT

SEQ ID NO: 984654 - protein, 46 aa, Homo sapiens
GTFLIQLLIQELLHSGTGVGLQQLPLSASRSSLSTFLCAVVPGAQG

SEQ ID NO: 984655 - protein, 51 aa, Homo sapiens
MAAMIGCSMSLQAAAVAVELEPGHCQADQRIDGTRVQAPVEERKRIEARAA

SEQ ID NO: 984656 - protein, 115 aa, Homo sapiens
VCAAVTLEDPAAAFFWCSELAVVRVFLRFNFQDLNWPCPLKKESSSWGGLNFNTDEQAREDHFSSFGPISEVVVVKDRETQRSRGLGFITFTNPEHASVAMRAMNGESRDGRQIG

SEQ ID NO: 984657 - protein, 37 aa, Homo sapiens
GLIRFLHHSHFFFPIAAPFFGIIRFLHHSHFFFPIAA

SEQ ID NO: 984658 - protein, 57 aa, Homo sapiens
MVWSLFHSDWTLVHFGLEYLYRFLHGRFFFSFLIIKIIIIIIFIIILFIIIVIRGTE

SEQ ID NO: 984659 - protein, 113 aa, Homo sapiens
GGADRVANICNPSNLGGRGRRITRSSNRDHPGQHGETSSPLKIQKLAECGSTCLQSQPLGRPRQENHLNPGGGGWSELRSRHRTPAGATERDSISNKNKNKNKHKVGTEKGPS

SEQ ID NO: 984660 - protein, 52 aa, Homo sapiens
MSSPCGSGWSRTPDLVVIRPASVFQSTGITGMSHRAQPVWFLIGFGKKGAAV

SEQ ID NO: 984661 - protein, 59 aa, Homo sapiens
AAGPFLVEEGLAMWLRLVSNSTDPPALVSQSAEITGMSITPGNGMIFGVFGVWFPSVFP

SEQ ID NO: 984662 - protein, 99 aa, Homo sapiens
HLSLRGSWDYRHRPLRRANFGILVEMRFGHVAQAGLKLRTSSDPPVSAFQRAGITGVSHHAGPKTGFFGIFLSKTGLTTVFLKQQKDNTGGHTVLKLET

SEQ ID NO: 984663 - protein, 65 aa, Homo sapiens
HINDIRSVTHGYTRSDANLYREACTADGEYTSTRLQLNDISAVSTVAHVSTELVQGRHAPTVVNT

SEQ ID NO: 984664 - protein, 111 aa, Homo sapiens
FGAATRFRCFLGGGVMAALGKEQAWRSEDGCCEGGCAAGPAVGPGEIRGGGATSLWTKMRSWNRAENRRLPLSIFPKVTPGARVSFTEMTDSPFHIFPPSAECREADGLNF

SEQ ID NO: 984665 - protein, 114 aa, Homo sapiens
STLYTSTSVFTPIMQVGVGSDPADIRVILLRHQENPQCALSVSQWATDKVYPSELVNSAGQQHAVVLQVGTLLTACLLGDGVPVKMQFSIHSSSPGVRIGTCQEREGHHLQIHQ

SEQ ID NO: 984666 - protein, 109 aa, Homo sapiens
  misc_feature (100)..(100): Xaa can be any naturally occurring amino acid
QRFIHSYNAILSQRFILPQRFILPRQALAKPFTQMKYKAWSSTLYTSSPPPQPAAEPGSPPAPAGPGHRPVPALGPSGPSGAQPPGRGKINHSLFLDPGXNADQDSLQP

SEQ ID NO: 984667 - protein, 105 aa, Homo sapiens
LNALYFMPTNSSSFFFWRQSLALSPRRGVQWCDLSSRQPPPPAFKQFSGLSLLSNYDYRLVPPRRANFSIFSRDRFHYVGQAGSGTPDLVIWPNSASQMCWGLQA

SEQ ID NO: 984668 - protein, 33 aa, Homo sapiens
MQGPLELRKYKAWRKYKSVELNALYFSPAPSPT

SEQ ID NO: 984669 - protein, 38 aa, Homo sapiens
ALYFLKLYFLNALYFLNALYFISSRGPGILNIRSIKRG

SEQ ID NO: 984670 - protein, 77 aa, Homo sapiens
  misc_feature (55)..(55): Xaa can be any naturally occurring amino acid
CGDSTDAETRQDWASEVWLLRRESGGCGGHVLPPPPSRGLVPHWMAERCSSVLPXWWAPNRCLLLEQACGLSGVRHD

SEQ ID NO: 984671 - protein, 49 aa, Homo sapiens
  misc_feature (47)..(47): Xaa can be any naturally occurring amino acid
TRLDCYSFLPKLCATLNGPGADRDRTAPGTCIQAKSGPGFVHPVRPXTR

SEQ ID NO: 984672 - protein, 104 aa, Homo sapiens
SSHGRHVGISRSMQTQVEHSAAQVDVQWKGTDGAVHLLLLLVALLQAAQKEGLAKKLLGSATRLDVQQGVVCVLGQALGEGQQMPSCTMGGVVKDLHWGVCMLN

SEQ ID NO: 984673 - protein, 41 aa, Homo sapiens
NSPFQACREHRQQMQQCEQHCMEVMAREQFELVMMHDDEST

SEQ ID NO: 984674 - protein, 105 aa, Homo sapiens
LEDKPRCKATVNKSLATFLVAENVLQLRHLFHPGGAWALQSPQARMASHRKSKGGGLPLSGSSVPGTFHISIGQGMLVGVAGGPSWEVLSSEVEQDQGPAYRSSL

SEQ ID NO: 984675 - protein, 110 aa, Homo sapiens
LTPQKVRLVVYRDEAHYRFEENLEIFPVDLQKKAGRGLGLSIVGKRNGSGAFISDIVKGGAAYLAGRLTQRDQILSVNAEDVRNASQKTAATILKCAQRLVQLEIARLRR

SEQ ID NO: 984676 - protein, 52 aa, Homo sapiens
ITTIQVLPTVPGSSISVPTAARPSCPSAEASTDPFLTSTPVTSQPSPPQSPP

SEQ ID NO: 984677 - protein, 98 aa, Homo sapiens
VKQTHLCCSSRGTFSHELCDFVLESTAGETPVVAIRTAKGETFVMQEEFSRDGKALPRILQYYYDGNLKRHLMSEPIRDSNDVPVKIEKAENFDAIVN

SEQ ID NO: 984678 - protein, 43 aa, Homo sapiens
CTSITRPLHEPHHHEAHTQNSTRYTAPPPEAQTHNSTRYTAPQ

SEQ ID NO: 984679 - protein, 50 aa, Homo sapiens
ILSDPKAKPSAISITIHHHPPLSPTIINVITITNIQSITNITTIIPTIIA

SEQ ID NO: 984680 - protein, 40 aa, Homo sapiens
PVPEHACLACRSDRVFTTADAIASHDKSVRPVSTGADLQY

SEQ ID NO: 984681 - protein, 41 aa, Homo sapiens
MPNMDPLGILQNKECRPQNSIIWSLVSTSIVSILLKLSCMA

SEQ ID NO: 984682 - protein, 123 aa, Homo sapiens
MWASRRREGTGWAFGEALLSERGVLMPSVHVEVFGFGPQPLSGNSAYHVDPTMDTSFLRAHWFGSFLINQRQGLAVVLLNSLGQCLRVFGFFFSWVVGQGRDLGTLLIQGRDVGSPGLDNQKP

SEQ ID NO: 984683 - protein, 58 aa, Homo sapiens
  misc_feature (56)..(56): Xaa can be any naturally occurring amino acid
GPVSFLRGGCQSVVLNGTEGETAPGDLGELSGDTSGWHILVGRPRTSSGFDGRECXLN

SEQ ID NO: 984684 - protein, 63 aa, Homo sapiens
MVLRSVSVVSAAPNFSRWCGDHCGALLNLTETSTCLARLGSCEPGRHIVARMSAVILVRSVRF

SEQ ID NO: 984685 - protein, 65 aa, Homo sapiens
DNPELAIWAGRPFTSSSGFFFMQSRPSVRASISVVQLRSCDIGVVNDLEERMDVVLHRVQLRTIV

SEQ ID NO: 984686 - protein, 78 aa, Homo sapiens
QRWSSAYCNSASRVQAILCLSLQSSWDYRHPPPCPASFFFFFPKGDVYLVIKNNKGKENMYLGGVPAGVTKTMRVSKK

SEQ ID NO: 984687 - protein, 84 aa, Homo sapiens
  misc_feature (3)..(3): Xaa can be any naturally occurring amino acid
NEXLSYWEAEVGGSLSPGGGGCSEPGSCHYTPAWVTEGDLISKNKKNILKYFKYGKRNKNLKQYQNYIKIIIYQNVVECNKDNN

SEQ ID NO: 984688 - protein, 67 aa, Homo sapiens
EDPNDGVSSQMEYPAYLRLVPQNFGVIGLREHFAIHFLAGGGLFGLVCLDVACLSNGITNDETSYAI

SEQ ID NO: 984689 - protein, 77 aa, Homo sapiens
MRAEDHRCNDVSSVVVCGRPTSMGSERSLMRPISDECSWRHEIECLKEELSSDEDHDEEVHGYKPDCSLGCGGEMPN

SEQ ID NO: 984690 - protein, 163 aa, Homo sapiens
CGYVTAMPEQCASSEAQCPVWMDADAFEHIKQGSDAYDAQTYDVASKEEQQLQTDSGKDQEEEEIEDTLYGHSRSRRSSKAADCGAAEARGTRCRAAEHPWALMRWQWRSKLSKQRKTKIPEQTKPYKETANEETRKKRGVYHSYSSSIPHGHDLPALFTRCQ

SEQ ID NO: 984691 - protein, 73 aa, Homo sapiens
GSPMMRPQSACLVDEYIIVSCHGHLTDTKYHTDVLFVRHDGSDSSQGSELLFMKKNHDEEDKAYKPRLARDLV

SEQ ID NO: 984692 - protein, 56 aa, Homo sapiens
DYLEDPTMVSDCFYTVAISGMMEVVASVARPWGPVPLMVDLEKETRRWWFSPEVCG

SEQ ID NO: 984693 - protein, 116 aa, Homo sapiens
MAPMLCILSRGIKKKRNGYEQCMKRDKQVLLHWVYYGDSYDTWMPSSAVDGSVADARTPENLRKVRAKWIVESESFKEWLNEDDYEVNDDENPVSRRKKISAKTLTDEVNSPDSDR

SEQ ID NO: 984694 - protein, 95 aa, Homo sapiens
LPSSSFFFWAFFSLDNSLFGWIRLSLSSDMAAISFSEFFLQLRQPSFHKGWWSSGSRVIPHLSQFLRNITKGQARRFSLDLGAILRAEEEEEEEV

SEQ ID NO: 984695 - protein, 59 aa, Homo sapiens
VGLNGCITTPVNHDMMKFCESGPSSSSGPRTPPSLQVVEFWGRRLGPGPEDCSADSLSL

SEQ ID NO: 984696 - protein, 39 aa, Homo sapiens
MPRLQMVSARMYAVQTGSPTNSAWLRVVLLVHREAVIDP

SEQ ID NO: 984697 - protein, 43 aa, Homo sapiens
GAYCERHYTQEELLREDTITEELYFTVTGDILSGSRLTNHRSR

SEQ ID NO: 984698 - protein, 57 aa, Homo sapiens
GSMDQADFKRSQGNTQTHFPGGQAHVRSWRYQSKGLLVPRGGKSKSKLLSLLGSNGY

SEQ ID NO: 984699 - protein, 38 aa, Homo sapiens
  misc_feature (25)..(25): Xaa can be any naturally occurring amino acid
LNSLQEAAQGKRLLLFRVIFWSSCXLSIQLVLSYRLCS

SEQ ID NO: 984700 - protein, 42 aa, Homo sapiens
GYQAGITGDACETPAGERQVVAGLPTHGFVEIIEMECHNVAK

SEQ ID NO: 984701 - protein, 52 aa, Homo sapiens
PSGEVLVDDRGVLCKNDWSIAPDDDKVRFSLSGVTPNSSPTMLNQTVSDESC

SEQ ID NO: 984702 - protein, 190 aa, Homo sapiens
MASSLETKVTEISLNQFRKFILLRLRMHSDTASGGPDDMCLRGLGHSLLLYILGGHNTSISTRKIHIGSIWKGRTTQTRVLGDFQLIGRFKHILIGSLLKALLSVERNVWLIFVLLVEMGFYQVAQAGLKLLSTSNPLALASKTAGITGVNHCTSLDIIPKYIVDLLNNKGIMMVANCYSILYQITGRCG

SEQ ID NO: 984703 - protein, 81 aa, Homo sapiens
QHPQTPASPFFPSTSILRAHFWSLSNSEHHIWWDMPIQCHSGHLTPCISVLPVSAGTDQLRARPSCLADRWVGTERARMPY

SEQ ID NO: 984704 - protein, 37 aa, Homo sapiens
TLGSCQDGRTSQAMPAHSSVDPDLRLPLSGKLLPDAS

SEQ ID NO: 984705 - protein, 31 aa, Homo sapiens
  misc_feature (11)..(11): Xaa can be any naturally occurring amino acid
MGDDEDACSDXRGTEAMAPDILARKLAGAED

SEQ ID NO: 984706 - protein, 132 aa, Homo sapiens
MCPQLLRRGHKERLHVLLLLWLMTDVSLLLPKLELQWRDLGSLECSASLCSCDSPASASRAARITGAHQHTRANFFFFGNLLQYRWGTTYCWPGWVWRLLTPGDPCGSASSRLGTQRREPPCPPQRSWVLPW

SEQ ID NO: 984707 - protein, 36 aa, Homo sapiens
NDWSSRYRVAESMENHLQPAEVDVAYELGIVPSIRV

SEQ ID NO: 984708 - protein, 192 aa, Homo sapiens
PAKNQATCREDDKNTVSPTTKKPAGNLFCFSPRGIKRSKAVWEGQNRQGMVGEGKSRGCGVCLATGVKGLPSPCWDPPSPSGLAGRVQPATPKGRCGAARCSRQGARRGSQRLALQGDDGTAPQLLCQGAGVLDLLVADCLQFMLDPCQLLLDGDLGAGINHFALKGRRLGCPEDKHQILLLALLGLIGCII

SEQ ID NO: 984709 - protein, 196 aa, Homo sapiens
NDGPTADTAEEEREEIIIPSYGNLWDSNGPFPVGCNLLPSLAVCSLTQKGEGHQVPLTVVFVSSSNPGQWLPCKIQPHLMTVCNTPHASDGRNPMPHATPISARLGSLISISLCSPQLWGLQTHFRSILSTSQEAEARGNNPCPNAPDHATSLYALSPSPGKIKLVEYLPMCPRTFSPHNHFMGQHYHPQVTDEEI

SEQ ID NO: 984710 - protein, 66 aa, Homo sapiens
KNISYHLTGPVQDNQHLCDHRCWSNTSTVILSTTPRGAHTTVIIPHSTDRHGRHKQVNVTVTKDIN

SEQ ID NO: 984711 - protein, 51 aa, Homo sapiens
ATTAAADASTGPSSRSPSTLLRKTPTAIKTERTPAEVKKTTAKSVPADYSD

SEQ ID NO: 984712 - protein, 50 aa, Homo sapiens
MRYVASYLLAVLGGNSSPSVKGIKKILDSVGIEADEDRVNKGFKKQELGV

SEQ ID NO: 984713 - protein, 125 aa, Homo sapiens
PPVPALERKSGRVVTTRLGCKYVSLNEGSEYDHVYVEKVSPVMIVQASAILDYLLVNNRLSHVYARSRSATALGDNLQELYETYVRTWKYMLKNSKWLNITVLEMLSDCILSLPERDQISRSRNW

SEQ ID NO: 984714 - protein, 35 aa, Homo sapiens
MAIQDECTWSFSISIFSDYHQRLMVIIGDFKKQEQ

SEQ ID NO: 984715 - protein, 118 aa, Homo sapiens
LLEDSEQVIKEAGSLEETQVIKRHTLVVAQMKRVSRLPDLTPPTGSNRGQPVPGELLPFCQEFWVVRPSVTNVFQESEEEKQPEVPCSWAKGESLSLPWVASSTTDGTEQVIIARSRN

SEQ ID NO: 984716 - protein, 95 aa, Homo sapiens
PQFCFLKRECIISTSVPAVIKHQGQGCLHQFHDRVPEFRVHGIKPVSSYLYHDNDRTFETDEKGEIEVCRLEIEEDQKRLRDREGGRTREFKVVA

SEQ ID NO: 984717 - protein, 104 aa, Homo sapiens
DYLTDDIGAPTTAKFRVKVAGKSVLWIGQLPSTIFICMEAEIFRAYWFTIRKTGRCIFIRGLCHDHGGVVKPAHTGMLFLLLILSVTFKVTVATHSFFRGSGYR

SEQ ID NO: 984718 - protein, 53 aa, Homo sapiens
  misc_feature (47)..(47): Xaa can be any naturally occurring amino acid
RYYYRVYFFTSLYNGFFLVVQTTRFLLGPTHVNTLPHGDFYDGFLGXATLYTR

SEQ ID NO: 984719 - protein, 157 aa, Homo sapiens
TSVKRRDRSRSRETRPEAESEEDLEVETGDAQGVAAGAGDPDPPVLEIKARKLRIDLGPKRKLMVGKVLKQKQKSTKHDKAGIETSTHSMLATLTRISWKQATCSKANSTSSSKNGEQAARKKAHGKHEEQLHTAHRRDANKGKKWSLEARKMMHQH

SEQ ID NO: 984720 - protein, 35 aa, Homo sapiens
NQRIPLNAYTSSTLYFLNAYTYTGKDEKMQQDSDI

SEQ ID NO: 984721 - protein, 44 aa, Homo sapiens
RPVIFSRLYFLNALYFLSFIFLNALYFHAYLILYCNSIRKYKAL

SEQ ID NO: 984722 - protein, 46 aa, Homo sapiens
TLYSSTLILSHFFLNALYFLNALYFLNALYFRIEFQYNIKYAWRSI

SEQ ID NO: 984723 - protein, 37 aa, Homo sapiens
MTWPQASDTRSGVVGVSVVRAPLSLPTERAPDGSIKT

SEQ ID NO: 984724 - protein, 54 aa, Homo sapiens
  misc_feature (27)..(27): Xaa can be any naturally occurring amino acid
RPHYYYSSSPSPSRTVWDTRLGITQVXPIRQPNTHSHHTLHHTQATLSAAHPTS

SEQ ID NO: 984725 - protein, 43 aa, Homo sapiens
PLNPTFWEAEVGRSRGQEFKINLDKLARVSQAVHSGISRGDLY

SEQ ID NO: 984726 - protein, 73 aa, Homo sapiens
MWSLQIGQESAKRLTAVRLQRQRAILYKRLNVPPAIKQYTQCLDRQTATQLPKLDHKYRPEEKQEKKQRLVGP

SEQ ID NO: 984727 - protein, 55 aa, Homo sapiens
NSPQGGSLGCCQSGLCVELQGSEEKCLARGLERGEVRSLRNPSSPILWRKRAGES

SEQ ID NO: 984728 - protein, 48 aa, Homo sapiens
MVGEWTWIDENDNITDVLAFCVAQTASRLSHHPFMPSHGVDCHPNNDL

SEQ ID NO: 984729 - protein, 46 aa, Homo sapiens
MLIVYGIDEDDETPPPHSGLQTRKVIPVTAGGTVLAAALCRVAYGK

SEQ ID NO: 984730 - protein, 34 aa, Homo sapiens
LLVDLEDPTMAQLFSYSFLPYPFFYVNYYVTEPQ

SEQ ID NO: 984731 - protein, 58 aa, Homo sapiens
MLRSLYDDSPNWSSRSENNNTLRHRVLLPLTSYARYSTAARACFTHHLKLTDPLVGVP

SEQ ID NO: 984732 - protein, 112 aa, Homo sapiens
CGFVQDGEYSGWRVCDCMLIMTELGLYTVTSAKTEDLNSKINKIARQQHYERQINNSEDLAVLHYPSRVACPAYSINPVSPLTTSGSSLYPAIFTQIPMKRYQATRQYPRSR

SEQ ID NO: 984733 - protein, 69 aa, Homo sapiens
MRRQGRGKCRWTIVRLGRSVVSDETRSGMINRYKNAHLGTALKANPLGGASHAKRNRAGKKSRSLKPKR

SEQ ID NO: 984734 - protein, 202 aa, Homo sapiens
MVSAVAQLQMEGSWGRWEGAPSETLCALQTIRCDSESFQRYHEACNTPFELNLSGEPGNQGLRRVVIDGSSVAMVHGLQHFFSCRGIAMAVQFFWNRGHREVTVFVPTWQLKKNRRVRESHFLTKLHSLKMLSITPSQLENGKKITTYDYRFMVKLAEETDGIIVTNEQIHILMNSSKKLMVTDRLLPFTFCGDLFMVADDS

SEQ ID NO: 984735 - protein, 72 aa, Homo sapiens
GEDTDTELYLLLVIQATGTFSGLGCLHTKFSSKPLHIVFLGLVLLRSALILKANGALIHLVLVDTVWARKGQ

SEQ ID NO: 984736 - protein, 123 aa, Homo sapiens
MMSVAKRIKMEGNDGMEGLTMSGLLTRQDLENLECCQSELATKQDGSGVTGYEEKLNGNLRPHGEKQDVLEGQANENINDEPVDMSARRSEPERGMLTPSPDIIVLSDHEASRPRSSSRMEER

SEQ ID NO: 984737 - protein, 52 aa, Homo sapiens
ALRGVDLLDIIPGLKSLKEQNSFLGLRVAFNFIFNYQRKFRSFLNTMRVRAS

SEQ ID NO: 984738 - protein, 83 aa, Homo sapiens
  misc_feature (6)..(6): Xaa can be any naturally occurring amino acid
NDGPQXGLTPVHGIWRYSNCTQRLNRERGWTKTLSIYTNALFKDITHKVMHLHSPMSGDHDSEECKPLSRLSSTSKKKAEGHT

SEQ ID NO: 984739 - protein, 79 aa, Homo sapiens
ERIPAYALLGLTASLTTVPCVRCLGVCAVCYVCVLCVHVCACAVRLCAVCSCVCCVRVTGHADASRASRVTQLALVNHG

SEQ ID NO: 984740 - protein, 42 aa, Homo sapiens
NDGPQLKIGGAEILVQRVMQQKARGMELIVLGLRDPYRLATP

SEQ ID NO: 984741 - protein, 81 aa, Homo sapiens
SVRGKVTQSLPVKEGDRGLSPSSGVVCDLSRPQLGEDEFSYGFDGRGLKAENGHLEELGQTLGENDVMGCLANLETEEVEL

SEQ ID NO: 984742 - protein, 34 aa, Homo sapiens
YPRNQISGRDSDLEVECSQRGKSASHSQFGPVAL

SEQ ID NO: 984743 - protein, 87 aa, Homo sapiens
WHRRGEGHSECVAHFGPPSPPNRRWTWSWKNRNSLFYLEDRFKVQKFLLYKSSSLHALPLAEDQPPAQDVRAAVARQGQGEGRKAKA

SEQ ID NO: 984744 - protein, 35 aa, Homo sapiens
RTALLICELVRREVVQQLPGYCSTYWVVPVGGRPR

SEQ ID NO: 984745 - protein, 131 aa, Homo sapiens
NALYFEILNEGVKRPLQRKRKTLLKEIADDTNKWKHIPYPWMGRINIVKMTILPKAIYKVNAVTIKMPPSFFTELEKTILKFIWNQKRAHTAKGRLNKNNTSGGITLPDFRLYYKPSPKQCGTGIKIGMEV

SEQ ID NO: 984746 - protein, 73 aa, Homo sapiens
REPSWLSAFRDAHNEASVTPSSLAVHDGAPQNEPAWDGLSSQELLVALVMRPEAGAPNGQTSLVLSSVLTVSQ

SEQ ID NO: 984747 - protein, 40 aa, Homo sapiens
VYSVQGSLQRSGQFQRQGSLQRQGVLNSSIILSMHGPLEL

SEQ ID NO: 984748 - protein, 44 aa, Homo sapiens
  misc_feature (1)..(1): Xaa can be any naturally occurring amino acid
XSWQLYHRLRTLTLDHTAQDYSTLTSVSSHDLADCWCADSPPAC

SEQ ID NO: 984749 - protein, 120 aa, Homo sapiens
MANFIVEDVHGHYEGNPKLNQEFSDGTRTPSKNTSGVFEALMAIFFSGGHCVRAVWESRGVFNRLSLGEKLVLLVLMHQGGMTTTRLLEGTGNNSPQALRAKEAWLCPILCWTWLLDAKL

SEQ ID NO: 984750 - protein, 92 aa, Homo sapiens
TRQTLSRAFDVPIISDPDAGTSFDGGPSFKAVVGTAPPNASLSFITIHQYTAGPFLVSCQQETHFWWDMPISATGPTHPMHTLYLPRQCLGT

SEQ ID NO: 984751 - protein, 178 aa, Homo sapiens
CAEVDLRIPHVGITALYGRQSETPSQKKKGTQVEAQPAVVYMSFSGDTDAGSNWRSTGLGLEILWLQFRHGISGMFSCPLRATSYFTGPSKTSRSVKPQFGINPGLLPSGVPKRVRVVYTTIGFNFYVTSKPPAVVLMKRLHGSSPPPSSQRASEFGLCQRELNIFLFRTSPILILPV

SEQ ID NO: 984752 - protein, 85 aa, Homo sapiens
LEDPPVGITEDGDVQFHLLPVLEEGRRMNRDGYTNCKLSAKEKKDSLFKPNEQFPGGGSRQLKQYGALPCVGTLCELRKVRTHET

SEQ ID NO: 984753 - protein, 57 aa, Homo sapiens
  misc_feature (5)..(5): Xaa can be any naturally occurring amino acid
VLRHXTRWHYFWAWAVLCGSALAPENPQRDVAPETDGEVAEATREGKYEHVALDLFS

SEQ ID NO: 984754 - protein, 77 aa, Homo sapiens
NDGPRAWIEKLKPNNINFKMKPGFHLGALVQDTYYKSSSMAGHSGSCPDLWEGEVGGSLEVKKFETSLANMVKPHLY

SEQ ID NO: 984755 - protein, 71 aa, Homo sapiens
QRWSLSFTSSWDYRHAAPCPANFVFSVETGFHHVGQDGLDLLSSGDRLARAPKVVGLQAIDTGPRRDLCII

SEQ ID NO: 984756 - protein, 68 aa, Homo sapiens
  misc_feature (49)..(49): Xaa can be any naturally occurring amino acid
GGCSEDPSRLYFLNAYFLNALYFLNALYFLNALYFLNALYFLNALYFRXEFKYNIKYAWKYKALRGTE

SEQ ID NO: 984757 - protein, 50 aa, Homo sapiens
MVLSYSSKEIKIIKRKQLDAVIKRDQQKIKEIQLKTGQEEGLKPKAEDLV

SEQ ID NO: 984758 - protein, 128 aa, Homo sapiens
MVRQLHLSCCKLQQDPPSSSGTGSASVCNHLITITSNSCVLKQSSLPHPPKIAVGYVTRPPHLARFFTYFVERGLNAGPPLCGFCIVASTNRVSNIFRKENDTLCLYCTCRLYSLAIVPSNTYHIKHY

SEQ ID NO: 984759 - protein, 86 aa, Homo sapiens
MGRIYKIIRATYGKLTANIILNGQKLEAFPLKTGTRQGCPLSPLLFNIVGEDLARAIRQEKEIKGIQLGKEEVKLSLFADDMTVYL

SEQ ID NO: 984760 - protein, 65 aa, Homo sapiens
MHRTTAMKMSFQLFCCCTIVHIANINGTGISLHLCSSMDMITGPALPGGGLLFICFSTSYCTSFS

SEQ ID NO: 984761 - protein, 76 aa, Homo sapiens
QRWSYSWSSLEHSSDEMQLMKVCVMFFRGSDTREYHRDQPSLSKCSQKYGSATESVSSIGVLALKFIQHKGYSRAR

SEQ ID NO: 984762 - protein, 30 aa, Homo sapiens
MQVTADLDGGAAEATYQVTPCMLSLLPFGP

SEQ ID NO: 984763 - protein, 119 aa, Homo sapiens
MVLMLFRSLALQVLGSLDSVSRIAGFLVVCSKPKCFFSPLSTVPGRTSLVSLLSCFQMVFFFFFLEKVSLWSPRRECRGAISAHGNLRLTGGSDSPASASRVAGTTGVCHHTQLIFYFK

SEQ ID NO: 984764 - protein, 66 aa, Homo sapiens
NDGPQLPRSRITGARHYAQLIFFGIISRDGFTMLARLGMMACACNIPATWEAEAGESLEPRRWRLQ

SEQ ID NO: 984765 - protein, 50 aa, Homo sapiens
DLEDPPGGASRPAFWLRKQKAYFNHLIRVSRSFKCWFLFHIFWQGVYQIS

SEQ ID NO: 984766 - protein, 96 aa, Homo sapiens
MWGITATETPHTIRSSWTSSITTKKTISYSSFQLHFFNHDHREPLTQYSQLNFLDHRHQVHHTQSSKLHFCNHHHREHLTQYSHFHFFNGHHGEHI

SEQ ID NO: 984767 - protein, 37 aa, Homo sapiens
MVLSSAREVMALALRGAPKCRIYSQDTCVRQQLDKIN

SEQ ID NO: 984768 - protein, 49 aa, Homo sapiens
SDQRIRHVGLTGLNILTEQSICLSLPSSWDHKHVPPHRANLVFLIETEL

SEQ ID NO: 984769 - protein, 39 aa, Homo sapiens
TSSEATAQNFVKEQGGEYRYFKKVLNGKPLYVITYGNFA

SEQ ID NO: 984770 - protein, 172 aa, Homo sapiens
MVNCTNESVSRMFHVGVVYQLELGMAHVNKKCCCYELSPEAQRVYNFDVRQLNWLESIENYVLGVKNILIDKRLWLGSQTANATLTKAPKYSLPLYYCPLPYRLPPSPLARSQMPRNVRYFMCTLLSYTSSPTLHALQHAQSFKSIEPIALYIWNLSRYPSQTTQTVIPNAC

SEQ ID NO: 984771 - protein, 44 aa, Homo sapiens
MFSMAGAALFLPFLPLLPAQLLLNTLLYDLSQLAIPKDYVGVPS

SEQ ID NO: 984772 - protein, 44 aa, Homo sapiens
KITQFGRILNELKIDIIFANSPQAKGRVERANRTLQDRLIKEMR

SEQ ID NO: 984773 - protein, 56 aa, Homo sapiens
RDGLIPYHGETFLLGEECLPIAQCRAQWLMPVIPALWEAKTGGSRGQEIETILPNM

SEQ ID NO: 984774 - protein, 41 aa, Homo sapiens
MSGIFAIDGAYCHVGRHFLIGLEMLHVQANKKVGQKWGYRA

SEQ ID NO: 984775 - protein, 40 aa, Homo sapiens
NDGPQLLIRQDRCRTVATPGFESPLLPRGFRGSDFNASEI

SEQ ID NO: 984776 - protein, 101 aa, Homo sapiens
LDLIVIRWRVVLGIVCCREIAHSTFAVLALSLFPRDPFWLLESSHPPPFYLILPLRESLGTPRRESGGGPNMNLDYCFLMMYRKSKGIYYVQLEDDKPWKV

SEQ ID NO: 984777 - protein, 134 aa, Homo sapiens
SYIRKRIPPDSETSNLIRIERAHRGAERQARVLEYASRLDNERTKDLIIEARFHRTIIGAEGGTDSVKFVNKITQRSYINFPDPAQKSAIVQLRGPKNEVEKCTKYMQKMVADLVENSYTISSPIIKQFTRISL

SEQ ID NO: 984778 - protein, 102 aa, Homo sapiens
MQLTIESRVHVAEGKEVLLLVHNLPQHLYGYSWYKGERVDGNRQIIGYVIGTQQATPGTAYSGREIIYPNASLLIQNIIQNDTGFYTLHVIKSDLVNEEATW

SEQ ID NO: 984779 - protein, 33 aa, Homo sapiens
STLYTFLQRLTFSTLYTSSNAFIHSVNRSYTIR

SEQ ID NO: 984780 - protein, 52 aa, Homo sapiens
  misc_feature (40)..(40): Xaa can be any naturally occurring amino acid
HAYTSIPPSATEEDRFSLEALQTIHKQMDDDKDGGIEVEXKVMNSSDEEGTE

SEQ ID NO: 984781 - protein, 82 aa, Homo sapiens
SDTCIRLWALPGLSVPTSSSSSFKQKSSGRGLLASGSEASISLSGLAILAAALCDGPICFMFSKLRFKNGGPVWAHQCCSVC

SEQ ID NO: 984782 - protein, 76 aa, Homo sapiens
MRTDQDKTLKEVFTKEVPPLSQLSKLIAWLLQFYGYLSCTGTCLLTLPLFLVPDLTGSCSFFTEDYPSSPLFDYPE

SEQ ID NO: 984783 - protein, 82 aa, Homo sapiens
MVMARRWVATGDQARADKLSEHSEVNPSVELSPTRSWSSGTVSLDQPSDSLDSTWDGVTDGPQPTALKETLPEGPRHHLLSP

SEQ ID NO: 984784 - protein, 52 aa, Homo sapiens
ERIPCLAREESPVKSTITGYYINSKWERKEFRDAVIDISSPHNCFNKAGKVV

SEQ ID NO: 984785 - protein, 107 aa, Homo sapiens
FRVVHPEYTDYGDSSSTPTYFTSSTATFLETTTLTPTTDISTESFMTPMISTTPITSSMTLRNTMTSMTTAASRPTTTNTLSSLTSSILSSTPVPSTEVITSQTTNP

SEQ ID NO: 984786 - protein, 112 aa, Homo sapiens
SRTQFCFLKDPYLSLDTAAVVTFWDSQPGSEQLGLIYLLCTKPVKAYDRNVPVRLYSSGGSGEKGLMRGDALFSSGNAGLIPNSLSCCLLSNDRVTQIITKVDGLGFKKQEL

SEQ ID NO: 984787 - protein, 44 aa, Homo sapiens
LLLKLYQQPQPINFNTTIGAKPTASTAASTTTTTAGTGFKKQEL

SEQ ID NO: 984788 - protein, 111 aa, Homo sapiens
MPQIYWWPLSNVAAQYAHGLLSQRGPNVGHCSSYRAFGSLRQKVGTFTFSEVPGFFRGNTEKIIPEVLSAFQMELSSFTPVLTFLLRTLRRCQTGLHMLIGYSQHILCCLI

SEQ ID NO: 984789 - protein, 77 aa, Homo sapiens
RDPAMRYWDQEIVGDLGLSFTSYANEDGSLEWATCTLEASDATFLVLRAAMAVLQDTQWDEGLCRQTGATAGEPKNF

SEQ ID NO: 984790 - protein, 102 aa, Homo sapiens
KLGNTRGEIYSSPGIINNLFLFLKSLGLLELIGKGTGLELGARVNWGGLSIHQFPDWSREYFKEKIGFLNPKNFSSTKDNQGCLLICKPIYLKARGGGGQFT

SEQ ID NO: 984791 - protein, 102 aa, Homo sapiens
ESTRGSPMWASRCQHNSGHIHGLRLSSGLRVKTKSGTPRKNGQISRTKTPGLHWSRRVNEVTIFWLFNQQVVIKHSCDLVSSGHFPSTAAKIKMSVQKREEE

SEQ ID NO: 984792 - protein, 46 aa, Homo sapiens
MPGMSGTCSVHLLVVHRGVAQCHLCSCAHCVLAEAINCPPGQHGTL

SEQ ID NO: 984793 - protein, 37 aa, Homo sapiens
GQLVVPVFQQQATQQQWQPPTAVGVQVQQGIQPHWHP

SEQ ID NO: 984794 - protein, 77 aa, Homo sapiens
MHGQAGLQLLASGNPPALASQSAGITGMRHQARASSCQQLLDQEASDGSYEVLCADSVDPVASVRHRLHLGPREEPH

SEQ ID NO: 984795 - protein, 50 aa, Homo sapiens
MTMMKPAAPSMGLCALASSKIRSPCSLQMNWPDNCDHRQVVSIHVDWAKS

SEQ ID NO: 984796 - protein, 33 aa, Homo sapiens
RGLSQVYGELADVEEGVHGMATPGSRTSSLLAI

SEQ ID NO: 984797 - protein, 53 aa, Homo sapiens
FDTGFHSYAPDGEHGVWLTGSLGRRGHSRCARRLVLVLLVKFGYVYPGYSVNS

SEQ ID NO: 984798 - protein, 87 aa, Homo sapiens
QMNIVHPVSTRSCFIMSRVMTTAQKQVLLTYVTVGNAYSSEAIKKYHLRPGMVAHACNPALWEAEAGGSRGQEIKTILTNMVKRRLY

SEQ ID NO: 984799 - protein, 35 aa, Homo sapiens
MNVQNDKGGGAIPGEWLYPQNTGRARPEQNSLPFT

SEQ ID NO: 984800 - protein, 46 aa, Homo sapiens
FTWRPLYGLQSTALGTVHQLQCIQVCCELSDCGFSWQMTLPFHVQP

SEQ ID NO: 984801 - protein, 48 aa, Homo sapiens
ATERDISARGIDKHRWYRWDLVVIVATSRCTSSSKVKSAEPDRGKSFR

SEQ ID NO: 984802 - protein, 38 aa, Homo sapiens
EQACDFLLPPSSLLWSQDHHLSNRIIAVTYPFSCLSSL

SEQ ID NO: 984803 - protein, 68 aa, Homo sapiens
GGGCCCGRLCSIPCHRSTRSSSHSLARLYTAIFSKPCMQGYHSKRQYPVKTLGPGVAHAGGIDHTGYR

SEQ ID NO: 984804 - protein, 43 aa, Homo sapiens
PRAYISLLFCLANSNYERTHSGFDQYRADLARFRTHCCTCLLC

SEQ ID NO: 984805 - protein, 36 aa, Homo sapiens
IDATIDKTEILSRLVNADDIHESSRVGYISSVASIN

SEQ ID NO: 984806 - protein, 114 aa, Homo sapiens
RDVLSPVIDSARICRSSAGASPLGSSIPGKSHGHQTGSLISPLPPGGHKIRAESRIRQIESTILKLLAGPSQGLASMLTTPSKMASPSIFQAGFFRVLWTLIVLRAAAYKRDYS

SEQ ID NO: 984807 - protein, 44 aa, Homo sapiens
RNDVVKKRFFRRLSAFRYSRTIVSSGSVSVSDPQCSLSQQFMSY

SEQ ID NO: 984808 - protein, 74 aa, Homo sapiens
PCILQHCTQAILDVELMPLLLAARSLESPIHSVGAKAGLHDQAKSDAFSVVVRYFTVRGVNITPIVLPGTPTDI

SEQ ID NO: 984809 - protein, 103 aa, Homo sapiens
SLAVKSVDDCGDPGATGTRHRARPQASVGQQTQPLPPAPPQTDQLSVQQQAAQTTRLGSTSEPWQWVRTYIGVDGNGVGQSSGWLWIYSFRTPPSVGQAPVHY

SEQ ID NO: 984810 - protein, 43 aa, Homo sapiens
DRCLCSSSEAGDELVLIASTSLLVLPMTALCVSGVGEARRKPG

SEQ ID NO: 984811 - protein, 34 aa, Homo sapiens
LLNVYDKNGDGFVDQDEYIADMFSHEENGITRSR

SEQ ID NO: 984812 - protein, 143 aa, Homo sapiens
LANCVIRGTRNSATVQIMTYECFITGPGFAAPWSWRVSSRSFFSFLGEASDGARDVWRAYSDMREANYIGSDKYFHARGNYDAAKRGPGGAWAAEVISDARENIQRFFGHGAEDSLADQAANEWGRSGKDPNHFRPAGLPEKY

SEQ ID NO: 984813 - protein, 40 aa, Homo sapiens
RERVSADKVVIEACDELGIILAHTNLRLYLVLELMDNTFA

SEQ ID NO: 984814 - protein, 86 aa, Homo sapiens
RERYPENLTGTINESGYNKQQILNVDKTAFYWKKMPSRTFKAQEKSSLASKLQGLTLIDNLKNARALKNYAKSTCLCSINETTKPT

SEQ ID NO: 984815 - protein, 123 aa, Homo sapiens
MLSTRETRLSRGDIVRSDQKTRVRAFCYARTGPPEGSLVYAVMPASGKTPVTKRIVVQQQQKVSRNNTRYLADRESRRRGGGLSPGEFREDSAPPPLVEGLTSVRLARSYPEAYTVSLWITRS

SEQ ID NO: 984816 - protein, 89 aa, Homo sapiens
  misc_feature (45)..(45): Xaa can be any naturally occurring amino acid
FRFVHPMTISQQEFGRTGLPDLSSMTEEEQIAYRMTNVPAWKQSXGQAESADHGVPATAIGHILSQPRRMDDYDCVCRTPDVPSDVSLE

SEQ ID NO: 984817 - protein, 95 aa, Homo sapiens
IQPRTDYSEHWTECTLGVEGPALYFHGDEMVFGVRQVAGCAVNVYQQAGHSGVRAQKVVDTPICMHSLAAHQALEEVLTSLSTSKGYSQRSGQAS

SEQ ID NO: 984818 - protein, 38 aa, Homo sapiens
CIPPPRVSLLSPVLSTDNNLFSETGHMLKKLEVSCLNV

SEQ ID NO: 984819 - protein, 30 aa, Homo sapiens
MVDNEASIHLRRNLDIEAPPTYTNLNRLIS

SEQ ID NO: 984820 - protein, 127 aa, Homo sapiens
NAPPDGVGRAERYRVKAMEAEDETSRPWGLQEALTTPLRPELSAPLPDTASRALLSSNMAKIFSPTETERCIESPIAVFQKYAGKDVYNYTLCKTEVLSFMNTELAAFTKNQKDLGVLDRMMKETGH

SEQ ID NO: 984821 - protein, 82 aa, Homo sapiens
GYGREDTRSLDDERETKAETWTLVLPVAGLNKVLKISLCAREYISGLESLGGQNRITRNKYNDHSGIRVLYLVHAHINSHTF

SEQ ID NO: 984822 - protein, 52 aa, Homo sapiens
QVEYAECDPRHVEPPKYLGLKDAIPHRAVCLFGFRFFVEMESHYVAQACLKL

SEQ ID NO: 984823 - protein, 106 aa, Homo sapiens
GGACNRDRLVNTREPGSHEPRKRSCEVRCTQSTKPVTLTVEPRRLVSERITEDYYFHLIADTLPVATRLALYSTRDSDDKKKEKDVQFEHGYRIGFTDVNKIYLHT

SEQ ID NO: 984824 - protein, 33 aa, Homo sapiens
MLTPGLVNFVPATAVTGLTHVNRSRRKECYKIT

SEQ ID NO: 984825 - protein, 68 aa, Homo sapiens
TKGGYRIRRERVGEPNGGVYSTNEQERWKRVYRIITAHELEVLGTAQSLLITNRAGASHGNLSRYDHI

SEQ ID NO: 984826 - protein, 34 aa, Homo sapiens
NPTPPAHTAKTIGQAQEGERKQCPFRAADGASLS

SEQ ID NO: 984827 - protein, 102 aa, Homo sapiens
MVVILAHCNLCLPDSSNSPASAPWVAGTTGFVPPCLANLRIIMGDRVSPCFGQAGLELLSSSIPPALDSQSAGIRGMSQCAKPIKVIRYPPCIFTQVVWDQE

SEQ ID NO: 984828 - protein, 36 aa, Homo sapiens
LLRIPNVAGGEHPEETLEEEARPRGPDPGDEAEALT

SEQ ID NO: 984829 - protein, 37 aa, Homo sapiens
AARRLDVRQGSMLLNKLGARGVTRCVLQCLMSSENHE

SEQ ID NO: 984830 - protein, 75 aa, Homo sapiens
  misc_feature (60)..(60): Xaa can be any naturally occurring amino acid
SRGSLGEDRIGGPPRILSNWTMEKVRREGVKVMPNAIVQSVGVSSGKLLIKLNRRQRRKXTDHICGSLWACEPKC

SEQ ID NO: 984831 - protein, 81 aa, Homo sapiens
LGVSRGSLRRKTVFGFKQVKKRCIWLGTICRYGFAADGVCWEAVQSSGGCGVGASAGWVLQGCSEEQLLFLAPVNVSTPHS

SEQ ID NO: 984832 - protein, 50 aa, Homo sapiens
MPVPFLGEKAMRLVSSFSLSTSRVLNKMVGLGSLLVSIVFLIVVILLLAF

SEQ ID NO: 984833 - protein, 106 aa, Homo sapiens
SAHSAAALLYSLTHCEAADLVPFQAVRRVTHTRRLRPQRCTCGKHRGLHLDIADAGCIGCLQIRLLVLLRVGAESPIQTALPFIEVQGCHLLFPTAVVNSLSRLAK

SEQ ID NO: 984834 - protein, 74 aa, Homo sapiens
  misc_feature (37)..(37): Xaa can be any naturally occurring amino acid
MKVVQMNHNEDGWDTSKCCAQRGIAAPGEHPAFHTEXISAQESELPPQETRKRSEVNPQTQGSIPGKGPARLQT

SEQ ID NO: 984835 - protein, 49 aa, Homo sapiens
QTGSFIPTIPSFPTCISRCEPFNGHALAPSTASLPIHNGEGEKRRERPC

SEQ ID NO: 984836 - protein, 146 aa, Homo sapiens
ARYPSRFSLPGCSARAYSAHCNLRLPGSSNSPASASRVAGTTGAHHQARLIFLFLVETGFHCVGRAGLELLTSGDLPPSGSQSAGITGVSHRAWLPGIFLSENPFLLDLTPLFACEFEHLPPRGFVLGTQGGEMCVSEYWNEKRRR

SEQ ID NO: 984837 - protein, 63 aa, Homo sapiens
PFALSFSLSSRSRCSGTSSNILLVVPVFPLHSKRVAFSGSRTRSFKAALLLMEDGLRVPVICP

SEQ ID NO: 984838 - protein, 101 aa, Homo sapiens
  misc_feature (84)..(84): Xaa can be any naturally occurring amino acid
  misc_feature (98)..(98): Xaa can be any naturally occurring amino acid
KTVDERGPLPLSSALVSVCAPQTHTHTHIFSLSLMHTSIHIPTIAGAKFGHNPVDSFPWLRVEVRGKEASNNMKTAAGTCSDAXLSSSTEEAGKRGIXSRV

SEQ ID NO: 984839 - protein, 105 aa, Homo sapiens
MGTEQQTAPNYSEAGGSLGAEQSVEKPVSSILSQNPSSRQRASKLRAPSSRSLHSRYRTILLAHMYTRGKGTPTIPRTVTNTLARCLTSWHLTNCSAKVVCSFRP

SEQ ID NO: 984840 - protein, 41 aa, Homo sapiens
MECKLEREREKTLETDSGVKWRTQMGLQTMPPTLRCPSPPP

SEQ ID NO: 984841 - protein, 112 aa, Homo sapiens
  misc_feature (4)..(4): Xaa can be any naturally occurring amino acid
LTEXLQSLGSNDPPHSTSQVAETTGAWHQAWPIFVFLVEMEFHHVAQAGLKLSASSNPPACGSQSAGITGVSHCTQLDILLLSSGKGTFLESITFILCKTVRSNYHLGFQNA

SEQ ID NO: 984842 - protein, 46 aa, Homo sapiens
RRAYHCMETQVLSNHSVDLQAVGLEDYGKQGDYIPRQVRTWVKQYR

SEQ ID NO: 984843 - protein, 131 aa, Homo sapiens
MFLDFTTKSKPIFAVNYIIYSHKIIHVQGAYNYQAKGLVPYLVFLYSTKFDIHTFSSVLMQSIRYSNKSIIFEHPTVFRMPHLDPVLPLVPGKFVLVHHSLRDPALRAEVPRLVHFFVVVPNLAARVGSQS

SEQ ID NO: 984844 - protein, 66 aa, Homo sapiens
  misc_feature (54)..(54): Xaa can be any naturally occurring amino acid
RFWSFQARSILPDDEDQNPKIENHLLSSSDCRQVVFMAPRELNHERHEQPGASXFIPETVTNRQCL

SEQ ID NO: 984845 - protein, 190 aa, Homo sapiens
RAVRKLTAECCSSMRGKGTQPGSHSGVIAASLCSGLCSFRLLPCPLWASVSPSEQREQPHPFTHWKPSPSSAWEGVVLSLGIPGIPQAGVNPEALGPGLYPVTAPGGYDAPVLQASPTDSPGQVACGWTSLCLAALCNQFMQGPAARLHKGRPGQRPAGEGELFKGAASPAAPSTGPGAESIGELGTPPS

SEQ ID NO: 984846 - protein, 39 aa, Homo sapiens
LSLTRFNKFTPSVTSGVSWMVSFVAKVGLKGPLGLKGPL

SEQ ID NO: 984847 - protein, 139 aa, Homo sapiens
MRIRTLTVELHLILMDVAEACVTLPIRHYLQVLVHNLWCRADVGPVQNEVPQLSSTCGGLSRVTAVITTILIQAYLLRGTIGLVAENSVVHHAEKLACLSQASTKTEGLPPFCSLISFSANIAVVSGTFCGSAPQTEED

SEQ ID NO: 984848 - protein, 114 aa, Homo sapiens
  misc_feature (114)..(114): Xaa can be any naturally occurring amino acid
MKAERGVEAAEEKLKLSRGWFMRFKERSHFHNIKAQGEAASADVEAAASYPEALAKIIDEGGYTKQQIFNVDETAFYWKKMPSRTFIAREEKSVPGFKASKDRLTLLLGANAAX

SEQ ID NO: 984849 - protein, 115 aa, Homo sapiens
RGGGGKKQNRNSHRIDKNTPTGYQNLQHLTIKQKEKAEAVSIDINCTSITKTPVSKSQLLIAFHSVHRLSFRDSLDYFPFTQTNLPVFSPGPAAASLVWSSLSECHKAGDRRGWR

SEQ ID NO: 984850 - protein, 44 aa, Homo sapiens
MLYSDLQFGKMSSMDQLHVIQVYTTTTMTPPTTYNTATPSSLHC

SEQ ID NO: 984851 - protein, 43 aa, Homo sapiens
MSGYPRSEPGVNIAASCDCAMVFQPGVTEQDPISKNKQAKGPL

SEQ ID NO: 984852 - protein, 93 aa, Homo sapiens
MCIAVSNDIESDWVSEDACQSCLVEIIPGTWDNWIHPVSRHYQSVNFRLAKAWSQSVCSAPTAACPGLPPDTCLVEFSRWQPKSLRNEGHQQP

SEQ ID NO: 984853 - protein, 42 aa, Homo sapiens
ESGDGIGPTDIGGGNLKRQGGMAERMEAFLNAPEATEALGVQ

SEQ ID NO: 984854 - protein, 42 aa, Homo sapiens
TPILRIPSDGMNIDPIPWMEKKGGQPCSSLMSAQGWEQYSED

SEQ ID NO: 984855 - protein, 34 aa, Homo sapiens
TLRIPEILNRGPGNFSYRIFETSSSEELLSLENG

SEQ ID NO: 984856 - protein, 33 aa, Homo sapiens
SEDPESGDGICAVIEGHFMQRMGPGRPIPYYCT

SEQ ID NO: 984857 - protein, 41 aa, Homo sapiens
KAKPRLCLYDNQSREVIETYLSILGKNNPVDKEKEICLLAT

SEQ ID NO: 984858 - protein, 35 aa, Homo sapiens
MLRIRVRGLGYTFIDPPYGISNLWKALNLQRWSRV

SEQ ID NO: 984859 - protein, 68 aa, Homo sapiens
  misc_feature (23)..(23): Xaa can be any naturally occurring amino acid
ADIHHMMHHHHGTSDWQTPGARXTESHLAEILAKAKESGEGAEGEGSERDLMGQIIPIYGYGIFLYIV

SEQ ID NO: 984860 - protein, 33 aa, Homo sapiens
TSRTLHRENGGKTTSLAKKVVLEPKMNAESLHA

SEQ ID NO: 984861 - protein, 118 aa, Homo sapiens
SLSHKPNSLHSMKAEESVEAAEEKFEASRGWFMRFKERSHFHNIKAQGEAASADVEAAASYPEALAKIIDEGGYTKQQIFNVDETAFYWKKMPSRTFIAREEKSVPGFKASKDRLTLL

SEQ ID NO: 984862 - protein, 100 aa, Homo sapiens
MSVRSGGALPGSQGASLGEGVLGIENSLGSNASVRVSSHFPGVYVWPSLHFPANSLWRYVGLHWVDQGGEGGWPRGATMAGETVNPCGPGGPWGCQETLE

SEQ ID NO: 984863 - protein, 38 aa, Homo sapiens
YRIPLAKRTLTTSFASFIAEAAVSSSQQIQAARRLIVG

SEQ ID NO: 984864 - protein, 41 aa, Homo sapiens
LKIINLYNLSVALKSAVDLLRSWGRIHLVSYKDAQYLQQTC

SEQ ID NO: 984865 - protein, 45 aa, Homo sapiens
RPHCCINQGVNENSLSDHQTRYSTRAKPIKYSLIVHYKPVYEDIK

SEQ ID NO: 984866 - protein, 34 aa, Homo sapiens
VLLHASSASQALAPLCSYAGPHDSTSGSFSSSSS

SEQ ID NO: 984867 - protein, 96 aa, Homo sapiens
RISRLLQDLPEIAVAIHQALEGAYLIGHAESGSDDNTGKVPYIVIDKSHESYQAPSNTFLLEKTAQMLCMIHRIYDKANQGHHERDSEYGKITKKR

SEQ ID NO: 984868 - protein, 101 aa, Homo sapiens
AQKLNSRTDAGDEIEKAPKARIGELDGKKYLCSHSDLTVGQFYFLIRQAEFISELEDALYILVNNVIPPTSATIGVMLYQEHHEEDFFLYIAYSDESVYGL

SEQ ID NO: 984869 - protein, 89 aa, Homo sapiens
YMERELGLQRGLGEILGLGLAWPLRGTAEPLDTGTSTLPKLGVGNVGKSIELAADTLWNLGLNLLGLYEGLDGLGTCTHGLGMVGLHLL

SEQ ID NO: 984870 - protein, 44 aa, Homo sapiens
EKWHDAGLSGVVMDDMLSAFSLMPVGHLVRGTVRDKALGDLQTM

SEQ ID NO: 984871 - protein, 32 aa, Homo sapiens
NYKLKHGPRIHSDRQAMHVPRVMTRTDMWQDT

SEQ ID NO: 984872 - protein, 48 aa, Homo sapiens
MKPWNGVWSQDLISLPETPGRPPCCGSLVQIRMPREHLLQRELHQHEM

SEQ ID NO: 984873 - protein, 183 aa, Homo sapiens
IFLCLSCFVVRVSPASVSRPAWVGLWVFDDPKIESVFALQELLLVALLAVSMPQNEYIELHRKRYGYRWHYHEKKRKTASREAHERSKKAKKMIGLKAKLYQENSVMVRKNTNDTDYHDACKENTKQKTAEKTPQGAVPAYLLDRRGTISSYSTFQYDLTEKKREGGKLGSPSAFKYVPNEKR

SEQ ID NO: 984874 - protein, 52 aa, Homo sapiens
AALLPSMKQIHVVRGDDDELQSDDIGDDDEDIDDIKLELNILHSILSEAVPC

SEQ ID NO: 984875 - protein, 87 aa, Homo sapiens
CTPCALPLNTLVAGANCGYVSKSLGSAKRNLELLTRNFPRIALITRTKDNQGYTQACTGYLPSDGLSQPPTGLATVLSSSTDVCSSS

SEQ ID NO: 984876 - protein, 69 aa, Homo sapiens
YSNNALSSAAFSDVHSAFRERKNTVDSPSNGCSAACNGAISVRPTTPYGWVGISYNVLYLDANSPGSCD

SEQ ID NO: 984877 - protein, 50 aa, Homo sapiens
CPTPGHPENMLRPYRHGRPAAQKLGSVTSQHYNGSNVACNCGGYVSTTAL

SEQ ID NO: 984878 - protein, 49 aa, Homo sapiens
RGHVPTAVCISALPQMQVKTITQWSKDRQKEKYLELLSSGMVDNMTKTC

SEQ ID NO: 984879 - protein, 53 aa, Homo sapiens
KELTVNHVMWTIAPDDIYTLLKYVMVPGLQTCSSTSVPRKAVVQPGIYLMYAS

SEQ ID NO: 984880 - protein, 100 aa, Homo sapiens
RGPCYVVVWSSVYSRAGSPPGNTNAFISSWLCEWLLPPIRQYPMPWDSGGSGIPAIGFILSPYLSSITRGYNKREDYTIIRLWFLTQKLRLGTVAYAQVC

SEQ ID NO: 984881 - protein, 99 aa, Homo sapiens
SSPGYRESPHEVYQQDLRDQSDLGVSGTGQTQGCSQCHGGNWTYLKVTSLIISVPQDIAENHEEAKEPLKTHNRCQKVQSPEAKCALWTSFGYGLGTCF

SEQ ID NO: 984882 - protein, 36 aa, Homo sapiens
LGVYTELVATEAPQCSGKKQWRDKLGPQPRKHEVWQ

SEQ ID NO: 984883 - protein, 69 aa, Homo sapiens
RLSSSLRSLVRAPAVLRKLGSEVVCPSCAEVLDFFLQTEDLFHLLIFLLSLQYTGQYSFLRALRQGFEF

SEQ ID NO: 984884 - protein, 87 aa, Homo sapiens
LTPGYRAGSADGHQANMFCSWYLRRLAQWGQPFFATAWQLWWKTVLHSAHLTVVSKLKGEDDVVVLADLADEAALCAQVAVVDMLVG

SEQ ID NO: 984885 - protein, 38 aa, Homo sapiens
  misc_feature (7)..(7): Xaa can be any naturally occurring amino acid
AADNSTXYVHVDVKANKHQLNRLVLELLRKELGSQVNT

SEQ ID NO: 984886 - protein, 44 aa, Homo sapiens
MDMASVALGLLWTGPPLVASAVFCAFRGCGLSGLCLRWLLVQWS

SEQ ID NO: 984887 - protein, 57 aa, Homo sapiens
RIPLLAQSIDTFPEATKPGFPGLGRDMRSSTRLLPTLPAKGGFQCSHCSPDYLVSTR

SEQ ID NO: 984888 - protein, 36 aa, Homo sapiens
PGGAQKLGWVTVSTHTAPGHGQQLSAPVEGLIEVAL

SEQ ID NO: 984889 - protein, 34 aa, Homo sapiens
DTTQEDSSNRGLERPCGSPEKGPSDLSSPSSLGH

SEQ ID NO: 984890 - protein, 51 aa, Homo sapiens
RQAVLSHEHQCSGYGWKHCTQSTSVRQTHWSTVPRATVYSRCREHCPQSTS

SEQ ID NO: 984891 - protein, 102 aa, Homo sapiens
EHLYVHNSPRHCGGGAKPFPGYSDLPFEQSGHWVQQAVPRSRLNHRIQPTICPHSITRPSNPCSLDSSLLSLRIRPQWPISLHPGKEPPHKAHGVRSSEFGN

SEQ ID NO: 984892 - protein, 82 aa, Homo sapiens
PEQKQSCPRHHAVVLIALPSRTHPLHHRRGHDPSLTIESICPPFGTEPNDVPLTTGEHKSSTPEHTPMVWQGTPSRSRPCKA

SEQ ID NO: 984893 - protein, 88 aa, Homo sapiens
  misc_feature (56)..(56): Xaa can be any naturally occurring amino acid
MINPYSINPLSLRRPAPVNRLFAQIGPFIRRISQKTISLHSFPTHSISHPSHPSLXLSLGGFLLRSLDLCSALHMLWSLGPSRFTNRS

SEQ ID NO: 984894 - protein, 109 aa, Homo sapiens
ASWITRLCSRIQAILLPQLPSSWDYRRPPPHLANFVFLVETGFHHVGQAGLKLLASSGPPTSGSQCARITGMSHCAWPYLYYLNFIRPGKHAYLGVCPFPNTHNKTNYY

SEQ ID NO: 984895 - protein, 56 aa, Homo sapiens
RQEVTATDELLITPLHSSLGEQQDPDSVAKKKNERQEEMQDRRTLQHGHFYIRPGK

SEQ ID NO: 984896 - protein, 52 aa, Homo sapiens
NLGPTLPSLTAALFKDSISSSHLTHILSVPGLLHLYSLFVESPTITIVPGPD

SEQ ID NO: 984897 - protein, 37 aa, Homo sapiens
VAGNGRHSPSAGHLRTVSVCCPRVTSCPPDLPLTTPE

SEQ ID NO: 984898 - protein, 141 aa, Homo sapiens
IADIIKNTSEEVGGPVACRRQIRHPVKLQTSGARAREHLSKANADDRRRADQAHTRNDEVCIEFSFTSGTTLAVNHLLTRSPFLCSDKVASAIGKPDATDQDSQENQGYKDGCHDDPHIRSTASMRTAFEVNGCPIPIPCP

SEQ ID NO: 984899 - protein, 76 aa, Homo sapiens
EKAEGARGTRRCRFCASQSAGIIGMSQHDPAWMPVLYQICVSHICPPRFVAACFLFLVPGCSLLDEFGPVILLGAL

SEQ ID NO: 984900 - protein, 102 aa, Homo sapiens
TIQLVGPDQSPNAHRCGLCHITALSWSQMLSFFAIANPPQSSHGLQASGTTGSLSDRRNPKARVVPEPAVRPHTPQVGQCIPPIPIRTTHTPPIKKTSYQSP

SEQ ID NO: 984901 - protein, 41 aa, Homo sapiens
LEDPGRSERKAVREGRFAGFVPFSKDNKESFPNSQLNPFWN

SEQ ID NO: 984902 - protein, 53 aa, Homo sapiens
APASYKMPAPPLPLLSRGWRESHKHYEVPVLNKGGGCLSLKEEEVKKGGSPSL

SEQ ID NO: 984903 - protein, 155 aa, Homo sapiens
YGVLTGDARWVFFVPVALVSDNLVLWCNGLAWDSGVENDDLCNADSLEFVVGEESRSALGTELDDRRLSSLAFWVSSLLSPRAALPDAVSSLLFSLLSYILRITEVGVKEGESMLVMEAAGAGEEEFPRCTGAGDFGTRCCLYLNPSLVLSSFGL

SEQ ID NO: 984904 - protein, 42 aa, Homo sapiens
LEDPGRSEMEQYYCAPGRRGCSEPATLLPPLQNQQFFSNPPK

SEQ ID NO: 984905 - protein, 35 aa, Homo sapiens
LNPRIRGHSFVLLVCLAFSTFESLSLSSSGIVTLM

SEQ ID NO: 984906 - protein, 35 aa, Homo sapiens
MVSAVLSGRRYMDGARSCPASVLQALKPSFTEPCP

SEQ ID NO: 984907 - protein, 34 aa, Homo sapiens
MILERLLLKEAVHLAETTGSLVRLGGSALGWLPS

SEQ ID NO: 984908 - protein, 89 aa, Homo sapiens
MVQAVASMLARAAVCDAVAAAGADLGGRSKYSNETFEGLKGRRCPIVNMQVEHVVKSALRDGRSAVPNGRGDAILVAIGLIERESGSRS

SEQ ID NO: 984909 - protein, 38 aa, Homo sapiens
GSIDSCQKKAQNIMESFENPFRMFLPSLGHRVSRLSGQ

SEQ ID NO: 984910 - protein, 34 aa, Homo sapiens
  misc_feature (2)..(2): Xaa can be any naturally occurring amino acid
QXSWTSHTLDPSSLHIPFPQPPQQSYYPQQLICL

SEQ ID NO: 984911 - protein, 71 aa, Homo sapiens
  misc_feature (37)..(37): Xaa can be any naturally occurring amino acid
MPLANSGRTRQTVEQAGVRSCPCSEILPTAVISCLTXCVASFFHPSPEVALSFTRVSDVSDLPLNLYFYSL

SEQ ID NO: 984912 - protein, 37 aa, Homo sapiens
MRSDTLWRIQMELQFEESSDVISFHCLGYNTESEEAE

SEQ ID NO: 984913 - protein, 41 aa, Homo sapiens
MYARTSLPPDSQCSLTSTHTISASSLFFILKPDGLRTSPGG

SEQ ID NO: 984914 - protein, 35 aa, Homo sapiens
HHSLAFRVGMFALEHREVKITLAIHERQHQADCHS

SEQ ID NO: 984915 - protein, 89 aa, Homo sapiens
FYTDPPRILVQYFGLQNKVSFQTSAATIIIHYFFGDRVSLCSPMLKCSAIIFVHYNASISWVQVILLPQPPELLGLQARTNMPGSFLYL

SEQ ID NO: 984916 - protein, 37 aa, Homo sapiens
LKAPPKHTQVQIPHNTLSLSEPPFCSSFSCSILEDYT

SEQ ID NO: 984917 - protein, 100 aa, Homo sapiens
AAVVCLGIHSSMVEVIIDDRLECTGAISAHCNLRFPVFKLILLPQSPEEPGLQAPATTPRDFRDEPGMMWDTEHVGRVLVQHIEMTGITLSFHRYAQVGR

SEQ ID NO: 984918 - protein, 144 aa, Homo sapiens
RIELCTCIPGHTRRAYGRQGWVWVHTKASTIWDWHTWQSQCMGVCAALPREKTCQNFPYEYIRTHPSKVCMLCGSCPVFTERRAGGLLDILLGPRSAAHGSIHSARVLRWFWQLNLLHSGLDYTYNKENAPSCDHRLRFIPHTT

SEQ ID NO: 984919 - protein, 41 aa, Homo sapiens
NQNHRNADQLRHGGFECNPAMLLSQRQPIQHVLGVPIRPGK

SEQ ID NO: 984920 - protein, 68 aa, Homo sapiens
GYIGVLTYSLRSLCVLSVHLLLSGGPMAMAHHLPFSVQAGDMHPISNHGGDPYTGQPPRMTIIMEACC

SEQ ID NO: 984921 - protein, 114 aa, Homo sapiens
WLLPTNDPSFHHCIDSLGGTFCNTLPAIAVIASDTAAGECRGVVAALCVTRALLSVVSTRLAGIRVIAEHNSCYLNFIHISYLRVLLVTRLHCQLALTWSSLWQVQVAYLDLAW

SEQ ID NO: 984922 - protein, 31 aa, Homo sapiens
MSLTLSPRLKYSGVISAYCNLRLPGSSDSPA

SEQ ID NO: 984923 - protein, 40 aa, Homo sapiens
MIYCCTAPQMDKTGPRAGKDDMVGTGLGCMKLRYSLSEPC

SEQ ID NO: 984924 - protein, 72 aa, Homo sapiens
MNCELKDEKKPVNVQIWGKFLSGQREQLSKLLRVGKELDMQNGHLRKSSLLECREQGGVGGGGWWHNFGIRY

SEQ ID NO: 984925 - protein, 127 aa, Homo sapiens
VLLCSHKVQVVSKNGASLLPSVPKSCPVNLHISPYLEIESSQMLLRILAALGSMAHACNPITLVGRAGCISRSADRDHTGRHGVPLSLLEIPQQNLGRPWWRAPEVPATREDDGREWRESGPPRGYP

SEQ ID NO: 984926 - protein, 83 aa, Homo sapiens
INTETGDQQLPDKISGAGRVGSSMCTKRQHGGVNWHMTWEHLTGKGRMPQVSMRTSVNKLRMRPLRSAGSATGHGVLYLGVCP

SEQ ID NO: 984927 - protein, 45 aa, Homo sapiens
SVRGKLHGPYNRKESLSSLSLSYAHTHTHTHTHIYAQVSIGKGYT

SEQ ID NO: 984928 - protein, 55 aa, Homo sapiens
WYRVGVRNVIAIRPHQADCEKEQRCGGPPAVGRPGYMREPCFALQGGDRRTRITL

SEQ ID NO: 984929 - protein, 37 aa, Homo sapiens
  misc_feature (35)..(35): Xaa can be any naturally occurring amino acid
VPKDTLKVKIHRRDFRQYCQMTRGWVIRWHPACSXCI

SEQ ID NO: 984930 - protein, 51 aa, Homo sapiens
SVVTAGSTESDVTEDGESLKIPQDQRVSCPRREKADQQPLSGKRSQSLRPD

SEQ ID NO: 984931 - protein, 42 aa, Homo sapiens
  misc_feature (4)..(4): Xaa can be any naturally occurring amino acid
SSYXQEAPLTHCSCCPADTVLTPDFLNRCRMHAISGCRLLSH

SEQ ID NO: 984932 - protein, 68 aa, Homo sapiens
CHGDNSTRGNRKLPRQVAASPAANKEVVELGMMVDRSVWHECAYDATEMPYVSLSVRGASRVLSVEAI

SEQ ID NO: 984933 - protein, 40 aa, Homo sapiens
GCGVRPVGVVFVWCGVLLSAAGGLLYESDPAGLHSLDLAV

SEQ ID NO: 984934 - protein, 54 aa, Homo sapiens
DSTPKARDFVAELRAVGAGWDGEVLGKKLEEKGFDKAYVVLGQFLCYRKMKTSS

SEQ ID NO: 984935 - protein, 114 aa, Homo sapiens
HFTPGVHWLATSSSSSGLDTGLWLGLLFPIETAQHLGQPGPYSPCITTVNAQPIPSLQCVGQMASPTCLTALLAATARILTGCACLTNVHAENDNEDPKKILHSTTQHVCHSGH

SEQ ID NO: 984936 - protein, 49 aa, Homo sapiens
MLLKKPRCWWLLETQMGTGKIGVDEFSTTGWLKAKKHCLPLVFHLSALN

SEQ ID NO: 984937 - protein, 103 aa, Homo sapiens
IKREAHESLGRREFTSTPYSGLCPLVSSPLPHSRRTFKPLGSSSVVQLRGREIWGKPLPLSDLTFPPLYSRTLHNLMCLQLDIYLLQARETEAQSGAEMCLTL

SEQ ID NO: 984938 - protein, 72 aa, Homo sapiens
RIRWRGASDYWDLEHTDFKTNTQTYRENLRIALRYYNQSEAGSHTSADDVLAATVGPGRGALLLRGITMYAY

SEQ ID NO: 984939 - protein, 69 aa, Homo sapiens
SGQMQPSRAKADQGKLTTMRIAVICYCLHRHHRVPYLVKHELIRGSSRGRAALQPNTQYAVATWRKALT

SEQ ID NO: 984940 - protein, 43 aa, Homo sapiens
MGRIQSPERQPHSLVGYVVYSVLCIHAWVLYTTSSADNDSPVY

SEQ ID NO: 984941 - protein, 130 aa, Homo sapiens
DHRGADDCCAELADVIMTFAQYGDYPPSRRAVWRSSEQLAAIYAVLEQLPEAKHNSLERLIFHLVMVALLETVKRISLGALAIIFAPCLLRCLDNSDPLTSMKGGPQDHHCRWLLEQPHKSGIPRIALGN

SEQ ID NO: 984942 - protein, 44 aa, Homo sapiens
MLLSASVNSISIMPSAVYQCRKGLRRNMGGETAREMRLNSFWMA

SEQ ID NO: 984943 - protein, 112 aa, Homo sapiens
CSRGEHLYFGVVEPLLSLSWETWYPFLQWTDSAFADVGAFAEVAKVTLAQAGLVEIGQAEQMVVLLLLLLLSAVVVAAAAAVVAAAADVGLPLSSAAVAVVALHLNSAVVCW

SEQ ID NO: 984944 - protein, 73 aa, Homo sapiens
RAGTLSLVTLPEKQVQPRSPGWPRYGRRDFHGCVGFHLSPGIIAVPPHLTSLLSRSLLLHRCHTLAALTSPIP

SEQ ID NO: 984945 - protein, 89 aa, Homo sapiens
MAQFYGCWQTIVLVVHHLKTKLISEAKLFKGHANLISHLFVLLSTMSKRIVISEQEGGLACCGAHPGTLEHIEIHPMYVELRVILMLDF

SEQ ID NO: 984946 - protein, 33 aa, Homo sapiens
IYAWGVHVSPSCCVVACVSLSVSKPLSRASGRP

SEQ ID NO: 984947 - protein, 38 aa, Homo sapiens
RRLCEAHTLICERLEYYLGLLVTGNEHPEKSLRVLWTQ

SEQ ID NO: 984948 - protein, 101 aa, Homo sapiens
MLDIAYNQITDTEGISHPRSCKPESHKGTVIHMVERSRTPQKLIQPAHKWSFGGTSWKAPWTINLPKLEEPLPGPKTCSKKVEGEEDLSNLSNLPLRDKQI

SEQ ID NO: 984949 - protein, 51 aa, Homo sapiens
GLLMVYLCVGLAQISRRKVAPVRVVRGDDAQTQASRVVGMLDAPPSKTLTP

SEQ ID NO: 984950 - protein, 79 aa, Homo sapiens
MARTKQAEESRMSGLAESSGLRFSPVLDASCSGTSDSKFFSFWTVGLTPGVCQGLLGLWPQTEGCTVGFPIFEVLGLGL

SEQ ID NO: 984951 - protein, 38 aa, Homo sapiens
LALSSYGNPTSVYAELVKYFVNYLLNISFCFNKPQGAN

SEQ ID NO: 984952 - protein, 50 aa, Homo sapiens
LSPGKLKLKIKGGVAAPLFFLSTPPSRLFDQCRSETHLSAPLIFPRRLLS

SEQ ID NO: 984953 - protein, 67 aa, Homo sapiens
VVCYQTAKERSLSCRRSSRVDGKALERFLQDYFDRQTVLKRYLKSEPIPRRAMMGLCAKRSGSRESS

SEQ ID NO: 984954 - protein, 75 aa, Homo sapiens
EQSAEGAPPYRFARRAGEVEHERTCEDPKDGELCLETEEPDRTVRELQHAALGGSSYSTEQLSRSSLFEPSSSGY

SEQ ID NO: 984955 - protein, 66 aa, Homo sapiens
RRTQDEFELQWRVHQLQPDLLTGPPLQGQCPDEKPSYCDSRRCKKTFRQCSNGRCVSNMLWCSVAA

SEQ ID NO: 984956 - protein, 35 aa, Homo sapiens
ACEHFQNLIEGELRGWHGCGRGLDSLHKNSVSQIS

SEQ ID NO: 984957 - protein, 109 aa, Homo sapiens
  misc_feature (49)..(49): Xaa can be any naturally occurring amino acid
  misc_feature (79)..(79): Xaa can be any naturally occurring amino acid
  misc_feature (82)..(82): Xaa can be any naturally occurring amino acid
MSCSLSVGPRCLPRPRRGCSQKALLGVTCPSSASQSSPALIVLPACQPXHNSALLLVMCLAVCWVQASPGRAQWGAALXTHXSPQDISCPSSLPSSTKHWHSLENTALD

SEQ ID NO: 984958 - protein, 90 aa, Homo sapiens
LPIGAVDQLSCDSSPATEYASRMRNGGSCVQPGRCLLPAGWRGDTCQSDVDECSARRGGCPQRCVKHRRQLLVPVLGGAQPVCRRYTLFA

SEQ ID NO: 984959 - protein, 129 aa, Homo sapiens
STFSGWVEAFPTRIEKAQEVTRLLLKDIIPRFGLPLTLGSDNGPAFMAEVVQQLSQLLKTKWKLHIVYHPQSSGKVQWMNQTLKHLLKFCQEPHLRWDQVLPMAFLQVRCTLTKLTGLSPCEIVLGGRK

SEQ ID NO: 984960 - protein, 101 aa, Homo sapiens
PDTEGIGSTARVLRSLPAGYAWMIYGIDLGGGAEFGLVALSVRTKYCLYFTDEETEANGSRHLPQTIKLAWEFCLPSDASSYSLTRCLKCWREIGTLSSGL

SEQ ID NO: 984961 - protein, 54 aa, Homo sapiens
ILGISNRKSAANLGYNIHQEDVLRHVTLRYMTGTSGTNRVDTSLTTDKRDKVSD

SEQ ID NO: 984962 - protein, 34 aa, Homo sapiens
CFTERGVALLETREESPCFSDERTSPCFSDERSR

SEQ ID NO: 984963 - protein, 47 aa, Homo sapiens
DGYRGQAIETILASTVKPCLYYEIQRIVPGCEWRVPCGPMLLGRLED

SEQ ID NO: 984964 - protein, 56 aa, Homo sapiens
MAKSEIWDLVLAQCKPFLFLITSAHQMSRLRIAVEISDGDVVIMVISVACVRWSSA

SEQ ID NO: 984965 - protein, 51 aa, Homo sapiens
VPSHSYLNEVRSSDVANGYTEDIDTACPTLYAEADHDSLRELLVTENFCLL

SEQ ID NO: 984966 - protein, 66 aa, Homo sapiens
YRGSSITGIWSVSTLLTECQALVQGGVHLSGKLGGKLDGQGHQQAVTEELDVDRVHPKFVRVAGRS

SEQ ID NO: 984967 - protein, 71 aa, Homo sapiens
CGIREGRAMTSSEIAMRGKVKADPAALMVSLMLLPSATPKLEIKYTKIFIHPDWQNSAVAEVYPVCKSSHR

SEQ ID NO: 984968 - protein, 46 aa, Homo sapiens
SLLSAVVYLGRVAERRLNNATSRRNTRCRVESFWMLSSERVRPSSS

SEQ ID NO: 984969 - protein, 54 aa, Homo sapiens
RLGGGDCGASDEAVETTNPHFMLVLSPSILPARPLFHNSRPKPVFMGEENKILE

SEQ ID NO: 984970 - protein, 111 aa, Homo sapiens
ADNSVYWYQNRHIDQVAQNRGSEITPPSTSSDLDKSDKNKQWGNDSLFNKWCLENWLAICRKENLDPFLTPYTKINSRCTKDVNVRPKTIKTLEENRKCHSRHCIWEIIYN

SEQ ID NO: 984971 - protein, 61 aa, Homo sapiens
MLEHSACAGTHTCTLSCWRIQSIWSRLLETGLLSKCERIRGRRATLVGDPDQCTLTYHSPG

SEQ ID NO: 984972 - protein, 47 aa, Homo sapiens
GLVSTLASIEGAADARGSETYRNVLHLKASMSEIRPDFHLSGNALFQ

SEQ ID NO: 984973 - protein, 53 aa, Homo sapiens
LRRICQQLLDTSEPAIPIATPNVCFLQSWRVIHTVTSHSHDSTLSFGSSSTYD

SEQ ID NO: 984974 - protein, 56 aa, Homo sapiens
VSTLLDVSTELVQRGMHRSGEYTSTRLHLNDIWRSARKSHVSKELVQGGMHRSGEY

SEQ ID NO: 984975 - protein, 58 aa, Homo sapiens
YSTGSSYNDILEVSTVLTYLTELVQAGMHRSGEYTYDLCSIFSDILVVSTCAHVIDGT

SEQ ID NO: 984976 - protein, 81 aa, Homo sapiens
CSSNNKELAGYRSNGRIPTRYPQRLNLPTTRSACTTDSSSVGSSGNTHDRLYVMKDFKPANSKDDILPMDLGTFYREYQNP

SEQ ID NO: 984977 - protein, 35 aa, Homo sapiens
CPILLGAFKGEVLKLCPSGGDRWRCVELRLLWPGQ

SEQ ID NO: 984978 - protein, 191 aa, Homo sapiens
TYIKTPMHPSSILSGSLWLSVTGIKAIVCGPLCKACMDTKSYEIILLIISQMIHISQAPLTWTTSSECLFCTILHGLYPRLETISRPRSQDPYSHNARYACLPGASAHSSAAEPLTLIWTRSLLLRDHSLTAPQTEYRNNMICYVACTIINCQSLLQEQGNPELSLRRASLSSFTDPAYLWVLREYWATSV

SEQ ID NO: 984979 - protein, 34 aa, Homo sapiens
ASAALWGVLADTCGVYWTDHLEGHLDGPLTAYWT

SEQ ID NO: 984980 - protein, 79 aa, Homo sapiens
TGVWTEELSGSPTYASGSRFLTARFSEILTFYVYDGAQDLALGGVPGNSDSSGLENSFFGNREFTHLYSILLNIIQDST

SEQ ID NO: 984981 - protein, 46 aa, Homo sapiens
MQLTELLLDGFGISEETGTYYRNGFPKGKMKCCQVRWITPVIPAVW

SEQ ID NO: 984982 - protein, 36 aa, Homo sapiens
NPITIYQERDPSKIKWGDAAAEYVVKSTGVYTTMKK

SEQ ID NO: 984983 - protein, 151 aa, Homo sapiens
DEPPIDFQTDRHACEVKADPAALMASLLLLLSPMRKLEIKYTMIFINNEWQNSESGRVFPVCNPATGEQVCEVHEADEVDIDKAVQAVLALPSLLVLCGEGWLHLERGRLLDKLADLVERDRATLAIMESLNGGKPFLQAFNIDLQGVIKP

SEQ ID NO: 984984 - protein, 48 aa, Homo sapiens
SAPAIPSIWTVSTVLTCRRNLYMGRACTCSGEYTYDHGSSLNRYFGWS

SEQ ID NO: 984985 - protein, 38 aa, Homo sapiens
AADNSIMQSRREGEIFIMGPFIIMCTGKLCMQFEIFLM

SEQ ID NO: 984986 - protein, 33 aa, Homo sapiens
MMRGVLCAMFRLPQTGISSLSEELLHFILQHDN

SEQ ID NO: 984987 - protein, 80 aa, Homo sapiens
MTVSSKDMRDEVLEHELMVADRGQKREIRELDTGMYKWQVLVDRIIGLSSPEFDNQRLAVLVHRIDAGPDALALDHPDPE

SEQ ID NO: 984988 - protein, 70 aa, Homo sapiens
WSTQAGQALSQCNGEHGLNLRESKMLSGVCSFVLGLLFLGAGLIIYFRNQKAHSVLQPRGFLFLSTESSI

SEQ ID NO: 984989 - protein, 50 aa, Homo sapiens
EESKKRSVNHIWPGIGGFMVLTGDNPTHCTKKGPAAQAEVFEVGMGSPDE

SEQ ID NO: 984990 - protein, 39 aa, Homo sapiens
CWPVYGFQACVRMHRQQAASIVDCCGGIPSGAAVASTQV

SEQ ID NO: 984991 - protein, 34 aa, Homo sapiens
VYSGENIFCPQENTEEALWLLLISELNGQPGRCA

SEQ ID NO: 984992 - protein, 35 aa, Homo sapiens
  misc_feature (2)..(2): Xaa can be any naturally occurring amino acid
AXLELLAVIAVVCQAVSIVPSQMYGFITDFSYIHV

SEQ ID NO: 984993 - protein, 111 aa, Homo sapiens
RGLGPQYGASVYSPPACRRHGGTCGGPPPPGSSAFLRGPRTPDCYLNCPDFAFDSVTVTAYRGRLIVNFTPVLSGLLELDSGQHHVGGQCPPSARTARGSSNISSPSLAQL

SEQ ID NO: 984994 - protein, 81 aa, Homo sapiens
ADRVGVRNTGPRIVVCLTHRLCSTCPSTLHLKNTGSKARLLRISRWRQQRGGHTLEADSACAIAGRMLPLCVITDFLRGSS

SEQ ID NO: 984995 - protein, 108 aa, Homo sapiens
MGALLCVRLYGAVRRYYCTSRYVMYLPPVSLRPDDLHHLPTLYPQVARHRVPRLDPGQVVLSRAYIAASQLCQLLLGHNHVLRALLVLRDVNHQLLLQILLQDVLGGH

SEQ ID NO: 984996 - protein, 73 aa, Homo sapiens
VSVQEIPLTLAGDIATAGTEEQKIVASSHDHGYTTLATNVTLFEASEVEEILDGHDEKYNAVSISTEPPITVS

SEQ ID NO: 984997 - protein, 60 aa, Homo sapiens
MSSTLEQPGRASSVWMSSLFIFTFFPFSTSSTMASSPSSSFKAGWAQATLVWKASPNNAS

SEQ ID NO: 984998 - protein, 48 aa, Homo sapiens
AFRSLPPVPAASSLAIAIYSQSACPPPDCLTYLTAGPALVRVLFVFLA

SEQ ID NO: 984999 - protein, 62 aa, Homo sapiens
RDPRLVVPRCYSHCESLVLIYCLSRVYRILQKEDNSSLFQILKVLHYFATHFARDFRMFGII

SEQ ID NO: 985000 - protein, 59 aa, Homo sapiens
MSLRLSIHLVITGTAYVSSSHGSQVNGIPRKNTILEDLTMTRKCQNRQTSVSDMSTASG

SEQ ID NO: 985001 - protein, 35 aa, Homo sapiens
MRGPLNPVAHPYSCIDLFNCIAASRDGEKVTGGLE

SEQ ID NO: 985002 - protein, 65 aa, Homo sapiens
HINGLAGTGFHGPRIIGLPQSRAGSLRHQWNDSVRLAVLMFTQTPPGCLTLNSVKVTQKASGPNV

SEQ ID NO: 985003 - protein, 135 aa, Homo sapiens
MAAGTLYTYPENWRAFTGLSDRLLMYSVGSWSDVLYRTTPTSISGQTNRHPLDFSATFPGRQASQTFERDDVDSVLFESNASCLLMLATEELREKYSNSAAALLAQWVSFADSDIVPPASTWVFPILGIMHHNKL

SEQ ID NO: 985004 - protein, 62 aa, Homo sapiens
RGRSRGSQRRLVLPFHSPSRLFDQFFVSSTCGMSDLFPSVYFPEIPSTFVPPSFAGRRLRRG

SEQ ID NO: 985005 - protein, 47 aa, Homo sapiens
IVSRGIPRGDFFFYAAAPFFCGITIVGLGPLYTFPETLEGLQGSHTA

SEQ ID NO: 985006 - protein, 55 aa, Homo sapiens
KTIIPKLMAIIGNHNGKLPKSSKASHAKAFIVLHSTAQHRVSEELPLQSSTRGQG

SEQ ID NO: 985007 - protein, 117 aa, Homo sapiens
MAPIHILRISLEWTALLYAVYSEYTSIIEKLLSSWYKYRRMHARYRSIQCYFHPILNMSFILTLISMEGSIYHNLAAHTFLEVRIILKALTVSDFTLNIGTFKEVIIGNSLMSCTYG

SEQ ID NO: 985008 - protein, 43 aa, Homo sapiens
TPSVALVLGVWVGRHNLPLPMLECRDSILTHCILRLLAISPFS

SEQ ID NO: 985009 - protein, 131 aa, Homo sapiens
MVGIRSRLKVDSMERERPAQYAGVEGYPKSSWPTFLFLTLFTSFMEPLSPWIAVEQPSTYPLIDQPTHPPVHHPSTYRPFTLPSIHPLIYPPIIHLSLIHPSIIYPPTHLSTHLPTHAPIHPPTPPLTRAP

SEQ ID NO: 985010 - protein, 59 aa, Homo sapiens
LESSSAPCLTDTLAVSTVLTVSTELVQGGMHRTGEYTLTRLHVNRYLEVSMVLTCRRNL

SEQ ID NO: 985011 - protein, 47 aa, Homo sapiens
IEPYFSSSCPASDIKSFYGCIVFHGVYVPHFLYPVISVMGVRRWLEV

SEQ ID NO: 985012 - protein, 47 aa, Homo sapiens
MVPGIWKLATSAILRCRWAGERVSWGTGPAEPPGQLLCLVELTRPPP

SEQ ID NO: 985013 - protein, 48 aa, Homo sapiens
  misc_feature (24)..(24): Xaa can be any naturally occurring amino acid
QLMNALEEDDLTSGRISAYAFAKXLRIIGAPYKVQHACEMVMAILRER

SEQ ID NO: 985014 - protein, 36 aa, Homo sapiens
SWSRILVRACHSLHIHIPVAVQAVAGTYQKYGSMTL

SEQ ID NO: 985015 - protein, 31 aa, Homo sapiens
MQNESGFTAGVDQAPAPSWATQALPVLTAKT

SEQ ID NO: 985016 - protein, 39 aa, Homo sapiens
VVGSSGITYSIEIYVSPFRIEMSVLCLSHHCILEVIVPR

SEQ ID NO: 985017 - protein, 35 aa, Homo sapiens
YYPRDGLFGFSAIRHRDLAARNVLVESEHHVIVPL

SEQ ID NO: 985018 - protein, 69 aa, Homo sapiens
RVNPPESFLGAAPSVSLLLAAPFHSGFSTDLRVFDIIRRCCFSQGSPGHSTAGPHFLLLIHKTMFHDFN

SEQ ID NO: 985019 - protein, 39 aa, Homo sapiens
RSQKVPLVVPKKPEAPPATVLSSKEVVQNRKLICPRLGI

SEQ ID NO: 985020 - protein, 35 aa, Homo sapiens
EDDPDHVMRASTVPCHVLLPSRPVLSLYASGRITW

SEQ ID NO: 985021 - protein, 33 aa, Homo sapiens
DDDKVRYNGLKASHIHGTANGFSPVVDPLMLSK

SEQ ID NO: 985022 - protein, 132 aa, Homo sapiens
PVVNEIHSLSMSRGPDRSSYMPHVRCPPSLRIFLVHNSTDILCVNFYGDFRRTGSLEIVKGYRLLPTFLLTVNVSKHSIIYKLTYKLGLGGRSFPTPQSYNIFFTCLVEIFIVYAFHHFVLTSVLILLFVQL

SEQ ID NO: 985023 - protein, 30 aa, Homo sapiens
MVLLMQMSRMPPLLLFLFELLPSMEEQSLK

SEQ ID NO: 985024 - protein, 43 aa, Homo sapiens
QRIPGSTRQQHLIKGRTKMPIQICLASNTTSSQAKSFMLQCAS

SEQ ID NO: 985025 - protein, 38 aa, Homo sapiens
FPKQLTPSAITKSTRDSQSHRDYHQIFHFFLTVCAVCF

SEQ ID NO: 985026 - protein, 95 aa, Homo sapiens
TEPVTQDAEDNTVSLLQTNGAISEPSLSVGPEADNFTVLNLAVDRCIPIISSKSICSTHASSNSTSLTQSNNLLMFPSPATLQQHTVHGGSSGHP

SEQ ID NO: 985027 - protein, 47 aa, Homo sapiens
EDLRKAHCNTSMLVRDAQVSVGNVLEECGLALAIGSYQPVAAAGYNV

SEQ ID NO: 985028 - protein, 148 aa, Homo sapiens
MTDRGPTLMQCSRQTGNDQTGRSTLADYEEWHQDYRNCRETTMYLIMGLENFRRRKLYYDSWLFLICAYSENKRTLVLTAYTEDMTEELISLYRRELLAKINMTQAAGHSSNLERIEKYNNGLIILNDVTCPILAIITGGLKWKTRIY

SEQ ID NO: 985029 - protein, 71 aa, Homo sapiens
MCELDSERQNQEYQRLMDIKSRLEQEIATYTAACSRDRKITTTICLAPRSSEAAGSGASAVLWRVVFWVEG

SEQ ID NO: 985030 - protein, 64 aa, Homo sapiens
MALLGQLQVALQLPIRSLQVQAHLLLLLQGSFQIIHLLVQVDYGLSQGETLSSSAYEVIQSLEV

SEQ ID NO: 985031 - protein, 64 aa, Homo sapiens
AILAHTTISSTLGLQLESNRSIPDQGLSRRSAYPPTKTEHQVQGGLYLGYSSQTGCVHLPAIYQ

SEQ ID NO: 985032 - protein, 68 aa, Homo sapiens
MKPQTFGLRQLARLKRLGHGANLVDFEQEAVAGLLVHGLGDPLWVGHCEIIPHYLDSCTGCELLTSSP

SEQ ID NO: 985033 - protein, 75 aa, Homo sapiens
SAFFPRNVDAPLLRGTRLMSCSIDVLTDALFVSTTPVGCLVQQPLYKHTAHLYSFPFILEEVGQSCVFLYKQMIH

SEQ ID NO: 985034 - protein, 38 aa, Homo sapiens
STRRFLYMLLSMRLIPSVQGLPDVDDVDASALTVIVPR

SEQ ID NO: 985035 - protein, 61 aa, Homo sapiens
NTLWSLLPQEYLDVVAGGPRDLFAYLMPEQGVDSWVHSVVSSHRVTPFTTPAVVITFTLLT

SEQ ID NO: 985036 - protein, 104 aa, Homo sapiens
VQSEQDHQVFLPAHFLSHCPVPGAWHCMATLFFSLCHFTFHFPILPSHTLDAMALVILAVVFGALVNLVVFLCKHILGSGQVTACPSCSWSLPFSAIPVLFLVT

SEQ ID NO: 985037 - protein, 146 aa, Homo sapiens
YKSQRYRYLGDEVSKDQQDPHHVSPVAVTAILDCITKSHEKPRIGFEQGNDEDLILYLISCTSCSQQTSNDGWVGKALGSQQSSQLRLFQSISGSSNIKSCFTVRHAGAGQVVQHRARKPCIIFCKVAAKCSIADGFAVGHVQGKV

SEQ ID NO: 985038 - protein, 100 aa, Homo sapiens
LRLLLLKHKDMKDEDFYDDPLPLCEWSIYFLILMMFFFFFFFVEMKSVLCCPGWSGGASLRVTATSASWGSGNVSCLSLHSSGDNGHAPPSRANFFGYFK

SEQ ID NO: 985039 - protein, 55 aa, Homo sapiens
RYYYGKSESGTICPGFGAEMVGLSDPGLAMVMMVASLPVFYHVPQPVFFSLARLQ

SEQ ID NO: 985040 - protein, 88 aa, Homo sapiens
SAQLLSQLTKEERDVTPPSSFSELLAAGDSPGWPVCGPARRWLRSQMQLPPGGACQQARVPFCRSLSLLHCPMDSTEQARDGTCALVA

SEQ ID NO: 985041 - protein, 52 aa, Homo sapiens
NAWSSLKNSPPAQRLVLRSTMDPQHTTMSYRSTMVLSSTMVLSPTLVHSYND

SEQ ID NO: 985042 - protein, 37 aa, Homo sapiens
APYLFNALYFLNALYFPALYFLNASHFISRYEVYSVE

SEQ ID NO: 985043 - protein, 35 aa, Homo sapiens
LVSQHTTRSLTGLHGGAGSRIYSSCYVVVAAAGTE

SEQ ID NO: 985044 - protein, 49 aa, Homo sapiens
LITGSSQHSSTAPSTTAQPMPVHTGPASSQLHSSTPRQATHSCPSRLTV

SEQ ID NO: 985045 - protein, 58 aa, Homo sapiens
CDPRIGGAVVPSVADMEAEPEAAMALGGGAGSGFGYGGVSWCVALGSVGDLALEVASV

SEQ ID NO: 985046 - protein, 57 aa, Homo sapiens
MPAGLAVSSCGALASASEFWDLEFHTWTSEGLTCSHFTDEDTEGSEMCRNVSSVMKL

SEQ ID NO: 985047 - protein, 33 aa, Homo sapiens
VDLEDPSRNNTSIKGYSKGAASSVSTKQALIRD

SEQ ID NO: 985048 - protein, 71 aa, Homo sapiens
GIPQIENLMEELLPEEDHEEEMNALRGQVGGEINVEMDAAPVLWTLSRILNDDADHVVVWRQMKNLQVMPE

SEQ ID NO: 985049 - protein, 43 aa, Homo sapiens
DNLSSCEHSAARSGPATVPSQICLQAACAAEECRRSEIQSLRA

SEQ ID NO: 985050 - protein, 34 aa, Homo sapiens
QYKSNFTFFRDIPVQVLSKMRALFPEKFYVIVPR

SEQ ID NO: 985051 - protein, 46 aa, Homo sapiens
MHWALNHTSLKTTGGVISKPPRETVGGTDIFKVASVYFNGTAFVIH

SEQ ID NO: 985052 - protein, 91 aa, Homo sapiens
ESQEIQDQLSYIIGSTSLPKNNNNNNDKKPGMGDDRHLVSHYWKTIRYGRIACATGVRGAVNYDHAPAQGNRARPMSQKIKNKKNTYNRIK

SEQ ID NO: 985053 - protein, 108 aa, Homo sapiens
MAIYQGFHVFGEKSYGKTSDVHFPVNTERKTIFIPQSEVKTGFWGDHNGGKLDNGSNNPRQQQNAYDSRPYSGECLSKLIMIFGEIFPVMGSWASNKQVPVLQYFLFS

SEQ ID NO: 985054 - protein, 181 aa, Homo sapiens
HRHLGQTPHPRSQRRRSGDQMMRSKRTRRTTAKGGYHPVKMGDLFKGRYHVIRKLGWGHFSTVGLCGDMQGKRLVAMKVVKGAQHYTETAWDEIKWLKCVRESDPSDPNKDMGVQLMDDFKISGMKGIHVWRVFEVLGHHLLKGIIKSNYQGLPVRGVKSIIRQVLQGLDYLHSKCQIIHS

SEQ ID NO: 985055 - protein, 72 aa, Homo sapiens
TTSQMEVGFGCWERLASTGGDIAISAQLVDHGYNTHRFRKPPARHQYGLKVRRRDVGRPWHILRASEFTTVK

SEQ ID NO: 985056 - protein, 101 aa, Homo sapiens
SMYGHQVRAPRRSFACHDHSLCEQQQASRIRVDILANCYHTKACPDRSRERQMVVFAIEKSQKCIYPIIRAQSAQQYLQPSHLFNPPGFSYAHWNEILASL

SEQ ID NO: 985057 - protein, 43 aa, Homo sapiens
ILFRFQEVSIEKGKRHMTYYNTGTQRLKARRAIRSIHQVIVPR

SEQ ID NO: 985058 - protein, 56 aa, Homo sapiens
  misc_feature (7)..(7): Xaa can be any naturally occurring amino acid
MLPFNQXEKAFSGFTRQQTALGKISFPAIQAAPSFSNSFPQIFRDRTDIQCLIPCA

SEQ ID NO: 985059 - protein, 38 aa, Homo sapiens
INEMWDVKINSFIFLYDLDINNIVELLQEVGVQVDCSC

SEQ ID NO: 985060 - protein, 42 aa, Homo sapiens
PGSSTRETFSIHCLDQSLGILKALTKFFLGLPTSSSSVARIG

SEQ ID NO: 985061 - protein, 92 aa, Homo sapiens
DFLQETLISVTITVKPRRRIVAVSGDCAIALQPGEREKLSQNKKKKKRDRISLCLLGGIAVALFIGFTVPFDLPVGNKLISLCLQAFPEVNL

SEQ ID NO: 985062 - protein, 40 aa, Homo sapiens
ASVPFSQHSGPRLYPSFWETEAGEHCHPKEVTNVESDCSP

SEQ ID NO: 985063 - protein, 56 aa, Homo sapiens
LVCPEWPEGPRSQPSSRLALGSEDGQLFLQVLLAPESIIQVDRGYPLRIDLSRRVP

SEQ ID NO: 985064 - protein, 37 aa, Homo sapiens
HVRIHSNMGHCCRISQRSVVYTPFHQETKTVRSDCSP

SEQ ID NO: 985065 - protein, 34 aa, Homo sapiens
IFTAAQACVQAAVHLQPQQASIAAPGYLQRLQFC

SEQ ID NO: 985066 - protein, 125 aa, Homo sapiens
EPAIAVQRFIMESGAKGCEVVSVWETPETQRAKSMKLVDSLMIHSAYPVNYYVDTAVRHDVQLMTGLCWVIKVKNHAALVTQPGKNWPKVSPMTDHVTHCRNPKDEILSPSTPDLSNRTLVGNPE

SEQ ID NO: 985067 - protein, 73 aa, Homo sapiens
MVWTVPQPPQLVSYKISVWPEVYLANLEAREYSCLSSVRLDEAEQLGLEGGKKQIQKREVEGTGAGRRGSLDA

SEQ ID NO: 985068 - protein, 46 aa, Homo sapiens
  misc_feature (28)..(28): Xaa can be any naturally occurring amino acid
  misc_feature (42)..(42): Xaa can be any naturally occurring amino acid
MEGKYSKEGHSMYKSLQLVAFKKLSSLXGLGTVVYTCDPSTXGGRG

SEQ ID NO: 985069 - protein, 115 aa, Homo sapiens
LEDPVRYTTAEGLHGCWTAPPSTSPCTIPRSTCSSGVGSPVHPMQAGYADGRHLSMLLCLGVTAAPAREYTLFLPSVMSMEEVLNCESLRGTGPWMGVTLGPELGPYGLQMWSDY

SEQ ID NO: 985070 - protein, 36 aa, Homo sapiens
RTVSLGLVQRMQLHIVASRGNELRRQSNESKGAELE

SEQ ID NO: 985071 - protein, 45 aa, Homo sapiens
  misc_feature (12)..(12): Xaa can be any naturally occurring amino acid
  misc_feature (18)..(18): Xaa can be any naturally occurring amino acid
LFKQHISFKPIXSKHIFXSSFPFLVNQLQSSGLSFFITGQGVTVS

SEQ ID NO: 985072 - protein, 87 aa, Homo sapiens
  misc_feature (48)..(48): Xaa can be any naturally occurring amino acid
MSLISLLVLSQNLNGVSWQHEVHQHQCLQVTCKGFLQCFIPGAFPVSXEICCFDPVDSCALFRLVRMSMMVASSTPLTIMALCKAAT

SEQ ID NO: 985073 - protein, 138 aa, Homo sapiens
STFGHLPWVSRETRGLVAKTDWLGPFTVWYFLREVARVSSGKRDAAGKLALLGIQEHQLLASTQEVWVAWNGCGFILTVSSLKCPLIEYLAYSGHSHGPMRHRGSMLLRTTGGSWKRPGPTRCTHVWIIFKPLQVRAQ

SEQ ID NO: 985074 - protein, 86 aa, Homo sapiens
MWARMVSISGPRDPPASASQSAGITGGATAPGLSSVQFLKRNLNPVVFFQHKQGYFSESAQKLSSVDSVTKGTRPRPTLWVSETNL

SEQ ID NO: 985075 - protein, 103 aa, Homo sapiens
IKMIIPNETKTPGAMEHELVLHQLEVNGVLKGIRICKERIPSRILYADFKQRYKVLNASAIPEGQYIDKQEGLTEKLLASIDIEHTQYKFGHTKVFYTARSSG

SEQ ID NO: 985076 - protein, 118 aa, Homo sapiens
RVCLGEDCWEFSGSCPLMHFENKNLMPPLRSGARPCPYNSTATLSVIRDYLVQKLQKYVQNVTGPGQRTIVELRTIVELRTIVELRTIVELRTIVELRTIVGLRTIVELRTIVELRTI

SEQ ID NO: 985077 - protein, 66 aa, Homo sapiens
MLVEQTFVAARCPITSLVGKKGLFELCPPSQVGDTRGSTTKSSLLVGGPGSPIDPSNILFCSFVHF

SEQ ID NO: 985078 - protein, 70 aa, Homo sapiens
LFCKTRDLYQPPKNYLPFRLNHLPPLSTQVKVRPRSLLLFLLSFMTLTLFSPDLLGDPDNLYPESNPFKH

SEQ ID NO: 985079 - protein, 42 aa, Homo sapiens
SRGSRCCYYYPGVWRAVPRTISGPGFMLRNNHVNSLKTSIHC

SEQ ID NO: 985080 - protein, 56 aa, Homo sapiens
MRLEKYGWASGGCEAIRFLTGEQAEDKMSPEWLVLPGGLLRSLVTSGNTWFPITLC

SEQ ID NO: 985081 - protein, 92 aa, Homo sapiens
LRLLLPAFTEEEMEAQGQTHHQAEMQIHMVWATGSRLLITTHGLTKASLVLTGISPITGEKGHLFWMDGLWDFCSRPRLGEVYKGGSMRNRF

SEQ ID NO: 985082 - protein, 161 aa, Homo sapiens
CRYYYQNIFKELEKTFENSYGTNKEPEKPRQSSAKRTKREATLPNFKLLLRATITKTAWHWYKNRHRDQGDRIESLEIKPHTYDHLFLDKADKTSSEEKESLFNNGGYGLGYAICRRWKLDSFLIPYTKINGRWIKDKVKPKTIKILEDRPGTVAHAYNAS

SEQ ID NO: 985083 - protein, 39 aa, Homo sapiens
SIYRISYPELNGKLTGMAFRVTTANVLVVDLTCRLVQPA

SEQ ID NO: 985084 - protein, 138 aa, Homo sapiens
TDDVVAEILGYILEKREVPKADWYSIDSRVRNPSLVVKGLKENVDYHFRVSAEKQYGISKPLKSEEPVTPKTPLNPPETPSNPPEVLDVTKSSVSLSWSRPKDDGGSRVTGYYIERKETSTDKSVRHNKTQITTTMYT

SEQ ID NO: 985085 - protein, 66 aa, Homo sapiens
TVARLDLSDDGRGQLKQSLTIVIKIPATISCGTYLFLITWNYPGKRAQINLPLYLKLMLKQDTVNH

SEQ ID NO: 985086 - protein, 146 aa, Homo sapiens
MSSEWSSIAVPREVYTLHLNPTAAHPPKEPERRSQLYLNWREEVESGKSGTCSNLMIEDTELKQVAYIYKCVNTTLQIKGKLTSITVDHCKKLGLVFDDVLGIVTDNHTSQDVKVQVMGKVPTISITNTDGCHAYLSKNTLDCEIV

SEQ ID NO: 985087 - protein, 33 aa, Homo sapiens
LYRDWQYKVSGDVLAASLQYKFCSRRLPEAVRR

SEQ ID NO: 985088 - protein, 110 aa, Homo sapiens
MPSLYPFLSRRAALCLTPNIAQLQPDRVSRIHQYPSYACMSLLVDVYSVLRCMPSLNKFRGHVSTVLELTKYRKDWSLVDVYTPMRCMPSPCTMYRRHVSTVLDPPIIVK

SEQ ID NO: 985089 - protein, 44 aa, Homo sapiens
MSKSRSEIGQLIMLGYVGLVVRLGQGLCFMRERLEHSQVYEVPR

SEQ ID NO: 985090 - protein, 36 aa, Homo sapiens
TVVIGAPSVQELTNVDGQASACISPIRRHTVSALGA

SEQ ID NO: 985091 - protein, 44 aa, Homo sapiens
MTLRIPAFDSSWSICARGRKGMTIKPIRTMMNHSTTEVFFDDMR

SEQ ID NO: 985092 - protein, 59 aa, Homo sapiens
MARECWSISFCARTEAPDGNALTANEVICPWGTSSGSPSIKARTEPTIFPYSSTDMYES

SEQ ID NO: 985093 - protein, 106 aa, Homo sapiens
CSVHLHIDLTTPPGSQWCPSPPLWFFFSVGQLLLAVFSLCISMVVSGQCQLIQHPVQCIDVWLHTQCCMWPALSQHWCWKSSAARWALSILVTGCWHCPTGGCECI

SEQ ID NO: 985094 - protein, 65 aa, Homo sapiens
CVQHGTVEIICHTGNRTTPSYCGLHWTPELAHLGMLANEPLWLLEPCRHTCVLRRMLADLACNVL

SEQ ID NO: 985095 - protein, 46 aa, Homo sapiens
SSGSHWIHFSRRAFSVALINSLQFFNLQLMLLLQRALAQQRELTAR

SEQ ID NO: 985096 - protein, 75 aa, Homo sapiens
LQASSSPARSAGASSWEMAWLQLWYHATQTRVLHFQTGNPDDELTGVSAGAAGGPGAWASSQGFRDVLSGSRKVT

SEQ ID NO: 985097 - protein, 183 aa, Homo sapiens
LSITLLAHLNLSFQLPVPGPPGFWDLAASHPSGPAAQPHPEGAADPSGSGSRFFFIRSRGARVSGSFFSSSAIRAASVRAFWAFSSGMAGFREKVLHLSWHWGNICLQLLLGVDQAGVLGCAVAEHAHWASRSSGSGDFSGSSLVCSRGARSSSISAGSRLALRSTIASCSFRSSWLRRASSR

SEQ ID NO: 985098 - protein, 76 aa, Homo sapiens
AQVTIVRGQGAIVIVERQVGHVAAEVTEDVVARLGEGDLVDGMADEASFQQVAGILAGLPPVREAFHMVVQPVHHI

SEQ ID NO: 985099 - protein, 103 aa, Homo sapiens
MGISPHLYNGLHSAIAGPVVGKPLHREQKVPTTGLVCRSRLGSRSVLRTCTQRRVATVMPLGKEHRASGKSSPGLDHVFGTHAVLALRGGRPVELCRSRPLGR

SEQ ID NO: 985100 - protein, 177 aa, Homo sapiens
  misc_feature (135)..(135): Xaa can be any naturally occurring amino acid
EDIFKDFYEREPHKYQNKTMGITPRGGLVLCKPGRAEVMAERIGEDFISDLDQLRKRLSLGDDEACIRDVAKVRQENKWKLAAYLERDYKVSTVNPKSLFDIQVTRIHEYKRQCLKGLQVITRYSRIKREPNKFXVPRTVMMGGKAALGVPHGQEDHQSSVTAIGDVVKHDPGGGEP

SEQ ID NO: 985101 - protein, 53 aa, Homo sapiens
SEDPGAQLILKEQIHRDDALRSQEDLKDQRAMVERRANRLQAEIEELRATREQ

SEQ ID NO: 985102 - protein, 36 aa, Homo sapiens
METGKLNTVVVEVARSSTAMARLPASAAPRGARSWN

SEQ ID NO: 985103 - protein, 104 aa, Homo sapiens
MVLSQVVGFFLVGALWSFRLYSFTYWIFSQKAYVTPISISGAFLQRDSWSRVLGFPNSDYHSLANTDSMVLYSARWPHLAGDALSILHSGNGLQVGNGGITGAG

SEQ ID NO: 985104 - protein, 62 aa, Homo sapiens
PRWLMSPSVDYSHTNHKDIGTSIPIYFVCIVPVAPSAQFRDLLIRAELGQPGNLLGNDHIYD

SEQ ID NO: 985105 - protein, 144 aa, Homo sapiens
LTAMDAIRYTIYEYGALTIDGEYYIPFKQYAGKYVSLSRVPATVSLTGQYIELNALQEELAPFGLVILVFCWKQFGKQEPGENSEILPTLKYVRPGGGFVPNFQLFEKGDVNGEKEQKSYTFLKNSCPPTSEPLGPSDPSWGSS

SEQ ID NO: 985106 - protein, 33 aa, Homo sapiens
INNLQEELDTSGGNGSLDRSEKLRTVGIQNIWV

SEQ ID NO: 985107 - protein, 91 aa, Homo sapiens
GAQLILNKSSSLKIIDFFFLKTDNPPASGTQVVKLILTGEINKRGKRQRWMAGRVISDTSGQSLARPSFKGTKKRGGGAYAGNLTTSGSGG

SEQ ID NO: 985108 - protein, 69 aa, Homo sapiens
PDCILLRGISMPRGTSEDRSSQDGGPNVTSLSPGSRVPHTNVSFSALRASSLLYDESPWQAFFIRSRDR

SEQ ID NO: 985109 - protein, 74 aa, Homo sapiens
TLLLPNSASTDFVTSEYFYYVLIGARYQKLRLVTLWRPNGKVEYSVHEYFILQRADSRGTWEDSLVSILVFSDH

SEQ ID NO: 985110 - protein, 54 aa, Homo sapiens
PGDPGSALDLPASSFALRGHQLFTTGVRFWLPTQLVLGTCLRHFLEEPWLIGGG

SEQ ID NO: 985111 - protein, 55 aa, Homo sapiens
MGITIGCIRPHKVGQFHWHLDSYQLGWCTLLLSPLVFLSLVARDHSLAASRKHFA

SEQ ID NO: 985112 - protein, 52 aa, Homo sapiens
SYHSRAHARTRARSRAGARQHQEALVCQMVTTEEEGDKEDTCEVAFLGASES

SEQ ID NO: 985113 - protein, 32 aa, Homo sapiens
GFSLHNNPDFHLAVSINHKLVLQKLLTEVFFK

SEQ ID NO: 985114 - protein, 109 aa, Homo sapiens
  misc_feature (88)..(88): Xaa can be any naturally occurring amino acid
GRLSLPKRVLQHHPSNGDQLLSSDQVDPPNHRQEEGVRKTLKDDRKGDFSENRDGDKREDWEDNSTPEPKEKGEEGCHQKGLALPVVXEGEVLSHSLEAEHRLWKGTEL

SEQ ID NO: 985115 - protein, 88 aa, Homo sapiens
  misc_feature (1)..(1): Xaa can be any naturally occurring amino acid
XRGGLDPCIRYDDIFNGRSGERVRTVLTGYGENLTKTFKKVTSKLSSDLGEQLVAGGGEQQMQRPEGRSILETFGGQQGGHGGKTTKE

SEQ ID NO: 985116 - protein, 63 aa, Homo sapiens
LRLTDPRLESLAIRCIKPANNPSSAKPSYGHVIRAFLDLESWFWVTGYNKRVSYIGWLECQDV

SEQ ID NO: 985117 - protein, 43 aa, Homo sapiens
SPALARDDFWTHVSWRPTVCTNQNLAPVGISSSEHNPNNDTPS

SEQ ID NO: 985118 - protein, 43 aa, Homo sapiens
NRKIINTHNIARTNPYTFVDKELSSNKIERESQRLRPPNNRRA

SEQ ID NO: 985119 - protein, 109 aa, Homo sapiens
PTLTAHQAVCWTICRIPQDIMYKKTAVSGNMMKLIVSMRMWGIEEELKQIIKLLPTRRTDYDSFLPPKLEKLEDLARISLNTRSHCMYGYDDALSEIHSGMVFNRGYVG

SEQ ID NO: 985120 - protein, 66 aa, Homo sapiens
RCHVSFSFSSWLPLPRLLAAAGRGRPDVLESPAGIMPQFPGGAIHSLLVYRDSHGLVSLSSSTIPI

SEQ ID NO: 985121 - protein, 60 aa, Homo sapiens
TIYEYGALTIDGEEYIPFKQHGGKYVLFVNVASYVRPDEASTYELECTTAKSLHHVGLGH

SEQ ID NO: 985122 - protein, 59 aa, Homo sapiens
SDIFGMAKVIFIHDAEMQKSALQIIINCSVVGPDNRISSIGKYYTLDSYGDKLAYRNPK

SEQ ID NO: 985123 - protein, 73 aa, Homo sapiens
QLLARLVHRVYFPYLVVHIAETAFWRYYSYTLKNSGLVRGNIYTPLLNSRDLFCISPPIYRIRNIPRVHADPS

SEQ ID NO: 985124 - protein, 51 aa, Homo sapiens
IYHSFMGQLLQCESQVLGSEIVRQRLESPAIGCRSTEDNSTTTRVHITPYS

SEQ ID NO: 985125 - protein, 63 aa, Homo sapiens
MRTHRPHLQSSSWAHKLFLMQRSKFSLIHLELLYIFYPLNKISSGLGEPPIVGQEAPRYHRYT

SEQ ID NO: 985126 - protein, 66 aa, Homo sapiens
MKVQCKGSTKVEDEALLSMLGLQAKGMATGRKPQWEDIFSQFAEPVNNSVLMKALVSCEEITRQSG

SEQ ID NO: 985127 - protein, 46 aa, Homo sapiens
FFNEHHLDTDACLNCRIPELMSNPPYFVVKKQEQAHHTPQSYRMKE

SEQ ID NO: 985128 - protein, 36 aa, Homo sapiens
TLHNHVAYNESNSYTLHFIFRSFYNFCRIIFVIIDR

SEQ ID NO: 985129 - protein, 57 aa, Homo sapiens
IFILSTLTFLYAYTILNAYTLNALYFLNAIYFSFSYSRYRSIKRREDMKLLRKYKAL

SEQ ID NO: 985130 - protein, 40 aa, Homo sapiens
NCARPNLSTSSSSSSSSSSSSYLILFIFLIFLLFLLFLAL

SEQ ID NO: 985131 - protein, 92 aa, Homo sapiens
LIIILLNAYYLLTLYTSQRFILPLNALYFLNALYFLSTLYTFSTLYTSSQRFILPQRFILPLNALYFLNALYFLSTLYKSLRKYKGLRSIKR

SEQ ID NO: 985132 - protein, 78 aa, Homo sapiens
RTVVYLLTMICADGYSRVGRYTEGRRFEALHTESAMKSTKIVFMLVNRQILSKILCHHSRFPPIASLEPPASDLHRPP

SEQ ID NO: 985133 - protein, 48 aa, Homo sapiens
MPHQRQYTIINAIILLNALLLLNALYYLNDFILLIRFILSHRLYTIST

SEQ ID NO: 985134 - protein, 38 aa, Homo sapiens
KKAKPLIGRGLVSVSVFVEPELRLNGANHTPVISCPSN

SEQ ID NO: 985135 - protein, 38 aa, Homo sapiens
VLISYTSYRETEKLEKYKALRKYKALRMYKALGKYKAL

SEQ ID NO: 985136 - protein, 45 aa, Homo sapiens
YLYFLSRSYLYLNAYTSSQRFILPLNALYFIPGMKYKALRKYKAL

SEQ ID NO: 985137 - protein, 72 aa, Homo sapiens
GPSSLYFLNALYFLNGLYFSTLYTSSTLYTSQRFILPQRFILSQRFILPQRFILPISFPGMKYKAFRKYKAF

SEQ ID NO: 985138 - protein, 45 aa, Homo sapiens
MLTRRLGDFLNNRRFIEEQLTNKKAVTGENNFTDTMRHMLSSRLS

SEQ ID NO: 985139 - protein, 46 aa, Homo sapiens
PLFKRREGQRDRDDQRDRRHRRDDEPRETRKLFFTGRFTTNVLKTF

SEQ ID NO: 985140 - protein, 39 aa, Homo sapiens
MPAGLTCIHQCGACHPMKKFRRHVSNRAELQNIVKLEPG

SEQ ID NO: 985141 - protein, 56 aa, Homo sapiens
YQQLEILEAQADKYSTKEDNYEEEIKAVGRITCPPWASRDFKLLVTIFSSSSRSPH

SEQ ID NO: 985142 - protein, 68 aa, Homo sapiens
MGGGSCAIRGGYGSRAGGSYGYGGAGSGLGHGGGDGIGLGRGGGAGLAGGFGGLVSLCAPWRHPRGSV

SEQ ID NO: 985143 - protein, 55 aa, Homo sapiens
SRSQAARRLVSISDPSKSLLRYSSELSSKASSSAATRREDISDNTPKDVTVLYSG

SEQ ID NO: 985144 - protein, 50 aa, Homo sapiens
AGIPFHQQHKRQAGQATIPTTNLSSNSGQAPSQAAGQAGRQASMAAQGSR

SEQ ID NO: 985145 - protein, 43 aa, Homo sapiens
VEPAPTPIAAPVTVPVVWKRKQKPKHLRQEAAKPKGPIKGVPK

SEQ ID NO: 985146 - protein, 38 aa, Homo sapiens
ILTDWLITNPLVLVSRDYAKSEKNSHHPKDNSADKVVR

SEQ ID NO: 985147 - protein, 33 aa, Homo sapiens
MALQPVHQELDSFSEEATGSGPPAGTALPIEGV

SEQ ID NO: 985148 - protein, 68 aa, Homo sapiens
MIADAFATAICAQAVGPIEDFLDRIDLRRVDRDRAELGGQCEPIGMAVDHEDLGCALDRRRMSPPSAQ

SEQ ID NO: 985149 - protein, 154 aa, Homo sapiens
GGDPRRVSLAADRGGTDCGPASNPSHGQRHQFPNFSGELLLNGRLRTSPPAAVNQPIERGSSSRQIALDKEVKLPPCHPSQRKWVSCLRQKPANVLNDAQTKAPGREWPLSTNWGPVIDGHFLREPPARALKRSSRVEVALVIGRSQDDGLLNR

SEQ ID NO: 985150 - protein, 78 aa, Homo sapiens
DFGFRHDSTTTRDIAPILSALQDSDSPGTSRATGAASPDSPETLIPRSPRVLVIVGLIVRRLIADLIRHVPARGTELE

SEQ ID NO: 985151 - protein, 33 aa, Homo sapiens
ILITFQSRYFQRSGNGFCSHFPQLYFHEVESLA

SEQ ID NO: 985152 - protein, 38 aa, Homo sapiens
RLKTDISPLPRTPTTQRSQTQTYQPKECDDVRLYQVGD

SEQ ID NO: 985153 - protein, 34 aa, Homo sapiens
RVFCDVSALVLTVSTELVQRRHAPKWLNTLSTMA

SEQ ID NO: 985154 - protein, 55 aa, Homo sapiens
IHANRVFGGQHWCSLCRRNLYMGGMHRHVVNTLSTSAPVLYDIVDGHARVLTVSD

SEQ ID NO: 985155 - protein, 153 aa, Homo sapiens
VRPPGDDLLVYNWAPGQMVSHLDESILPNVSPPDAYHTILFTEDRDIRHQEKHTSIGNQAEDQDVQMMNENQIITNAKRKQSVVDPALRPKSCIREKETRRRRCCLVKEGELVLPLWWAPSAAPLSACCPTPQSQELEAKHSVEGSRLEEGTR

SEQ ID NO: 985156 - protein, 62 aa, Homo sapiens
RARVNVFMYQAPENYGHGSLELLADVQFALGLPFYPGYEGQFSSGGEEPVGENRAVLFPAGS

SEQ ID NO: 985157 - protein, 70 aa, Homo sapiens
RMSSLSSMCECGRMPVPGRQSSCWESGSRCINPAAWRCAELCRASRCLGSHGSAGLRDVMPEHWPPLQAA

SEQ ID NO: 985158 - protein, 52 aa, Homo sapiens
  misc_feature (13)..(13): Xaa can be any naturally occurring amino acid
  misc_feature (15)..(15): Xaa can be any naturally occurring amino acid
SDARWDRRTLLTXTXGDGSLTRHAWTVGTTLTTVYTPLSCPGHCRQRDDVPT

SEQ ID NO: 985159 - protein, 119 aa, Homo sapiens
KCTRDPPSLSLTVRPPVRCWAWVLPYGDHTDLAGDGEDKLRTPELVETQATGDGTFQKWAAVVVASGEEQRYTCHVPARGVAEAPFTLENGQPSSRARPSPSWGIVAGLGCPRAVLQLS

SEQ ID NO: 985160 - protein, 40 aa, Homo sapiens
TSLASFLQTTSRSLYHSQLKYNWLSFDHCDFLFQLFLQNR

SEQ ID NO: 985161 - protein, 39 aa, Homo sapiens
AHLHGKHSDGTWPMQPPCSAPSTLIFFWSVATQQACTHS

SEQ ID NO: 985162 - protein, 115 aa, Homo sapiens
CALSLHLGSTLLGSLITSGLHDTVATLCFSRFTLWTRTTLVPAAGCGALWGLRAAQLVSSRPPTSRLLPGGLNATTSAGCVLLGRTWPGRWTAWDVGTVWWPRLGCPSGVVRTAD

SEQ ID NO: 985163 - protein, 43 aa, Homo sapiens
MPDLRPDDACEWLLARGLSWDTVVRLTDVLLDAGRWWWHVTGR

SEQ ID NO: 985164 - protein, 56 aa, Homo sapiens
YLVRASPDGRFDGMDMSPLMAHALSLSVCELKADKDYHFKVDNDEDEHQLSLRTVS

SEQ ID NO: 985165 - protein, 181 aa, Homo sapiens
TDGGRTYELTDFTVSLHHLLSSCADWVHGRHRPRCTQTEDYRTLTTYKDFSQFVRPLIAAQPPKIAVSKMMLVTGAQWREYSTNNPFKGRSWGIKWQLRQQQLVAVVESLVQATEVAPSPTPVEVPIRQDKTTAGQVSHCSEDAQKADLVSLDAKDCYTQESTPLKIMLGGNGSTRKRSSK

SEQ ID NO: 985166 - protein, 68 aa, Homo sapiens
MWYAPVVLCYLVAEVGGSLETERLRLQKALIQPLHSILGKMSNDSVSKKKNYSTNNPFFLVRKGVFVA

SEQ ID NO: 985167 - protein, 39 aa, Homo sapiens
ACFTTAVVASLYTFRRPVSTVLPSQYSFRWRLVASRGSS

SEQ ID NO: 985168 - protein, 104 aa, Homo sapiens
PTCRTQGHPEGPRASGSSRCPSVSRSHAANHAGSHFVSSSTKISIGSCMNLRQPGRHLFAPGSTEHHDLLLVGGHAETFPGHPDACGAVQASLSHSSKNKGFMC

SEQ ID NO: 985169 - protein, 84 aa, Homo sapiens
TWYTAMTKCDCVIRSGAPLSSIPCIHTSQVTQLCLGFLTDPQLDTDQLTSGIFNVGSTLPGDWFLAAHLPQCHGQISVKGLQDE

SEQ ID NO: 985170 - protein, 111 aa, Homo sapiens
EDLRSWTAADTAAQITQRKWEAAREAEQCRAYLEGECAEWLRRYLENGKETLQRAEHPKTHVTHHPVSDHEATLRCCALRFYPTEITLTWQRDGENQTQDTELVETRPAGD

SEQ ID NO: 985171 - protein, 72 aa, Homo sapiens
SVVPHGDVHGPAPRTRECGLTEKGVFADIIKDLKIILHLGWVLNPVTWVLTRERSGEEHRGGGHVTPEQIGV

SEQ ID NO: 985172 - protein, 45 aa, Homo sapiens
LRKLGNKKSSSSPRGGDLSPTPWRRRRFLISQVLGHRFGLPSLLR

SEQ ID NO: 985173 - protein, 62 aa, Homo sapiens
CRYYYQSRGTCVSCPRGARDKRMKHPVSYHFEPSSATYISPDLLPWLFARKELCSIPPKRDT

SEQ ID NO: 985174 - protein, 66 aa, Homo sapiens
CPYYYQKQRVSHPPEEYGCDVGPDGRLLRGHDQSAYERQGVTSAPERGPDAPVTAAGHLRLRITHA

SEQ ID NO: 985175 - protein, 50 aa, Homo sapiens
LHVALKLQMDASDGLLSGHHTVPLTGSPWSRGLVAAVSRIYSSCYVLLGG

SEQ ID NO: 985176 - protein, 39 aa, Homo sapiens
SSRQERLVRGSQLVCVSGHLAHSRPLGIREQQQVIPSGL

SEQ ID NO: 985177 - protein, 40 aa, Homo sapiens
LEDPAALYYLVFPVPAISLEVSVRVLKRRLTFELVDWERQ

SEQ ID NO: 985178 - protein, 66 aa, Homo sapiens
GNKVMFWWPSREGKSAISAHGNLGLRGSSDSPFSGLSLPSSGEYGHRAEGLMVYSVGPFSELGKMI

SEQ ID NO: 985179 - protein, 40 aa, Homo sapiens
CGDYRREPPVQPWFNFLKALARSPRLECRGTVIAHGSLEL

SEQ ID NO: 985180 - protein, 41 aa, Homo sapiens
SDYGEFVIKTLMSAVWGVRKCMPQMNYDKLSRALRYYYNKR

SEQ ID NO: 985181 - protein, 110 aa, Homo sapiens
KLHQQEHPLRSPSTLWTLVLSTLHNKSCCCSLFGSASPLRAVNLTVKVRGFILEVSRTTNPPEEKKLWTHLKEETPDTPSLRAVTVTAKVRGFILEVSKTKNPLLPSLLR

SEQ ID NO: 985182 - protein, 52 aa, Homo sapiens
EDVGCDWVRTGAPPRVYQFAYAGKIDIALNEDLSSWTAADTAAQITQRKWEA

SEQ ID NO: 985183 - protein, 48 aa, Homo sapiens
MRLPPALALNDRKYISAYFLSLRSSCSLKKVSWRLSSASLLSSSLASR

SEQ ID NO: 985184 - protein, 35 aa, Homo sapiens
MGVSQVQPLFTGLPALGPAPELATLFPALALFPSP

SEQ ID NO: 985185 - protein, 35 aa, Homo sapiens
LLRDSTRPDHGFGGGLTVWDVTTRARAHPITPRTG

SEQ ID NO: 985186 - protein, 48 aa, Homo sapiens
  misc_feature (35)..(35): Xaa can be any naturally occurring amino acid
  misc_feature (47)..(47): Xaa can be any naturally occurring amino acid
ADGRLYDVTPPNALDLFTPPTTGHRDAGFTTRRDXTVTFYPYLTDCXC

SEQ ID NO: 985187 - protein, 58 aa, Homo sapiens
TFQQANTPAVRAQVSYTLLQESPSTVHTPAGRASQSPRHTPAWMSPPVDCTLSCTGGG

SEQ ID NO: 985188 - protein, 130 aa, Homo sapiens
TVQATQDIGKNKTLSPHYSWNVYAPCVSPQVDGSEVSGKGYHCVHTDLDQCLSEPYNKRIVVLINTEGSFAGSGPSNEGDQMSVHMGTSFILAVHASLKKLTSLQDVGIHLEVLVGPQQEHMTYDINLPY

SEQ ID NO: 985189 - protein, 64 aa, Homo sapiens
VVPVGPQVKVAPIVVPSSTELEGRVLRCQPSELHIGCAVGVVTLSGALALNFYCIVLPLRKIII

SEQ ID NO: 985190 - protein, 58 aa, Homo sapiens
MSYRLSSWEAQRTLDWKELIQDISRLQRRTVGTGHLEVPGPYYAARYSVLPPMFDPGD

SEQ ID NO: 985191 - protein, 61 aa, Homo sapiens
THTTDRENLRIALVYTTRARLVLTPSRRCFGCDVGSDGRFLCGYHQYAYDVQDYIALKEDL

SEQ ID NO: 985192 - protein, 56 aa, Homo sapiens
RLSKLGMQSTFIGQKLSVTVLNNSCLPTQCPGGQTIISSCLGILDDLFGQFCGEPG

SEQ ID NO: 985193 - protein, 66 aa, Homo sapiens
RLSDYTKTSGRKFSSKRPASGSADPAQYDRYVNKDMCIQELAVLVSGQKKAQVLKLFVTADAWPLL

SEQ ID NO: 985194 - protein, 45 aa, Homo sapiens
PPPGSSADQAEMEEPANIAGDSSSLPEGGARNAIKLAGGVVTLHP

SEQ ID NO: 985195 - protein, 69 aa, Homo sapiens
GNDSFDHHEFPCLTWAVAAGFSRIFLIVVISFEGVIDSNLGPPPLSYPYLSSSYIIPAYQQLASSEDLP

SEQ ID NO: 985196 - protein, 121 aa, Homo sapiens
SDQLGKHPVTVCTAHHDTVSTSPNHPHSLQPPQVSHTLSTSSNPPTVCNLPKSPYVQPRKISPTMCNLLKSPHCVHSSPNPSHCVHTPLVPHCVHPPKIPPMLWQPSSNTPLNASKLLQIS

SEQ ID NO: 985197 - protein, 38 aa, Homo sapiens
GTRIGGVLWRIQSLSENHAVLFPACPDGVILLEIDSAV

SEQ ID NO: 985198 - protein, 40 aa, Homo sapiens
TRRLSSWDTLNANVPRFQCPLGSRIIPAEKPRSHNIQLAQ

SEQ ID NO: 985199 - protein, 49 aa, Homo sapiens
ESYRLSSWEVTVSDPVDVDRRAGRATGNSSHPGSPRAGAASDSLSYATL

SEQ ID NO: 985200 - protein, 83 aa, Homo sapiens
DRGLPVETGLMLNNKYASATSIYKILHGWMGRASHAGGTQYPAPKVLEEVIMSVLGLVGLPPSFAGGSRKIGVTEGGFYTEEG

SEQ ID NO: 985201 - protein, 51 aa, Homo sapiens
VLKPRTDVLVVPGELLLCSFSQQDPLLVWNDGRLLLVGTLSLNFGIFPVCQ

SEQ ID NO: 985202 - protein, 32 aa, Homo sapiens
MSCQVCEVRPWVQMPARGDLWLRPMDPQELEV

SEQ ID NO: 985203 - protein, 46 aa, Homo sapiens
SRTVERLSDSGNAVITGLIVVMAFKVQIATVVSFFSQCTIPAAPGT

SEQ ID NO: 985204 - protein, 74 aa, Homo sapiens
APFWGGGSSGLKSLEIQGEGFIHMASSDFLTLHGGHWFSSSAGERGLTCLRSFMPSTRYLGFPRGPLSVQCPRL

SEQ ID NO: 985205 - protein, 34 aa, Homo sapiens
ETGLMHCVDFSLFVPGWVTAVLRVVVALMSLGEQ

SEQ ID NO: 985206 - protein, 48 aa, Homo sapiens
GGAQRHAWVIPIGAPTRQFSNSSQRMSCNFHGYPSTAGGPACHPSAAP

SEQ ID NO: 985207 - protein, 68 aa, Homo sapiens
MAVARRVLGVQWLQRASRNVMPLVHGQPPNMSKDMFPVPYPRSPEERAAGAKKVEYAVWKDYEHLTRD

SEQ ID NO: 985208 - protein, 44 aa, Homo sapiens
HEGCPVAVGALGTPRRLCAMNLEVFMCIMTRGSRLWWEILDDPR

SEQ ID NO: 985209 - protein, 140 aa, Homo sapiens
MRSLSQRQHCPEGPCCEQFTEVKKLDLLNGNAGCSNPVSHNLMCNNFFLKAILGVARSRHDLQSAFRQTYGSHPEVDSARSKAGLVDFKSPSLTKYKIGGRKSHLIRVDLKMSSMKIIGVAKNGERPYDVYSRCVQGNKN

SEQ ID NO: 985210 - protein, 62 aa, Homo sapiens
SAYRVSCHHVISPQWDASVLGTASVCVGGRNDRRSMLALVLRYGVPGVGPLLKKIKKGIVSS

SEQ ID NO: 985211 - protein, 81 aa, Homo sapiens
DGAQHPVILFLNKQDLLAEYKSLLGKSKIEDYFPEFARYTTPEDASPEPGEDPRVTRTKYFIRDEFLRISTAREDWCSYSY

SEQ ID NO: 985212 - protein, 89 aa, Homo sapiens
  misc_feature (52)..(52): Xaa can be any naturally occurring amino acid
RTYGYSCSARAATAPMFVQHPDLKALSAPVPAGKMCSVDYADLLQITRFQYXDELTARWFCQIQVKTFGTLVSIPVCNKSSVQVGSLDQ

SEQ ID NO: 985213 - protein, 134 aa, Homo sapiens
PSCGFWNLTKVSQEGVHVLQILGVTSSPTLDMTNNYHMGVYNPCDIRSNIILYPTGYYEQYHRGLYIPCHIQSKIILSSPEYYKQYPSRVYTTCNIRSITFLFLSEYYKLYHSGVYTPGSNIILSPTGYCKQNH

SEQ ID NO: 985214 - protein, 40 aa, Homo sapiens
KLESSSCNQVRSDQEDDQAGILIQSKFRSYYEQQAISCRA

SEQ ID NO: 985215 - protein, 37 aa, Homo sapiens
GFVNGRPLGSGPQRIVDLATRCNGPATSLASSAVSNG

SEQ ID NO: 985216 - protein, 42 aa, Homo sapiens
MSVTDKCSPIPGNHIYALLTEGLSEGSTHPTGAILGVATVMG

SEQ ID NO: 985217 - protein, 44 aa, Homo sapiens
MVLETLCRQEGDAWQRQLQGPEVGMTLTWPMCRNGLTKCGWSGA

SEQ ID NO: 985218 - protein, 116 aa, Homo sapiens
QCSELQQQSAAKLGSSRTEWHSWKRSCALPGRAIAEQRQNCVQSAEETRGSCWQPCKQELELVVVRAGVLRVGEEEELHAVKLQTEKKRLQQHIQELEAHLEAEEGALEKLELEGA

SEQ ID NO: 985219 - protein, 157 aa, Homo sapiens
AGPVMSQIEERHCSHDCVDANLELAEHVPCCAPGQHAPASASSSELMLCFTGSKSSLVSPRVNSSSRDWKRFAAQVGVLLATLSGQVADEDLVVLHQIIVAHVDLPVRDRVHRFDVAPELLGGYDKPALNGRLLGPEFLYLVEQDLVQVLALIGVGD

SEQ ID NO: 985220 - protein, 129 aa, Homo sapiens
QSSKARVQACSPLHHGSLKFSSQTAMVRSSLLAGHTDLLQMGTPHGQIQVQTITQHINNSQQQVSACACHRIPGYGRAPGQVTAFVPVLHFSTFKKNPLRFNIAKTRACGFSFSKLSSRLHPETRPRSH

SEQ ID NO: 985221 - protein, 45 aa, Homo sapiens
VHAAEHVDCEPHQPALQLLEPFDKWDGKDLEDLADPHSRSTGTVY

SEQ ID NO: 985222 - protein, 52 aa, Homo sapiens
MCAVFERIPSAGPKFRLQSRFCFSALFLEARSDSRSSWNKAEKQKRDLGASW

SEQ ID NO: 985223 - protein, 41 aa, Homo sapiens
MLRSFYTDPPPAGPQGKRAAHSQPGYVLGMGGAGGSACPVG

SEQ ID NO: 985224 - protein, 38 aa, Homo sapiens
LQLAPKLHGPKLTLPQHAACQCDVWRKEKNAGRNQMTK

SEQ ID NO: 985225 - protein, 35 aa, Homo sapiens
  misc_feature (8)..(8): Xaa can be any naturally occurring amino acid
  misc_feature (23)..(23): Xaa can be any naturally occurring amino acid
  misc_feature (35)..(35): Xaa can be any naturally occurring amino acid
MDTARDSXIQMASRVGRKSYVTXSSRGAGGTGARX

SEQ ID NO: 985226 - protein, 109 aa, Homo sapiens
SSWPPSQPHTACDSQNGSAWRFPILSNIPHGPFSLPHRTFNFPSFSFPLAHHPLRNFVLHPAQTPGPYFALSGPSTAPGPHHFHHTLTPLGATRDGVPELDMRNSLVTT

SEQ ID NO: 985227 - protein, 107 aa, Homo sapiens
  misc_feature (6)..(6): Xaa can be any naturally occurring amino acid
STMEDXFSRAIWPPTLAEEKKDPLQPYEREVLCLSVLWLISVNIMSPRLIHMVANDRISFYKRLNSIPWCIYITFFIHSSVDGHQGGFHIWAMVSSVAVNMAVQISF

SEQ ID NO: 985228 - protein, 46 aa, Homo sapiens
TQSVLVPDCLWTTARCDSAVTLMLLVHLKATRNSVPVPCHWCIKCK

SEQ ID NO: 985229 - protein, 67 aa, Homo sapiens
SGRGVKAEGPGGRSGWCGDPGPQTPNRVGPSVVWVNEPAPAAPSVTSSGGLVPSECCISHKSTGELG

SEQ ID NO: 985230 - protein, 45 aa, Homo sapiens
  misc_feature (1)..(1): Xaa can be any naturally occurring amino acid
  misc_feature (29)..(29): Xaa can be any naturally occurring amino acid
XSEGKAQAARGACSLTRLPGDRALSLGCXATFICTGPCAPPPHPP

SEQ ID NO: 985231 - protein, 60 aa, Homo sapiens
GPAVETIQTQGTFSVQFRGKMCSVDYADLLQTFQVFILDELTARVFSQIQVKPFGTLVPI

SEQ ID NO: 985232 - protein, 71 aa, Homo sapiens
SSGPQAGGGRSQAAQEDRTRPKAERLGPLFPSGIPGTRPGGPPTYARLSRSGTTVPSPTPASEPALHRRLP

SEQ ID NO: 985233 - protein, 44 aa, Homo sapiens
PAGPQARAVTPLSPSQGRGTDPQVGGGQTPFSCLDLVTCRIRGS

SEQ ID NO: 985234 - protein, 47 aa, Homo sapiens
DPVVLMVGCCTRTGDRTADDADTGLGWARWDGPTDVSAPGTFCTPLT

SEQ ID NO: 985235 - protein, 58 aa, Homo sapiens
MLTLKMSLAGDLGVLLSGYLASLRPPGHSCGLCQLVIRKSTHHTGMQHVVACALGGLE

SEQ ID NO: 985236 - protein, 42 aa, Homo sapiens
RGPLSCPKLVESLTNDNGGDARTPRELAVRGCHGPGPWTTGT

SEQ ID NO: 985237 - protein, 84 aa, Homo sapiens
DRARYRLSSGYWEFPCRNSPAAVPAGVSMICLPREHQERVGWVSDGLVDAASRRDCSKFIGEVVPVWVIPHESLPHAFTTGQCG

SEQ ID NO: 985238 - protein, 76 aa, Homo sapiens
TVVPSDVDSSTGRIRLDQQDSRYTDIMAVSTVLTVSRELVQGGMHRSVKHVDQAPGNRYLEVSTGAHVSTELVQGG

SEQ ID NO: 985239 - protein, 60 aa, Homo sapiens
GWRREIGVHGKQRLNSQDSRQHEQAQLRAPTVHTAHTSQARSAFGELAGYIQADGPLPTS

SEQ ID NO: 985240 - protein, 37 aa, Homo sapiens
GWDRNLNRSLALMASQRHLKTPDEGYEEETRDLARSK

SEQ ID NO: 985241 - protein, 67 aa, Homo sapiens
VALDGLPLQLAPQQSAGLSGQPCLAGPMGPGAQAARHALLAMGPVHPSCHQLGGTCGPWGPAGGVTA

SEQ ID NO: 985242 - protein, 136 aa, Homo sapiens
DPLSWPHVAVSPSPSKEAVLPAYPTYSVLLKMWYRLFISEIGIEASALSSLLEQFEKSEATKECPPPAPADSLAVGHSGGVDIPQEKTALERFKPQTLANVAGLTPPATPPQQLWKPLAAVSLLGKAKSPKSNAQA

SEQ ID NO: 985243 - protein, 92 aa, Homo sapiens
SWPQELLMVICQWTSTWQSAWNPFRPIQLSGVWAGGLFSPINGILGVHQSSPELRSALVLTCRFGRKSLQEARSTDFVLTFSSFVALGGQLE

SEQ ID NO: 985244 - protein, 37 aa, Homo sapiens
RSGQVLGVHMLPAPVREALPGTRALELGQAPVDAMQA

SEQ ID NO: 985245 - protein, 77 aa, Homo sapiens
KDPPQLAPKVHELVQLLLAMLSQAMLRGMLDADGNQFVAYFLPVEETLKKRKRDQAAALAYAPDDVYDYKIAWGPAG

SEQ ID NO: 985246 - protein, 126 aa, Homo sapiens
MPTPSTSHSSLTREAQREQMAPRCSGWGYDGPEESVFQAVTAGLKVSEEVVGGLFTSLCTVGSKQIRIDHESSEWNYETCLATPVSLAPEVTHGNTLMTYLFRDAALMQASWGAPAGRLHTGDGTG

SEQ ID NO: 985247 - protein, 75 aa, Homo sapiens
MMCTAQFLEVQCFHGWIPVCLHKSPVTTAVPGLLFQRLLKSLVSHSMQGGPLLLTFGIQCFPQSIQPCSLSFCSI

SEQ ID NO: 985248 - protein, 44 aa, Homo sapiens
EGQFVGYFLLEKTTLMKRKRDQDEEMDYAPDDVYDYKIAWGPAG

SEQ ID NO: 985249 - protein, 93 aa, Homo sapiens
QELPGSGGPRWDLAVTVLAALGCSLRRHGTSVPHSSCTHIPFLDKPCETSVWYTWTSLWVLKSLDAGLDHSCPFVTILVSGVLVSVPCPTMHA

SEQ ID NO: 985250 - protein, 68 aa, Homo sapiens
  misc_feature (56)..(56): Xaa can be any naturally occurring amino acid
TRTVALSLSPRWDWLDSKDQVMGPGVSYLVRYMGCVEVLQSMRALAFKTRGSGPQXCLQSGVYGCAGC

SEQ ID NO: 985251 - protein, 90 aa, Homo sapiens
PSLRCLIPCMESLFPAECLLLLFFFIVIIIVLNLIFVVIIDTFADLRSANPKTEEILKRICFICVLERDKFVNNNDRCHLRNTIKLEHNM

SEQ ID NO: 985252 - protein, 40 aa, Homo sapiens
SYTSPLGWRHGLRLRGSPVPSATLHRWLLPRLWGSAGGVG

SEQ ID NO: 985253 - protein, 34 aa, Homo sapiens
SVSRNHHRKMSPGGSHNHLLQLHDVRMTQAAQQR

SEQ ID NO: 985254 - protein, 39 aa, Homo sapiens
VTELGTGMACTCFKHLATGNYLAAEENPSYKTVMPHAPK

SEQ ID NO: 985255 - protein, 133 aa, Homo sapiens
MRLGVDMRACLMCVLEHRHSRMRKQIGEFAMWEGREKPGGEDVLVAAPRLLVWDLEDCDGEVGEQKAGGELVDTALHMDQEAAQRLEDADVLEQEVLVRAQGPFQSQALLLGLFILLFVLLFPPTGHLRGYRA

SEQ ID NO: 985256 - protein, 124 aa, Homo sapiens
MMWWDIWGGNWNGSIEGQSCGVGVSESSCCDWVHWLSLLVVLIILADWGTLSSGATALRGYIRGLLLWTVCGRPVGFLFWGLRRRPPVSVFMTLKTVNHMYGSASRLTDALVAQGGHLRGYRGS

SEQ ID NO: 985257 - protein, 41 aa, Homo sapiens
VEGQAAGEESRASCQPNERMMQAAVSPALSILVCIGDHELA

SEQ ID NO: 985258 - protein, 76 aa, Homo sapiens
MAVGQVRVRKPITRKMFSRWFPTTTSFRLHDVRMTQGSSSVISRKLLMGMPSFSLSIRTFFRATISSVWVSRARYT

SEQ ID NO: 985259 - protein, 39 aa, Homo sapiens
MVSSVRILTQEPGPHPVAFLSKQLDLTGFSPSPTCLACE

SEQ ID NO: 985260 - protein, 128 aa, Homo sapiens
MRFPQLYSTTPFMWPQISREELSGSSPSSILETENCACWSWFCHSPFVATTGFARQLLSLPACPLSPQFRTLHIHSRVFPEIFVCPARGFHDNAALRNASRSLRGARQWVLGDSSHGMGSSAGTRTRT

SEQ ID NO: 985261 - protein, 75 aa, Homo sapiens
GLWTTGRFHFIEGFNAENSNVDALCESSTLSPGAKAGVRVRDGMNIYFYTIKPIPATQELLVWYGRDFAERLHSP

SEQ ID NO: 985262 - protein, 49 aa, Homo sapiens
MIAAVLSRLPWVGPRAGAGTAPAPALVARRPVRTTGPFPTVGRCGGAFV

SEQ ID NO: 985263 - protein, 45 aa, Homo sapiens
LQDPLEDGWLAEESSNEMNTLQQKAELSSRVCFSGIAAPKMNGQW

SEQ ID NO: 985264 - protein, 54 aa, Homo sapiens
MAVGPPIMLSYSKTQPFFLSCLMEAMRKYTNLDPASQKEPLSYSLRFISQPAIF

SEQ ID NO: 985265 - protein, 118 aa, Homo sapiens
VAGGEDWAMKWQQRASHTAGTAPSEGEFIDVFQKIKLADLTCLANAADSTSMNPMRRWSSVATSSSWPRGPWCLGAVCGMGAAAWVVGPRWPLAGISPGGRGFGARSVACLWAGPGSR

SEQ ID NO: 985266 - protein, 36 aa, Homo sapiens
MTSSWMPSCSKELELGAVPVKTTVQYQCHKWKWQCV

SEQ ID NO: 985267 - protein, 88 aa, Homo sapiens
AVRSYCLAHGIQPDWQMPSDKTLGRGDDSFNTFFSAPGAGKHVPRAVLCRPWTPHGICCRSPGHLPANSSTLTQVLTGKERLLPIHYC

SEQ ID NO: 985268 - protein, 74 aa, Homo sapiens
HFPLRILSMLPKELLQFWTLILDWDLPRGLHGFSPHLALTHASPSYPTPDLPCTDATVCPTHCHCSTPTGRLSA

SEQ ID NO: 985269 - protein, 63 aa, Homo sapiens
WAGEEGWGKRGDRGTERKECLAQDTAERDLGSLVYLLTFPPLWSHDPAKSPSVRNTQALFPSP

SEQ ID NO: 985270 - protein, 140 aa, Homo sapiens
MLPKSINEYHLEKISAFPSMETRLCEFAYHLALEPWLDASWIFLPKEGRLEGSEPQAKEPLMQTLESLAQRRCMGPSGAEDKQNIMTTAEMYPSEDHLAYAAAGVAQPSLTWGRRSSGQQTACLCREMSWGPLLSLKDAE

SEQ ID NO: 985271 - protein, 34 aa, Homo sapiens
GDEGDEDWRDLPPTSYHPKSDAGGDSEMPSQLFT

SEQ ID NO: 985272 - protein, 77 aa, Homo sapiens
  misc_feature (32)..(32): Xaa can be any naturally occurring amino acid
MTTTDHDTFLMNDYRTRTTDCTYGTVTTPRRXRTREHVFDRRGTLLGTRAVDGWRRFRNGLESHCTTLVRLPWTRTF

SEQ ID NO: 985273 - protein, 60 aa, Homo sapiens
MCVSGQEELTFCRTLVLPAASPLRGDFSGYGPPLQWCGHSPLEPSLFPPLLFPGLLWPGI

SEQ ID NO: 985274 - protein, 41 aa, Homo sapiens
CYTSSRPAGCPRDFDTQQRLYASTTPPYHHVLTTHGADHDV

SEQ ID NO: 985275 - protein, 145 aa, Homo sapiens
CGRSTRIPLGGTTGHPGLRVCGTRGTVVTCAGWVTGASVCGQDCEWHEVNSRRGRNLMADAQGGVGATSCSPSKPLGHLNGTTWGPHDCDGHTWLRPLQTGGRERSCEAQALCREKRDLGPMNTQKPPWKEQYGGGASAASQAAH

SEQ ID NO: 985276 - protein, 30 aa, Homo sapiens
PWGDIGSHLPLLHVGAEWAVDLGGNKRYLS

SEQ ID NO: 985277 - protein, 37 aa, Homo sapiens
RVSSAHQARSPSPRMAFVPKPLTQSILSGVSQAFHCQ

SEQ ID NO: 985278 - protein, 48 aa, Homo sapiens
AYGTGRRLRDGQAASGSWLPNQDPYWTDHRRRSLAHSMTAQPRMHGAR

SEQ ID NO: 985279 - protein, 47 aa, Homo sapiens
SLRCFRRLPCGWRRGPDGLHADLTFGAGCCAPGVLRRVCLPAGFPAD

SEQ ID NO: 985280 - protein, 60 aa, Homo sapiens
GLGTRDGGVVLTRLTLCCFSGSPPTLCALSDVTLQPQTLGLPFPLSPDPQTAHPPAPLPQ

SEQ ID NO: 985281 - protein, 37 aa, Homo sapiens
GASTTDSPWAGDRRGTRHPGRQTVTTVRRHLVHTGTL

SEQ ID NO: 985282 - protein, 76 aa, Homo sapiens
MSYADLVRCQVHLDAPYAYRQAYLPKHFPLPVRPTDVVFSTVQDALRLVLYPALARIRYGWAEAVAVHWGLGASWR

SEQ ID NO: 985283 - protein, 34 aa, Homo sapiens
PAWPPSIQVMVCLRWVQFGQKESSLTASMLRVDV

SEQ ID NO: 985284 - protein, 81 aa, Homo sapiens
ALHERFTVVELQQMVARPDVVEMHDVTAQDPKLLDQLKATRNSVPVPGHWCDQTQILQCTGGIAASPPSAACRDFIQTHRP

SEQ ID NO: 985285 - protein, 72 aa, Homo sapiens
DIPRSSVVHLRILPNDRVLASLARPGWASRGGLQLPFCPIEETTQIPLASFPLRGNVRVMVLYDVPSCVKHV

SEQ ID NO: 985286 - protein, 43 aa, Homo sapiens
WTYESAFLPPGEYLVCCDCRGSCASYSPPDQVWSRTLGWEARI

SEQ ID NO: 985287 - protein, 93 aa, Homo sapiens
PAGPKHLKLVLRYKPFSKDASTAGAQGYGSISNAHSEQEHRACGPKPPPSQGSQCEPGLAVRTVANCLALWKRREGPLSNCSLGACVLGGQLE

SEQ ID NO: 985288 - protein, 60 aa, Homo sapiens
QLAPWLPVVKNSITKNQWLLTPSREYATNNNEWGSGRGTNLAKELKDGRHGTPSTGKQYL

SEQ ID NO: 985289 - protein, 72 aa, Homo sapiens
GWGRGDGILSPRKSGERADSADCDLLGHMLLGEPFSPRGFMDATMLPTDPSGQGTDSATASDELAMISTAVF

SEQ ID NO: 985290 - protein, 64 aa, Homo sapiens
  misc_feature (52)..(52): Xaa can be any naturally occurring amino acid
RRLEDPQTSRGATRGIVVRGQYGMKLPGMEYVDGDFQCHTFDSSNVSDASPXHTVSLTPLFHAH

SEQ ID NO: 985291 - protein, 44 aa, Homo sapiens
WAGMQGENQDGELGSHEPTESRGRAGATSAKTWVRGSQQTQSLP

SEQ ID NO: 985292 - protein, 175 aa, Homo sapiens
IGNLSSSDRSRWLLLLQCVSRIPIPSEYRSPMAGQLRLGLPVEEGIRQFLVVDVTLAHLRPNFLSHFGLHGLLFCLLLQGLSHLLDACALDEVWQFEGGLLNALLALQVLALKTPVAWHRHRVPSGLAVNQELRVLRCQIVHLHDIGPSHQLIEFRPSEADHSAQLLLGQLGGQL

SEQ ID NO: 985293 - protein, 43 aa, Homo sapiens
LQLAPMRLRGYIFSATGRSLFCTIFYSQTCFGTTGTLCFLTLT

SEQ ID NO: 985294 - protein, 108 aa, Homo sapiens
MVCVVLLLDTIVMVPRAHMDSHRAMDPFLEANCSWMFGLRNSFRLQGSLLGGGLRRFGFGQAVRQQPGASKLVGEGVAGGVSPAMLASNWGYVNRSRGPLLLGNVNAS

SEQ ID NO: 985295 - protein, 50 aa, Homo sapiens
PAGPKVANEYGYVAFHTSLKRVDMAKFMKFMKLGMLCGLFREGGLGGQLE

SEQ ID NO: 985296 - protein, 85 aa, Homo sapiens
PNEKIETRWLQEQLGLGNEHTRLLGVGRKLGLAEGDRSLGCQLERAPKLTRHNMLHASVMCGDKNRHAGRNQMRNLEASGRTCRE

SEQ ID NO: 985297 - protein, 64 aa, Homo sapiens
MAGWVVEGVVIMAAGLLEDWEGHRFLPSPPPPPATTECRLCVALAHPWGGIYSGKSSKHGRQFG

SEQ ID NO: 985298 - protein, 99 aa, Homo sapiens
VVLEDPSKMAGWYETADDWGPHLPPKKRLDFDLEKLCSISLSNTSMLMPVWCGASTFKAGVGSLSAYIHRVEFQPPRFALNLQQPRSFTGLRRPSNADR

SEQ ID NO: 985299 - protein, 69 aa, Homo sapiens
  misc_feature (39)..(39): Xaa can be any naturally occurring amino acid
  misc_feature (42)..(42): Xaa can be any naturally occurring amino acid
MAGGHLEEVEEEEEKKKGVWERIRFKLSSQALVEEFSYXVTXDRSRDSNMDTLGQGERDGLVSNHEGDK

SEQ ID NO: 985300 - protein, 68 aa, Homo sapiens
LLRCSTTAPSPLAVGVCYVLRAARRYGWGDDSDDRRTAVTYGRTPTDRRGVGYWGYWHGGFVLDGSRR

SEQ ID NO: 985301 - protein, 88 aa, Homo sapiens
ALDGSPHRLAGWAADRLDLAAASSPWRRRSSGRPCVRPLWVDRHLGDTTSTHFCHVPTAWCVHHPTLRLLATGCTTGRTTVAWRDRRY

SEQ ID NO: 985302 - protein, 45 aa, Homo sapiens
MHLCAIFPAVRSRIAEITTLINGIAFQTNILAAQRRGGSGARRRT

SEQ ID NO: 985303 - protein, 84 aa, Homo sapiens
VRHELLASLVDADLNLLPMLLPVPLPCHLESTATVYANGAMLQCDLYQHAVLCHRAMLLLTVIWAVGSIYESAPACACNALCTW

SEQ ID NO: 985304 - protein, 78 aa, Homo sapiens
DELGTIRRHLQYIEGNGSFAYALPAQTYDEISMLIDRGIKPYLEAPPPSTPHGALGGLCRQSIFNPGGRCPVRATANP

SEQ ID NO: 985305 - protein, 100 aa, Homo sapiens
EVFWPAAVSVQADAATVIAIVAGEPVQPQWLSCLQVCSLATRSSRTGGRNEKRGWGSAPVSAAMRNISMASVRMGAPPASRSGSVASSKRCSSRADRMAS

SEQ ID NO: 985306 - protein, 47 aa, Homo sapiens
AEIALCNYALRDAIDQQTDIPWAITAQSNISDLQQFVHHSMEVVSID

SEQ ID NO: 985307 - protein, 35 aa, Homo sapiens
MNGTVALSSCSSIGEADLGGAGAKLGGELGHDTGI

SEQ ID NO: 985308 - protein, 71 aa, Homo sapiens
HTFERGRGLLFGKCDIALFSRMLHVDEHRLVVRGEGDAGQFAGLRPHHETANFAADRIAHQHLVVALPGVI

SEQ ID NO: 985309 - protein, 30 aa, Homo sapiens
MLPGYKNVGLVSWAAFAMKVRVHKDLSFES

SEQ ID NO: 985310 - protein, 35 aa, Homo sapiens
SRYLMHVARRIDHHRIRDEKVKVLRSLRRIDQTNV

SEQ ID NO: 985311 - protein, 184 aa, Homo sapiens
GARYRLFCLGCGAQKAHNCSRISKALAAMNQALIWALHEHRQVTARQQQGAVEVLFDHGAQHKAEQDGRDREFHAVMRMAPSHTECASTSQIWKRLFWVLNTPTAMKNRADGNRKRYGTCMQLDPDADQRHVEHHQQHVADPEAGDQAPEDVRMLGDQLRAGLDALDQQRAQDQRHHRVAGNAQ

SEQ ID NO: 985312 - protein, 65 aa, Homo sapiens
NIAELFAVCKTMRALEKATSRTVSPPASTLQPVPWLLVQYEAAFRQVQASEISSIDEFCRKFRLP

SEQ ID NO: 985313 - protein, 122 aa, Homo sapiens
VILEDPDRAGGGFLNAILTAVGRDEPAIVAVTEVHTGCAVDRLTVTSICTGFTEERFDESGMGKGIPGWLDISGRQWLRKRLQQCRHLLCLGEEVRLGKTALPSAASPAIGSGLGLWGAFSR

SEQ ID NO: 985314 - protein, 33 aa, Homo sapiens
QVMSRGQRVAHYSYRRSQKEDGLADFRGFPLKV

SEQ ID NO: 985315 - protein, 70 aa, Homo sapiens
TCTDGWTYSCIFTSSWSISTLGISGVHYYELCSYGTPRLIRSFHYRTLLLGLALCQGSLDIFRSTQKTDS

SEQ ID NO: 985316 - protein, 34 aa, Homo sapiens
GGGYLIYAYFHDQASASWNPRRLKVSCAAIPLHA

SEQ ID NO: 985317 - protein, 105 aa, Homo sapiens
MCDAPRQIHVTAAAGNARDGYWPAGALMETDASTGKWQELTPTLSNSCEVFPHSRTRVQAQQGDYAWALWRPYSCCRRRGQVFLGSVDFMEEPTMNASLPDFLRR

SEQ ID NO: 985318 - protein, 90 aa, Homo sapiens
LAVRLVRVSGLAAPAAWRQRCLALCVRPEGRTRTASTGDDRCDHAGVGLQYIGECVGDATRGRLTLAVVAGVRVVRIAAVVAGTAALTAS

SEQ ID NO: 985319 - protein, 43 aa, Homo sapiens
SGQVGRDARFESEAYVVDAGKRHIGGTDYYGHTSQLPKPPIID

SEQ ID NO: 985320 - protein, 53 aa, Homo sapiens
DSERVNSRQAGLKAIFFMMAVTTSPTQVPVSISKAIFSHSTSFNAAILQPVSL

SEQ ID NO: 985321 - protein, 65 aa, Homo sapiens
MAQSLSTRGGKFRLTASWAVSGCSLLYGLLSIRSTAPLANTPGAALSAGARAFSTDTTCLRQATA

SEQ ID NO: 985322 - protein, 35 aa, Homo sapiens
GFILPPILVSLPASVSGTLCPRAPPGDAALSGYSG

SEQ ID NO: 985323 - protein, 47 aa, Homo sapiens
FLARWLSSTLRSLADGLLRQKTLIWIGLVEPAQSNGGKIPQPDSTKG

SEQ ID NO: 985324 - protein, 56 aa, Homo sapiens
GGQAGRLFIAPTAVFPTLRSLARRIAPAKNPYLDRVQSSRRKSNVWENSACRLDKT

SEQ ID NO: 985325 - protein, 63 aa, Homo sapiens
MLHPRLIIAVTLNEASPPLAGVYVYATLVRALISYAAFMLAVVADAATLLGGATAFCDDVDFS

SEQ ID NO: 985326 - protein, 37 aa, Homo sapiens
RAGRWRTCACRLVGLSAVTQLAEPRVLSLMMGTWFLA

SEQ ID NO: 985327 - protein, 41 aa, Homo sapiens
LQLLSCEHCSTVGCLGGGVAVGGAVVTLLLPFLPCGRTYSS

SEQ ID NO: 985328 - protein, 36 aa, Homo sapiens
MGRADSAIIKVGHNGKSSPSGEKRRRSKFGDNAARD

SEQ ID NO: 985329 - protein, 101 aa, Homo sapiens
KRGQLCYKVAFAEFGEYPSKCSPSMLIRDARPEDALCMGVLGMQVFLDTYATEGIRDSIAAEALQAFAPQTISALIAQPGTAIIVAESNGHLVGFAQVAMD

SEQ ID NO: 985330 - protein, 34 aa, Homo sapiens
IVRAFLCLYLACRLSQIRCGGEPVQAPCSMQNTK

SEQ ID NO: 985331 - protein, 38 aa, Homo sapiens
LSAIMGVDDHVGLQQGAFQVDSGAHSEPCRAQRCRASR

SEQ ID NO: 985332 - protein, 63 aa, Homo sapiens
IFRDLIESTTHDPYPYHQHYHYSLSRTTTHDPNPYHQHDHYTPIEQLTDRNTTHYPYPYHQHY

SEQ ID NO: 985333 - protein, 66 aa, Homo sapiens
MVLVRLSQLIPDRSQLSAVTTPWGIELHKDVFFLIKSHVFTVLPNKHLDRLLVPILRQLLAHQVGL

SEQ ID NO: 985334 - protein, 38 aa, Homo sapiens
CCSRGSRRSQEEEPDSKKVEEDLKADEPSSEEGDLLHD

SEQ ID NO: 985335 - protein, 89 aa, Homo sapiens
GNAESHFMNKSTYDSGPTSSTWLMSRIQATSPIVPIQDNPGRSIPFHHDRVVRITLRALIVSIYEAHFLMLTILLPSSSTSIVYELTPC

SEQ ID NO: 985336 - protein, 34 aa, Homo sapiens
MKDQPKRTRTGWYHGNPGKRGLQKGEVIFWRVPE

SEQ ID NO: 985337 - protein, 58 aa, Homo sapiens
SYKSTKHGKKDTIIIHSTNAVRFKLTVVHGLGNLCSSQNSHIKMKATKSELINYINTW

SEQ ID NO: 985338 - protein, 77 aa, Homo sapiens
AFFGERALLFCEARLVCRSLNRGHFLWSRVPAVEEEYPARFRLFFNFLLVHGIYSDTPPQFLKFCLAERGGSVIQAL

SEQ ID NO: 985339 - protein, 32 aa, Homo sapiens
MCPAAHWACLITQQWQKEYLPDASYHSILSPH

SEQ ID NO: 985340 - protein, 87 aa, Homo sapiens
VPKNQMFMSPRGNSALPVNSYTTSTSPAEEQAEVMWSTAMPVEEPATRMLNPRIPVSVYESQFCLASKGMRVLPPEERSVHSEAFSF

SEQ ID NO: 985341 - protein, 44 aa, Homo sapiens
SFYTEERVIPREPVFTGHRVTPGNRLSPGAGIHWGTGYTRGNRI

SEQ ID NO: 985342 - protein, 118 aa, Homo sapiens
MRVTRADVPKEKAGWGEEAGLLSLSGPELMPLLSLISNTPWLFVLSSASCCPISPLYIHLSFSMAVSVSLGFSGRPLFLPCHLSRYIQLWGIRLAVDPARRLQALSTGLIVGQQSVDL

SEQ ID NO: 985343 - protein, 44 aa, Homo sapiens
MLMANTESECRSVLPYSLCLIFLTTLSPFSLHQNSFSPHSFILV

SEQ ID NO: 985344 - protein, 71 aa, Homo sapiens
VKRAINVTEEDKYSDYGGLNNNSYILPGSYLEPCELRLLDVNESSSTPDGSPHSYNNYIYKTSCTHELSPH

SEQ ID NO: 985345 - protein, 86 aa, Homo sapiens
TQARAPIRLTREDILLVGYSYCVPAIGPWKPYSLVMRDVYSLRNVLEGLLVIEAKVRALDSSQGLILSSCGIVSPHTTTFLFSCPP

SEQ ID NO: 985346 - protein, 88 aa, Homo sapiens
VVNRTDSEDNGAIRIVLLLTCVIITSVSGILLVEVQSVLSDSCSILDRPGRQGDTPAAVDISLRISDSAFCSVQIQTVLSVPLCEWLV

SEQ ID NO: 985347 - protein, 47 aa, Homo sapiens
LQNYAWTFYFCAPPWGYAPKTHWPSNDMCAGIASQVARNSELRSTIL

SEQ ID NO: 985348 - protein, 98 aa, Homo sapiens
ILTCRRGENPVTGLTQIHTPVPNCWTKTTNTTEKSYKTEDNSEVKTAKSGVDDPKARLTHSMQKDNDDNHSNNNNHNKTKVQVKSSAWGVQLQAGEGA

SEQ ID NO: 985349 - protein, 50 aa, Homo sapiens
VTSGPLFPESDIHISSRNTGQRAVLKDTLLPLVASSKLLAASLLEPSLSA

SEQ ID NO: 985350 - protein, 47 aa, Homo sapiens
GGEGLRRQLTRKQRITETESPYQELRGHEVSDVYMRPQHTAGPYYKL

SEQ ID NO: 985351 - protein, 53 aa, Homo sapiens
LTPGTGMPTDKKKVWAITPGDSKKQSRIAVARCFNSCAECWGRLEGVCLPVLV

SEQ ID NO: 985352 - protein, 49 aa, Homo sapiens
AGITGMSHQAGPPRALSVGELWGSTLSSFTRPGEVPLLVDRFRSFQQEE

SEQ ID NO: 985353 - protein, 111 aa, Homo sapiens
TVRKSESLLCPDISQTNREDEKMCDHLIRAAKYRDHVTATQLIQKIINILTDKHGAWGNSAVSRPLEFWRLDYWEDDLRRRRRFVRNPLGSTHPEATLKTAVEHATDEDIL

SEQ ID NO: 985354 - protein, 118 aa, Homo sapiens
MILRISVVHCYPGKPSSYNYYYYYYYYFLRRSLALSPQAGVSLYLPRLECSGTISAHWNLCLLGSSNSPASSSRVAGLQVHAQLIFGIYSRDRVLPRWPGWCETPDLRQSTCLGLPKC

SEQ ID NO: 985355 - protein, 78 aa, Homo sapiens
QDYSIISVPLPTQMRVSSYIRYKQLEWSLYTALCAEGKLPLVKNKGSEGIGPPHPDEEYNDNDNIYRSTECVAYGSMF

SEQ ID NO: 985356 - protein, 100 aa, Homo sapiens
ITFTSINQLDQQEKVVGCIATMFRDSNVQEEISREKKKCQSKIKSQSTYATTEHGSSYIFIQPVFIQSSRYMSRCKSLAPLLPFLYPSYQNFTYQSRIYL

SEQ ID NO: 985357 - protein, 143 aa, Homo sapiens
STVSVLVNFFFLRDSVWSWWSRRECRRKIILPGSRKLRTSKDPPILASSVAGTTGAHYYTQLLVYLLILEMDSGSVARLEGRGAISAHGNLRLPGSSTSPASASRVAGTTGTHHQAQLILVFLVLVETGSHPVGKAGLQLRTS

SEQ ID NO: 985358 - protein, 78 aa, Homo sapiens
AVLRIPRCLVQNTENGAQCRACCWQRAEGRAAQLSSRSSGKPSYRGPCVETNNEEHGGPVGTPTTLHSLHVTMMDDLA

SEQ ID NO: 985359 - protein, 62 aa, Homo sapiens
MVSGKNGRNTGKQEVTTGSSRGHEGTGEGAWDGDGPGRTATHPWNHSKGSRILILILTIWPG

SEQ ID NO: 985360 - protein, 53 aa, Homo sapiens
LDLLLLLCPWSLLVCHGEGKDLCLGVTNAWKLYLVPHGFIWHQTGDPWVLPSH

SEQ ID NO: 985361 - protein, 83 aa, Homo sapiens
MERRRSALRHIGIDILIIRVLIYRRERRKTDFLFLTGKGMTHLRQTWKPKIEVHIMPPLESLDQPPRLQCNGALLAEAVRIAR

SEQ ID NO: 985362 - protein, 52 aa, Homo sapiens
VTSLSSTEADAVVELVTLHPRQVLCGVKARLCFSKPSAASGFFKLSSGSLIL

SEQ ID NO: 985363 - protein, 81 aa, Homo sapiens
RNSRSRPGCPYCLVEGELDLWEGAASCIAERARVRWSVWKEEGRDEVERGGRSQRGIWPQTALANDQDRQAVWCSGCSEGR

SEQ ID NO: 985364 - protein, 34 aa, Homo sapiens
MAAYPSDTQAIHVPKQIHGLSPRLSLQTCIAVCA

SEQ ID NO: 985365 - protein, 55 aa, Homo sapiens
LGRIGEQRTLYRQYEVYTSYRYIVFKETSAVAEIASLVSLTISSEVVPPLSGLVL

SEQ ID NO: 985366 - protein, 53 aa, Homo sapiens
YLWTKRRERAKSVWYYFGANGKAYKRSDSATGDVSLKTINGKKYTFNTDGKMQ

SEQ ID NO: 985367 - protein, 45 aa, Homo sapiens
MRPRTELLKKILNQAARVLRIRRLNVRRMDRKDSLLLLLLKLLKL

SEQ ID NO: 985368 - protein, 72 aa, Homo sapiens
SIRMSGHYQYPKVPEIQYVPIHNDEFFNCKAPYLPLGTHIKGHSGKPTMHQYHISAKADLSDKFFATSEGFN

SEQ ID NO: 985369 - protein, 84 aa, Homo sapiens
ALSIVDKNWLMQTANGRRCQQRMTLWYLKDYGHTIVVTVWQTIREVFAMLASLSGNEYEHVLWQDDFDNTPPNTLLEFIQHDIL

SEQ ID NO: 985370 - protein, 39 aa, Homo sapiens
MGPTTTKNASNSNETGGGGPAKWYPRLCPNMGCEQGDPS

SEQ ID NO: 985371 - protein, 107 aa, Homo sapiens
SSSAQQSLLSWLIREEQQHSSPGGMHRQTQRRPMDDYEGKDVATRVGEAWQESLELQEVAKETQLYPLINLQIPAPQSGRAAPADLSNLSDKRVVAAACRLIHTGGT

SEQ ID NO: 985372 - protein, 111 aa, Homo sapiens
GYLASPSQHEPTTGTRVRARAVQALAHLARPASRSSLDFMHLVPVSHSFPISAASNFLHLSKWGMQLTCLFRHCFSAISTKMSKHFALQHPKLHSTGHSSVFVPLLSHSPL

SEQ ID NO: 985373 - protein, 38 aa, Homo sapiens
KSRYWALSKGREGYIVECALNLDLTGEPNGTRNVSYCF

SEQ ID NO: 985374 - protein, 79 aa, Homo sapiens
VTPPGYLQKNLSHAVLRNAALLRWAQSLWQKSWIGVQRGADQLCNPAGTAKASALPPAKCPICSQVCTGPLSALRHAYQ

SEQ ID NO: 985375 - protein, 130 aa, Homo sapiens
MWLAQRDSQELGLRFWLRTFGGFVQLVLHYGNRKNLFAVPKNYKNTAAGGEEESLPGRIGPNNVCRCPALKDPERDFASFSVCCAQRGPSREHCMEGGRSSLAVEKPDTLSLSQVIKVNIDNNKPVRQHI

SEQ ID NO: 985376 - protein, 96 aa, Homo sapiens
MAVMVKVFAAEMLNFRVGKVVTGPWLEIFTLQYQRYCLPRNSLRRTEVFLSSWRVGCSMEPTFFPFLAKAVPFPQPIGATLVGLEVWAEVFPWVPW

SEQ ID NO: 985377 - protein, 88 aa, Homo sapiens
SNTRTALQLTRGPAGQEAGTDAGQVWDPALLPQLGHDGINPREACLALSPLGQGLRIAVPGDLDADGVPLHAVKPGVVGSCRVEELSP

SEQ ID NO: 985378 - protein, 32 aa, Homo sapiens
FKTEQKQKSEKSNPHVMDQHWNYILGDSSSQE

SEQ ID NO: 985379 - protein, 37 aa, Homo sapiens
MAALGPKGGRTNLLLGLGKRQTSGYPGPASGYHLLRE

SEQ ID NO: 985380 - protein, 57 aa, Homo sapiens
RIRYAFISVIIFDFLSHIVGSFARSLNRNRVSSVDPAAGQSLSAFPMSAAFHSLEQL

SEQ ID NO: 985381 - protein, 104 aa, Homo sapiens
MRSTNCVLGFSYILKVLFIHLTNINKGLINGPRNIGGIEGKKKNINSVNITESWEVVYHFQNEVILQMSETPGSITMNVFIIISKVKNSNNSPHTQSELYMKTA

SEQ ID NO: 985382 - protein, 53 aa, Homo sapiens
SLLSFFPFISLLSILGRSFFFLLSPVLLLLHHFFLSLFPAAFSSTFSFYSFRS

SEQ ID NO: 985383 - protein, 61 aa, Homo sapiens
MRLSALFSPFELVFIYCCYVKVNFISLACGYPVFPATFVKNLSFFPLNGLGSPFPKIPLTI

SEQ ID NO: 985384 - protein, 120 aa, Homo sapiens
GLYVICNNFFETEFCAVQAEVQWRDPGSLQPPPPGFKRLLCLSLPNSRNHRCVPPHLDNFLCIFSKDGILPCWPGLSNSWPQAICLPQTPKTQSAGITGMGHHAWPNVTNFFFFWRLHFT

SEQ ID NO: 985385 - protein, 72 aa, Homo sapiens
LYNILGASKGKEQDYQANGKQKRTKVASLILDTTDYNNGQKGQRRALHNDKGFNSSRRLNYPKDTCTQHWSI

SEQ ID NO: 985386 - protein, 37 aa, Homo sapiens
AEPVLSQLRYRSSRTLYVPCPPPPSTDTSSGYKGKTR

SEQ ID NO: 985387 - protein, 106 aa, Homo sapiens
MLNSAEQVWEAAKETEIVVVVDEERFELWISEFERLFTSSGIRYVVDPYLPFGSSGVMEKLLLLVLLLGASGAAQPQSFEMPLPPAQILPASIATKLWDADPRVES

SEQ ID NO: 985388 - protein, 77 aa, Homo sapiens
MMYDDIAYAEDNPTPVNCDATVPNGTDVYQGVPTAYTGEDVTPQNNHCCAERRCRSTVKGIRSGKVHEKRAPSASRV

SEQ ID NO: 985389 - protein, 34 aa, Homo sapiens
PRYPQDESPTTRTTFADGRQVTSTSIGHQGTPAT

SEQ ID NO: 985390 - protein, 37 aa, Homo sapiens
MHPVKLKVPCEDAGYPRQDGNDPMELYSSLVLGFGNT

SEQ ID NO: 985391 - protein, 126 aa, Homo sapiens
ADFRSLTTGALWRSSFPLGMGLPESWAAVIVIALLGLATQLGYQAWDAAGECLRRVLCCDPSSGLPAMGSSTCSAGGGGGVKWTLGGSLVVVLLSALAFSNAGYAAVKLSRGQTRDLWTARRLRCL

SEQ ID NO: 985392 - protein, 48 aa, Homo sapiens
KHRNHKLLWRGRRWLQEERLARPSHRNQGQDKVQRNKRGSTERSSLGN

SEQ ID NO: 985393 - protein, 31 aa, Homo sapiens
MAELALHGVPLALGHSNMLCPRVSPFPPWPE

SEQ ID NO: 985394 - protein, 34 aa, Homo sapiens
RILKVAGPFGLEDQRYKAEEGQELDSKENDLLVT

SEQ ID NO: 985395 - protein, 36 aa, Homo sapiens
MVLQEILGLARMLGQMLINVADLRARGQGSSPVAMQ

SEQ ID NO: 985396 - protein, 120 aa, Homo sapiens
VRLILFTKHPRNHPHNSHGPMVGAQPLYISTGATFQKMFFLIKHGKNSTLREEKRLKKGLIFPGGEKRLKPLSERFTFLKCIYFINHRLASQTSPQRHLADRDILETHWRQLIYLPLLQD

SEQ ID NO: 985397 - protein, 108 aa, Homo sapiens
VWRSRGSLHGRRRRHLLQSESPGCMPQPGGNRLNGTQEMGPVGMTENCNRKDFLTCHRGTTIMTHGNLAQEPTDGTTSNTEMCEVGQVCQETLLLLDEDSHQPCLRTY

SEQ ID NO: 985398 - protein, 36 aa, Homo sapiens
HRFAGQHVLMKRLHARYPEDLANVLIDVGGYITQQI

SEQ ID NO: 985399 - protein, 65 aa, Homo sapiens
MLAGRKAALFLQRFDSIDTTGPAVLASLFHPSVLYLPFPHVLEFLFLRTPESQTEGPGGDGFLDW

SEQ ID NO: 985400 - protein, 104 aa, Homo sapiens
MLSHHPFLEHLCFLLQDLHKLKVQEYLMVQERDLKPELFVGAVVAVTVLELPLLDELDEPPLLLDAVEFERVAIEGVALDTVDLTTTVEVPGIIISEGAFSPSI

SEQ ID NO: 985401 - protein, 32 aa, Homo sapiens
MVRYASFSFTFHHDGQFPEASQPCFLYSRRTY

SEQ ID NO: 985402 - protein, 138 aa, Homo sapiens
VGDLEDPTYMAVHIPYDLTTRCPEHIQQSVAAEPNFCWLILVPLTVRLIDRPTISCTLASGARCINYFESLYCPRKVELINLLSLFLSPYVLYHFLLPPFPYFLLFVPCVLPDLPFVSSLYNPILCYLTQCSLPLLSF

SEQ ID NO: 985403 - protein, 142 aa, Homo sapiens
MAVDQSSISPGNRKALDETLKKALTVHLEEVVLALVKLQRNCVLMNFVLPGRGLEPDEDTLIGILASRTNKEIRDINRVYREELKRDLAKDITSDTSGDFRNAWLSLAKGDRSEDFGVNEDLADSDARALYEAGERRKGTAI

SEQ ID NO: 985404 - protein, 34 aa, Homo sapiens
HGDGSCTFFRGSEKLLEVGSPGSSRRKQGLGIFA

SEQ ID NO: 985405 - protein, 43 aa, Homo sapiens
LEIRLASLWNTRDFAQGLVSLQAQDHLPKVQRQLPGPPQCCLL

SEQ ID NO: 985406 - protein, 50 aa, Homo sapiens
LDDRLLNGCHSLLASVQMKLLQFVPVILFQSDPSITLLSYPRVSKETLLR

SEQ ID NO: 985407 - protein, 100 aa, Homo sapiens
DPKYAVSPWCAGICLNFVYDGLWYDFCLTRPDNSQEFGRQPRPLQPCDSFDSPTYMLPTCCCKEGHHMLLKYCSENTEVNIIIITCNWNMAGSHLWKISM

SEQ ID NO: 985408 - protein, 57 aa, Homo sapiens
MKCRCSVHNPEPENQDEHYHDPQEFSAYVFGKQHANQLLCPSQGSQVCKELRGAPIP

SEQ ID NO: 985409 - protein, 71 aa, Homo sapiens
VDCIRIPHIDLIVRIDRPSYRDRDYDNPTAAGGRLLHLMEILNVKNVMVVVSRWYGGILLGPDRFKHINNC

SEQ ID NO: 985410 - protein, 45 aa, Homo sapiens
QGSVYESDQLRYAYGTATLDCTARMMSDIECHTLVDVTLVSDSLY

SEQ ID NO: 985411 - protein, 117 aa, Homo sapiens
LYNVSAILLHQQECMGVGMVAQIASLQSIVSQGSIFICELEMKSQCKSRQRNCSKSRLLSCYVRRFQAIKVELWHCELYRLLSGLQQCSHICKVGEPLSIPRHFMFKPSTSRFSTSK

SEQ ID NO: 985412 - protein, 70 aa, Homo sapiens
LRTVYVHDQDVFEATREQYKYCVLCGKDIEPSCVHFEISCVSLNMLITSEPCEIVPCVAEDQSMLRFQGV

SEQ ID NO: 985413 - protein, 98 aa, Homo sapiens
MRSGTSLVIPNAATLVTLYACETAYICFCRPSIRCGQVCEMQVLEFTSSLPFKNVHFRDRLFSVTEAGVQGLHHSSLQPPTPGLKRSSQLSLHSSWDC

SEQ ID NO: 985414 - protein, 99 aa, Homo sapiens
MKYSLNVTEHLLEKLTALHWAVLLGADLLRVEGRSGLFLPELWHQGYSRAWGLNYSSEPVPPDRAHYIDDDKFSRVCHDLEGLLVFGMSCRVIGHLTKA

SEQ ID NO: 985415 - protein, 90 aa, Homo sapiens
PGELRVRGVDARSTGAFRVYTIEDGNKQNTLEPEIDPSSNTSKYPSQETSGLHEYLCRMRSEMILWIIPAGCHCCTTFSDHIHLCHYAYM

SEQ ID NO: 985416 - protein, 43 aa, Homo sapiens
MSKDSLWNSGFQCQCFEGDYEEAGSTILKSFGKAPNNIVNSGV

SEQ ID NO: 985417 - protein, 72 aa, Homo sapiens
RERCDLNTLLIEFSLLTYPISPLTIATFHRAVGHQHNICKKVNAFSTDLSPSGASPESPFIADTPKSLSSST

SEQ ID NO: 985418 - protein, 68 aa, Homo sapiens
AHRGGWLPPSPPQGRKGPRQLRYHTHYSTALAAACVQILFTYAASVFDPSRTAKDLTDSINLAIPHHP

SEQ ID NO: 985419 - protein, 56 aa, Homo sapiens
MSCASDKSSLVTNTNRKKLKKAGVMVAHACNPGSWEALQGGGSPYGREYTTSRGNL

SEQ ID NO: 985420 - protein, 72 aa, Homo sapiens
MHRYYIISRLICQILSKTKLKSKLTEKVDTFYSHLILVNFPGIFGQGIFPNRNDNTIPDSRMLSRIPSCLYR

SEQ ID NO: 985421 - protein, 60 aa, Homo sapiens
PWSCLVTYKAQLELVASRAKKPKVQSGSESVIQEYVDLRTHYSELTTLTSQHNEPHEHKN

SEQ ID NO: 985422 - protein, 64 aa, Homo sapiens
VLEDTFLCWRVVLGVASVVAWVLAWWWFAGGDGFWWAEGSNSLNTEKTLCDNNESKTGPDKNHT

SEQ ID NO: 985423 - protein, 82 aa, Homo sapiens
CGSVLACRNFKTIHHHQGLPFSTFVYLTVILTGGHWQQGSGRMKLVPGNGIGIQSRLAFQALNAAGMKVKSFSSVPTSKEPH

SEQ ID NO: 985424 - protein, 37 aa, Homo sapiens
DLEDPFLCWCWSGGMLVYRGSCSQTGASSFQLFPSKE

SEQ ID NO: 985425 - protein, 94 aa, Homo sapiens
  misc_feature (76)..(76): Xaa can be any naturally occurring amino acid
  misc_feature (81)..(81): Xaa can be any naturally occurring amino acid
EDPRGVLMRVCGYIGVGESERKILTLVFLAWEEPSFFHYIIILLSSCGADPYFYPRSGASARQSKAYKTKYFSFRXHLCSXDGQTRNSRPSQSS

SEQ ID NO: 985426 - protein, 127 aa, Homo sapiens
SNDVTSNGISCYLLRITYILQSKISFLISLLSVPSVSTPSSESFTISLFLCATLSVPLPVLTHNRYPAPRPRRGPTFFLQLPLSHPYNPLYRPRPTHNAVHAYSFCVRDSALPNQFPLREVAGPIFR

SEQ ID NO: 985427 - protein, 35 aa, Homo sapiens
TESLSPHQPANLPQHQRVRTEELQQIKTLNNKCAS

SEQ ID NO: 985428 - protein, 38 aa, Homo sapiens
NESTRLPYNLQNRTTASRGLRTEEREQLNTLNNKCASL

SEQ ID NO: 985429 - protein, 37 aa, Homo sapiens
ARVGIPTSCILKGHQQTEDAKESNTDKGSHYVQSTKL

SEQ ID NO: 985430 - protein, 131 aa, Homo sapiens
VLVSSPRMVGTPASWVHTLPFTRVNLAWGYIRRRREPGQAHCHQWELELVEVGSSPQLEGPWPRCLCLCRGGLGEAQHLAAVVPPGPHPWQRGGGGGSHGGLEDTVGLDGSDDDLLQLLQSVSLVPAFQHK

SEQ ID NO: 985431 - protein, 44 aa, Homo sapiens
SRGPDMCLTWHNCYSLAGPVGELSQFTVICIGYGFSTETVSPSW

SEQ ID NO: 985432 - protein, 35 aa, Homo sapiens
AKITSDPVIVRTITYITLSCRYDGFLEDVKTVGLD

SEQ ID NO: 985433 - protein, 112 aa, Homo sapiens
LGNEAGVWCCCRVKAAMGQDAGLLNLAADEQKGRTHLLPYSTVCKHKKARPVPGPGAVLCPPLFVLALLSAAMQAVAGQGREAIAGRDDVARAGQGGIFSDCTDKAQERDSW

SEQ ID NO: 985434 - protein, 44 aa, Homo sapiens
HEQEPSMHAWLKVDVYHHCGACLPVQVRRHVSTVLTIQISLSWS

SEQ ID NO: 985435 - protein, 69 aa, Homo sapiens
QYPSMHACVQGRRVYTTAVHASLNKYRRHVSTVLTSKYVKLEPGRRVFNIAVHVSLYKFRRHVNTVLHS

SEQ ID NO: 985436 - protein, 46 aa, Homo sapiens
MNSLTLRLSFLALLPMTKVKKVVTTVINGLLLALSDGSAAFFRGEQ

SEQ ID NO: 985437 - protein, 32 aa, Homo sapiens
CGSFLAVNTEVNSTKIFPQPGTSTPSTVPGES

SEQ ID NO: 985438 - protein, 56 aa, Homo sapiens
LVWLQWGCVDGNQPKESTLETLHPARVWVAWVCHSAPAPAGPTPELRVSDVTQCLA

SEQ ID NO: 985439 - protein, 79 aa, Homo sapiens
TLEDDKSSVIIYTELYSSRTKLYKLVHTDNTARSHKNYEPHIPRQYKYMVELTSIHITNLSITYYNNWPRYPNMKLHSS

SEQ ID NO: 985440 - protein, 59 aa, Homo sapiens
MLNLLGMQPSRSQPYFTQPLFKNGVALIQITLTLGQTPRTQTQHGGKRCIASGLQVKDE

SEQ ID NO: 985441 - protein, 78 aa, Homo sapiens
MEQALHMWVEEMNRKRVPIDSNMLRQKALSLYQDFCKGCSETDTKPFTASKGWLHRFRHRFSHHYKKKKKGKYVTTSY

SEQ ID NO: 985442 - protein, 59 aa, Homo sapiens
RYLCGAEAAEAVATQETRAQVDEGRSFSPSTTVVAPSFLTSLGSADPALCSWTYTPQRE

SEQ ID NO: 985443 - protein, 72 aa, Homo sapiens
PDLSVGDHRKSLLSSHLEHSRAHGTLAQGSLTDSLPDTSMAERLKNDTYLIASEAPWTITDAELPVNSQSGR

SEQ ID NO: 985444 - protein, 38 aa, Homo sapiens
MQHSDDRCTFADMMIASNISIYTQIVVGPQIDFNKDRL

SEQ ID NO: 985445 - protein, 104 aa, Homo sapiens
NTITGSQIQAFIDDTSNIQIQSEPVDVAYREKVPVLSLKSVVPIARAYPRLIASLEKYCALSARIEAGPLMGDIVGPCFAKDLAMKKRVALVLGSGGARGYAHS

SEQ ID NO: 985446 - protein, 35 aa, Homo sapiens
MRAHAWQGQSADSDPLMTILGKSSKCNLQWVHLTH

SEQ ID NO: 985447 - protein, 114 aa, Homo sapiens
IQRHATVKHVHESQQDVTILIQYHNDEQTDLEDLLLGSDSETHVQQLTGLRDASGVSFNWTPLKWEERCSRTNLAFLCGFYRVSSVLPGCAEPCNHGKTFNCTACLPRVHTYLG

SEQ ID NO: 985448 - protein, 64 aa, Homo sapiens
MSPSLEAERLQTIYLQVDRFQTLMTTEQPRLRVPGCKPDLDVQTKLYDCLEEHLSESNSSNLNP

SEQ ID NO: 985449 - protein, 53 aa, Homo sapiens
SAGSTDWGSPYCCSQPGCACWHFLLLLPAPLPIDENGQGEERRELSVCTAVRW

SEQ ID NO: 985450 - protein, 45 aa, Homo sapiens
SWDGWAVLLVPASDPGTVVAGLHLVAQTVRDLVYHVVALHRYCMV

SEQ ID NO: 985451 - protein, 135 aa, Homo sapiens
MTDVVYSTAVTGLLSTGGNEGPGATPSRGCSRESSSPKQARWGCVCSVTCAPVNRLGAQLLRNLSLRRCCKLSFPCWASAGTELGFSSSGQSCDLQSPPSLELRAERSQNHREAGDRVVCMSLGFRIQTKGRSVY

SEQ ID NO: 985452 - protein, 67 aa, Homo sapiens
LYRSPRANHLDVNATYRKQLEGDECRLNWRWPWTSQHLCGAVHRSPVVYGRCQVVSARGFRPVVELS

SEQ ID NO: 985453 - protein, 144 aa, Homo sapiens
RVHITCIVSEEGGDSSWEVKGRAHRVLCLLSHDLQLSSPPLPTIGDRAVLTCSEQDGSPPSEYTWFKYSIVMPTNPQITRAFPNSSYVLIPTSGELVFDPLLSLWILDHFRCQARNGYGTPVTSNAVRLDAVERNVRVIVAAVL

SEQ ID NO: 985454 - protein, 43 aa, Homo sapiens
LTSELPRLQRKLQHDVLKLEFERHEPVDGRSVLRGSLVACYLP

SEQ ID NO: 985455 - protein, 63 aa, Homo sapiens
YVDLEIPSQTYLSIISLLALGFIVGLGQQHWVLLRCHAQARCTNRSGARIFSTVVPTLIVSRL

SEQ ID NO: 985456 - protein, 46 aa, Homo sapiens
LLLEIPLQVQPLFSDGGAAQKLSDELSCNQTGEGQAERPPSVHQTV

SEQ ID NO: 985457 - protein, 75 aa, Homo sapiens
NAQTQGIGRLFGAGGAGYSHADLAGVPLTGMNPLSPYINVDHENTLRVGYTLCTCTHTVTITHRVIFHLTFCTMD

SEQ ID NO: 985458 - protein, 43 aa, Homo sapiens
LLYRLSERLMELLISSAVWCKDISASSSLLGIFTWSVTGGRRE

SEQ ID NO: 985459 - protein, 73 aa, Homo sapiens
ACSDDSVSICASCATTGRTKAGTQQGTAAAYQEIDVNWSTNYAAHTNEEKDNAEFKLQLKGSPPGIFQSYALA

SEQ ID NO: 985460 - protein, 59 aa, Homo sapiens
DSPDNGRSGWERLRSRGRRPRRHWTPPLSGLPHSCTYGQPAPSRDLNPTAYTVLRPENA

SEQ ID NO: 985461 - protein, 59 aa, Homo sapiens
ILEDPSFRSLSVCCFLAKVNLLVMVWPRSSAGTKEVLPILLHLRDDLEVAGLFDYIAGD

SEQ ID NO: 985462 - protein, 49 aa, Homo sapiens
KLDLADDANLLCCLRQPRSLNDASCDELRSPVFLASSSCRNRSGGNNVP

SEQ ID NO: 985463 - protein, 89 aa, Homo sapiens
ILVMPWLPRIPVRRRQTGTPGECGMRFGQEDITRDRFRINIPPDIDLTVAAAPRSVQLVNQSAAAFIAFFKKLFDLTAVMPFGACKDIG

SEQ ID NO: 985464 - protein, 52 aa, Homo sapiens
APTDVLQVTAGRHGDDHAQHQRRRLLEINRMIQTAEHLSIDHDQDSSCANHA

SEQ ID NO: 985465 - protein, 103 aa, Homo sapiens
FSLEKLLAAGSLTALTAESPPEVFGAYCWRELKRLGHLRGCCRSFSYDCRPFQLKILLQSPLSSTKQSSDISSTRGQGAGVRHLGQVHLSSGIRDLPHRESVG

SEQ ID NO: 985466 - protein, 108 aa, Homo sapiens
GQSDVRAMYGCGDRLPTATLLEGEELPAEWLHGVGHMSTISVVQSTVSSVYGGASGVGSGLGPGGAKQLLLWQWSGREESGYQFQHREESLRVASASLGCGSSTIKYI

SEQ ID NO: 985467 - protein, 127 aa, Homo sapiens
RGQSDVECVKKHLRWAMEGPASSYSVLGDSTSAGTVDSEVTDGCRRVHSRSILRSGRWRVTLDLSWMHGVASAGDLVICMSVSVSQGYIVVCRRLPESSTYAVLVLAGGVKGQHGLDGHVLSRTSVL

SEQ ID NO: 985468 - protein, 91 aa, Homo sapiens
TSYANVKQWLQEIDRYARGNVNKLLDGQQELHSPPKKVVDNNTAKEYADSLGIPFYGDETPSMPPMSNRAVHEHGCCLGHVSDAHSGVPNM

SEQ ID NO: 985469 - protein, 46 aa, Homo sapiens
GVSRMWNQHLGYVLTWPSNLGTGLRGGVHCYNWRTVSKQPKFEVDP

SEQ ID NO: 985470 - protein, 55 aa, Homo sapiens
TEFSLWGWTLHLLGPRNEYQGQVLCVHSWGSCTSCDDVQGLGREADTLGETGSVP

SEQ ID NO: 985471 - protein, 125 aa, Homo sapiens
RASYGCGDRHLPQLLEGEECRLNGKALRQVNVSVVQSTISSGYRGASGVGRGLGLGGGSSYSYRSGLGIGGGFPSSSGRAIGGGLSSVEAAVPLIKYTTISSSSRKSYYHHRAASSSRSHIRTGP

SEQ ID NO: 985472 - protein, 133 aa, Homo sapiens
  misc_feature (62)..(62): Xaa can be any naturally occurring amino acid
QYGCGIMLRLQLYRTAMMGWGVRASADHPIRVTFICEYVGELISDAEADVREDDSYLFDFDXKDGEVYCIDARYYGYISRFIYHLCDPYIFPSGFFMLHHDLRFPRIAFFSSRDLRSGEELGFDYRDRFWVIV

SEQ ID NO: 985473 - protein, 87 aa, Homo sapiens
WTDVVVGDDLVAWHRTDRLRPSVEMWMEMLMSGKCEGCSSLQERYARCLCWAASFHSSDPPATPGLRSIMAALIDCASHGSHCAVAM

SEQ ID NO: 985474 - protein, 38 aa, Homo sapiens
YRFLSVGGHIEDSEVQDMEEADGAQKHRCTPRMSIRKT

SEQ ID NO: 985475 - protein, 47 aa, Homo sapiens
PATDVEENMCPAAVTRMTCQLQVQAEQDNLADAEGALCISCIKQLVF

SEQ ID NO: 985476 - protein, 112 aa, Homo sapiens
RQFVCFSLSTSWVALNSWEISKGFLVADWMENNVGGGEDESRTEGKTRGGHKYSLDVSCLLVEMGSLGCVTSGLCVISDLHLTLGFIVVFNLGLVLVLQFDLRAPGLIHIRT

SEQ ID NO: 985477 - protein, 40 aa, Homo sapiens
RVQINEDAKWEERGSELAEMLPHLRHECKLLHLTSEVAGL

SEQ ID NO: 985478 - protein, 36 aa, Homo sapiens
RVPSTDVWAMWMLKGELRARMKIPSNMWVERLAKSD

SEQ ID NO: 985479 - protein, 148 aa, Homo sapiens
PVVDSLCHPRRPCRLWYPVGSGASGIHNPSLCRAYRLLLILLKLRPWLGKPLAPAVQRLPQKGDVEMLCGGPPCQGFSGMNRFNSRTYSKFKNSLVVSFLSYCDYYRPRFFLLENVRNFVSFKRSMVLKLTLRCLVRMGYQCTFGVLQ

SEQ ID NO: 985480 - protein, 58 aa, Homo sapiens
QLLLNPEFEALQPGPCGGELGGTVGDRSIVAGRGGPDRGRGVDQFKPLIAQEHPHWIR

SEQ ID NO: 985481 - protein, 57 aa, Homo sapiens
GVTYGCGQSFSNEHYGSCFLDPIAWSLPTVKDMAPGDPCIHRSHTENTALLRCCACR

SEQ ID NO: 985482 - protein, 63 aa, Homo sapiens
LTVSLSRLPAFTRFLPRAGVFSDRYHDVCSAWRLYRLGLACTDRCSVHVFECPPPTSSGVTLL

SEQ ID NO: 985483 - protein, 78 aa, Homo sapiens
WPSRMWKEGRKQQSLRASREGRTEKVCVVWLRNPHSDGAFLVPMKDAVAGPQLTIDHQASQGPQLFSMSMVLHIPSEP

SEQ ID NO: 985484 - protein, 54 aa, Homo sapiens
HLMPWDSLQCTENPHGVKAVTSGQLLCQYALVVHPVTLEHSDAGQGAVQMTLVN

SEQ ID NO: 985485 - protein, 42 aa, Homo sapiens
CLPLWHCVLFHMDKRNNNNNAITGIYPPFVSVSYDLVHLCTN

SEQ ID NO: 985486 - protein, 76 aa, Homo sapiens
GEILIRAISIPGGIIFNRPEVNTEENLERGRRAVTHPTEAILNKNNSVTSHQKPSEQDGMVVLVNNVAFANMVLVS

SEQ ID NO: 985487 - protein, 58 aa, Homo sapiens
HLLIGGGVAPSTPDGVYSEGGMRDLGEKNDTETKYRERNKGTQGNQTLTNSGWIPASA

SEQ ID NO: 985488 - protein, 39 aa, Homo sapiens
GPTAGARCDEERLDIMKVLITGPADTPYANGGFELRLAV

SEQ ID NO: 985489 - protein, 110 aa, Homo sapiens
ETQTLPCHPNLSLTPCAPATTGSDNMTRGGTGVEVTVPAGAIWEIPRRLQTRPGPLPLPCGTRSSIRAGVHPYSASSATLPGSHLVPSIPLGSTVPTLTGFSQGMGTHYG

SEQ ID NO: 985490 - protein, 56 aa, Homo sapiens
MHIQADTHSCMHTTGEHAHRWPHTRQIHTITCTHRSTHSRMPTGGHSHTQIDTQLH

SEQ ID NO: 985491 - protein, 59 aa, Homo sapiens
RGCGLTWLVGDRAVENLVPQVLNGLEVGTVVFDLSSAADDFRTKYETELNLRMSVEATV

SEQ ID NO: 985492 - protein, 75 aa, Homo sapiens
LTQVRSLTCIEYVYPDTDKSRGLSGGKYQEHELIIIFSPKPGMIGRKGIHTTFSSAFGIENMDFPVVCSHKSLVK

SEQ ID NO: 985493 - protein, 73 aa, Homo sapiens
VRVFDRGFSDTLVAFGTDEAHCLSHGRFLVRDLPVRFGHTPPAALNMDPVRPTAAVVLSEVTGRARLHPYTMH

SEQ ID NO: 985494 - protein, 84 aa, Homo sapiens
TEKCRDPIDRTQGVVVGRAEFSILTLLPSGHVILDQRLNHVGPLFSHLYNMGLICLCKQKKDPAPELSIKDAQWAYSQHTAILY

SEQ ID NO: 985495 - protein, 155 aa, Homo sapiens
ELVQHEGGAEVHRQGGALCILPDQDTMAAVDAMLLPETLTRRRDSLEYREIGELYCQSNPSRGDYNLERHNFSSCGIEEAFISKADLSGITGDKEPTQSPKVDHTAVLDVFEEGTEASAATAVTITLLSALVETRTIVRLTGRFLMIIVPTDTQN

SEQ ID NO: 985496 - protein, 57 aa, Homo sapiens
EAGDAESVVFYLKMKGDVTTRYLAEVDTGDDQKRLLDSARSDYQLKAMDISKKEKPR

SEQ ID NO: 985497 - protein, 117 aa, Homo sapiens
FTLIWLPSAKEAVTAADIMVTERIRETDVAEKISHICRGMKSPEEMRQQAHIQVVSTDPGQPGTTNHAPLLIWGARTIRHGYAVQHRHRPCANCGKHLADFSAHYGPTIMAGGILSE

SEQ ID NO: 985498 - protein, 41 aa, Homo sapiens
PGHVLLLSSSSSSSRSSSSTSSPKPIGREMASEICWAHIME

SEQ ID NO: 985499 - protein, 130 aa, Homo sapiens
IVRLAFKEQETLIIEPEKNASQYVNLWNKKRLMNEEEGQDRMSLACSKEEDEEDDSESEAETDKTKPLDYHVTNANTIQIHNAAPDRLLQHTTADHQNQDNNLHHHIKKFPTTDYKTFLPTEDERKDESP

SEQ ID NO: 985500 - protein, 120 aa, Homo sapiens
MDWDNLMCPSLILLMKGDMGRGKISKEKSFLDLVVEEEKLNLVAPDQLDLLEKCLKNIHRIDLKTKIQRYKQSVQGAGTSYRNVPQAAIQKSLKDPSNNFRMITPYAHGPDLKILGNGSM

SEQ ID NO: 985501 - protein, 80 aa, Homo sapiens
MARLSPKGWMWLSERCVPVQRRTGADSGKWRCVLKIGEHILLKPFAIIVKMPMYLARLLPVSLPGIIGPLLPIRWSLEIP

SEQ ID NO: 985502 - protein, 63 aa, Homo sapiens
YGMDLAESHHGQSCAMLVTQKFSHEEIAMETSTALRRTVSPVVTRISFLSGGQSEEEASINLN

SEQ ID NO: 985503 - protein, 55 aa, Homo sapiens
KPGVPASELERYKLERYRGREVQLIMQAEAEAASVRMLCGKLSAFAIGCPSPRPE

SEQ ID NO: 985504 - protein, 62 aa, Homo sapiens
MVVTLDPTRDQCFGDRFSRLLLDEFLGYDDFLLSSVKGLAETEETKGFLPECGVRAEPLPPW

SEQ ID NO: 985505 - protein, 77 aa, Homo sapiens
EPSDACFTTFLSHHIWQVSLDGRSRSTTDTLCSGDTGRPCRGSSRSVSGMTIAHMPWWSPVRGREFSSLSSVDPLSS

SEQ ID NO: 985506 - protein, 82 aa, Homo sapiens
EFRLLGSSAIVLWLIPAVLCALPAVLRNYRDSEPSVDAPIVPSRRPSSSSDTGLISVSSPSELSDGTFSVMSAYSVPQYSRN

SEQ ID NO: 985507 - protein, 145 aa, Homo sapiens
NSGSLEEKCCNGSGGAGGLQHGHRLLASSSHDWDDAEEEERENEEEQAAEEEAEEDEEEEEEEEEEEEEEPQQRGQGEKSATPSRKILDPNTGEPAPVLSSPPPADVSTFLAFPSPEKLLRLGPKSSVLIAQQTDTSDPEKVVSA

SEQ ID NO: 985508 - protein, 35 aa, Homo sapiens
  misc_feature (1)..(1): Xaa can be any naturally occurring amino acid
XKDEEKMELQEMQLKKAKHIAEDSDRKYEEVARKL

SEQ ID NO: 985509 - protein, 63 aa, Homo sapiens
  misc_feature (1)..(1): Xaa can be any naturally occurring amino acid
XVGSVPHIVAGERVKGEVRIRLNNQISCELTHYHENSKEEILPHDPITSYQCPSPSTGDYNST

SEQ ID NO: 985510 - protein, 39 aa, Homo sapiens
TVDRVLLHRCSNRRITHQSQSPFTSLLFLGLWLLLALLD

SEQ ID NO: 985511 - protein, 39 aa, Homo sapiens
NSSLDFNLSWALEPQQEQLWWLQPQGQSATKADGSAKQG

SEQ ID NO: 985512 - protein, 85 aa, Homo sapiens
GRFRKEHTERILKTSTPASLLIDDVSSGSSSRKEQHFSEVTSYYTYFYCHTPSQNEDSPCDHRTAQTVIPCYQYRSINHLCFPIN

SEQ ID NO: 985513 - protein, 67 aa, Homo sapiens
IYQMESVMLMARLCLGLPRRRCTRVTRGLATSISQASGRAPPKTTVCKITVATDTDTVMVATATATN

SEQ ID NO: 985514 - protein, 73 aa, Homo sapiens
DPLNCKLPSIQRVRTRSASRSRPSTLMFASFIDKVRFLEQQNKVLETNVDPACRSRAPQPVSAEPGARCSEQY

SEQ ID NO: 985515 - protein, 122 aa, Homo sapiens
  misc_feature (110)..(110): Xaa can be any naturally occurring amino acid
MLVALPAGGGGGGVLDGRNCRRPTELRPAPVGLALLELEPAPTPRSLPVGVAASSTSGLSHCLTPVAPPVATGDGGLTLLNVDLSNAFAIQPALLALQELAVSGDLHIQXQLDVHQLLVLLQ

SEQ ID NO: 985516 - protein, 63 aa, Homo sapiens
TEMQEVQTLNNNPDIYKSDTIQYEVLSLPVKNECGVQNYKTLCKIYSSTKRTHATLTSSSTLN

SEQ ID NO: 985517 - protein, 91 aa, Homo sapiens
GGSDSLMAVRNSAIHRSVVPPLRRQESLRCMKKLACEDQDCYKPVLQVFPSSEIRVVSQSPVNVGIPWRDFRGPSGARGLLIYGSRIEDGT

SEQ ID NO: 985518 - protein, 70 aa, Homo sapiens
HYDLPALSEGKACGDHEVTEVRDQAGHHGETPSPLKIQKFSRARWRTPVVPATPEAEAGELLEAGRQRLQ

SEQ ID NO: 985519 - protein, 47 aa, Homo sapiens
MYTCAGRNLNLLDKENINQTQDMTKWILHGLAVRIFSYLCNTVFLQT

SEQ ID NO: 985520 - protein, 142 aa, Homo sapiens
RISSTESEVSPLSHRYQRFTNSAGPPPPGLRSEVQRTTEYWPWCNNLVKAVHLTGQQGYENSGPGFWTGLGTGGILGYLFGSNRAATPFSDSWYYPSYPPSYPGTWNRAYSPLHGGSGSYSVCSNSDTKTRTASGYGGTRRR

SEQ ID NO: 985521 - protein, 132 aa, Homo sapiens
KTYQNTEEGQAGWLHACNPRHFGRPRQVDHLRSGVRDQPSQHSETLPLLKIQKLAGYGGTRLWSQLPRGLRQENRLNSGSGGCSELRSHHCTPAWATERDSVSKKKKSSYVHLPSIFSPNQPQNFGLDPFLF

SEQ ID NO: 985522 - protein, 133 aa, Homo sapiens
VKRYENVKEIETQKTLQKINESRNGFFEKINKIERGLARLMKKREKYLIGAIKNDKGDITTDPTEIQTTIREYYKHLYANKLENLEEKDKFFDTYTLPRLNQEEVESLNRSIMCSEMEAVRTSLPSKLEFDLR

SEQ ID NO: 985523 - protein, 115 aa, Homo sapiens
MLSLRGFLKSRGLKDLPASASLSLLVHYQSEPPQSAPCFMSCYSIPGAYQLGPLCFLTKVSTSFMNRRHSSSSHGRAMHCTVTRSPTDPLTVSEKFLSELISVVPLVEGQFLLVL

SEQ ID NO: 985524 - protein, 52 aa, Homo sapiens
RVVHVNICMQSFEPIHVKRVFEAKLKTFLDYMLMYLEYPLDEARDEVPTLAI

SEQ ID NO: 985525 - protein, 106 aa, Homo sapiens
GLIRLLPEYQELTERRSWPWHVEIATYRNAVWRARSAGWDGEGVGQVNVSVVQSTISSGYGGASGVGSGLGLGGGSSYSYGSGLGIGGGFSSSSGRAIGGGLSSVG

SEQ ID NO: 985526 - protein, 45 aa, Homo sapiens
DGVKKVMEERWNQAESQQLPFPSDSLSLWGGDSSTSQRPIIDYNL

SEQ ID NO: 985527 - protein, 50 aa, Homo sapiens
LTERLYWGSNSFWRPALSVLGPHLHCTETSSLVSLSLYTSFQRSSMARLG

SEQ ID NO: 985528 - protein, 108 aa, Homo sapiens
MGRMDIAYWNQRSSLTLHRSSQQIVEVQAVGLRHIGVFSSETWMALCTFSHGTEKGIIFITLAIKAKSQVNEEERHHIPSDFRSYAVISITLSLSFFTHDPRLIILTS

SEQ ID NO: 985529 - protein, 62 aa, Homo sapiens
RYMRMTYTHTDNPDRKYQTALGTTRSILEQQISVVSPQKGDGNCSTPSSHSSAPNFYNTKRR

SEQ ID NO: 985530 - protein, 62 aa, Homo sapiens
ENLSLRWRLLRASSAQRTPRQFPVRKQPLDDWCHMAGLGVVLQEDLQYPCLPSLYMSSLSLN

SEQ ID NO: 985531 - protein, 42 aa, Homo sapiens
MRKHSASSSSLFPFASSFIWRTIMSKNSSKSMVPLPSSSTSS

SEQ ID NO: 985532 - protein, 41 aa, Homo sapiens
LEFSSILYSWFWHSISLLESRISLGLDAADESLDLLQLQGI

SEQ ID NO: 985533 - protein, 123 aa, Homo sapiens
APNQPLTLLGSHMRAATTCTCHHSAQLPPTPHEPTTHSQQPAAQGVLAPANCNHLSNLANGPSSSKRTSKLIPCFSFLLTLYGLANNCCPDLPGPSFYTNPGSTGAAPDCPSSGTHTSAPGTS

SEQ ID NO: 985534 - protein, 74 aa, Homo sapiens
TIKSTAGNTLLAAFFVMWDNILGTYMPYSLEREERREVSKPGQSNSRADEIIDAFLGFQLKHLFCILLIYCSDC

SEQ ID NO: 985535 - protein, 83 aa, Homo sapiens
MSDDDWLKKFTGKTLEENKEEEGSKPPKAENQEGEPIAKKARSNPQVYIDIKIGNKPAGRIQILLRSDVVPITAENFRCLCTH

SEQ ID NO: 985536 - protein, 118 aa, Homo sapiens
FVSRQEGAVQPQSLADIPLSSSDVNLSIITDVAWLSQTRLCVLGRAIDAGVTTPYEIAVDGSGATSMGQLTATSMAAVVALPKETGTEAVVLSEDGILLRHEDSFRWRQILQGVSAVA

SEQ ID NO: 985537 - protein, 124 aa, Homo sapiens
GKPILSCDGGNPCELLSLKRHAMGDESEEDERTVHVDHAFREELMTVLQAGKALGGEDSENEEEPLLWWDEAMMALDQSLASLFAERKLRIQARRDEKNKLQKEKALRRDFQIRVLDLVEVLVT

SEQ ID NO: 985538 - protein, 37 aa, Homo sapiens
ASVPSIVAWSVSHIIPTLQQLLQVPAQLAAQWFHMLQ

SEQ ID NO: 985539 - protein, 44 aa, Homo sapiens
PPDMCLITDLPYRCSELKKDTGHQRPSELDKKNLEQTVKDLQHR

SEQ ID NO: 985540 - protein, 48 aa, Homo sapiens
MRRGDLGSAGGCMVLQDQAFFMAWKREMSFPEEGFLVPSDGAPLADSS

SEQ ID NO: 985541 - protein, 102 aa, Homo sapiens
MRRPLTASHIALLFTFKFTFKFTNPGLQFLDLLLPTLQGQLLRLIQTMLQVLHRLFQVLLHPLQIGAGSPVTFFSSSDIMAASVMDFLAFSSALRASQLNNL

SEQ ID NO: 985542 - protein, 136 aa, Homo sapiens
HGLTDGILNLGILNLLSLAVTSLSAKDRSPSNCALSSLALRAWTSTSTLGRDTSTSGTLTSTLGSFRSSLGPLMSIWGPLRSILAIFKLRFSTLGKFLFKASSLGQVALRELHIHLVSLDLQVSRSGLNAEVSGLQ

SEQ ID NO: 985543 - protein, 105 aa, Homo sapiens
MTHRYSDMSVYLCKIKLILNSVIPHINDYLSTSNAHEKRPVYLQSANVLDYHKQNARGKIQAQEETLMCRAKAQNQDGDYKEIHDNPAQYTYKKHLGFLISILYL

SEQ ID NO: 985544 - protein, 83 aa, Homo sapiens
  misc_feature (13)..(13): Xaa can be any naturally occurring amino acid
YDDRDLESMLQKXLAERLAELLLMTYCVRSQRPLIRHQLTAPSPTHAPLQHGAQARLRTQPWLTISTYLMHRGLFINKKLNRQ

SEQ ID NO: 985545 - protein, 37 aa, Homo sapiens
  misc_feature (36)..(36): Xaa can be any naturally occurring amino acid
ACELQKVQELQQQSCPRSCGSSSVLSGTAGRGVALXR

SEQ ID NO: 985546 - protein, 61 aa, Homo sapiens
RLSTPPTLTGAGIALNDHFVKLISWYDNEFVLQQQGVCDLMCPHCLQGVRPLGPPCPSNEH

SEQ ID NO: 985547 - protein, 34 aa, Homo sapiens
LLETTQLWYDTAASYPGDMWALCSPEVAPSTDDQ

SEQ ID NO: 985548 - protein, 53 aa, Homo sapiens
IEHQVVPDLHSRTPTPPALYAGAGVALNDQFVKLISWYEPTEFGYCDWVVDLM

SEQ ID NO: 985549 - protein, 111 aa, Homo sapiens
GLQFLISGCGVHMTVAVAVATVILVTCGLRGCPPRWLAYGVWPVPSSPSCIFSWEVQVSLAISMMNSSNLRCLSAFVSRSSMYVFYDLFILILLLERIVLIFSQQLFDFPL

SEQ ID NO: 985550 - protein, 35 aa, Homo sapiens
HSSTFDCGAGFALKEHFVKLISWYDNEIRRTGTGL

SEQ ID NO: 985551 - protein, 42 aa, Homo sapiens
YAVQPVEISDYISSIEAQLSELAAEMECQQPSSTTMLLAHQA

SEQ ID NO: 985552 - protein, 103 aa, Homo sapiens
SLAPPLFRGLHGTVRRGDSSVVRGLSVAGAPQAVEGLSLPLVLLLGLVVQWSYSLEAMWAMRSTTLVAVSQFLSFQANELDKVVVEGNASPSSDVDEWESLVV

SEQ ID NO: 985553 - protein, 38 aa, Homo sapiens
RALLRLQRARCTCAIQAVLSLYASVQDHLASVAGLLCD

SEQ ID NO: 985554 - protein, 45 aa, Homo sapiens
KGHGQKSGYFSRRQPRTKLTWSSSAAHDLASMRPGGKTAYRPGRG

SEQ ID NO: 985555 - protein, 71 aa, Homo sapiens
  misc_feature (58)..(58): Xaa can be any naturally occurring amino acid
ELVRRQGDSIFMATPSWDELTTSLPHHPRAELLQRDDAVPITSLFFFFILLSLLFLEXFPCSFLFVLDETS

SEQ ID NO: 985556 - protein, 54 aa, Homo sapiens
VTFPDGDRRWIWDQQVDVYQLMAKLAAGAGIQLPSTAAAAAAAAAAQAAALQLN

SEQ ID NO: 985557 - protein, 43 aa, Homo sapiens
TRYLAAALRGSGNSQSCSLRPLCIRLFAYARHEASSKDPNHST

SEQ ID NO: 985558 - protein, 50 aa, Homo sapiens
DAYIEWHVSCAFCNAFIRFRKFLIEKDKLFSTHNISDTHCVGFPRPLQFS

SEQ ID NO: 985559 - protein, 89 aa, Homo sapiens
LLTPMLIEEYVNESILGLFVVRGVSLYIILPHMDKCKEGVRLCVLSGGFQLDVRRFIPSDSPSYKTILSATYYWIPCPRAAIMGYRCSI

SEQ ID NO: 985560 - protein, 38 aa, Homo sapiens
LRGLWAPLTCATMNGGGVFLIPYVLIALVGGNHSHWST

SEQ ID NO: 985561 - protein, 147 aa, Homo sapiens
APYAARTSDRLCVHYTQNSLAAPLISDHRRSLVTNRLGWRVGAGETVLPLGPVLTLVHRNQRGMSVPSPEGLPGSPLLASWQSVRPLVSQGWSTALPENSYQELLSYLQLTQAFIHTFPRTAPRAALARSASLILFFFCTFSVKLEG

SEQ ID NO: 985562 - protein, 64 aa, Homo sapiens
LDLTASRDPSRISSPQYARLTYIAFLVGTEFSPFGQAGLEFLDSSDPPPLASQSAGITGMGHHT

SEQ ID NO: 985563 - protein, 65 aa, Homo sapiens
HIGVVTFWLMKVNSPFISLENCPISTDGDYHGNITHEIKQRTSLHRLGRAIPVQETCGPAAYRGN

SEQ ID NO: 985564 - protein, 43 aa, Homo sapiens
LRIPTVVTLCCTRGDPQYSSGILHPALTLCKWSDIDDRYDITV

SEQ ID NO: 985565 - protein, 141 aa, Homo sapiens
MLPFISFYERESCSGVQAGLECSSMIYGPLLTSTSRVQTILPLQPPKAAEITGTCHHAWLTFAFLVQTGFPHVDQAGLELLVSSDPPALASQSAGIIAVSHCTDDGKFLYGEFVYTQDVGKVRVLFIGFLAGLGGKVLWFS

SEQ ID NO: 985566 - protein, 38 aa, Homo sapiens
TEHADVAVRSTPCNPRNFGMPTTASDYLTLGIFEDLAC

SEQ ID NO: 985567 - protein, 35 aa, Homo sapiens
MANQEHSKAPRINLEITTKAREQTVTCCKEHYKSR

SEQ ID NO: 985568 - protein, 38 aa, Homo sapiens
CGTVVQYTTAQLTVQLAHRTGELQSTKGLQDAQYTYCL

SEQ ID NO: 985569 - protein, 69 aa, Homo sapiens
CRDYQAPYKRYLVCSSVLIVGTELVQGGMHRSVEYTSTRLHLKIFGGQHGSHVTTDLVHGVMHRSGEYT

SEQ ID NO: 985570 - protein, 81 aa, Homo sapiens
CINEELHATSETENHVHGALFSRGVVRQAATIFTVLPDTDQPLLHKKNAFLILHLCLDILYGVTGLHLEGDGLTSQGLHED

SEQ ID NO: 985571 - protein, 40 aa, Homo sapiens
LSSPDTRVGGCRCMQGVAGFPVPHLLLRATESYPLMPLTL

SEQ ID NO: 985572 - protein, 122 aa, Homo sapiens
YYHLRGNKRMHVRVVLPFHDLGLMGLARWAGSPGTVISWMLIPGTSQAEVTMTTNVATEGARRLRVMLSFTRPSPVTFTEKGLPGTLLVGKLDVDDVVAWLCGAVGDPARPVLQVLCVDVHL

SEQ ID NO: 985573 - protein, 130 aa, Homo sapiens
TDDAIRSKALSHPDRLPAEPGKKYVNSQERSQGESETTQPQTRFHGLTLRNCLNTNTDRSISEVMNSRLLCRDRTGPGRDRMKAATDREREQQQREQSRGKSALSAMGRRDTLYQGVQGHSRVSARRDTL

SEQ ID NO: 985574 - protein, 71 aa, Homo sapiens
MPHDSTSMKFKNRQNYHDRSQESGVLWVLKGGEKGLGTLVGEDSVLYLDMSVGHQAIHFIFVYVNYLSKGL

SEQ ID NO: 985575 - protein, 60 aa, Homo sapiens
DIRRSARCSWCRRNLYEGGMHRNWGIHVEQAPALTILGGQHGAHVSTELVQGGMHRSGEY

SEQ ID NO: 985576 - protein, 86 aa, Homo sapiens
ADDRRHKVDTIYLFAFKAEAEAGYRAALGEGVIRVLGEDADNLVSQLGKDAFQHNSVIDLAITSTIEQNHLIAPGTFLQECLRGTG

SEQ ID NO: 985577 - protein, 49 aa, Homo sapiens
AWPARDSWLLVVYRSPKSSCLGGKYLAVIALPALAPGHTEWLLGEEALN

SEQ ID NO: 985578 - protein, 67 aa, Homo sapiens
QDLGIEWHVQECTGMGKGRLAWREGRFAGFRPPYSKVPTKSPSHNSQAQPLFGNYCVGGSGHLMSQH

SEQ ID NO: 985579 - protein, 138 aa, Homo sapiens
DSLGISTIPSLQKIQKLAGHGWCMPAGGAAWEAEVGGSKEGRKGRRERKERKRERGRKEGRPRERRQEGRKEGRKQRKNGKERQQKEKERKKSNERKRAAVLKVWLRAPKRPFPGASRDFTWLFHSPEVYNGAHIMAG

SEQ ID NO: 985580 - protein, 35 aa, Homo sapiens
MRYYSNPGSDDSALTTVGISGEWGKVVEFWAHIME

SEQ ID NO: 985581 - protein, 53 aa, Homo sapiens
MEWHVKMCAECLEVRVTEGGVGREKPEPLAGAESTGICKPHGKSLDYILKAVL

SEQ ID NO: 985582 - protein, 63 aa, Homo sapiens
NDHVYDDVTCSSIMAEAAELAVVELVLDCILRTVIGKVKSFFLWLSTHLVHICGTTRIESVYC

SEQ ID NO: 985583 - protein, 50 aa, Homo sapiens
MDHARKAPPYAPEETVGPRHPLKKALPPFISEDLPPRVDGARDPNVRLLC

SEQ ID NO: 985584 - protein, 105 aa, Homo sapiens
GIRRGINSNALNSNCTFYRKVLDCQLGLPSPSVRLYLECSISYLDDDIKISGTNTLVLVHFFLINVLLFDSSESYTTDTYQMSSTSSDPTSSILRISSSSQSSSA

SEQ ID NO: 985585 - protein, 53 aa, Homo sapiens
GVWLQMLLFHRGIDRKRHHHVSGACELNFDVNTGKVSPWPVTRNRTEIQIDYA

SEQ ID NO: 985586 - protein, 78 aa, Homo sapiens
LVSWRTAGWETFFPTGSCYAEGPRGTEWHHNKPRAQSSPATACLLSVSSKSSLLLPTSFTHRVSRPTGGIRMWARIME

SEQ ID NO: 985587 - protein, 32 aa, Homo sapiens
MAKRFVEECSTSLIIGKIQINTTMRYHFIPVI

SEQ ID NO: 985588 - protein, 118 aa, Homo sapiens
QIKLSLSLPHKLFSEYHEKRMLVSGLEARDVKCPGVSFGLSSCLCERAGLRCSSLQLSGDCSEECWVLGYTGDVVGSGEGGQLPTVVSPHVWWFPKASSHTPASESSGELKIQIPGYL

SEQ ID NO: 985589 - protein, 81 aa, Homo sapiens
MSGEDQVHPPLCHFPQMSLQHQLLSLELSVLPRGAIPWQDMTAASVYRLPPRGTCVVLTRAARLCPSMMETGLCGVTGAAD

SEQ ID NO: 985590 - protein, 42 aa, Homo sapiens
DLRLPLRRKTKKKKKGVSTLCEEHVETETVAAMLARTEKSPS

SEQ ID NO: 985591 - protein, 34 aa, Homo sapiens
FSFRPLQNCPSTVIRPTPQSSILGVAIHNPHPHT

SEQ ID NO: 985592 - protein, 48 aa, Homo sapiens
TVLLQSNCRASLVTQWSCWHAFLCNPADGVLALHQALGTFPFQEPQHR

SEQ ID NO: 985593 - protein, 118 aa, Homo sapiens
AVNGILGINRHQPPVCSTSAGDSHVIVPYVPRVVFFLFFLFLTIRVIVLFMAVRPLAIMSTDILASSRVAAQDSSCIIPPPPKHITAFSNALVFMSSKGGNTHSVCLFPHDKLYQKPF

SEQ ID NO: 985594 - protein, 130 aa, Homo sapiens
WRNKGDSAETEGDEQWLETVDMTASAERARAAGLPREKYDWHGGRWLSDYVVLPGSAGLLAVLACLVGDLARWPVVTHDPRARVIDLLSAPRVTCEVWSSSRTFEDGTPRRSWPETYDMNTSEPKTEQES

SEQ ID NO: 985595 - protein, 126 aa, Homo sapiens
LVLCVAARRLIVLTVLLIIGSLALFRFVPQQFFPASGRLELMVDLKLAEGASLSNTADQVKRLEALLKEHAGIENYVAYVGTGSPRFYLPLDQQLPAASFAQFVVLAKTIEERESLRTWLIETLNE

SEQ ID NO: 985596 - protein, 82 aa, Homo sapiens
TLQMPPDSHLFVVAMVQQNTPLIRSHARIPYVSGEISLFIYYDNERLPTCRTHLRHTYPAPPSRSTSISFCSPRRIAPESEG

SEQ ID NO: 985597 - protein, 73 aa, Homo sapiens
KNNRETTPPRDTQSAGITDMSHCSPAARMYLLSDILQKRYPCLFLTDFFSYDPINEQAYCRKRNVVHFIMRYI

SEQ ID NO: 985598 - protein, 114 aa, Homo sapiens
GPMTWLAPAPRPGGDAEQRHAQHMGMRAACSQRIGDVMVTQQVQLYVLVTLRGMQGEGRATTGVGLDIRGMEIGSGVCATAKLKTLLTGGTYTPGFEGLVVEVQHGSAGCVEAF

SEQ ID NO: 985599 - protein, 69 aa, Homo sapiens
YTLMQNTVSLISIGNLPSAFKFSSLTDEFLLAMTRSCVSCGLEPWESGVGKSLLTFVNCAYVKWAHIME

SEQ ID NO: 985600 - protein, 110 aa, Homo sapiens [sequence omitted]

SEQ ID NO: 985601 - protein, 61 aa, Homo sapiens
MYQHVSPACGFGIKMSVSHVVHGQQQEGGRGHGARTQTQALSIGGSLGIAACTQKLGTHYG

SEQ ID NO: 985602 - protein, 66 aa, Homo sapiens
YIAWQMLDGTRNVLTQLARKEVVIDSRTREADLTSGVAFPKDVMTLVTAEWQSVSKTAMICSNCYK

SEQ ID NO: 985603 - protein, 106 aa, Homo sapiens
MAYMLKENRSFYKWNMYLNVHHHAVQESKDMESTKVLISGGGSGKENVVEIHYGVLQSHRKKNEIRSFAETWLQGVVIILSKLVQEHKAKYGMSSLISGKWAHIME

SEQ ID NO: 985604 - protein, 41 aa, Homo sapiens
EDPSVKILRWSGEQVHVADDEPAGRHLLMSMCLPWASSRLF

SEQ ID NO: 985605 - protein, 34 aa, Homo sapiens
  misc_feature (6)..(6): Xaa can be any naturally occurring amino acid
SRRPCXNAILHILAVKAKCRLFDFWETQSPPLRM

SEQ ID NO: 985606 - protein, 81 aa, Homo sapiens
  misc_feature (65)..(65): Xaa can be any naturally occurring amino acid
MHVLQVIEESLGTWNGGSKAEASHTYPSPLQRYSEDPTVPLPSETDGYVAPLTCSPAEINQQMFXPQPPSPREGPLCLLPD

SEQ ID NO: 985607 - protein, 148 aa, Homo sapiens
VGPGMGIWLQISHWEHCLAAAVHWHREHRGRIRRFYRQLLLTADDRVNPCIGGVILFHETALPEGWMMGGPSPNVIKSKGGVVGIKVYKGVVPLAGTIVARLPTQGVGWAVFIAVPSTWKDGACFAQWRCVLKIGEHTPSALAIMENA

SEQ ID NO: 985608 - protein, 68 aa, Homo sapiens
ESTGLWIGIKYTSLTLRGRACAPRNATEGFHNFNLYRAWEMGLQRRAVPTPGTNVNSIGISITAMEFR

SEQ ID NO: 985609 - protein, 49 aa, Homo sapiens
YWAVVPMWKTLQEVELQIAKDEMTDIDLYWILMTEDEKVTEANEANGKQ

SEQ ID NO: 985610 - protein, 36 aa, Homo sapiens
VVQILVEVEAEGSLQSQEFNDYIQCAMIVPLYSIDR

SEQ ID NO: 985611 - protein, 36 aa, Homo sapiens
MTVSASARRPCKHHIWDIRSLLNSFASAYSGPLATL

SEQ ID NO: 985612 - protein, 50 aa, Homo sapiens
WALCLLCGNEDLPNRLSLFQKYVYQYAPSGHLEMDRTGCAIYAVRTPSRN

SEQ ID NO: 985613 - protein, 55 aa, Homo sapiens
SLSSVPNSEFDMSDEADTIIVIIHEVDLSHEYILRALIVIKNSPHSSRRQLSVRA

SEQ ID NO: 985614 - protein, 65 aa, Homo sapiens
RVSHGRAERMLAVLTWLEEIPKPTVVLKTFWVLSILHNPEEGPKEEGDFFSCLSLTWNCFGTLAV

SEQ ID NO: 985615 - protein, 105 aa, Homo sapiens
SQLPDVDVTVHDAVVGGLVNDRRLQYRLRSGWKMRLQAVEALVADGDDLAVWQLVFLFQGGGGGESSPSRSRSPGPRSTVFSLMSRTISRSAVVTKEELTLSEDL

SEQ ID NO: 985616 - protein, 102 aa, Homo sapiens
RGSIGRLFFPSCNSQLAIYPLPVLQTGVLRSRHLRAVLPLEALGEDPSCLSQLLGAPGVPGLVAASLQSLPPSPRGLLLCVSPLLSLRRTPAIAFRAHPTPG

SEQ ID NO: 985617 - protein, 45 aa, Homo sapiens
TAALEVTIGTTDASVEAVSPREENIVVIADDVQGVDPHPAMEAIL

SEQ ID NO: 985618 - protein, 118 aa, Homo sapiens
SRGSLRQKITPGVIMLAGGLCACGMTLAVGFVCVRDDACSGVWCACGDTLAVGFGVRAAMTLAVGFGVRAAITLAVGFGVRAAMTLADGVRCACGITLADGVRYVCGDDACSGVRCVC

SEQ ID NO: 985619 - protein, 108 aa, Homo sapiens
MTREQACIRARLMSRKPPKAPTRAFPTCKAPCSTREGKLAYWRPCVSPVTEWDMWDWAGLLRVRCSLSTCAHAKCSDGQRIETPGHADLGPQIAAHMETASCTHAEQL

SEQ ID NO: 985620 - protein, 33 aa, Homo sapiens
  misc_feature (21)..(21): Xaa can be any naturally occurring amino acid
MPARSHAEFFMYDLAFIRSTXLHLLPVASDTSS

SEQ ID NO: 985621 - protein, 52 aa, Homo sapiens
VRPLPVSVADFPLSCARDIDDNIRGTVRIHQKVWYSYSTDDTLPPAPGCEGG

SEQ ID NO: 985622 - protein, 76 aa, Homo sapiens
  misc_feature (2)..(2): Xaa can be any naturally occurring amino acid
VXCERNTQGISYKNGLMPPSKDMLPPRRENKKETEGASPYKNGLGSVPMDMGPPRRKQDSPSQGFGITLRNRGGTG

SEQ ID NO: 985623 - protein, 59 aa, Homo sapiens
SAETLRSHSSISARRHCAPKLTPYFLLRKRSLRTLLESTQSLSIAIALPALYQDFYKEY

SEQ ID NO: 985624 - protein, 80 aa, Homo sapiens
MSALHIVGLNPQCADVGGCMVDDHDDWPLYNNLLGRAEEAHAVIGDEVCEVILGVVGAVLLFHPVPTQRVVIKAGVPKES

SEQ ID NO: 985625 - protein, 95 aa, Homo sapiens
LGKRQLDLRQEVHHGLSEGCKETEKFGQGVHHTAGQPGKETDNYVQVAHHAAAQACDESGGFAQEAHHVRGRPEMRLVGLPRWSTMVLVRTVRRQ

SEQ ID NO: 985626 - protein, 66 aa, Homo sapiens
EQDGGYWASAKSVHSGPGLIGSGTQHLLPPRAPVSCSSSYAPHNTLRLTQTFYILTLHCHPARLAQ

SEQ ID NO: 985627 - protein, 44 aa, Homo sapiens
VLMVVDVWPWFQEMRELRRVERLEEDEAGEKGKQQELAAWNSRE

SEQ ID NO: 985628 - protein, 48 aa, Homo sapiens
YWQSWGEMQNITYHAGRGVELRGMAKVHQLQRPECWPYTQDWVTALRR

SEQ ID NO: 985629 - protein, 52 aa, Homo sapiens
GVAVLEDPIPAAFLLLARELLPPPLPLPPPRPRRTAPPPRELFLLLPRESLL

SEQ ID NO: 985630 - protein, 54 aa, Homo sapiens
RSLTGHSASRDDGIIMASVSMRISPVRQLLECLPWSRESRWHAALMCGWPLHVS

SEQ ID NO: 985631 - protein, 38 aa, Homo sapiens
LELTVQQESRGGSSEQQQEFSRAAGILSSRNSRGGSRN

SEQ ID NO: 985632 - protein, 67 aa, Homo sapiens
RAGSRNSRESSRNSAAGILAGQQEFSREQQESRESSRNSRGQEFSREQQDISREQQEFSRDQQEFSR

SEQ ID NO: 985633 - protein, 40 aa, Homo sapiens
LSRGSRENLSSSKQSSSRNSRGSSRNSSRNSRGSSRNSRG

SEQ ID NO: 985634 - protein, 76 aa, Homo sapiens
RLQRSSLSQNSTVGKLTVQPSVCGRRSKSPWQNTGVSPRVQKLKNLESDIQEAEGIQHRGKVKAGRLNTCSYLIFQ

SEQ ID NO: 985635 - protein, 58 aa, Homo sapiens
PVSPGLSHKLLLSQIVSQQGIHEVQNDFCTRFYQEPSRIKKAAYERLVWVLHVELPEK

SEQ ID NO: 985636 - protein, 51 aa, Homo sapiens
MLGAQLTVAAVHSEILKYFQSVTYQAVAMVTIFLILIVFFIIYVVYPCMNP

SEQ ID NO: 985637 - protein, 32 aa, Homo sapiens
MAGMRSREESLQSQSQPAAMSERSRKRGSKRD

SEQ ID NO: 985638 - protein, 50 aa, Homo sapiens
TGFHLHAHHCGGRLTTSHHIIPELSSSSVMTPSPPAPSSGFSSFGRFTAE

SEQ ID NO: 985639 - protein, 35 aa, Homo sapiens
MLFRFHESLPADSMLKPRFPIVWPSRPLIHFSRLL

SEQ ID NO: 985640 - protein, 34 aa, Homo sapiens
GLRLNKRINPDKGVAYVSGGAGEHPDGGQVRERA

SEQ ID NO: 985641 - protein, 124 aa, Homo sapiens
SISSSSENDESVSYSRTLSNSCLLAYTRKALDVRGQNSNGRALNVVMKAARVILFINMHHQPFMSFPRTFICSIRFSFEIHVLHFSPTLATLIIFTISSRVFFCCIPCFFFPFICFRSSTTCDT

SEQ ID NO: 985642 - protein, 56 aa, Homo sapiens
ICQLDCGFMTSFLMTWEPGNVGISTRAAGHRFLDRVWAHRAAFLFTPTDASKEVFD

SEQ ID NO: 985643 - protein, 57 aa, Homo sapiens
MADITLLLIILPDKQHMLCVSTQNSTIIRNKNQVSNKVPDLNFISLKEAQKGKDNLE

SEQ ID NO: 985644 - protein, 38 aa, Homo sapiens
QTEEKPIKSETALLWPSASLNDHPKGDHKILELSDIIT

SEQ ID NO: 985645 - protein, 69 aa, Homo sapiens
NSFSDLLGRHNSELQECTGQREPSISSTSMTSNCSSCATPMEQSFSADTGGGRPREQHPPDPELCNDFN

SEQ ID NO: 985646 - protein, 80 aa, Homo sapiens
MVHGILSRTQILYFASKVRNEESWRMLGRGESRVGLSMGRSIPGSSIMARYNVPRPVWEVERTRSQCQLVAIRSEEKWSN

SEQ ID NO: 985647 - protein, 157 aa, Homo sapiens
PLSSEALMSTKRTPTQKPHSEAISIKAQRKINTRRMRKSQCNNAENSKNHNASSPPNDYNSSPARAQNWTEMSLRIDRSRLHRWVITNSFELKEHGLTQCKEAKNIDKRLQELLTRITSLEKNINLLEERVSITEINQAEERISEIEDQLKSNVKTK

SEQ ID NO: 985648 - protein, 120 aa, Homo sapiens
DLIGSGSTVLLHRSYNNGQNFYPIMNTSPYVFKLTIKRIKTAARFLEGILPNVQAEQVEGHVYPGLLECLFHAELEVSILPSLQVLLICDSEYKPHPTKIFVFLVHSCFTHTEQAQAING

SEQ ID NO: 985649 - protein, 74 aa, Homo sapiens
ATVIRDKEAREMSPDDSVITVPLINKGGISILEDGDKQAIDDKLPVLSLDGAMEYAMGGIIYEHVNHVVAVKEG

SEQ ID NO: 985650 - protein, 109 aa, Homo sapiens
MWLGQLMGVPRSIKPGYAPAFTCSRISEPDVTTPTPTYPVYCRVLRVPRMGSKKWAPQEKPLSSPPKPRMGDCSREFNKIEQLRLIIEFTQGVLHAGRNCKNRGSYKSG

SEQ ID NO: 985651 - protein, 49 aa, Homo sapiens
NILSSVEAQYIQAQSQVAPVIPQNTLKKRERKQSPKRTEDIQTTLTVPA

SEQ ID NO: 985652 - protein, 65 aa, Homo sapiens
QIQNMQNRVSQGPHPKSQGDDIPEERRIAGHAKPGSTPQSQTLSSSCPPLINKADTQKQTLYGYT

SEQ ID NO: 985653 - protein, 67 aa, Homo sapiens
GVNRLSSSVAFCYDGDEMPIMTLVPAKRGLQMNVIPALELVEPINEALRSHATVLIVYLCRLCDIPW

SEQ ID NO: 985654 - protein, 39 aa, Homo sapiens
PYSRQVETVSGCDILRSGVWDSLRYFSEFFCTASFTVLV

SEQ ID NO: 985655 - protein, 58 aa, Homo sapiens
DCRQVLIQYNPAASCTLRRSPVLWLSHVNGQCRQRVPEQEVQHAAHQAQGCRSSSEDG

SEQ ID NO: 985656 - protein, 61 aa, Homo sapiens
MLVIVSTLCAASVCSADLQVRLPTPPLCELGGGSAGTGGVHGEGFCVMKDDSDLLGPKAVS

SEQ ID NO: 985657 - protein, 59 aa, Homo sapiens
MVEVSTCLDLWGCHVTLQVQLHHGTVDAPDETYCRRVTRLSDLRGCFHVFPLPPVPTHH

SEQ ID NO: 985658 - protein, 37 aa, Homo sapiens
VRIHLYTKFKNYAQYVTMLLRRLSEEDHMMPTDGRRL

SEQ ID NO: 985659 - protein, 34 aa, Homo sapiens
LSSGDPSGGGYGSGGGIGGSGSRRFYKQSEEGYS

SEQ ID NO: 985660 - protein, 65 aa, Homo sapiens
VLADDECFLVVTEKRNLPFCKPCAFLVTIAEECMRAEFSNCSSSCVALGCFSTTCESPWFACIFL

SEQ ID NO: 985661 - protein, 71 aa, Homo sapiens
GCHGSRGMKEMYAVIPFLRSKQQVYSSEMSSRNVGLCLISPFFLFFFYFKERNSQQVAKVEVRGSNSRFPI

SEQ ID NO: 985662 - protein, 34 aa, Homo sapiens
MALASQGQTEQMKRKKTELEFWDQAVGWALSRGK

SEQ ID NO: 985663 - protein, 80 aa, Homo sapiens
MHKKLADYLKVLIDNKHLLSEFYEPEALMMEEEGMVIVGLLVGLNVLDANLCLKGEDLDSQVGVIDFSLYLKDVQNLDGG

SEQ ID NO: 985664 - protein, 105 aa, Homo sapiens
MLRGLQVDEVCIRYEHMYYFSQCKFSQHSQINSLIGWELQIHMPWEPKGRKVYGTKRWDASGNICTVTLNMNAQAGAVAHACNSSSLGGCGSLELMRSRPAWATE

SEQ ID NO: 985665 - protein, 111 aa, Homo sapiens
LSQSRDRVKPQALAGYTASPLTPPSQNQLCSKAQAQHLRTSVSPDAALISTNPPQPLDKSWTQPYLPLVDRPIRTSLTLPGYGFSGHAKGFRVHSSASQHHFRLRQPPSPL

SEQ ID NO: 985666 - protein, 127 aa, Homo sapiens
MGGAGSSCESAGAGEGIYQVRTLCPSGVGLLGLHRGWAASVLVCEGTCSCCGHHLAIVHIHDLGAHLAAGGGHISWIHCDPKGAHWERVRGGRPRPSYQAGGSVAISVLLAASSTVLARYLVRPWFS

SEQ ID NO: 985667 - protein, 31 aa, Homo sapiens
MDFYFGQVWYRFATPHSVVLFFNYPYSPVTE

SEQ ID NO: 985668 - protein, 112 aa, Homo sapiens
  misc_feature (72)..(72): Xaa can be any naturally occurring amino acid
RILYLSDFCRVVGVIQILLCSSCCCNVGGIWLITWSLPVLRDEDLPVGKLQGHSYHHREDHEELFCKLTLLXTLDPSVRLDLDPQKSSFHDDVRWSCTLVLEETTGVPMLDI

SEQ ID NO: 985669 - protein, 34 aa, Homo sapiens
RINPICCTVVFSSGIWAAHFRIHSIRALLTAPLC

SEQ ID NO: 985670 - protein, 115 aa, Homo sapiens
RSRDLLADAKMGKQESAGKQQLQKGETVENRRSRGHEQMLKEGGSRAETAKVKTAAAKSSTGNTDDTQTTKLADAKTGERKTSAGKNTATDTGDTIRTTRRTQTATAYFWRRAGV

SEQ ID NO: 985671 - protein, 77 aa, Homo sapiens
AECTYGDRGDTVKREAKHMPTSLWGRSENTDGRCHDSESPSSLRRGPHPKTAPLITYHVLRIPPNTVLSSHTRQINP

SEQ ID NO: 985672 - protein, 88 aa, Homo sapiens
MKLQDSSLHQHGGYKDRPGGRTLWVLSVRTHKGRWDFLTLMKWEKYCMISNDRLFSSRDKLPLIGWVDGKPHGKLNIRQHLQAAMDVV

SEQ ID NO: 985673 - protein, 103 aa, Homo sapiens
  misc_feature (7)..(7): Xaa can be any naturally occurring amino acid
DSLLDGXMGSEPGKCTAQSTMWDTRALLLKLGLTNLQILPLLLLICKCHLLACIAHCNHCQHKCIVLGTQKSILPLLLPGPTAQRLPKDLRAYKHLRKPCRGP

SEQ ID NO: 985674 - protein, 63 aa, Homo sapiens
RARCYMMGGLDQEAPERQGPDVGGAMGVEEYVILGQLIITRAPFVRGTRFSQAIPACPALTST

SEQ ID NO: 985675 - protein, 58 aa, Homo sapiens
ETLSREEMEELEKELDVVTQTGVFPCGCGRETRGEQSRVLQPGAMLNFCEKEIKSDYQ

SEQ ID NO: 985676 - protein, 69 aa, Homo sapiens
WEAAQSRATATGGYASDRISVQDARTRTAGEAQGIAAHVPRGKPNATATATSTSGIHHRDIHGSHSPRA

SEQ ID NO: 985677 - protein, 107 aa, Homo sapiens
MGGEVVDGGRGRGDCVEEMIESTAYLELSLRSISEPAWLRTYPGIPVEHGHDTHSILDSLVARMGSNSRLCMVSLSLFRTLLNLSCEDVLLQLVLRYLVPCNHVMLS

SEQ ID NO: 985678 - protein, 99 aa, Homo sapiens
GVNLYDFCSKQVKPCPSYTFRPVLQQVSHSPGLNLKSLVLSTLTFKADNIMLVDPSRQPYRVKVIDFGSASHVSKAVCSTYLQSRYYRAPEIIPWFTIL

SEQ ID NO: 985679 - protein, 44 aa, Homo sapiens
ANSRSGTNTSLKKVVKETSYEMMMQCVSACWPPPPAQETQERLT

SEQ ID NO: 985680 - protein, 113 aa, Homo sapiens
TPEERIYSKMQQHGYENPAYKGREQLRTRPPPQQPLKSDSKPIASLTHRCPFIDYCGKKQTRIMIYSLSPWGQLCCNTSRCLQLELIHTSVMYTILSLHFGLYTTLYNGLRVL

SEQ ID NO: 985681 - protein, 45 aa, Homo sapiens
RCRLSARVLSMSSNSSMQHMVRKASSMSMFIQHAGLHLVEFALLF

SEQ ID NO: 985682 - protein, 84 aa, Homo sapiens
MRHQLIKSTISFSNTSKGDAASVIHLTPTLIQYFWAFQIVQHFTITDVTSYYQFISAEILSATHEGRVLFYTLLYPQHLAEYLA

SEQ ID NO: 985683 - protein, 114 aa, Homo sapiens
GTEDDGSHIVEALDPLAAFIGLATHVKHVEAVTLRTLELGLNRFQHVRTRQRTRVLIGSRHTSACCDQVILSREVLGTVNQLVLVGAFVAGTHSYILPESLGMLIAFGRQVKVR

SEQ ID NO: 985684 - protein, 178 aa, Homo sapiens
MTLRSWLSPHVTPQAQRIPTGSPQQHHFSISLPSYPMITDVQNSFHIYGFPYLVTHMIQDTPKVTFPSTGYPAEQSRWGRDGQAGARSARMVNSRPIKQLKTPSAGDGRTVNHRPRPSGHEVRATYIYLNKRHATQHDLSSPSHPKLLVHDYPGWGQKAMAQAPITLGDFSVPPQSHA

SEQ ID NO: 985685 - protein, 114 aa, Homo sapiens
HPQQVSKSGCQSGLNNAHELSDRKRGWLQARFRRLASSSGDKLLESNSNPMQVVGIPLQPHEQGPHRTRTQKRRVAAFSRRFISLILYNFSINYILKLVSPGKPIISGVVFTII

SEQ ID NO: 985686 - protein, 53 aa, Homo sapiens
TWVYGDDMTEQVYATMKALREADVDCLTLGQYMQPTRRHLKVEEYITPEKFKY

SEQ ID NO: 985687 - protein, 34 aa, Homo sapiens
RAHGGRWPSITGPSSARAITGQELGLGSLGHWKA

SEQ ID NO: 985688 - protein, 146 aa, Homo sapiens
MILVRESVTCKPEESVDSEPIPSHRQSGGGVVTEMLRTLSFGIQRSLRPGLRAAGQKASWRLMCKLVQCADLRSPQHRAGARQASTLSCPPPSRSSGNHTVAGLAELGLVLPEMSALKFSLGLFPVRNSTSEVSVETELAMPLGAA

SEQ ID NO: 985689 - protein, 74 aa, Homo sapiens
CCPSTPSGRRTVIVMDSGDGSPTRWPIYEGYALPHAILRLDLVGRDLTDYLMKILTERVLLFHHHGRAGKSCAT

SEQ ID NO: 985690 - protein, 123 aa, Homo sapiens
MPIVNCAELVTMTFIKDALLKANLMTDDLPCNFTSAFGAGFCTSVIGSPVDVVKTRYMNSALGQYSSAVHCALTIAPEGGALSLLRGVHALLSPLGSLDVVMSSPIAVEEPHAADFREVLLSS

SEQ ID NO: 985691 - protein, 53 aa, Homo sapiens
MANPFRDERAFWSYGITTVLVYQQITESTLDVSELRVLSEHAIIVYISVRCKM

SEQ ID NO: 985692 - protein, 65 aa, Homo sapiens
MGGCLEQRETAFTLLLLFPANNAKQPKLLKYSRKHFRQLTHGGLHVPCEEGGCAVLLARGVHVAD

SEQ ID NO: 985693 - protein, 167 aa, Homo sapiens
LFAGEVLKCEYRGAKSFQAQESEVNSQGAPQTVKSKGLRMQSLMSASRACSTLLVPACTSEGISCLSSASTQRCYCVDAEGQAIPGTRSAIGKPKKCPMPCQLQAEQSFPQDGEALLSNSSMLPPFPTPHPTVQHLMAVDAKCNELGLPSSLRVVQDGRLRQGQDLT

SEQ ID NO: 985694 - protein, 84 aa, Homo sapiens
SHILSMSHEYQGRDRCQCTASPSGREKLLLLESNMKVSIMFFWPLWSRSIRVTLCLNGHCNSESTSPRMTTKYKDRCDSWKCPR

SEQ ID NO: 985695 - protein, 110 aa, Homo sapiens
PILYAKDGFHVPMIPDYLSPQQQGDLGLGTPDQKPYQDLESRTQQPSTNPSVYYEGHLTISRASQDLKALNTSYQSQLIKPSRMRKYPNRPSKTPPHERPYACPVESCDR

SEQ ID NO: 985696 - protein, 38 aa, Homo sapiens
SRGSFAIRRPKRVSRPSSSRAPSVYSGSMAVIKVSIGG

SEQ ID NO: 985697 - protein, 58 aa, Homo sapiens
  misc_feature (54)..(54): Xaa can be any naturally occurring amino acid
SYSLNCQQTLIRSQVKSHRLEMNSASDGCFPLQWHSSRRLLGSLHIIRMHIQWXSRNE

SEQ ID NO: 985698 - protein, 39 aa, Homo sapiens
SESYGNNCSSRRRKGQERFNLLVLTGMTVAGVFCWAHSS

SEQ ID NO: 985699 - protein, 82 aa, Homo sapiens
YRSLVSPLNLLFDSKYQRFTAEKREQIKDPQQQSVASFIDKVRFLLSSITMVLETKWTLLQELSSKTVRQTSGACCSSMYIN

SEQ ID NO: 985700 - protein, 118 aa, Homo sapiens
LSPQHLLPSLLEWRIICLSASKAGLSQIHLIRLSKCQTCKSDHALSIHKILPRLFYMDIVGITHRVKFKYLGRTYMALHHLASPSPHTMPFSPPLLCPLPGHTLWSSIMCAQSRGSLF

SEQ ID NO: 985701 - protein, 38 aa, Homo sapiens
MSITRGCFHFLLTTLLLCDSWKCPAYGIQIHKVETREN

SEQ ID NO: 985702 - protein, 54 aa, Homo sapiens
GQISENTYHEKNSCVVVVLNLPTNLLNYNIHSHQNLITISLSSFEDHTLSTTVG

SEQ ID NO: 985703 - protein, 45 aa, Homo sapiens
NQSIISSSWGILSAVGACQAMPSSGLLACSFSHTYVHQGISGINN

SEQ ID NO: 985704 - protein, 138 aa, Homo sapiens
  misc_feature (14)..(14): Xaa can be any naturally occurring amino acid
TVTFLSPVEKCALXLIDSSAELEVLGRETSLFEPAACRSWFPSWHQWTHLQPRARCCCPGFSFRLFDAVPGGTYPGILWASSERIGSRLQHSVLQYDVPLIALSLATILEPPENLFQRAQLALGTGRIQKGSSSAPPQ

SEQ ID NO: 985705 - protein, 40 aa, Homo sapiens
SGYQFPPGAVYDRGAGGGGDPFPPAACSPESRASGGRPPR

SEQ ID NO: 985706 - protein, 81 aa, Homo sapiens
SVCEAENFVKDAGSYSKKVVGTPVTRSQAENSRTLFQLKQRRNVPMKPPDEAKVGDTLGDSSSSVLEFMWMKSYPDVSVDI

SEQ ID NO: 985707 - protein, 35 aa, Homo sapiens
YICVFCAHIPFMTNLQVWATSGYHLMITCQVQTRA

SEQ ID NO: 985708 - protein, 70 aa, Homo sapiens
DVDQVAKIHKAVVEMANSFNLGVNEDDIEELLAVVPEELTNELLEIEQATAEEEARENKTAENHHQENLQ

SEQ ID NO: 985709 - protein, 59 aa, Homo sapiens
SEEYPIMIAISDRCHFPCLFVPGQPQMSSVEHHILATISLPRFSSIAPGIPLQGPLALN

SEQ ID NO: 985710 - protein, 46 aa, Homo sapiens
ASVIGAHDRRPSVDDLDKAAKEFQEKHKKEVGKLEEHRTYSELHKY

SEQ ID NO: 985711 - protein, 107 aa, Homo sapiens
MEYSGPIMAHYSLKLPGYKQSYHVSLPSSWDYRYSIVTLSELSFIFCSRDRDLSMLPRLTLKLIALKGYFLALDSQSIGITGMSHSAHRLWFYNLLTSLYTSFKECL

SEQ ID NO: 985712 - protein, 86 aa, Homo sapiens
RHNSSKENQEKHKTAEGRRTNKDHTEINHRGAEEERTADKNTSRADRHAQQPKKVDKKRKEEAKQEPQTEQEVKEQGDKEHKKIYN

SEQ ID NO: 985713 - protein, 74 aa, Homo sapiens
  misc_feature (27)..(27): Xaa can be any naturally occurring amino acid
  misc_feature (41)..(41): Xaa can be any naturally occurring amino acid
RDHLCSSPVGIIFSTACNSLPSISHFXTSHSAIFAGAANHXHHVHVRASHACRTQQLPSQAPLTTIKAIPIRPH

SEQ ID NO: 985714 - protein, 35 aa, Homo sapiens
VTTDEILGLRALQQYVECGESAKYFDAVWEYARVS

SEQ ID NO: 985715 - protein, 98 aa, Homo sapiens
  misc_feature (31)..(31): Xaa can be any naturally occurring amino acid
  misc_feature (35)..(35): Xaa can be any naturally occurring amino acid
IHPAALGQVGLSQDLEETGYLWSTLAVTCSXLRQXSPLPSFQKQGSWLQTRELEIQGCNNSQSEPIWGHQDRTLKQAHTVDSVLESCRAPSESRHCAS

SEQ ID NO: 985716 - protein, 69 aa, Homo sapiens
LTLVFLQANEVEASGVSAESAGSDYVHSEAGAGPVVTSPEHIPMDSGGIDSFRFRGRDHSDLLKSYYTS

SEQ ID NO: 985717 - protein, 49 aa, Homo sapiens
MNSTAQYAGIRLGSVIGAKSRKAQDNIQQTLGAPKPRASIGYARDGLGV

SEQ ID NO: 985718 - protein, 122 aa, Homo sapiens
CEKGSSKLKAQEGEAHCSRNPVLEEELAGIPDLACIPEQATVQAGSTQPPKSQVEKTQKEKVLATCFKTSLVADQKLRYPRWLNFAKWLDIILLKVVPRKLLKPTAKKPFSQHPENNCEASN

SEQ ID NO: 985719 - protein, 83 aa, Homo sapiens
LEDPGIEWHVEQYMRLARLPAAVAINDLADFNKLGKLFTQILRVKDRDDFPVVSAGNKADLESQRQVPRVRSLCLRRLPSHGH

SEQ ID NO: 985720 - protein, 110 aa, Homo sapiens
EWHVNCSIFGFEGVSLGACCFRVGGKVGWAGSGARLGWREFTAKQTGPTLEARIPGSGRTTRSKARHTRLNGHGAEGSCAGSLATSTHMLLPPRPPRVTRCSPLAQLNAC

SEQ ID NO: 985721 - protein, 40 aa, Homo sapiens
  misc_feature (34)..(34): Xaa can be any naturally occurring amino acid
MVILGSHKQQMRGEDVEKWECSYTVGGSVDWLHXIVRGQL

SEQ ID NO: 985722 - protein, 37 aa, Homo sapiens
MIPSSPPPPEAEALSSSLLLLIRGPLEYVPSAKVEVV

SEQ ID NO: 985723 - protein, 42 aa, Homo sapiens
NSCQVVEDTLMEGSIYAMPLLLCPKAYPSPKHEILTKNRVWL

SEQ ID NO: 985724 - protein, 101 aa, Homo sapiens
QYRRKPDHNELYEIYCLRLAESQITYTRTQILHIRKTLTDPDPYTMHPDPTSSDTDQIQILTTEPDPTSSDIERPRSLYQGTMLPPKTLTDPDPYTCTRIK

SEQ ID NO: 985725 - protein, 52 aa, Homo sapiens
MSKREDHCSPGVRDQPGDIVRLRLYKKIELASCGGAHLIDPRLLEGSDGEMD

SEQ ID NO: 985726 - protein, 180 aa, Homo sapiens
RVTQALFAKEVSCPMSSSQEVVSCLRQKPGNVLNDAQTKLLAVSGPFHYWGPVIDGHFLREPPARALKRSLWVEVDLLIGSSQDDGLINRAKAVKQFEESRGRTSSKNSLFQALQNSLGGEDSDARVEAAATWYYSLEHSTDDYASFSRALENATRDYFIICPIIDMVSAWAKRAEERSH

SEQ ID NO: 985727 - protein, 32 aa, Homo sapiens
LVSQTVRVIMTSVVDCRYRCCEIVSSEYESDA

SEQ ID NO: 985728 - protein, 71 aa, Homo sapiens
  misc_feature (1)..(1): Xaa can be any naturally occurring amino acid
XTLVDPPNTCNLDLDSIIAEVKAQYEEIAQRSRAEGESWYQTKYEELQVTAGRHGDDLRNTKQEIAEIAVF

SEQ ID NO: 985729 - protein, 34 aa, Homo sapiens
  misc_feature (7)..(7): Xaa can be any naturally occurring amino acid
  misc_feature (28)..(28): Xaa can be any naturally occurring amino acid
  misc_feature (31)..(31): Xaa can be any naturally occurring amino acid
IRVMSMXLNGAVQHKVEEWVEALQGFHXASXALP

SEQ ID NO: 985730 - protein, 159 aa, Homo sapiens
MVHTNLSNLYLTCDFSLPSFGQQYEWVAGNGRRSGSKPGRVFHSGPVDTLDLLCDGRLILACLFRLWQINHDISSSSIRLSMLTVDSPQGSQIQTHPCAPLACPCPLHRAHFLSSWLICSFHSNITILGPPVQKVCFYLRIFIYFALGSMTTTFLNHSP

SEQ ID NO: 985731 - protein, 122 aa, Homo sapiens
GLQGHTYAGHLISPPYHVQISPQLPAALTFASLHQLRVLSPPAPIQGRRDLSRSWARHHHPCLDAPQPTLFSKGSLRGPGLSRKVSDGERPGPTHTGSLSYLGTSPWEESPRDCSVHPTAPR

SEQ ID NO: 985732 - protein, 99 aa, Homo sapiens
QPVHTLSDDKKCQMPRKKGCMTIDLGGLEYGFLERCDIQTEYWNDMSKRLIRTKYEGVYSNHEGTVSDTNAQNGKIKALEYFERNCKSETTNKYAIPVT

SEQ ID NO: 985733 - protein, 89 aa, Homo sapiens
EAVYCATDIHGLEESKRLESCKHWEASFTGWTQSSQSCWIQGPQGELLHSVARQLLALCGGGRSSSSSVWQLDSIAFCQFGNALTTSTC

SEQ ID NO: 985734 - protein, 95 aa, Homo sapiens
VASFMDEADAFLADSEPLEEISKDLRARRERLLYHMGQHSNKFMLVLASNLTEQFTVTINSRIDVMVHFDRPQQEERERLGETAFGQLWYLRPAT

SEQ ID NO: 985735 - protein, 59 aa, Homo sapiens
MGFFCVDEGRLPHTQRLLEVISVCDMPQSAVSMAATPPTTADRRTAAQWTCIVWEDRDT

SEQ ID NO: 985736 - protein, 41 aa, Homo sapiens
SVPGRQDTGQQIRRQMRLQADVPGKCQARTDHGADIVSRLP

SEQ ID NO: 985737 - protein, 82 aa, Homo sapiens
YGDLLRAELDGMSPPEFSNMVRSEVNKLMAAASKAGHNRFTHFEYQRIQLRLGTPTQLHRVAWQRQWAGQYAQAGHLRNRFG

SEQ ID NO: 985738 - protein, 111 aa, Homo sapiens
DLLLLLRAESSVGQESQIHVRVRALVCVILSGQDWVVVVHLDPSLSYAALAWCVSGLYSLPFTQARGNQPSFLAGEAEEVGAFALGFAEHQQRMSLEKMKREAGGGSCYES

SEQ ID NO: 985739 - protein, 48 aa, Homo sapiens
MDLTDATRRKQTVRGERLRQRRPRRHVRLWCRNARTVGGDGGLLYDVD

SEQ ID NO: 985740 - protein, 45 aa, Homo sapiens
PKPDNYVTERLISMAYGQIGMIQALGGFLYYNLCRYLAREQASYP

SEQ ID NO: 985741 - protein, 50 aa, Homo sapiens
MTSLANNCETPSLLKTTKTYGRCGECAPYYSHDYSGGLSETGRRMSETRT

SEQ ID NO: 985742 - protein, 61 aa, Homo sapiens
HCWCWPGWILNYLNSSEPPDSDLPKCWDAGVRQRAQPEHTFLMEPTHEDVGAGEILIVIDL

SEQ ID NO: 985743 - protein, 32 aa, Homo sapiens
MVRSTVKSPKLSHDRGKAAIYKGFPMQTRHLM

SEQ ID NO: 985744 - protein, 71 aa, Homo sapiens
DIPDGVQKILQDYKSHPGYHCHPGYEMNLLRKTSETVSRARKIQRILSQPFQVCIEVFTGHMGKLVPQKGA

SEQ ID NO: 985745 - protein, 59 aa, Homo sapiens
VLRVELEPRCVGLELKRSARAEACQNAPAMHTSKPCTCHVSCASLVVYSSSDVSTCTAM

SEQ ID NO: 985746 - protein, 109 aa, Homo sapiens
CHSLGTAKAMTEELTAFPQAQDQVQGRVFLDGVVRKSAAIFQLLACKDEPLLDRRDAFLILNLELDILDVATGLHFQSAGLAEEGLHEDLHTTSQTQDQMQVLLLLDVV

SEQ ID NO: 985747 - protein, 95 aa, Homo sapiens
DWYQQNKYDSDREGRDATGDGTKEKPYTTGLHGFDDSREQEPFPTIYVASQTEHERWPVISTNQRLTEPLKQMWHYGNQTEDVTLPGTKTTTADT

SEQ ID NO: 985748 - protein, 133 aa, Homo sapiens
SAYSSAGTSSNICDAEYLQSGYDVHLEFLDLCVEGMRDDHLYFSQIHLELTLPGKLQQHGKELMCTGTAFPCDTAIMKLWNLTMPFIQPSSTLKESFDGQMTEDNIEVWQSAMQAGFRRLTPTEVQDYLAAIA

SEQ ID NO: 985749 - protein, 44 aa, Homo sapiens
MNEGGTQQDTEGEGGTEEGLGYLNPSVCQRQKEDINITTVSWLP

SEQ ID NO: 985750 - protein, 34 aa, Homo sapiens
DGRNCVYYCAKEGGYLLWFGELCLTVWTSGAKVT

SEQ ID NO: 985751 - protein, 78 aa, Homo sapiens
MSARGATGISRAVRDLCLSECSQHDGLSPHHLCNTPTLGAVRLYCSYADYLTTRCTTYVCTGQNLADLSGSRERRPPH

SEQ ID NO: 985752 - protein, 56 aa, Homo sapiens
WGACPDNRGRIQDYMNSEVLAHMGIKACRGFKTLTGDVKPRNCLVKHVVNADTKGK

SEQ ID NO: 985753 - protein, 80 aa, Homo sapiens
MIPQCIKEEDTPSDHDRGICMSPESYLGSPQHSPSPEGSPNRSLPSPGVLCGSARPKPYDPPGEKMVAAQVKGEKVDKKL

SEQ ID NO: 985754 - protein, 184 aa, Homo sapiens
ASSTIESEPPKHVEGVWWTSMVDTLSDHTRPVVWCPTLELLTPQSAGCQLVLQQLLVEAIFRGVTAHQEQRQASAGSKGVTSNGEQLHGLGGLLLPPLQGGEVEDPEITGDASSGKSPQQIHGTTDSGHIMRLQWKERGDGPGPPSSAPASICVQRRSLTEYLYRFPSSPWGRPGPKYHKVHRV

SEQ ID NO: 985755 - protein, 163 aa, Homo sapiens
IQAVQAEPGTLTDQDDREREPELPAHPPRSSTLDHNTLARMPSGLPELKLLQVVYLHSNNITKDGCQDFCPMGFGVKRAYYNGISLFNNPVPYWEVQPDTYPHAVTDRLAIQFGNYKKKRQLQPPRGLSGGLWGTQIDILMGRQRQEAKPGPSCVQPSPPPRV

SEQ ID NO: 985756 - protein, 69 aa, Homo sapiens
PPIHSVPRQCVSLLTQVSARLGDKQASSAPPVSSAKAGTEHANGPAIRHTCQGGDSTGGQEWVHTMTGP

SEQ ID NO: 985757 - protein, 109 aa, Homo sapiens
YGQSLALPLLEHAHGLRGTRELAWTILSHLHMKYWNALDFTRLLIPLQMRSASWEAHQTSALCFSWPSPSTHAPSYDSRTPSFTDDDGGVSSCLRALPVRYALPGTHPG

SEQ ID NO: 985758 - protein, 40 aa, Homo sapiens
RRYRGSPSRAEHYPRQTMNQIGACIRQWGVTLLLLAVFTS

SEQ ID NO: 985759 - protein, 136 aa, Homo sapiens
AAAMHRHAPSSVWPVHIITCSSPISSRSSLTFPVWPFPVISMCISCILVHSIVLLAAASACSCCQSRWSTMHAQLEVYIFHFNFSQVCSSVAGHIQAKQHNNIMFSHFQSRAHSQLAVQTQWQNSIVLNSTQQAQH

SEQ ID NO: 985760 - protein, 102 aa, Homo sapiens
NAQVTNIPQVLNYQTCIQNFGWGDLGAEPNLTEQYMLRLHQSTRTTILNRSNNLTNGPRYPRDTSQSYTRVHINKRVYELNIGSGHPDGAAAITGSFVRRLP

SEQ ID NO: 985761 - protein, 85 aa, Homo sapiens
  misc_feature (8)..(8): Xaa can be any naturally occurring amino acid
KEEEEEAXSSEPAVGITRHRTGGQAQRLTPALPATQEADAGGYLEPSSFEMSLGNMARLALQKVLKNSWVQWHVPIVPVIQEAEV

SEQ ID NO: 985762 - protein, 31 aa, Homo sapiens
MGIIGTIFIGLIVGLLARFLKPGDDSMGKST

SEQ ID NO: 985763 - protein, 34 aa, Homo sapiens
MFGSTYICEQLFSIMKLSKTKYCSQLKDFPDGIL

SEQ ID NO: 985764 - protein, 100 aa, Homo sapiens
IVHVKELGIPGLMQFYWVHYRLSQDTDNQTKVYAVITHRTKKKNHLTINTDIFVVSLYKKQIRAFMWGYSYVPVVTSRSPNSSGYIILVTWPLNTGNRAR

SEQ ID NO: 985765 - protein, 69 aa, Homo sapiens
MAPLPLLLGISSGSSSRSCGAWRLATLRGCQCLLQLDHQYVKSQLIKIIDSDQPKPGIAQLAPTGEKGG

SEQ ID NO: 985766 - protein, 75 aa, Homo sapiens
MVCVVTVSVCDIITVGVMPSWRLCDINMCDVDMARDVDAASRCDVNAKFPMSVCDVLHLNEAIAISLRDVTWPLN

SEQ ID NO: 985767 - protein, 58 aa, Homo sapiens
  misc_feature (56)..(56): Xaa can be any naturally occurring amino acid
MPNTNSPIRPRTIHNTNPPIRPRTMQNTYPPISSRTMPNTNPAISPRTIPNTHLPXAY

SEQ ID NO: 985768 - protein, 77 aa, Homo sapiens
REAILVIVYYTPGAGESSKMNDAFGGGSLTASPVKKHRLVYVSSLHSKQMSFRITERTDLLGKQNCSTKVFALRLTL

SEQ ID NO: 985769 - protein, 52 aa, Homo sapiens
QRLERGNKNLLVETTSRTAPQLGSGLFQSLQSIVLNLEILCVSWPEEGGSRA

SEQ ID NO: 985770 - protein, 70 aa, Homo sapiens
QDTKSCSRPTDMLSTYHCYAYARFQTKLFISFFYLWVHLIINIIQVWITSPGILCSIFFIHLATTVLSFK

SEQ ID NO: 985771 - protein, 40 aa, Homo sapiens
AGVADMSHRTWSDTPFSFNELSGAVATPLLCGMQVVRDGL

SEQ ID NO: 985772 - protein, 84 aa, Homo sapiens
YVSYYPYRTHLPYRLIYLYRLILPYRLILPYTSYISLTVLISLTSYISLTVPHTTLTVLNMSTISSHHSPIPLHRYHSYTPTVR

SEQ ID NO: 985773 - protein, 52 aa, Homo sapiens
MTHSSVHVFRLSELRGPDETGDVAHGKPAGPGFRTWPQARPTRVDANFNAIP

SEQ ID NO: 985774 - protein, 103 aa, Homo sapiens
QVDAQSEAQALSWTGFLSQDPSLQASGSRHQGGGWDSVSGCGWEGVSGRGDPRVLGVIQSSDGLKVPRWRKEESLLLACLPSCLLQDASSHRLWTKVWNLHQP

SEQ ID NO: 985775 - protein, 112 aa, Homo sapiens
MQAGAVHVGLLCGASVKLLSGAVAASKPWCYESVPQAQGPQAVLLMAENEAKQLPSLEDSTGVEAEGPFQGRAALGAAAGARALFYHTGTGTQVPALSAGSQEADSPVVRSH

SEQ ID NO: 985776 - protein, 45 aa, Homo sapiens
LEYPFLMEPQATDASTRLGRGVSEDQVLQALLDDFDYKLRAAASC

SEQ ID NO: 985777 - protein, 33 aa, Homo sapiens
MVLYLSSRKSPYDKTGRLLLCSSICFYVLFIIE

SEQ ID NO: 985778 - protein, 77 aa, Homo sapiens
KLTLVALLLWADRCHVVRDRDLDGGHHPQMSLSQQIENIGAQRRRKEPAPTWRDLKMCHSDWKSGEYWIEPNQGCNL

SEQ ID NO: 985779 - protein, 74 aa, Homo sapiens
TFSTSAPTVCVTPAVLSDSNSRTYLESQGCLLAESLSPARLCLACPCLVQLTMPPLVPCFPKFCCAALNISSRL

SEQ ID NO: 985780 - protein, 40 aa, Homo sapiens
  misc_feature (6)..(6): Xaa can be any naturally occurring amino acid
MCPLAXVWLFRVPSGPFSVFTQGRPSLSFLSLAAWHSARW

SEQ ID NO: 985781 - protein, 40 aa, Homo sapiens
MTGVPGPRGRSMSRTSHSYTLSHGPGSHAVIDSRVFRSQT

SEQ ID NO: 985782 - protein, 37 aa, Homo sapiens
VTALRRHVPPLSLGSPFLSGGQSEEEAVIKLNAIGPA

SEQ ID NO: 985783 - protein, 44 aa, Homo sapiens
ILVLESAPGPGLQHHEQWLVGGPCLMSLQSQRRLSPEIHLPHFI

SEQ ID NO: 985784 - protein, 30 aa, Homo sapiens
MDQLPWVTPRVLQTLCLDTCIHVAIGPGGG

SEQ ID NO: 985785 - protein, 113 aa, Homo sapiens
QAEMEVIAYVMLSIQPHYIGGVTVQRWRKVRADMSETVTTPVLPQSYSSLPSTETKWGPTEISTSNTCWLNHVASARGCLTHARGRLTLTRGQIPGFNTMTLASKVPRKEAPS

SEQ ID NO: 985786 - protein, 45 aa, Homo sapiens
FNNPHTGNCNEGLKNVTAGANPMDLKRGIDKAVAKVVDHINGFCR

SEQ ID NO: 985787 - protein, 107 aa, Homo sapiens
RAGTSSGPPLRPVNSLQAFSAWVGSKNSTNHRKVALVPHTKVPRGKLSRLRGPWVDIMVPISASLTCTARLPVYHGFQWERPVHSNSFLCKGDKVLVIGFGIPGLRA

SEQ ID NO: 985788 - protein, 85 aa, Homo sapiens
QFWPPLLMITPKKGNQGIIDDTSIPMFTACTASQPPRLESELSVHQQMAGTENVGAYDTVQYYAAIKRNEILSFATTWMELEASC

SEQ ID NO: 985789 - protein, 64 aa, Homo sapiens
VPYTPPPGFLPSLVYLVCGPAAGAGATPLRDLLRVVYHGSASPGGLLTHRPPWTSTRRTGVPAL

SEQ ID NO: 985790 - protein, 52 aa, Homo sapiens
MILDIVLSQSLKTCALVRIFSFRQEMSCASEFLIILVLSQDTVTQFRTVSFI

SEQ ID NO: 985791 - protein, 124 aa, Homo sapiens
GDSLRARVISRIALCGTVVLQVPGRCSAVNVGVQGQPGVVKGCRGMLVTRPWVGESTLVKESASGAKEAEGDGGLGRVTYLCPMLLMRLSIAFPYSCILMALILFASSPFQEFTAGGTQNLPQL

SEQ ID NO: 985792 - protein, 46 aa, Homo sapiens
  misc_feature (28)..(28): Xaa can be any naturally occurring amino acid
  misc_feature (39)..(39): Xaa can be any naturally occurring amino acid
ASSNISTSEKGDRKKGLTNQSRKSHEDXKSLLVLSWVIXSVLPRER

SEQ ID NO: 985793 - protein, 66 aa, Homo sapiens
PELMMSDGVTTYDGMARAWCRLNCLVPQGLVLPQRAGSGGDCAQQGSRRSLEERPHMCRRKYSRKD

SEQ ID NO: 985794 - protein, 50 aa, Homo sapiens
MSEMEQFYPKTFPTSWNSCLPLNWSLVPEQVGDCWLRQPPFSDEHFELGN

SEQ ID NO: 985795 - protein, 39 aa, Homo sapiens
TRYRTEILRNCGKSRVVSGRQWDLRATAAEVGLVQALDV

SEQ ID NO: 985796 - protein, 39 aa, Homo sapiens
PRHLAQKFSHEEIAWRPSQRCADSAPAVTGITFLPLGQR

SEQ ID NO: 985797 - protein, 72 aa, Homo sapiens
LCCGRSDGLPLDDPRLTELTRWEAALRALEGLVYRSPTATREVSVELATRALWRSPANPTTQVFSSRCRGTE

SEQ ID NO: 985798 - protein, 36 aa, Homo sapiens
WQGEARKIMPLHRHLTQIGAKDSPCQLDGINRYVAK

SEQ ID NO: 985799 - protein, 52 aa, Homo sapiens
LTGHTLSSGHKLSPDPGHTLSSGHTLSPDPGHMLSPNPGHALSPNPGHTRVP

SEQ ID NO: 985800 - protein, 166 aa, Homo sapiens
GREVMREEKTLSRIAFMQQDVLDRAREQLSATAEEIQGPKSIDQIHKEAAMAEHREHIKVQQLMAEGRDQASGLVLQALPSAVDFPLLDDGGWNTVPISKGSRPIDTSLITKITKPGSIDPNNQVFAPGGRLSWGKGSSDGSGAKPSDAASEAARPGTSTLNRFSG

SEQ ID NO: 985801 - protein, 44 aa, Homo sapiens
EDPLRIGCILIEYYLGFTVFPTHDSKEHLAVIERILRPLPKHMI

SEQ ID NO: 985802 - protein, 193 aa, Homo sapiens
MTALSLSTLEAPVAAVAWGHWLIPVVFPCVDRRHPDTHAIHAAAVLVTVIRAAHVTAVIALEALLTYTFALDNSGPDCDSHWGTVAGCSPPQYSPHHTHNLPIDTAAMATAAIGTLELPTVSSSETIITLTPPVYTAATIVTVSRTPLLAAVHTGKRLITYTLPLLTPGLGVAGMWAGGFPQSSPVRLLRRPG

SEQ ID NO: 985803 - protein, 139 aa, Homo sapiens
SGVQIILLPQPGWETQAEMDTQGGGGPSDVQGVKTVMLSKHNSPISSVQSQPSQSVRSVSSPKVPAFESGYTQISPEQGSLSGPLYAEQGAQPHEGCAYRIQTTLKQGGGTGASVTWGRIESTIETYENPKKYDSSDGR

SEQ ID NO: 985804 - protein, 67 aa, Homo sapiens
GRIVQVQPQVTAVSAKRQPEEHLQRRCQYSHQSRPMSSLIPSRRCRCWFQSHDRVVVHSLRRWTMPP

SEQ ID NO: 985805 - protein, 52 aa, Homo sapiens
SKDPVQPSAEPDPLRCMPGVAGAGRATIRPCSTFVDQQRFSRPRNLGELCQC

SEQ ID NO: 985806 - protein, 38 aa, Homo sapiens
IPMAAPRSAASSTGLAIRQQGHTHILFQVGKGSRSSHI

SEQ ID NO: 985807 - protein, 40 aa, Homo sapiens
WQDSANSLKIISNASCTTNCLAPPGKVIHVQLWYRGKDSM

SEQ ID NO: 985808 - protein, 40 aa, Homo sapiens
MLDDRDWGMQPQALLNAHGQEGQLGQVVPFNLYRFTVPQK

SEQ ID NO: 985809 - protein, 52 aa, Homo sapiens
LAGHAFMDTAWVGVHNTYKLEEFREPRGQVQWTVVTDNNAPGNFSRIMNKEQ

SEQ ID NO: 985810 - protein, 41 aa, Homo sapiens
YTKPAQCGTLVIVNNYTADRINFSLARGELARVLNGISLDN

SEQ ID NO: 985811 - protein, 38 aa, Homo sapiens
MRLSNSGRSQLSLPQKLLQSSSSESSPHPLSLGGTSSN

SEQ ID NO: 985812 - protein, 68 aa, Homo sapiens
MAYPAGVTLIPPAAVPEFQTPHFDALSPTQVEPGTGGSTEEAGVRRIKMATADKIVKLMLDHMTNTTN

SEQ ID NO: 985813 - protein, 78 aa, Homo sapiens
TVSLVMSEQLHLLLSRCVSFSSDQELAVLVQTGHRSAHLSLQAAEVETPVYTAAGLWGMLFFTPYAVAVVVVPLGQRG

SEQ ID NO: 985814 - protein, 35 aa, Homo sapiens
FATRCRRMIMIRMHLPGSCDRTYVLAGTPLLSLHS

SEQ ID NO: 985815 - protein, 48 aa, Homo sapiens
RPSLADMPCGWMVTDTLTDSHCNPDLQQSQLPLVCHWASVSQASAIGH

SEQ ID NO: 985816 - protein, 72 aa, Homo sapiens
MCTECDVNETDKQTLYLHPNWYRHTDKQTCAPTSMNGWINQTLHLTIPSDGMDSHQTLQLIHERMNKQTWHL

SEQ ID NO: 985817 - protein, 75 aa, Homo sapiens
MLSRRERTPHFEGSHKLCLLVEGPGAASGRSTVQPLRVEEGWAVAFTLIFAHYAVKDDGKALSSEARPAAEAFSI

SEQ ID NO: 985818 - protein, 56 aa, Homo sapiens
IEVDLSGTQFLLSRSGFYYFIHFIYFAGQSPGRNKPGQFLINEFHTNTKRFCHWAS

SEQ ID NO: 985819 - protein, 84 aa, Homo sapiens
MAHTITKKFDTLKLQKKARKELLGKGELQPQLDSALRDVNDMYLLLEETEKRAVRRALIEERGRFCSFITFLQPVLDGEPTMLG

SEQ ID NO: 985820 - protein, 134 aa, Homo sapiens
TPLGNGGVVSEGQMLEEQVLLVSHQRGIGSNVRRRSRYSSETCSRTLSSASSSCLKVGLCEGAVCQHSRISAYSSGGQCGGRSIGCPSRSRENSSSTWIAGYGEAPKGERFSHSRIPKDHTSLLCVLPPGQTRP

SEQ ID NO: 985821 - protein, 39 aa, Homo sapiens
SLPVTSESMYIMDCMRWVTAGNEMELLIKTKNGECPPSS

SEQ ID NO: 985822 - protein, 41 aa, Homo sapiens
MYRPAGIYSSLCPAGHSSNCIKPDGLLEFAKQLARWGRGAF

SEQ ID NO: 985823 - protein, 54 aa, Homo sapiens
LSVGRPKLTWNWTNDDKLTFLNDLDLNLTPLYLLLDYADDYYFTYTLPTILDMS

SEQ ID NO: 985824 - protein, 142 aa, Homo sapiens
VVVLGRSLYAHCVDSETPIPMWATFESWESACVLIAHGFPRSLGPHLSRVRSLELDDWPPLHRKVMSSIVNDLTNSIWEGSSQGQTKPSEKSTREEKEQWIRSKYEEKLFLAPLPCTELSLGQQLLRATADEDLQTAILLLA

SEQ ID NO: 985825 - protein, 42 aa, Homo sapiens
TRTTFDSSLASTLAGAAAAAGAAVVAAATGAAATKADGSAKK

SEQ ID NO: 985826 - protein, 33 aa, Homo sapiens
ACRPLALPQAPVRSFSCSACAPPRALILPLGQR

SEQ ID NO: 985827 - protein, 52 aa, Homo sapiens
MARLRGCVPIFSTQRHLAKSAPSFLYLGTAAQTSPSNPWWVVSPFVPAIGQR

SEQ ID NO: 985828 - protein, 67 aa, Homo sapiens
GAISLLKEVEQLRMECYRLLSSHNTMVLGLIVDEAEVVRTLITPPAYGTNSEDSLTPHEIESEGKDN

SEQ ID NO: 985829 - protein, 34 aa, Homo sapiens
NGILMRKLLSAALPVVTMLGFSKVLPGRRGGHSE

SEQ ID NO: 985830 - protein, 107 aa, Homo sapiens
TLLSNATRVNYSWALWLTPASQSFRKLRQENHPNPGGGSCSEPRSRHCTPAWATRAKLCTPPPPKKKEKTNTSLLLAFKKTDHQAGHPTQALDHYKFKHQKPRVPIL

SEQ ID NO: 985831 - protein, 56 aa, Homo sapiens
LTIYHTPGLNPSADTALWEGQRKEKADGLTDTTEEQESSLGPMEEKYEPLGILASV

SEQ ID NO: 985832 - protein, 74 aa, Homo sapiens
ANPLEVEQDSIITEYLEVSTGAHVRRNLYRGGMHRIGEYTSPGSILTIFGGQQRCSLCRRKLVQGRHAPKWVNY

SEQ ID NO: 985833 - protein, 33 aa, Homo sapiens
RDEAMILARGKDPGDTLWKAAVPSIIIIIMTQL

SEQ ID NO: 985834 - protein, 50 aa, Homo sapiens
MIVCDHVSCLQMAVLSRMKYSLQVPPFYLVRKPEQALASQNSDLGLDAGV

SEQ ID NO: 985835 - protein, 38 aa, Homo sapiens
PGTRLDPGTALYKKAGSNDDDDDGRHSVLTTKGDLGLV

SEQ ID NO: 985836 - protein, 120 aa, Homo sapiens
LSVTRRDQFFFMKASYLVDRLISHNMGRSPALSIAPSLAPPGSHAIIWSGPRQKYPQSPTQVSQHGHCIDNHSHLPIGSKPHLDPCLSGGPSREPSGVRLTDTDANFSAGRSTRKPFTHT

SEQ ID NO: 985837 - protein, 36 aa, Homo sapiens
VSWNANHLAVFQYSSSPVIGATLQKGHTEYPERSHG

SEQ ID NO: 985838 - protein, 62 aa, Homo sapiens
MAADCLASDPAEKLCGACANFDGNQTNDWHDSQEKPAMENWRAQDFYPMLWLESVIHQERRF

SEQ ID NO: 985839 - protein, 94 aa, Homo sapiens
MIVTWIRKRVSDSTMCSYVFAKLIRLKVTVEIESSQRSGHAARLTQVKQRGVDDPGSGSVREKLSCVNSTVVKRGGELAALAVHVGLHVGDAVV

SEQ ID NO: 985840 - protein, 39 aa, Homo sapiens
MRYVNLQYRIFKFSLTLIFLPPFSMSKGHMYWANRGYRA

SEQ ID NO: 985841 - protein, 46 aa, Homo sapiens
MIVCDHVALKQQWPFEKPYKSLVTSSPILPVLKPDKPYKLVQDLGL

SEQ ID NO: 985842 - protein, 68 aa, Homo sapiens
MAPRTERRVTRDLMSDAVPNSSANICATREIWSWGGMINDIMLVPMAAGRLQALNELLDLPDLHVPVG

SEQ ID NO: 985843 - protein, 125 aa, Homo sapiens
MLSAKPGNSFALSLVSRRYGWQLLQFLSNLQRLTSALQNLKIYLLDSHTNLHQRAHLFPIPSGWLHAYIDVSTGVREVDPPLHCCAGRLKTTKPLRQGNAIIPVITLYVHTVFPSISLSTPLCNR

SEQ ID NO: 985844 - protein, 62 aa, Homo sapiens
  misc_feature (1)..(1): Xaa can be any naturally occurring amino acid
XSVLEVCCLSLVIRNLQSLCKEVIALHTCGAGGEVERQCHSRSTLGHVFLHPICCGSGGGAI

SEQ ID NO: 985845 - protein, 72 aa, Homo sapiens
EESAEAGASSHRSDTESYERATRQRLHILNTYKPQKDSWKSRQVILFWRPYLSRVTHEIITRNLDQDTETSI

SEQ ID NO: 985846 - protein, 38 aa, Homo sapiens
KTSRNSGVSYTVYVSVVRCLVMSRYYNASQATYGSTHS

SEQ ID NO: 985847 - protein, 96 aa, Homo sapiens
QTEKQQSQNCSRRLQIPFHSLNRDSHEKSKEVSPSWHNLTARVPKPLAEDQYWSVACWKWAAQQKVNGGKQALPPELRLLSNPWWHYILMGAGTLL

SEQ ID NO: 985848 - protein, 41 aa, Homo sapiens
ESISAPLRIRETCELPACVCSTSLSYFGIMSHRWYGISAVR

SEQ ID NO: 985849 - protein, 36 aa, Homo sapiens
APSMYTAFAAAFALLNCGMAVGPWHEEALLIVPGLL

SEQ ID NO: 985850 - protein, 63 aa, Homo sapiens
MYPLYTVTRSSCLLIDYVRLEQLHFLRELMDHIRFFPVWRLSVSTVSSGSPVMMPSLICGRIL

SEQ ID NO: 985851 - protein, 78 aa, Homo sapiens
MFNHVFYLQIPGTGLRKSKYQTKVVEYSTSGRNAEQLIYRLVAPARPPGSPLLKVTITTNSANLHTLPLTCFAKPQLR

SEQ ID NO: 985852 - protein, 50 aa, Homo sapiens
KALVSSFTTVIGCLFLNLEAADKINVPYFPAMLVRNCPALGYVLSLAIFP

SEQ ID NO: 985853 - protein, 86 aa, Homo sapiens
ALVLKAHEGTPQQHRQCQPDLQHAAGAFLQGVVSDGHGDAGTDQQDGIEQRQAPGADGALGRRKEFRVGVVEQRPDEFEVRRVPSS

SEQ ID NO: 985854 - protein, 64 aa, Homo sapiens
RLIIQPSASILARSWCVDAFSFFQHLLQVHDTRGFPPGLLYCYGAVVYTGKEPFRQGWCFSPGA

SEQ ID NO: 985855 - protein, 34 aa, Homo sapiens
  misc_feature (16)..(16): Xaa can be any naturally occurring amino acid
MFNFLHLSKDYSTLTXQISATPNVLVLYYYQQEF

SEQ ID NO: 985856 - protein, 61 aa, Homo sapiens
HKDSKEQALMSEKKKNRALRALNDQLLAELARIASVNQRLLFEMAELKAVSSGKVVALTQK

SEQ ID NO: 985857 - protein, 168 aa, Homo sapiens
DRFIPWHHQVDALKKMCWIRGASPGVSRLLSPTVGALTWTVSPGQVGHNYSGIILMPLSPTTIYGRLSRQAKFYLVPLHYRWAGCPMCRCNLGTHNLSWKAHRGLSVASVHRFHLCSGCGLTLDRSGQLPYQRAQKSHSQGDTMVRVGPLWCSLQNPASQPGAVRYWS

SEQ ID NO: 985858 - protein, 34 aa, Homo sapiens
RSSSAPCLTDIWRSAQVLTVSDGNLYMGGMHLKW

SEQ ID NO: 985859 - protein, 95 aa, Homo sapiens
SPTRTIGSSTPCPEHRNNHQWLSQDTTPLSTLVTRLPTTISRSTPTSESTYTTSPSSSVTDSTSKIAYSTSMTGTLSTETSLPPTSSSLPTDEDH

SEQ ID NO: 985860 - protein, 166 aa, Homo sapiens
VQDTDFVIRLKLGHRPRNGGTRRVVTSVAFMLTLPILVCKVRDSNRRKMLPTQFLFLLCVLGIFGLTFAFIIGLDGSTGPTRFFLFGILFSICFSCLLVHAVSLTKLVRGRKPFSPLMILGLAVGSAESQDVIAIEYIVLTMNRTNVNVFSELPVLVAMKTLSPAH

SEQ ID NO: 985861 - protein, 80 aa, Homo sapiens
SCCTWLRHHGKVSDGALLQVLSAPTYVIVRPPGPGSAHSFSRHKFQDGLGALYSAHVALALATFHCFSLAFSDASTLYSP

SEQ ID NO: 985862 - protein, 106 aa, Homo sapiens
MAVWCSRSPQDLPGLVMARQAHSSGRSNPQFSGTTIIRELQVLLSSTSPYIVSFYECVLQQWRRSSICMEHMDGRSVDQGLKKAGKIREQVFRKSQDGCNKRRCRI

SEQ ID NO: 985863 - protein, 36 aa, Homo sapiens
  misc_feature (2)..(2): Xaa can be any naturally occurring amino acid
EXLLRALTLFVMTERDMRWYTELNDPMRDGRFLNEQ

SEQ ID NO: 985864 - protein, 72 aa, Homo sapiens
ALPRWPDGTLTAFFLGMESCGIHEYTFNSIMKCDVDIRERPVRHTTVLSGGTTMYPGIAERLQKEITAIGPA

SEQ ID NO: 985865 - protein, 52 aa, Homo sapiens
EDFPTPVERLSLVEGSFPTPGVRVRSLVCRPVPKLPQSLEPRVPQAGIHGLH

SEQ ID NO: 985866 - protein, 77 aa, Homo sapiens
TLQYLTSCPPYFPPSSTGSLTQDPVASFESIPPSLSEDGSPLMLIFVVVSSSSFYNGSRPGSLQVAMEDSSRGVPSK

SEQ ID NO: 985867 - protein, 42 aa, Homo sapiens
VPRCQCNGRVYVVRIVCTFWPRTHKGDWLLKGESVKFHIVCP

SEQ ID NO: 985868 - protein, 58 aa, Homo sapiens
NEDATSQHDDDNIVNYQWFFFKSFGERYNCSKEHFIATFGGPQKLNVLTHSHSTLPVS

SEQ ID NO: 985869 - protein, 80 aa, Homo sapiens
SIMRKLECKHGLGLTMLGFRKGAFQVDVVVTSEPCDTQPDTFSVTYWQRYKSWSPSERISGSMMGTMPFCWRILRIEPSG

SEQ ID NO: 985870 - protein, 110 aa, Homo sapiens
MVFRVVKTVRWSDISGSGNEMTSLSNSESSLSLVRKRDRIEEMSALQAVLNMGFKRKSVFWVIWRMVIICVHLISNNSLFLFCFKHPPMVLESASGQNLFIICLQTLMRV

SEQ ID NO: 985871 - protein, 67 aa, Homo sapiens
TVTPAITDIMEVSTVLTVSTELVQGGMHRMGEYTSDQAPVIRYFGGQHGAHVSTELVQGGMHRSCEY

SEQ ID NO: 985872 - protein, 177 aa, Homo sapiens
VGMYPMSSPLHLIVAVAQRNRIQLKYLILRLSCGDVFQPYSSVTSGKVLQRTLSARMRRTRAGEVSRFFVNEENTTSNEKGLLAFLLVYSPIQSFHDVLRDTSKRVSYLNRHSCSQRNQDYWLDEMTKDAALDTSSTVESLEKLPDILNMTHIMSLNSTATSFTHYHQFRHNKKQQT

SEQ ID NO: 985873 - protein, 58 aa, Homo sapiens
PYSLRASSPLAGSRALSAPAPGSPGVTWLYAQVLASAGNRRGCTSSLHEALEDAQVGE

SEQ ID NO: 985874 - protein, 51 aa, Homo sapiens
GLRVQDAVGEVGQLQVGIPLLPIKACTACLGGNDDQFLPPPVKGFHHCTAR

SEQ ID NO: 985875 - protein, 66 aa, Homo sapiens
MAATTANPANDIRCTITVVQHIASWKLMDLEIQGWTEPLVQKALLQRATSGLELLNEWLDERDTAK

SEQ ID NO: 985876 - protein, 61 aa, Homo sapiens
MHIYHLDTGIHPQLRCQGVCADYSQPPSVSVCTLLSGRGHEKKDDDPVRSWDSVRLTLGDP

SEQ ID NO: 985877 - protein, 69 aa, Homo sapiens
APQMFLCDPSNDHLSPHDVSTGYVEQGLVCLRHHWLWERGLELPETLWLWERGQVSLRCSGYGNRAWYA

SEQ ID NO: 985878 - protein, 106 aa, Homo sapiens
MVPTEYIPYCLRQLLRMNLKAEDSLTTPTQTSSCSASDVVSPIILPERQCRNGCRQLRCHCPRAPIILVGTQSDLREDVKVLIEEDKCEEKPVPEEAAQLCADAYA

SEQ ID NO: 985879 - protein, 79 aa, Homo sapiens
RAGDESNGTGEQMGVSAYVREAFCPGNSHISRYKGQKRRSGGLRQVLQQTTPPYCRTIYNASICDIVGKPRAGKMQIFS

SEQ ID NO: 985880 - protein, 102 aa, Homo sapiens
GEQNRGLVYIVGVRLRGHATLAEVSRSYLGSNLYTEIANNMPYFLKGIPHDVSSLSPNTGKWCLFPFFTRSFYLEVYKKLAWVSFLCTTYFSVLNFMDFRSL

SEQ ID NO: 985881 - protein, 36 aa, Homo sapiens
RASVGYGLSTQGQNHHIVYLFFPPFLGSPVSTGARA

SEQ ID NO: 985882 - protein, 144 aa, Homo sapiens
MLESDHFSNVRDEHALGNLCNNPEAKRHPQLMGCVLWDGTAYIFGLYSLRLEGFGSKHHHQISPQLSPFTSVSTHKKVTMSTNNMAGKAQIMLQLIPQVGISSLAGVGHDSWLAFFLSFGYHFSGGLTTLVPATGALCGGILEA

SEQ ID NO: 985883 - protein, 32 aa, Homo sapiens
MTEAHTSLGPVAHGPAEMQRQLILLPKRDDGR

SEQ ID NO: 985884 - protein, 124 aa, Homo sapiens
SRTVFAMIPNATVSEHLLLSRIQANVHERSGHVRARGPQVSQGSISCDEYLSPFFLGPGHLIRMGKYFRVPLYKSVFNFSPVALLFEKHQLIFLSKSGGSKKGNFTICIRPLVPQRMITNGLAR

SEQ ID NO: 985885 - protein, 70 aa, Homo sapiens
PVRMFLSGSFHPTSPFPFTAEVWGSWGLDYFLDILLTGSMGSNIGTWSLAFQPRFCNQFLHNLRKVSSVI

SEQ ID NO: 985886 - protein, 43 aa, Homo sapiens
YPLAPSSWDYSFTSNLIFGKAGSLLVGQAGLKLPTQVICCSAP

SEQ ID NO: 985887 - protein, 32 aa, Homo sapiens
MHGFCYSPVNSCGSQPILPTSDYLQSGVPTLE

SEQ ID NO: 985888 - protein, 189 aa, Homo sapiens
RECPKKFFQQRRTINFFQPPLYIKMCSFDTTGYAVFFFSSGSTRDRFMQHLKVLFMWANGFHINLNSGYLDGGTSPFPWSFSLAGIFFTAALRIPAWLTHRCGGSVTPRRFRSATDLSTSSASGANELPAVQEGDQTSYKPDEPSDLCISKSLHEVLRKTPRTPSALGILVIIRVFGFTLGSRGSLGLP

SEQ ID NO: 985889 - protein, 68 aa, Homo sapiens
SSLYLNSWSQAIYLPQLSKCWDYRCDAPYAAGQWYLEPRSGVADFKNLIWSQTNGPASSASGNSLKAI

SEQ ID NO: 985890 - protein, 35 aa, Homo sapiens
ADPWCHACLPSQAFIQILLTDMRKQAVDLRALKGQ

SEQ ID NO: 985891 - protein, 101 aa, Homo sapiens
MRARYRCLSMPPCAGGEGAVTLITLDLNLPFLQVGALYICYQANVSRTSVWVLLCYGHLDPPSPGYRLRLSTASVYLTIVSIQDGDLSCLVSDPSSMSIVS

SEQ ID NO: 985892 - protein, 41 aa, Homo sapiens
LVPRPEWNNATHRGHEENGTCAAGYMQPPHVTVCILITPVV

SEQ ID NO: 985893 - protein, 37 aa, Homo sapiens
SGVMMHTAGPESLYKVHETCVCIAKSHILRVPHSMVE

SEQ ID NO: 985894 - protein, 54 aa, Homo sapiens
MSWYLVLNCSWINVPPFFRRFGAANFIGLIAGRMLFYLGGSRLLIAKSVMAIMI

SEQ ID NO: 985895 - protein, 103 aa, Homo sapiens
IESARYRCFMMHYVTHSHAEMSPTFYNIRVDRGLGLCLEVDVGEDGHYDLTVTLITRSLLATDFDESREIEGTESTVSHWVIDSQIHHRGRPCMDLQDLVTDA

SEQ ID NO: 985896 - protein, 66 aa, Homo sapiens
GLTYLAPCYAVRSREDEEQGLPSLQYPPGPGMSLTQGRTTTHVESGLQRGSSCSRKAYGNIELTAG

SEQ ID NO: 985897 - protein, 154 aa, Homo sapiens
GGVVHGSIRRRNCLYSWDHADYARRDGRRRREWEQYLLSGSVSTPRRGTHPGGCPSQGRLWGSGSLLRGGDGTNWACVLATRSWLGRMDSDLPTVGVGQGRLSYDKHHSPILRCRLYSLCVLVNMSNTYFPRRTLTRAPEIWGLAQSKGYGTFA

SEQ ID NO: 985898 - protein, 38 aa, Homo sapiens
SWYGVMMHGGGSADRLRSYSCARFAFLRNHVDKPDIAE

SEQ ID NO: 985899 - protein, 51 aa, Homo sapiens
LAEGSRLEEQAVQAFFLPFLPREPVRKVSSSPILSALDCRGGAVGAVGLVG

SEQ ID NO: 985900 - protein, 57 aa, Homo sapiens
SALSRTGVVDDESSMTRADGDNPPGGEGHGGLVWAVPDAAWARTRCPGIPVAEGTEL

SEQ ID NO: 985901 - protein, 37 aa, Homo sapiens
MRVSMTRADGDNPPGGEGHGGLVWACGRSSVGPNTMP

SEQ ID NO: 985902 - protein, 72 aa, Homo sapiens
MSEHNRLTPWPGGGDPRATYLLVAISPWPYPDTRALLHKTPYQHPVYWEPCASWMEVQLGVWIPEGGSSKLH

SEQ ID NO: 985903 - protein, 35 aa, Homo sapiens
SLVGSPVCSGLAPPCWLLLPHSCYSEYLEDVLEEL

SEQ ID NO: 985904 - protein, 61 aa, Homo sapiens
FNKLTVRGEGRRVVYRDSGPRRGVLTTNTDGTRDDYPCNDGTVRDGVTYDDDTQRRRGRRH

SEQ ID NO: 985905 - protein, 85 aa, Homo sapiens
STKQKSAVLTLQTMCSFESQHRTYISQPQVGFQSGDETGLMSGTFRQTEVSDSREIAGGSSADMGTTQNVPKWTGLKQPLKRDGS

SEQ ID NO: 985906 - protein, 106 aa, Homo sapiens
MARDACTQVEAEGRGVSVYPTLLKAVAGGWLTDTSLFRVLWGLPVECGEDDTRRALGSGTLHRVDSKEESKDVIVMAVAVGVAVLALGGWSNSAASCSLISMFIRG

SEQ ID NO: 985907 - protein, 76 aa, Homo sapiens
MGVIPEPFHSPLREAATESGEVERQFPCGASAQVLRNCNRKCSDAGQTPSENGNLHLLHMPIAYMEMVTSYHSHSF

SEQ ID NO: 985908 - protein, 49 aa, Homo sapiens
PTSRQVPDQPDSSRVFIMPPISGVFARLGQRHPVPARSYLATPPCRASR

SEQ ID NO: 985909 - protein, 33 aa, Homo sapiens
EDSSYSAGEAWLNPVLVSDHPPLSCTRLSRQAQ

SEQ ID NO: 985910 - protein, 52 aa, Homo sapiens
MRGPQTRCEAADDCSAGYTRPWFLGMAGTNRSFGDGVFLGSSLFPTGKHAHG

SEQ ID NO: 985911 - protein, 51 aa, Homo sapiens
SVRDRRIGTNNCSPGDNTVIHPGAVMINIPPHSCHRHCSGNIEGDGKSGSV

SEQ ID NO: 985912 - protein, 47 aa, Homo sapiens
  misc_feature (27)..(27): Xaa can be any naturally occurring amino acid
PPACTSSNDVQPMAHATRSSGEQLVPXSAPDVKCVAPFPFRGDEACG

SEQ ID NO: 985913 - protein, 36 aa, Homo sapiens
TLSYYSHRLRIIDLSSLSIFHLHVLGEAVAAGEAVA

SEQ ID NO: 985914 - protein, 41 aa, Homo sapiens
VGGTEVPGPGSRYAPSVHRAPVDHLCLVPDTSTPSVVSPIA

SEQ ID NO: 985915 - protein, 69 aa, Homo sapiens
GKRTVCPNVDYHQQHESRLGESAWTQAHGSDCRALTYAPCCSYSIVPIYIHNRASSSDPFYYSLSVCKK

SEQ ID NO: 985916 - protein, 112 aa, Homo sapiens
MKEQERRGTLLEELTLCEAWSAHLQPRHTFSSLSSTKASHVAHTFACSVKAQNTQGPNCLPTAPASWLARQGQKDQIISHISPFKEAVIDHGAHAQIVPLGSLSSRGSQFLH

SEQ ID NO: 985917 - protein, 39 aa, Homo sapiens
VHGDSPWALACVFCQMLGAAYVSRKRGAYTFSGKPVAWV

SEQ ID NO: 985918 - protein, 46 aa, Homo sapiens
EDPVLKASIALRQIIWSQLYFWGKLAERRLNNATSQGATPGAGWTL

SEQ ID NO: 985919 - protein, 83 aa, Homo sapiens
VYAPSWCSYGGQPQMTTEVPVLVMVTPINEFSPDLLPLATFRVQEDAAPNTLLGSVVGTDMDYPHDNIEYYTSGGPTTFAVDR

SEQ ID NO: 985920 - protein, 30 aa, Homo sapiens
MGLAAGCLHAFCITGWQWNLQLVLLVLDCD

SEQ ID NO: 985921 - protein, 37 aa, Homo sapiens
SRGSLVASIITQADEAGFELLVDPAVPGVIPVKVVEG

SEQ ID NO: 985922 - protein, 53 aa, Homo sapiens
MARAVRVLGGVSLPSADILNRSVLQPRRKAWGGAAALPTLRLRGFPVRSARRG

SEQ ID NO: 985923 - protein, 60 aa, Homo sapiens
MGVGLRRYLLLPLSVGSGVVIPEVRPWEVVVSVDVRADAPQCMLPSSVPHTHVEDWYVGS

SEQ ID NO: 985924 - protein, 76 aa, Homo sapiens
EGAASWVVAAGVRDANMRILVKTLTGKTITLEVEPSDTNENVKAKNQDKEESHPDQQRSDMGRTNSVEDGRSSLSN

SEQ ID NO: 985925 - protein, 76 aa, Homo sapiens
GPRPRLGGESPAQLSWLERGRSSISSSGIVRLRSVISVWLGLDHFCVGGHLLVQLLSLAEEPGLDIPAVLLRQGLV

SEQ ID NO: 985926 - protein, 84 aa, Homo sapiens
YVKCVAEEWDTYFLSFVQCKVREGLCKSHSILSLLPCGRDGIWLENEWVFLSSSAVTMDDVTARHHPVMSVFLRCYAIQPFAPG

SEQ ID NO: 985927 - protein, 51 aa, Homo sapiens
RDISLKEYKQMTERTSGTFAYTGPSCGDQWGLLYVLDANGDGDIGIIAKEA

SEQ ID NO: 985928 - protein, 87 aa, Homo sapiens
MERVSWILACLAQRVDGGTCGSNLATDQVLGNPEQAVGDLCSLVAVQVTYVTPSRLVWNRGILGADQILVNPKQAVKEIVESLGAST

SEQ ID NO: 985929 - protein, 61 aa, Homo sapiens
ALIASRRYSLSALGSPYKDEVPCKENDFYFQAKSGKLTPLRNWFRLRGSGRRSSNMGLGLG

SEQ ID NO: 985930 - protein, 60 aa, Homo sapiens
MRCTVGSPLRIRPTLNIILYLYGEDIQTLGQEDSGIVPLLHKGKSSDASMLLAATCCLLQ

SEQ ID NO: 985931 - protein, 92 aa, Homo sapiens
  misc_feature (69)..(69): Xaa can be any naturally occurring amino acid
  misc_feature (77)..(77): Xaa can be any naturally occurring amino acid
VRRDDSPVETSSVWLSHVRHSFRETIYTISIRRQALTHTLHFTVRRHIVLQYVHMLSNIYCLSTVHWRXSVVRWRLXGRLGGSLTAPQYAAV

SEQ ID NO: 985932 - protein, 48 aa, Homo sapiens
RIQALIASHLAVLDTLGSIPVVEYNRRQKVGILEVEKIPEIVHISQRL

SEQ ID NO: 985933 - protein, 159 aa, Homo sapiens
SSCSYLVWKKSVVANISPELVIPSYLLAYTYASATLLPRQLPPQTTAHCKSGVQIPPLTGAVLILSPSSSCITQLTGPCTSTIDHYSLLDIQFMTIASVGPQLSTCSLHYLSNVFSPLASLYRCPLPSPGRDATAGYLSLVQQQGIALTEQLKQEAQLS

SEQ ID NO: 985934 - protein, 46 aa, Homo sapiens
QLLHTCQTAGVANKFLINEKIGSHGEKNDNAALVFRLTAEALETKT

SEQ ID NO: 985935 - protein, 37 aa, Homo sapiens
SRYLFFSIYSSNHSSRDTDQGEQASNDAHDGGITRSR

SEQ ID NO: 985936 - protein, 42 aa, Homo sapiens
MAEVRVRIEVRFFHSTLSLSSSLVASPPQPAQACASYLSSYS

SEQ ID NO: 985937 - protein, 103 aa, Homo sapiens
MAPNVLVLRVLSTVPDPGCFFEMGSRTVTHVGVKWRDPPPRLKQSSPSASQVAGAMGAHHHAQLKYLVETGFCHVAQAGLELLSSNDPPALARHEPPPHAWIA

SEQ ID NO: 985938 - protein, 104 aa, Homo sapiens
AYYGYDLAFLKDHKDGGVGHTGHAAIIEGVAPALLGRRTDKGGIAPDELAHQHPGQEHRVGLRVGFAVVVEYGSISGKVAPLAVGSAMNTTDPPVKVLLADGVH

SEQ ID NO: 985939 - protein, 46 aa, Homo sapiens
MPSGDTDESFRRYTYGEITTGCVPEEHPCGQEGGGHVAFTDQDMLR

SEQ ID NO: 985940 - protein, 35 aa, Homo sapiens
EVIIRNHVSSDDGLHGRLHLLHLWTDTYLDSAPEV

SEQ ID NO: 985941 - protein, 46 aa, Homo sapiens
HEAAAMGKSSGLFVVVVVVFEEMGVSPWVAQYGMGKGADLNCTGNA

SEQ ID NO: 985942 - protein, 104 aa, Homo sapiens
PVDGSLAILLSSLLHPGVDSHMPGTSRPTSNEPERPTIGQTYLVELQQRTTYTGSSEPPSALFYVVEAVGIAVNITYETVQTRPGLAWLQWSSIPRTVRQKCAW

SEQ ID NO: 985943 - protein, 92 aa, Homo sapiens
SSTPPQVVLERERPLRLAGALERERPRLAGVLERERTRLAALLERDLPLLLPDDLLRDLRPTGDRRLDLRLASVLDRDLPLRTGALDRDLRL

SEQ ID NO: 985944 - protein, 160 aa, Homo sapiens
MRLWRLLALAVQCRGFGAARSLVWGAPQKLLLGLGGTGMSLSRPCVRRRPSDSVSYCHVAACPDIGALTPLGVEGGIEPSSFLQSPPEVGEIMRLVNAYWGNPVLTVEALSQVFSSMPRSAEIASPPRQRPGLDEPRDGLAAGGGCRTEPAMRSGLPSGR

SEQ ID NO: 985945 - protein, 45 aa, Homo sapiens
LLDPLELASTPSIADPALICEERSPDVSMNSLALSRQVVEKCAWV

SEQ ID NO: 985946 - protein, 77 aa, Homo sapiens
MNVFLFLMISSSTFLPLAHFTVRMHHHARLIFFAFLVETGFLHVGQAGLKLPTSGNLPASASQSAEITGISQYNLPV

SEQ ID NO: 985947 - protein, 137 aa, Homo sapiens
ARCCVPEVAPVQYADGWMAARVWQLYIWRHPQPAPAEYKALACLGLLRQHWLPAGCSTVALWHCGEPSAGAWGLLHEIGGLGSCLVLALACRNHMWPVCTVMGWPFAKSLEREWDTKWPWMQCTWPWHEHGTCDVPL

SEQ ID NO: 985948 - protein, 40 aa, Homo sapiens
CLTSKRLSALRWSKRTGLRMCDSPHRPSGGLHGMHRSAPG

SEQ ID NO: 985949 - protein, 74 aa, Homo sapiens
RIAVCLGNLVPGEPVMFSASACTCEHSVLEIYLGTHSACADSTPQSQEGRDEYVTLKVASPGVHIHTAPPHPRH

SEQ ID NO: 985950 - protein, 35 aa, Homo sapiens
MEVTEGASLDKYRANTGGSERRKAYKKNIPVFSFQ

SEQ ID NO: 985951 - protein, 97 aa, Homo sapiens
QRDAHEYRVSISGGFTIATNFFPSTGRIYFPSLCQGWPCDFLLTQQKLQASAFCALEAITEKTSYYETTMAVRKPKLATEQGETLHKGTLAAQKCAW

SEQ ID NO: 985952 - protein, 103 aa, Homo sapiens
RSFKGNVVLDMQRHGNSLGRIVKHLEGLSEEAIIELNLDDWYTHCLMNWHKNYAAYQAHAVLGDEETVRKAMEAVDSAQDKAKEQSKAGEKGYCPQEHTSLPV

SEQ ID NO: 985953 - protein, 67 aa, Homo sapiens
ALCVDVPRGGAASLCSVRLLWDWATVTYRQAIYTCGGPEEVQCTACHVTLYYEALCGGWQAFLIREL

SEQ ID NO: 985954 - protein, 39 aa, Homo sapiens
MHISSKLPENFFRPGTPLLISADSIHPLSTWTLRSSYTI

SEQ ID NO: 985955 - protein, 98 aa, Homo sapiens
SYSRGIPATRRTSPAEEEDAAVAISCSTSTVDVLTASPLLLAHDFPSRTVAGASSLASAHVMESFMTVARLRIPDQPRIQTAEMALRGCGVTLVRLGP

SEQ ID NO: 985956 - protein, 34 aa, Homo sapiens
TGSLNPNYVQYGEQGVFTVHRTSPGPFTLFQPGR

SEQ ID NO: 985957 - protein, 135 aa, Homo sapiens
WCRLRGNNSQDMNAKEKFLKDINSANSSEQTNDKKMKQSYCLYGKIFMVWIAGQTSHKIPLSQSLVQSNSLKAERDGEAAEEKFEASGGWFFKYKEISHLHNLQVEAASADAEAATSYPEDEGGTDSPLGDQCSW

SEQ ID NO: 985958 - protein, 149 aa, Homo sapiens
HPGALLLFLPPLLLLLDVPTAAAQASPLQALDFFGHGPPLDYNTGHLYLRGPLKKSHAPLVHVTLYYEALCGGCQAFLIRELFPTWLLVLQILNVTLVPYGKHRKQNVRGRWEFKCHHGEQECKFHKVKTCVLDKLYMELAFLTIVCIE

SEQ ID NO: 985959 - protein, 76 aa, Homo sapiens
MRLREVGYLAALTLGRVLHRSIKVDWHIWAPFTGHNDVSLLRAGPVCTVGVPGAVCQAAVCDVHAGVALVAVALPV

SEQ ID NO: 985960 - protein, 74 aa, Homo sapiens
TQAHFWTWVQLLVRTSDRALISALGRTFHGVTNHNLEHHTKLPLHLPPGDGTQVERFPLSLCQRPQYHRGPRAG

SEQ ID NO: 985961 - protein, 68 aa, Homo sapiens
YQASPSAQDTQSIASDGTPQEEKEKEQRPPELPLLSEQMNLGELWDMLGECLQELEESHDQHAVLVLQ

SEQ ID NO: 985962 - protein, 107 aa, Homo sapiens
TQAHFWLGLPHNAEESSLTTQGVDVISKMLIDADIAEDEDDLAYAETENKTRTDSTFDGRPAWMRTLHSTASSSLPLIPHTLSHLKRSVPHIEDPLSRFFERQVRLG

SEQ ID NO: 985963 - protein, 130 aa, Homo sapiens
MYAGLADVLLLVFKELDILLGNLKSTGIHVLEVYGPSTSLPCRCASRSIRSEPNKHVGWAIHMGHGDVDSPQAPFLQAASDGLLELVLHLWRCDLFQKSLGLFCRHTSLLCSRQDALRLGDVFIPEPERY

SEQ ID NO: 985964 - protein, 145 aa, Homo sapiens
PPGALLAVPIVLSHPGHTPVTSLVLGPQWWAAALSFTRGCCYPGMGCLIRDLCPPSLLSRRWGDQPALVPSTVSKILVYPLLQLSFESGRPRCGLVRTCAWVRTQALFSAMGDDQARVWLLKRARAYYYRISKYTSFITCLLPCS

SEQ ID NO: 985965 - protein, 52 aa, Homo sapiens
SEHVSLPILDESLTLYPVSHCVRALSYPVLHGHNHLGSGTLGVGASDLSKPS

SEQ ID NO: 985966 - protein, 69 aa, Homo sapiens
MLIGLRERESCVAVVTAEVFYFSKMQAGRRGSHPLSQVHVRGSLEPRSSRPGWATWCEPVSIINEEINP

SEQ ID NO: 985967 - protein, 33 aa, Homo sapiens
LVVGPAAHRPLCFRRAPARIVGHEAEAVFFHFL

SEQ ID NO: 985968 - protein, 69 aa, Homo sapiens
MVMFAESGLGSTMSQNLGAWDNKSTDFLSSHYLEVRLSICLLDRSDCQNNSNICIQSCCRQMCTDIHRS

SEQ ID NO: 985969 - protein, 45 aa, Homo sapiens
SSSVPIPSNAADCSQRWMHVSGVGCMSAALDGVSGVGWSQRRWMQ

SEQ ID NO: 985970 - protein, 41 aa, Homo sapiens
WSYSTGIPATQAHFSSRLAVRAWYFPANLVSQAPPDLANFL

SEQ ID NO: 985971 - protein, 113 aa, Homo sapiens
RIPPGLLRSATVSAVHWGLEVARALWAGVHGADSSPESPVPHVPTLPTMMVLQAGSSRPCARGAEGHWSSSIPCHALPLLNVSSSQSPCVCRMQILQTGDVLRWPLYQSYPPL

SEQ ID NO: 985972 - protein, 97 aa, Homo sapiens
WGDGVQVIPSKEYRKWRSGLVIDSEMCYRARREEERDVRINLGSGRWQQRLHVLCAAVTIATARSSPLRRSRMSSPHSHRESAAWRATTVLGEVRLG

SEQ ID NO: 985973 - protein, 71 aa, Homo sapiens
RGSPWLALVSTLLTAYWEGDAWRVLLVERLGYVSCSDSLALLRTGEEFWSSELICGTQLILGDNFANVPDI

SEQ ID NO: 985974 - protein, 121 aa, Homo sapiens
HQAHFWPHILRVAQPKDVTETCLSMSTLTNAFKVKTLDTKPGLYTAYTAHLHRDKALLTRVLPGVHEKRPSDLQSALLRWPLLELTQSFIIPLEHSIASLMPLQKCAWVQKCAWVQNCASV

SEQ ID NO: 985975 - protein, 91 aa, Homo sapiens
GSVPVTVGCHGSHQRDGVGGALQPGLHSVLSCARVTDSTRSFPTGDPKSFSRSSKGSHFFSIPNSQYCMVYYLEFYGRKYWSRSRSIIMKS

SEQ ID NO: 985976 - protein, 108 aa, Homo sapiens
WLLIVLPQHPKYWDYMCEHHSLPEDNLSIDSGRERKETWVSQEAKGTGALKEIAGVMRASCEPTGVKVTSGGQAHQVWLVFLELKEINDNLDCRVFRALLVQWDTQVP

SEQ ID NO: 985977 - protein, 68 aa, Homo sapiens
QARLPYPANLLEVGHRENDCRHHPGSEQEWILSATTSGIFLHWMWSTLSVKALARGKSASAEELRRQA

SEQ ID NO: 985978 - protein, 44 aa, Homo sapiens
MRMRGPVLPSTVAASASLPEMFASFLGRLCSRSVASGSYQRHAD

SEQ ID NO: 985979 - protein, 30 aa, Homo sapiens
MHSAWGEEARAPQPLSPEKVILLSHDCLLW

SEQ ID NO: 985980 - protein, 48 aa, Homo sapiens
MQYELNRNNVTDPSLSEMVVVAIQILRKKPKGFFLLVEGRDPGSDERG

SEQ ID NO: 985981 - protein, 78 aa, Homo sapiens
  misc_feature (48)..(48): Xaa can be any naturally occurring amino acid
LRATTLTSEALGGLDESPTERYLTGDCEAVSESPGPKGNHAHTEGSGXSRATPAASDAVSCVVSTMGCQKVLPSGART

SEQ ID NO: 985982 - protein, 34 aa, Homo sapiens
APSYDYTVLTCRAELVQGGMHRSGEYTSTWIHVC

SEQ ID NO: 985983 - protein, 110 aa, Homo sapiens
  misc_feature (96)..(96): Xaa can be any naturally occurring amino acid
SSRYQYDGDSLEQQQFIHMNGCYLLEHQLSQALSYAIKRGSVNLLAPFNALMGRVVMKLFPAIFINDSVRSEHNLGYEALVLCDRSHCRSDTVPVXVNDLIFDHVDSTMT

SEQ ID NO: 985984 - protein, 62 aa, Homo sapiens
YEIPPGRSGLCPVSLFQSELDRDANYCCSALIHSLRFDNRHRVKKTIGGPPCDSSPVTLVHC

SEQ ID NO: 985985 - protein, 71 aa, Homo sapiens
SEQRNKSNYVSTRQSFPSGSISDRSSVRKVTLIAFMATNALLSSTCPKKMAHKIIIIIIANIIELFIGYHS

SEQ ID NO: 985986 - protein, 84 aa, Homo sapiens
MLASTDYCYNRPIPKLKQLQLSGRSKPAVCFLPLMNPSLPYRISPVSELLSTGRVDGAMAHLSLLVTKQNMPSFLDGSSGGLHD

SEQ ID NO: 985987 - protein, 59 aa, Homo sapiens
MAGPEDLTDTPHLTDPGNPRYGSDDNQGERRRMKLTVIDTPGFGDHINNENCWQPTVDK

SEQ ID NO: 985988 - protein, 49 aa, Homo sapiens
MGHHFIYKTGYLYLRGPLKKSNASLVDVTLYYKALCGGCQAFLIRELFP

SEQ ID NO: 985989 - protein, 78 aa, Homo sapiens
LACSGLPKCWDYRQEPAHLAMSTHSFVGTRSAEGYSEPLRPSLLGVPGPFLNRRVHFQEPYVLGNAPRRCWNLAPSPV

SEQ ID NO: 985990 - protein, 158 aa, Homo sapiens
ELGTTCPRLAKGPKKIVAQLQAWNGFIRQASTSVLHSRRAHSPPIAQMSLATAFWKLHSFRNEQMQLAERRQKAFQKAAGNEQVENAFTETLAKDPKHSVKGVQSLGVNLLDLQKSVMDSFSEMKYFLQVDITGHAYTSPGPLLSQGTIFRVFGKHLD

SEQ ID NO: 985991 - protein, 116 aa, Homo sapiens
TRRTSYLPPGSHALLRTGITLGRSSRPQHSSCPQGQRLPVQRVPLEGPLPDASRLQLGTRNYCFLLWRNQSCQCYIQPARPQSFPYQVSTGPPEPWRLGTAPLPQLSWTIVRLQPL

SEQ ID NO: 985992 - protein, 51 aa, Homo sapiens
YFDSGIGGSLQHQRSILTILGVSARCAHVSDWNLYRGGMHRSCVNYTVDHG

SEQ ID NO: 985993 - protein, 94 aa, Homo sapiens
TQAHFCTRPTSSQLMVLPVRIFVNTRDMEGTITLRKWSRVTPVENVKAKIQDKAKASLLDQQGLIFAGIHRLEDGSLPVPRLTASSKCAWGAHP

SEQ ID NO: 985994 - protein, 97 aa, Homo sapiens
SYFLCLTFFNVPETLWQDFSVISHWAFECGSAHWCIIDLESDGVIGDEHASEPANRDHHRMSNVCASYPPTLPDMGKATSSLNNGRDLIQDEPMDAS

SEQ ID NO: 985995 - protein, 94 aa, Homo sapiens
YQFDGDSPLARDGCMGPIAAMRPSIFRSSRVTIVQSECVTHSLVGFAISMDTVLRVYINQKLNWGLMSVGVGRLIPAFGVIPVSQFCLPQVALL

SEQ ID NO: 985996 - protein, 43 aa, Homo sapiens
GFSEDLSPRRSYVLVHTVLSYRHGADGSPWTGLKEYFCSMLDV

SEQ ID NO: 985997 - protein, 143 aa, Homo sapiens
MESSQPSDSSLTDITETRRQPMPDPVPDCPCLTLLPTWLGPPWYMLPKPMRSREPHFLLLVIKTIAPGVLASNSDQLEDQALAQIKPYSSSKDSSPTLASIVHQLERLLNMLRQDLKNEKEDQAHLQADVQHLREDHLRLQEE

SEQ ID NO: 985998 - protein, 72 aa, Homo sapiens
  misc_feature (67)..(67): Xaa can be any naturally occurring amino acid
NRARYQFDGDSRHCPIIDNDESELIFSLASTGAKLKQSSHHHTVSSLEGYMYPNLPSPQLSLPREGXAALTI

SEQ ID NO: 985999 - protein, 79 aa, Homo sapiens
WHPRMGDCRKPPLQLYYCALCCFPYRLSYRTSTLDALWIRGLSVCGNSLTSHFDSRPLIALIRYLKAFKDLLTVSFTSP

SEQ ID NO: 986000 - protein, 103 aa, Homo sapiens
TYRILLAGSARQARSPGQELQAELLQQCRPCGHCIGLQVQWHLERGVLGEEDGKEAVRSKPCSLPGPYRAEASFVEALDYDDSGDVKSFGGEKYLEKGPLTIW

SEQ ID NO: 986001 - protein, 138 aa, Homo sapiens
  misc_feature (48)..(48): Xaa can be any naturally occurring amino acid
WRRILGLALRSALILELCVAGHAFSPASPQLHPASTLDLSPGLRPLLXLPTCQPLPGVPPGLQRTDQRHGCPGPVGAGSGAFEWARPLPRAPVALGGVTEYTGTGAGSGSRADSVSPGTPPALGLRNTTLHRNPGAEG

SEQ ID NO: 986002 - protein, 74 aa, Homo sapiens
MILARILARILARIFGADFGADLRRGFFGADSAYGCGGQTCYRSRTCQDACTEGDSGRVCVCVCVCVCHRQCLA

SEQ ID NO: 986003 - protein, 30 aa, Homo sapiens
MTEAGSDLLTLGLAGVSEKYPGLRRRGYEL

SEQ ID NO: 986004 - protein, 80 aa, Homo sapiens
  misc_feature (75)..(75): Xaa can be any naturally occurring amino acid
EVDLNVRNNPLKQAQSAGLSFESRHSLHDLIPEAEQQLRVLQSTKICGRHGQNDGVRGQLYPGHWILLDTPLTLXQGGLP

SEQ ID NO: 986005 - protein, 98 aa, Homo sapiens
QACAAGGMHLLIAVQGRSGMIENILAGKMRNMRGYACNKNGGERLAVHAPRLSSVRFSRRQIQTLVHCCHRNIPWHQKVPTRFLTRVGHTDTWVVCSR

SEQ ID NO: 986006 - protein, 36 aa, Homo sapiens
LGGGSEEAAGDGAEDEEAVGLIMLTRPLTKLKRGSV

SEQ ID NO: 986007 - protein, 106 aa, Homo sapiens
NAQADVENAQAAKERNRASPDPRRQRIEEALSCSSRGPISLRAEARSAAVSLFSPGRWGCGYTMGSPSPPAHARRACSSLSSWCPLRVILCQMLLILLTPIHSAKA

SEQ ID NO: 986008 - protein, 114 aa, Homo sapiens
SVLSDATDGGASEPGEEVHEVMSSVKARTTHFHFFCDSSVTSGHLDVYVQAWAQRPDNYLPKAPLPSFSFSFFFFFGGRGLALSPRLEYSSTIAAHCSLHFPESSHPYLSFLSS

SEQ ID NO: 986009 - protein, 74 aa, Homo sapiens
NVEDPQAVEEGRKHLSVYAAARTKLKRDLKHTDSHIRSVNKNRHESIKQVHAAAGTETMDCMRELYNSCTSREE

SEQ ID NO: 986010 - protein, 51 aa, Homo sapiens
RSLLIMYHKKVHCLTIHMYTLLHSITVKSSLCARSLKISFSLASKLGKRRS

SEQ ID NO: 986011 - protein, 97 aa, Homo sapiens
MSRIPKAAEDGNTQRDSCQDDSVEPLGCKLNGTWLQADELSCREGCAQPNRPGIYTRITYYCELNPPLCPQKAVSQAWLDHLHHWRTNPCCPKHHCF

SEQ ID NO: 986012 - protein, 104 aa, Homo sapiens
EDPLGCEGGVSKTNLNVLSGTESPGGKTDLIQGAPLRNRTDEKEEMRLSYGKSQKNMMCSGVTMAGFPEEETPELTPKDDSELMHDTAPDGEAACANVQKIPTA

SEQ ID NO: 986013 - protein, 110 aa, Homo sapiens
GGPASCTYYFSVDSDVALNDPISLRLLIHLTKNVIAPLIIRHVRLWSNFWGALSAYRLLCPVPEHYVHIVHGRRVGVCNVPYISNIYFIKGSALRCEPQSSDLFHHCQLN

SEQ ID NO: 986014 - protein, 80 aa, Homo sapiens
PARSVGTSMTRTSRFTRPAGMETFQIWAAVVVPSGEDAEITCHVQYEGLPQRVSLRWKPASLLTILIVVASLLHWFSLGA

SEQ ID NO: 986015 - protein, 72 aa, Homo sapiens
WVSDAQKVRALLSAAGSPSHQRCLYSYFVAQTTTHETLATGHFISVIHILDAAEQKFAIIAICSSHYHLPDP

SEQ ID NO: 986016 - protein, 112 aa, Homo sapiens
RIPLVTTHGKLLDLGVVLNWYRTVGRRNTFIGTPYCMCSKVIACDDNPYATYNYWSDIRSLGITAIDDAEGAPPLCDLHPMRGLPIGQSMHRPPRPAEQVIVDLQIPISISI

SEQ ID NO: 986017 - protein, 45 aa, Homo sapiens
SIEYPLVFAFVGRQGMSRELGPRENPTQHPDLVPGPSTEVGLVNL

SEQ ID NO: 986018 - protein, 96 aa, Homo sapiens
SDEYTDYGGLIFNSLHTSPHYSYEPGDLRLLNVHDLVLLPIEAPIRIIITSQVRLCISLDLSPQLCLTKQYTTSRYALKPDPPFTGFTDRWVILRV

SEQ ID NO: 986019 - protein, 39 aa, Homo sapiens
MPAVVGCVVFVDKACRVNLRMRCFTSQLSIEHVSTSVLL

SEQ ID NO: 986020 - protein, 142 aa, Homo sapiens
QPRMAGAEEVDIVLVSVGVVPVCHPLILAQQEEEQLVGQAEPDQAGLVMRLLQSVLRGRRARCCPSRFPVSCTRHTSLSLLSQCSPGARNVWVTPMRGISVCSRHARNFRNPCVHCQLAIHVMPLSSWPYWFASCFTNHWII

SEQ ID NO: 986021 - protein, 58 aa, Homo sapiens
FPFCPSRFEPCGLTQLSRLKYGRCRLVRRTVRAGCDTVCSLRRCHNLVRRHRQRASSF

SEQ ID NO: 986022 - protein, 136 aa, Homo sapiens
SGDTSACPSSVRLSALPASGCAQSFQSFLMVRFHSRDRFVFLVVLCDSVTCCFSSPGPAYPCVPPPQWFTNSYSFGPGPIASYHVLRLVNLHAFSVPMLDVLHAAHYLSVKPQRDFIRYSITSFNTYNCFFKLSTS

SEQ ID NO: 986023 - protein, 36 aa, Homo sapiens
CSSLTDILEVSTGAHVSDVNLYSEAMHLQMVNTLSD

SEQ ID NO: 986024 - protein, 67 aa, Homo sapiens
DPPAIHACQGLFMCGLCYGHCMTKEATTELFLQRRNTCRIITKDRMVMPVDESINEADQFPCLLLLS

SEQ ID NO: 986025 - protein, 87 aa, Homo sapiens
ITQVVGAPFPKLRTEGTQVFRVDVPSRGGVHCHRPSGDSWAAPGDRGDEWPRRCSGCERDVVARELGTHSLIPVPHHPSAPFSDIPP

SEQ ID NO: 986026 - protein, 72 aa, Homo sapiens
MKVVNVKKVNSTDSNSGWSNTSLVLSDLSLCESTWKVTFKQRFEGEEDMSYEAMSGRRDAGRYHPSADKVEP

SEQ ID NO: 986027 - protein, 54 aa, Homo sapiens
YLSADCVTMLVVPCGLAVWWGLTAPQEETCDDPSAVGDGHCQTMRDLRCGQTIE

SEQ ID NO: 986028 - protein, 34 aa, Homo sapiens
MSTLESRHGRAGLAATGGKCPTTGTRRTIDTMAK

SEQ ID NO: 986029 - protein, 36 aa, Homo sapiens
MTHMNRIAISELHFLERAKTAHTAVHIPNHPELANT

SEQ ID NO: 986030 - protein, 66 aa, Homo sapiens
  misc_feature (20)..(20): Xaa can be any naturally occurring amino acid
EDPGEQEICECQGLHHRGLXRKVPSWAWTERAHVAQLLMEQVAAEGSGPFLYLLYQHLFFNFHLRT

SEQ ID NO: 986031 - protein, 103 aa, Homo sapiens
CNPRMRFMKRARENLKNERDMEEHQRIGHGAPCVYTDPGCVDPPSSSGALGLHFLICYIDARCCVREHAQGRVRITTTITITITTITIYRHPSIVITIIYHFH

SEQ ID NO: 986032 - protein, 49 aa, Homo sapiens
MLYKTASICGRGRVVSATEDEADPAQRTIMCRERIPSAGEKDHHVKRLS

SEQ ID NO: 986033 - protein, 34 aa, Homo sapiens
QRLEVPVEMNPEGYMTSRTVREASGLLSLTSTHY

SEQ ID NO: 986034 - protein, 36 aa, Homo sapiens
MVGEYAKQAPSESYRTWLNPPPWTSKGSLHEATVVL

SEQ ID NO: 986035 - protein, 142 aa, Homo sapiens
VEDGAHISEGRTRNRRFHRAPAHCSWGLIWSWKMTCASHCPVPQRPRSVGNVSLPRGGPGPGRCSRSGHVSVLGRRVHAGTVPGMGLSGTRESPLGPLRQTHSPRGHLTPPQPPGRATPRDNRCHGYLRLTPIPPAAVEGEG

SEQ ID NO: 986036 - protein, 58 aa, Homo sapiens
SPWNPRMAWEGTRKTWYPKGNCQREHKDSIDTASNMGVEWVLILRLQNAMICVVKHKT

SEQ ID NO: 986037 - protein, 40 aa, Homo sapiens
FLDRKHKLIHCTFPGLPELRRVIQQGPGRRAEPEFGDVES

SEQ ID NO: 986038 - protein, 35 aa, Homo sapiens
MQVDVYDTTAVIASLYKYRRHVEHRADLQIYVKLE

SEQ ID NO: 986039 - protein, 70 aa, Homo sapiens
SQQYSSALVKSCPTSKVDGSTRWILIGNDDVFVCCGNRYGVINVEVSRTAKWVRFLAVSTDLPVTDGTDE

SEQ ID NO: 986040 - protein, 39 aa, Homo sapiens
WPISGLSFWVCLLSPGIWRRSGACARFPVLRCAGLPGDR

SEQ ID NO: 986041 - protein, 80 aa, Homo sapiens
MCLAWSTLGQRETPLHRLPRYFLSIKVAGGGDIHQGFQISYSPNSEQRLARRYLLKDGQQATLGKQSCDFLFNLIEIPAK

SEQ ID NO: 986042 - protein, 56 aa, Homo sapiens
KIKSMAAASQAELNSRSPCTQFFGGYEESWIKEKKLLVGSEDYGRDLNWRADLSKP

SEQ ID NO: 986043 - protein, 89 aa, Homo sapiens
MTQKLRSRLASTLVATSALLATNGSWAATLFGGVTDDSVCDVGSTEQRKGGGFGPPEEFIERQCRNGQLLVGVGVFAAGGMSEPLITAL

SEQ ID NO: 986044 - protein, 31 aa, Homo sapiens
MPVEVAADVVPGLAGAGLDDPDQEQGEPAQH

SEQ ID NO: 986045 - protein, 42 aa, Homo sapiens
MAKHSSVPGGRRVYTTAVLASLYRSVDHVSTVLTSKYRYAGA

SEQ ID NO: 986046 - protein, 44 aa, Homo sapiens
SLCGDGDPQRWDQDRSRERPGRRGGKERQEEGERRKRQGYLTLE

SEQ ID NO: 986047 - protein, 54 aa, Homo sapiens
SEPSPLTRMLLCPCSGAVGCCTQQCSWSQHTLRMAFCTKQASVNGTVEDYGSMS

SEQ ID NO: 986048 - protein, 42 aa, Homo sapiens
MSCGCHVTLHDGVEGSFVDATEIHAQDGRLEECLRAAEPLIA

SEQ ID NO: 986049 - protein, 44 aa, Homo sapiens
TRYRLILQHLASISILLIMSTPCVGKEDSLGRSRGRPSQKCAWV

SEQ ID NO: 986050 - protein, 66 aa, Homo sapiens
ICYQEAIRAITVWLQKCAWLRTQAHYLPSLRCGRPYSRATLYRQSAPCIPRSPRGHHGQSTADYHS

SEQ ID NO: 986051 - protein, 76 aa, Homo sapiens
WGAAALSLHPWTAAIRAMGCLNRDLCSPFPGFRGGGVTNLSPGPRHGSKILATTPSAVLRALAQAQMCHLCRKCAW

SEQ ID NO: 986052 - protein, 111 aa, Homo sapiens
HPGALLAWACPQQTPKRVLLTTQGVYIISENAVDADIVTDDDDLVLRRDLRYQDEDRLHVRRAPCLDADTAHPPRPSRCPSSSHTLSHLKRTVANIEDPLFRFFEREVRLG

SEQ ID NO: 986053 - protein, 62 aa, Homo sapiens
MRVVSIDFARLLGTIAGWSPHLLETGYGGHRSLLRHPIPSIAASTGEAEISRPGSELEVLLM

SEQ ID NO: 986054 - protein, 113 aa, Homo sapiens
PGALLADRAGYAAPSNTKRGQAALDRLTVFDGFPPPYVQEKAVWLVPCCLSRIVLSERLQAQFAYPGAPWPHRSVGLVSYHGRCHATTGSEKVRHEVHESAAWVAVECDLGSE

SEQ ID NO: 986055 - protein, 54 aa, Homo sapiens
MYPRTQAHFCCSLPPLLLLLARPHGRRCRRPLCKRYTSLRNGPPSSPTKTRQLY

SEQ ID NO: 986056 - protein, 115 aa, Homo sapiens
STAWSRHTGPGPRQAVVKTGARPQHSEMLHSHLIGPGLAQALSPVNLLLAEALLTRLQPLLCGSIHGLFSSTKALRFPFNPHCPTVLVAKSFFQSVRCSFKRIAITSHHAWTASG

SEQ ID NO: 986057 - protein, 149 aa, Homo sapiens
AIPRMGQHAAQTACLSRMTGLALRPCDLDRCLPASEVPCGTPGSLPQFAHPGCGVRRIGQHGTFTWQASTLCPVPSWALPTHSPPSLLEGPGLALLSDSRPPGSPRVQRVCRVLPRGSSSVRASFTPTSVPAGSGPQLVTLSPACIAMR

SEQ ID NO: 986058 - protein, 43 aa, Homo sapiens
MHRAEVCITTTITITITTITIIVTTIVITTFTTASPAALRGSP

SEQ ID NO: 986059 - protein, 88 aa, Homo sapiens
IVDLDGSPGRRGRAASMRSSSSYSFMAFSMRSLARPRHTLLEGFQLVVMKPSMYWRSDVLILVKNCRKHGPGVHHYRLLASSRIEVRR

SEQ ID NO: 986060 - protein, 46 aa, Homo sapiens
MPVISMVKQKKDSKQLYYHRAPFHEALWVPDGVGYSVTRWSVRCFP

SEQ ID NO: 986061 - protein, 108 aa, Homo sapiens
MREISRIHVTKTLLIKQHAVKMPAKSHQNQDGNKGDLYVILTAQLYANCIAFSMLKDTSTNAMTVYRCHGNAKTLSYMAKKGEESSVPGIAHPFPGKLMNNPGNGWHR

SEQ ID NO: 986062 - protein, 81 aa, Homo sapiens
PYACCAVQEVKRSQRGCGWKRRCPLWWLKFSDLIHPPGNGEPSGLPQHGQLLHKEPLFLITSTLISLLGLSGMVVVADNIS

SEQ ID NO: 986063 - protein, 39 aa, Homo sapiens
VLEGAESDGHAVSGEERTILIACPMIGQQVDFTLPLLLL

SEQ ID NO: 986064 - protein, 37 aa, Homo sapiens
ERIWIMKEAMVQAEEAAAEITRKLEKQEKKRLKKVQV

SEQ ID NO: 986065 - protein, 35 aa, Homo sapiens
  misc_feature (27)..(27): Xaa can be any naturally occurring amino acid
STCPVDGRALLGVDEVPIGKVGSLQSXVCNCLLCT

SEQ ID NO: 986066 - protein, 78 aa, Homo sapiens
IPGPSPRRRQRVVPEIQGLALLPRLECIWRDHSSLQPRPPELKRTSCLSLLSFLSSCDYRHVPPCPVIFVFFVEGPGM

SEQ ID NO: 986067 - protein, 125 aa, Homo sapiens
YWRISRVTGSSVKIFGWSARVLTCRRNLVQGGMHRGGEYTSTRLHVCVIGWSARCSRVERNLSREVCTGSGEYTSSCGHACLLVVLELILYTSIQVPVLNEYLAGQHRCSLCRPELVHGRACTCT

SEQ ID NO: 986068 - protein, 33 aa, Homo sapiens
NCPLRVTEQQFEICIVEPETVPLHSSLCDKGTP

SEQ ID NO: 986069 - protein, 107 aa, Homo sapiens
YSYVTRVLSECFHKSIRFRTSSVPIARRSRDFSCPSTHPIDRSITCTLQQRYHKVSSSVQMEPSAHQQSYFPVAGEQEKDRQMARHVQKTRLSTNESSPSPSPGVEA

SEQ ID NO: 986070 - protein, 110 aa, Homo sapiens
RPKREASSLRAPVACTSACGLPCPEPSFSLGFQEPQLLSACSLSQQTRSPRPGQLHTHDPPPPRPGSPKLGTSLCLPTPLDLDELSASAADSGAALTLWPACARQRQPER

SEQ ID NO: 986071 - protein, 74 aa, Homo sapiens
RDSSIPMTYFSRPTVTKTHIDVAPDFLHSMGYLFIYLTVIYDPLSTTTPTFMSRERLQIGAATTRQTQTTIAPS

SEQ ID NO: 986072 - protein, 46 aa, Homo sapiens
MVILQSPARPLGLWQLCPFQGIPHSIASEQEIHLRLAAVAHACNPS

SEQ ID NO: 986073 - protein, 33 aa, Homo sapiens
MDIFRDLLLNARPDGKPRSTHEATVNPQATVNP

SEQ ID NO: 986074 - protein, 107 aa, Homo sapiens
MPSVGPDRESRLKRSVTHNSRKAVKETSNSSDLKVSHKPLCKSFGIVYPGPSRMTLTFKRIKISNIVGGKRQACWGEGEGRPQDCAENHVAICITPKPNPSARKGST

SEQ ID NO: 986075 - protein, 59 aa, Homo sapiens
SSRGPVSSPSCIILPKGQILRPSSRMTFRPPQSSLFITGPSASFGTWYKVTGGGCILVQ

SEQ ID NO: 986076 - protein, 96 aa, Homo sapiens
FSAVHLAEHLVPIVALSSAASCTCGFQRCWRIFQMLRTVFARGPPTCDAASCLAIVACILILLLIVCILFSVCIRLSDQRVRQHPGGHVEPQCCHH

SEQ ID NO: 986077 - protein, 75 aa, Homo sapiens
EAPRFDGSGAEVHVGVPSQVTVSYSRAGGLNSDRWMICLGPCCSEGLHMIRELVLEDQRDSIPPSSGIGGFHLLN

SEQ ID NO: 986078 - protein, 174 aa, Homo sapiens
PRVTVWQGQTSRAVFYSKCSSCKVHKKSRAQFVERRNAQGEHGREVFDSVELHHVGVVCWACQDPYMGCIVAISNSSREHCHSVGPGGISCCHSTESTETSVYQDDHRLCRFPAWYHAVLKSSIAQQSPRSSPRFGWGLPPDCSDVHKAQQMGLLRDHVPVARQIVVMLPYCSS

SEQ ID NO: 986079 - protein, 37 aa, Homo sapiens
CVTRLPVVMQHAPGLTRTCHLSGMLWVIRLEVDPAWR

SEQ ID NO: 986080 - protein, 81 aa, Homo sapiens
MVAAKVKGEKLDKKLKKMEQNKTAATRYRQKKRAEQEALTGECKELEKKNEALKERADSLAKEIQYLKDLIEEVRKTRKSR

SEQ ID NO: 986081 - protein, 44 aa, Homo sapiens
WLTVACREASTIRLAASSIKSAPLGRGASWAETMLGTEGVLLSL

SEQ ID NO: 986082 - protein, 39 aa, Homo sapiens
RRPVLSMPPIRSQPVDYVYVRDFKLMRVCACVCMWHLIN

SEQ ID NO: 986083 - protein, 153 aa, Homo sapiens
YRCTEAKSSLLSNVGSSTKARQLCSREALTHSYKCPLRKQRAACSGFTHICSIWLSHGRALTNYEHITMWQRGSKPDFSFRTFKMIIGKLAQELLVENGNLKTLLPRISNTNIENHIITLHKLLTQLNYEPPCTCGQNNLPPDNSETNSRYHI

SEQ ID NO: 986084 - protein, 51 aa, Homo sapiens
MHKLKEVQSRSDVIVFDLQDRGEPADFIREAHGQHLGEGLNQPPLSLWRKM

SEQ ID NO: 986085 - protein, 38 aa, Homo sapiens
ITPCLKLAFEMLQLAQQQQVLLFKVGQATVNPQATVNP

SEQ ID NO: 986086 - protein, 69 aa, Homo sapiens
LINPEIWEHQMEYLQARTTRSKKLFSCLACLGPCNPYMRPLNEDTSDVSNILTNLCHQHSIVRNKVRVS

SEQ ID NO: 986087 - protein, 67 aa, Homo sapiens
WSPSTSVAYVPFATYHSDDTSREMGIKYVSCRTFPHGRSCTRKGLFLLSQGKHQKSLHSRFCKFKSQ

SEQ ID NO: 986088 - protein, 74 aa, Homo sapiens
PVEDGRLGKEEVRPTPGQAEGQVVPGMLQLPADEPVLEELVYDAGRAADVVLHDIQHARLMPVDLQQLDYAVTI

SEQ ID NO: 986089 - protein, 86 aa, Homo sapiens
RQVTGEISQSITALYTTVRVAFYSTSPYGSTVEGDIKASSVSLLSGENTRAKNSTKALERLKSPLSHTVIIHEISRSLGDHYAHDT

SEQ ID NO: 986090 - protein, 90 aa, Homo sapiens
MLSGATVRGAYKGGVQELGRATAPAPRATPTVNEPGRQAHLKDKRQELDGHDHNRINPKSFFILHDINRDADLDEQELLALFSQELEKVY

SEQ ID NO: 986091 - protein, 54 aa, Homo sapiens
HSTWLLPGHPEHLEGGMLVARPTLHSRACAPTEEGAGALTCLAQHTTPKTQRSP

SEQ ID NO: 986092 - protein, 37 aa, Homo sapiens
KSPGFGLCVCFSCKPRLWPCIRPTRTAGHVTSPVLTQ

SEQ ID NO: 986093 - protein, 94 aa, Homo sapiens
ATPPGCTQATQSTKEGGSVGCPTLPPGLCPSPRGALDPQTLADPTPHLRLSAASEGLPQGRGLKAERGTRPRLTPHRLALLLEGLSLYEADSAS

SEQ ID NO: 986094 - protein, 62 aa, Homo sapiens
TGDAVEEDPDLLILFRGRTKDELLRRANASNSITIYVLNINHPLRKAYCEHYSLQKHTSHIE

SEQ ID NO: 986095 - protein, 33 aa, Homo sapiens
LWKTGDLGKKKGGLQRDIHGGPRDPGPPRIPTI

SEQ ID NO: 986096 - protein, 54 aa, Homo sapiens
AEDAPRSRGRAERPIGMLERPSHPCTHTCAALAHRCTCVVLRKQYRLLLQALAC

SEQ ID NO: 986097 - protein, 50 aa, Homo sapiens
RVMRLQAVSINWRQTPRVSLRISVHKDCHRYGTASNGLICSQDALGSCHY

SEQ ID NO: 986098 - protein, 49 aa, Homo sapiens
MRMQQAETTAVQASLGYRGRRKAEGEGEEKKIMKKLYKPAEFCQRPVLS

SEQ ID NO: 986099 - protein, 39 aa, Homo sapiens
MTPVLTGILSCLPFSPRYSAHSHPKRYTVLTLRLTVIPS

SEQ ID NO: 986100 - protein, 82 aa, Homo sapiens
TGDAVDSEEMTLNISGDLRQLSAMLIVMRIIIVLKSLELYAELAEDTEKYKRFYEAHSNKLRLGTHEDSSNRRRLSELLRYH

SEQ ID NO: 986101 - protein, 46 aa, Homo sapiens
MNASITSFIAKYGDELFLGQGAPGHGVKMTHTLQVLLDVLAVVGDA

SEQ ID NO: 986102 - protein, 69 aa, Homo sapiens
  misc_feature (2)..(2): Xaa can be any naturally occurring amino acid
TXDAVVVDLEARGSVDPFQIRLEPYALIIRGESYIGITERKAYKMWSHSDVDASAACEDMISDCRIIEG

SEQ ID NO: 986103 - protein, 37 aa, Homo sapiens
KPPKELPERIRPPGVKGSRRVKGSRRVKGSRRVKGSR

SEQ ID NO: 986104 - protein, 58 aa, Homo sapiens
MCHQTRLIFLYLKKIFEAVVGWLTPTIPALWEVEAGGSQGQEIKTILANTVKPRLHQK

SEQ ID NO: 986105 - protein, 91 aa, Homo sapiens
LDYDEQQGSGNEIMKTESSPCTAVVCFSANPGSDLATGLQHSWPCGLTAVISLDFTLDSEDPLDSRDVVKNCALSLHSLTLACIVQVFTNL

SEQ ID NO: 986106 - protein, 78 aa, Homo sapiens
TGDAVGHTQVREVVQEPGLPVLAHKADEGLHLGLGDVLFQELAVVAQQGSDGVLGQDVRANLRLHHPKLLVNVLVRLA

SEQ ID NO: 986107 - protein, 53 aa, Homo sapiens
  misc_feature (16)..(16): Xaa can be any naturally occurring amino acid
ALNCYSRKKQPRGWWXSEQEADVFSSKERAHHLQGTGGTNGDRARDTKKSCWP

SEQ ID NO: 986108 - protein, 79 aa, Homo sapiens
RVMRLVMNKMARMLTLPDDQNTAQQEETCNICMQDNHSDEGLHEQHYRMHVRLAEIGSADTIDELLMRITHSDERSHVP

SEQ ID NO: 986109 - protein, 70 aa, Homo sapiens
SVYDVHVVRVRGRCAGESPQKWSPCDDEHRSACVPVGCSLTGGSESRRAEPGTFRGCLRVGVSLLYVCVG

SEQ ID NO: 986110 - protein, 39 aa, Homo sapiens
PSFFSQGAWTCLTCTLDAPAPHLHFTCEHSSTAHNRITR

SEQ ID NO: 986111 - protein, 38 aa, Homo sapiens
IAQVALRRYSTALDSTLLCRAVGATALSQQNKASIDTC

SEQ ID NO: 986112 - protein, 34 aa, Homo sapiens
NSYSKDYSFPNLIGQTAEQLMPWNIVKNNRTAIN

SEQ ID NO: 986113 - protein, 31 aa, Homo sapiens
MDLADLHVACTCTSPPFHLHTHRQLTTASPV

SEQ ID NO: 986114 - protein, 71 aa, Homo sapiens
KILMTSEGPLLKAGGMLCGGPVTKACFQNVHAPFTVLRQLFKLVWYQLMLPSLCEFVFELVQCTFSCLLPV

SEQ ID NO: 986115 - protein, 45 aa, Homo sapiens
MRQKGGLKHVMRSFIEAVCSLFAARSTGSQAQSAPTLVWYEDTAQ

SEQ ID NO: 986116 - protein, 52 aa, Homo sapiens
MHGGQIRKLADVGSHLTTEESRKMTVPGSCRQRGNSFPRCFSSSEWAVRLLL

SEQ ID NO: 986117 - protein, 92 aa, Homo sapiens
PRAFQDERDAALGFQRAFEQWPLLDPSSGCNTAMRSPPSTIGAPPAHSHQEMEQTPGTHKWMVEGLIARWPPSELCTHTSGFPAVTRMVRHA

SEQ ID NO: 986118 - protein, 65 aa, Homo sapiens
MRVPAYTSYRRYVATVLCIPATHLSIPVPGHYSWDQHQNPEPGSILRVKKCAGTQVDLQVIGGKL

SEQ ID NO: 986119 - protein, 101 aa, Homo sapiens
MSTASLGVALGEVRSQALPAAARARFCTEPGSTQRGPGPPAMRGPVRPRSRPPPPAPAGGSPAAEVWAGALKRAEQAHGAGGRTLRKEAVLSQDWSEHFLA

SEQ ID NO: 986120 - protein, 60 aa, Homo sapiens
TYSCSADVVTAKNEGGNCVMRDRSRNWPHSSYTRRRCSRKEPHLILCSLGCKLILGLVEG

SEQ ID NO: 986121 - protein, 72 aa, Homo sapiens
MQRVYKVQKDRADRVPLSSQQEACGMVEHPHGAIDHNTARGEVWAFELTIRALDGTHGCCTLILGMQDLPDC

SEQ ID NO: 986122 - protein, 64 aa, Homo sapiens
MPTGLVYTSSSIEPDLCRLLPLKEVLGSVLLRPALAEFRSHATCPCSSPREKLSPVPATTDARN

SEQ ID NO: 986123 - protein, 107 aa, Homo sapiens
MDAGGLALYTARVAAAGAAYSPPRTWGRSCEVGGRGVDLTPRNLVNDRPGLADSGDSFLDASLPPNGQVFLLLDNMLSGMDPRELLRLVSKESSLPTDDISRSRWKS

SEQ ID NO: 986124 - protein, 37 aa, Homo sapiens
  misc_feature (2)..(2): Xaa can be any naturally occurring amino acid
TXTYALDGRLTSALNRTNSDRLHTSALSTKPQDPYGG

SEQ ID NO: 986125 - protein, 44 aa, Homo sapiens
MPTVFDMFCAWYDLLCRGVVMLPCQGRGYAAVDRGVDDAVGLVG

SEQ ID NO: 986126 - protein, 77 aa, Homo sapiens
MTETITGFQVDSRSRQMPDSIQRTIKPDVQKLTPYTGLQPGNDYMIYLYNIEVTSARRTPVFIDAYQCQFDATSNLS

SEQ ID NO: 986127 - protein, 57 aa, Homo sapiens
MMRARRGLCIAEGLTLKPVELGMPNTPCCLGSDLFTPMLTENWQHHSVHVKGYAPTI

SEQ ID NO: 986128 - protein, 50 aa, Homo sapiens
YSGSLRCLSWLGACVKVALAGARSERIPGVTSQLPLRGAQVVWPSFTSSL

SEQ ID NO: 986129 - protein, 57 aa, Homo sapiens
AQECKIEYVEYSVTDRAPGLKVMPPDLSLGLGRPTLVMMMSRMVMKMPKNQGPRCTG

SEQ ID NO: 986130 - protein, 58 aa, Homo sapiens
RVSRWDRIPGHHRLLGRLCPEEAWAALEKPAVIEVAASVHNYRALELLVGTTMQTNRI

SEQ ID NO: 986131 - protein, 82 aa, Homo sapiens
SSVHSAAIPYRWRSAGGAYASRLLIFGVYERLRYNRYSRTIASMRKFKALISIARRSVMMIIAIGSIYRARVIITSGRRPMF

SEQ ID NO: 986132 - protein, 38 aa, Homo sapiens
MSDNALGVWGGRSTTNYPKIVGGGMGHSYPRSQTWVLP

SEQ ID NO: 986133 - protein, 33 aa, Homo sapiens
MSPAEQLKQMAAQQHQRAKLMQQKQQQEQKQQQ

SEQ ID NO: 986134 - protein, 41 aa, Homo sapiens
MRILRSGKVKQDHVCWTNVPEPRESGGKPGDGRGARGCDAE

SEQ ID NO: 986135 - protein, 116 aa, Homo sapiens
LTTPDASDPAEGCSVGLASLLLLADPGPGLAALALYFKGSDHVPSSPPHLSQTPIDEMSPGEMGKASVLAHSSGGDLARHDPPDFFCPPGDFGHFVSSGRIDNGPPMDKSDLGQKR

SEQ ID NO: 986136 - protein, 114 aa, Homo sapiens
VGPINCTRANSVSFNQSINQSIIKKLAGYGGGRLQSQLLRRLRHKNHLKLGGGGCSEPRSHHCTPAWMTEWDSILKLLMVTPVQQAYIGGVPGKPGCRVPLLYMKCWISHLGGE

SEQ ID NO: 986137 - protein, 117 aa, Homo sapiens
  misc_feature (46)..(46): Xaa can be any naturally occurring amino acid
MCVLNRSPNCRSCFHTQRIGQRDRGTMWRRMRLMVRWGISPASDLXIESSTDSIKAGLVTSWAPLHTATIDVSSPLGAGPCMHMFGYLGAVLSERQSVNVLLRIALVAVALPVLAGD

SEQ ID NO: 986138 - protein, 32 aa, Homo sapiens
MDVDQPSPSAQDTLSLASVWNPHRGARTRKRK

SEQ ID NO: 986139 - protein, 36 aa, Homo sapiens
MVWKRASGDHGPELVVLSHLLLPFLSFCQFPPFQSL

SEQ ID NO: 986140 - protein, 69 aa, Homo sapiens
MDVHQPSPSALRYSIHLPPYCDPHTGARKEKEQRPPKFPLFSEQLNLDELCDMLGECLKELSNPMTSML

SEQ ID NO: 986141 - protein, 111 aa, Homo sapiens
SLGFARGLARSAYKIIKKLSSGEYEFRNAPSVEDHDATVIASSFEFARHNSYEDVSPWAIMRMTAPVKLHGVRMRMAVTTRRSLWLIDEYAMSDLRSVCRRPHGACSHYAS

SEQ ID NO: 986142 - protein, 96 aa, Homo sapiens
KVSGKGCNVQTVRIVKGTSHTPTRSSLTDVPTGVGNEFLSSITTEDRVRQRRRSKGRPQDKLQVVTVETLCSNPSLALTLGPGSMSPPGLAGWPQC

SEQ ID NO: 986143 - protein, 36 aa, Homo sapiens
MPPASLKHTGQSFITCSQSCTVTTSQFEDIFITSER

SEQ ID NO: 986144 - protein, 34 aa, Homo sapiens
LYRIFPDEPDRAVGYSGVGCSRTFMTQLGQTHNR

SEQ ID NO: 986145 - protein, 60 aa, Homo sapiens
MVVMISVWKWWAECLPLCIGMAVGKPAMRGAGACRLELVYTLALCSGGVSRINCHSHESE

SEQ ID NO: 986146 - protein, 39 aa, Homo sapiens
MLKQENHLTREAEVAGSRDRATGLTVACGLTVTVAWLTV

SEQ ID NO: 986147 - protein, 78 aa, Homo sapiens
SVTRASQLIQHPQLTRASCRYNEHPQLSPASSGQASILRSHQHPQINPASSDQPSILSSFQQPQVTPASSAHSNILSS

SEQ ID NO: 986148 - protein, 30 aa, Homo sapiens
MAQSRLTATLASQVQGILLPQPPEELRTIV

SEQ ID NO: 986149 - protein, 42 aa, Homo sapiens
RLCVSNSLFMLGLWFSGHSHPPAHTLTAPPSVEAQGLGKCSL

SEQ ID NO: 986150 - protein, 83 aa, Homo sapiens
MESLSLPTGGKKCSTSGYTNIHKVASVTCHQRGTNHILKRVKTTEKSFMRVGGTMVFIMSTESCSVAQARSAEVQHSVQCNVC

SEQ ID NO: 986151 - protein, 121 aa, Homo sapiens
IPVRSPFVIKTRNRLPMFGSQCAPFLEASPFIYRQDAPGKKTTGISRRLMVRTVEEFYVVLLVPLVCVCVWRRPRPLDHLLELVVQDQHEGAPHAPQDVGPRTLEEGLAPLISEDLPPTVD

SEQ ID NO: 986152 - protein, 127 aa, Homo sapiens
MAPPIYTDVLEFDDGRGLESPTPRDAFPVFLGPGGPAHFLSGASSVHVSGGFWAPSVLRMSGGGYSPFDALCRGSVCFTEGGHDPRLDMSLRIALTACRWPGTPATMSQIAKDVCTFLRWASEPEHD

SEQ ID NO: 986153 - protein, 43 aa, Homo sapiens
TLEDPSSIPLRVSIRLRVSFPLRVLIALRVGITLPAGTTLQWM

SEQ ID NO: 986154 - protein, 82 aa, Homo sapiens
GASQPKVRLLGSRRQATQALYAALIRLASACVLSIDVCAPQVAGEHVMWHVPTVSRVPGDIVPMQRKMDRPHYGILPISVSQ

SEQ ID NO: 986155 - protein, 37 aa, Homo sapiens
SNLQIPTCSFQSIVNHITTKSTNTQINTTMPRFHPTN

SEQ ID NO: 986156 - protein, 48 aa, Homo sapiens
MRVGTTAEELKGLVECDTSYCDWIASGCRNTKTKQTVHCIHMNSMRTE

SEQ ID NO: 986157 - protein, 106 aa, Homo sapiens
PYRILRLYVQCCDLGLHCNAPPSRVHTILLPQRSAGSSDYRRLPPRPANFCISITDRVVTILAQAGLKPLSSGYPPTLASQSCFESQDVSLCCPALFSPFLAYRRD

SEQ ID NO: 986158 - protein, 69 aa, Homo sapiens
CAYCYSMVYSTSAREAEDDSLQYDARDLREYVGYLRVTQSLSMKIHYEQISPHIKLLHDLISLYFLAII

SEQ ID NO: 986159 - protein, 53 aa, Homo sapiens
ERSAIARVHMGQLLHQLLLVLGICLLLSTTKGGLKPGEWLLTSEVPCRTPRCA

SEQ ID NO: 986160 - protein, 50 aa, Homo sapiens
IPLQQHSIYKHIDAPDYPQLGDPLLYPLAYADLYLSNTLQSTRISLARKS

SEQ ID NO: 986161 - protein, 111 aa, Homo sapiens
TGDAVAHARNPSVSGIGGFLVSLTSRMKPRTLAVSVTVLKGGVSRVCSFCCSDVFGVSSFWWVRGLAGSGVKLQTFVVSVTALKAARLELLVPPGGLLVSLASGVKLQTAF

SEQ ID NO: 986162 - protein, 140 aa, Homo sapiens
DSIQHINTSKPHDELKLPSVPIPWSPMPTAAQTSTNEEFGNSGTKILIRIFELILYTKLRTSHITYAGSCCFKRQTDGKPSMHMLGKLTGTCNESANNRAEYYHLLAEKLSKIQKELEEKRRTRLQKQNMLPNAAGMVPV

SEQ ID NO: 986163 - protein, 150 aa, Homo sapiens
EESEAEALRGGWRSEAEQLEQTKRDESKAREGEADSGERAGGAGQRGERCCCRAKGDSEHKRKTVEAQLQELQVKFTEGERVRTELADQVTKLQVVLDNVTGLLSQSDSKSSKLTKDFSALESMLQDTQELLQEENREKLSLSTKVKQVA

SEQ ID NO: 986164 - protein, 130 aa, Homo sapiens
CLASRLEGPEEPERSVCLSRAPHTARTSVCLTGGSPYSKDVCLSHWGLPIQRECLSVSLGAPHTAGMSVCLTGGSPYSGNVRLSHWDLPMRLRHLSLAGSPTSKDVCLSQAPHTAGTSVCLGLLIQLGPR

SEQ ID NO: 986165 - protein, 49 aa, Homo sapiens
WRARCLVLDEARYGSASGWVVRPEHVRKRFIMRLCACRNVAQPVNIMSH

SEQ ID NO: 986166 - protein, 99 aa, Homo sapiens
WGGVSLSPGSFSRFPLPFPGHSRQGGDEVGAERMEAGDLRFPEYSGWGLRASPVPSLPPCLGFLPPSTPPGATGLSGAQAVPGALLLLPTRPHSRWTGY

SEQ ID NO: 986167 - protein, 69 aa, Homo sapiens
MGCGGSMSQHQLRVPQPEGLGRKRTSSEDNLYLAVLRASEGKKDERDRVQKKTFTKWVNKHLIKVGGAC

SEQ ID NO: 986168 - protein, 57 aa, Homo sapiens
CGYPAKRKRKSNWYVPRLQSMKYHRNCSNEAPNICITADSGIDSVKELHLYPRGPLL

SEQ ID NO: 986169 - protein, 70 aa, Homo sapiens
RIHCNIRSHIKVILLLSLPRSRNYRCPLPCSDYVCIFSREGVSPCWPGWSRTPDLMIRPPWPPKVLGLQG

SEQ ID NO: 986170 - protein, 137 aa, Homo sapiens
MLHSCDWLGVSTCSRVMSEDVTRRADWLGLSTCSSVMSEDVTLLLTGWDMSTCSSVMSEDVTLLLAGWGVSTCSGVMSEDVTLLLTGWDVSTCSSVMSEDVTLLLTGWGVSTCSSVMSEDVTLLLAGWGVSTCSGVM

SEQ ID NO: 986171 - protein, 107 aa, Homo sapiens
MVIRWFSIQEPITRNYELDLILVSDNYETELTNGTAVLFVAHSPFLSYIILYDDGAFTTAALLYVTIILYLYIKEDNSIYSWYSLNTFPTLANFPYVTDRQYFTTIS

SEQ ID NO: 986172 - protein, 33 aa, Homo sapiens
VKNEGQDAPGTNTVNGITYLSQIHLFQLAPSSN

SEQ ID NO: 986173 - protein, 64 aa, Homo sapiens
QWVLMDEHMVNEAGLYIDAHLSKYICIEKIHRTYITQGKARRECTCTPVRYVSECTLRECKVRD

SEQ ID NO: 986174 - protein, 90 aa, Homo sapiens
RIIERGLIRTHQYTRLPRKQQKTAVDPWNSSTKYDGAHEDPTAKLPVLMNSNRIPPPHNVKRYSNITIPRHSWFILDNDQNIFTRTHYRC

SEQ ID NO: 986175 - protein, 65 aa, Homo sapiens
MTSRVILVLRTVDAQCCQVVRASVLVWCQAAALRIVKRYLITQLINVIRAVDEKIGHLVRFIETT

SEQ ID NO: 986176 - protein, 32 aa, Homo sapiens
MPLVGSLASCASYPATLQDTCLTLGGHSHQSA

SEQ ID NO: 986177 - protein, 86 aa, Homo sapiens
MSVSGSPCLCDDTLLNRVSIDPPPIYGCLLFNFVGRLIHLTGPLQSVPFRLSLCVFLSSSYCDSSVVDRSALSGQLAARKNLVEWL

SEQ ID NO: 986178 - protein, 108 aa, Homo sapiens
RVQRLTAATVSTKPRDSMVRVGDRNTESEEGGKAVHEVEVALKHNRFTIGDLLLRQSPCSGSRTPSPSAVTWRLSASPRRDWAEITLITLNTGIVSGFRRTPKKGPGS

SEQ ID NO: 986179 - protein, 81 aa, Homo sapiens
MCHQRAPLGGSLWPQRYTSPRAWGYCRDAPLPSSHGVSSSVNINDSDCTTSMYEAWHRSSSIVPHPSVIEYPSQASSGCSQ

SEQ ID NO: 986180 - protein, 37 aa, Homo sapiens
RVMRLLSEKDVDPVRTTSNDIVEIFTVLGIEAVRKAL

SEQ ID NO: 986181 - protein, 73 aa, Homo sapiens
MSGTYQRLACHWMRLESVTFFELLVMCEIVISFVVTGDVLDLDLLRLIAKFCFEIASWFLVESWIWTQNAPHG

SEQ ID NO: 986182 - protein, 139 aa, Homo sapiens
PLWSRLRHDDSPGCASDRNYSRTIAPPGSHPYSPKIDGTITLRDEEENSPVTTNVDRMRRDQIINWIVQLSNIIPDCNANYSQTGASIGGILSQACDYIRELRQTNQRMLENFIEAERLQIDDELLRPQIEELNNENAL

SEQ ID NO: 986183 - protein, 85 aa, Homo sapiens
YEACWNGLGLKNLFRRVFHGTYLKNFCSIARLLGTTTCKQVSSVCSEESLILKLPTDELMTPLTEEEEKAPIVGCTLQEDSAEER

SEQ ID NO: 986184 - protein, 139 aa, Homo sapiens
FGRVCGHLQVIVSRSGRVMNIIEDVLSDDAPSSLSYASTLQANREDSMNILDPEDEEEHTQEEDSSGRYEDEDDSQDEEELRRRKMRKIIRRMINVQAREMKHYDYYCSEMESDEDYPDMNASPLVRFERFDREDDLII

SEQ ID NO: 986185 - protein, 30 aa, Homo sapiens
MPLLQPDDSTQNAPNGSRVSNSPNLVFASF

SEQ ID NO: 986186 - protein, 76 aa, Homo sapiens
MVFRLPPLTSMLEMELKFGVNPVEAATEEIQTHKWIRRGHVLMPVPEGPEGLATLLRAGRPPARDLAEKHPVEAAP

SEQ ID NO: 986187 - protein, 125 aa, Homo sapiens
SMITSDGPSAPQLLAAERAWRDAGPLSSLAVKVHGIRSSENSTVHLQSPRRPSTNIMCLTVSATLSAAIWCGALFFSLEHHPVMLVPHNYRLSCSRAGPSSAHSLVSSQGSITPSTGASHNAPNA

SEQ ID NO: 986188 - protein, 55 aa, Homo sapiens
GSHLGPDCACSPVNYRLEVNTVRLPGLEPRAISLLRSCGSADGVLASPLHAERPL

SEQ ID NO: 986189 - protein, 55 aa, Homo sapiens
MCTRLWYTACLHVVRVCDTQCDYNVVLPLLQPDDSTQNAPNGSLSLEFPNLGHSL

SEQ ID NO: 986190 - protein, 81 aa, Homo sapiens
PVVWDTLKPTFRCAPGSSLFTTLLFPAPESPLSTTGLGPDMPHCLSSPASTCAGLSRPQGAFSTVPSQPVFSRCVTSAPQN

SEQ ID NO: 986191 - protein, 123 aa, Homo sapiens
MALCVSLFSDNRILKSCRQIWEAHYSCRYSAFADNDLISLPKEIGVASPLKELHIQGNRLTVLSPELGNLDFTGHMQVFKPDNNPGVTPIADQFQLAVSHVFEYIRSETYYYLYCRHMQAYAE

SEQ ID NO: 986192 - protein, 85 aa, Homo sapiens
MAALGVLLREQKHLLPEDQLLTVSMIIVHPPFYTAQIEAHFALLQLEHLVMVSRPRSSDSSPCPPWPHMQLPLWACRDWVTALGT

SEQ ID NO: 986193 - protein, 69 aa, Homo sapiens
INIPDILTEPTGTNESLQTQVVNLFNTLEEVRELARRDNQDSAKLKSARKQELQAQVGLSPRAGGTGPA

SEQ ID NO: 986194 - protein, 74 aa, Homo sapiens
TGDAVDWRLKVQGRYRRQLNAVADTGLFSRDRDHMVNRPLPAFYNVLTCIIINCGIDSVTLYDYTIMYDTLCNV

SEQ ID NO: 986195 - protein, 114 aa, Homo sapiens
ALCVEENGQEQTMSECEAVAHELQRAKRSLAPAEGLVHADNPVGSWRPWSACLESSRQLGLSDNICSNWALDSFAFSSVYLPPQVPDICINTILGTPKSESNYSIASFLMSVRI

SEQ ID NO: 986196 - protein, 73 aa, Homo sapiens
RVMRLDRSGQVTVYGLIVRRRCQPTDVLEGLNLLITISGKRNKLRVYYLSWLRNKILHSDPYVKKKHGSTTVV

SEQ ID NO: 986197 - protein, 68 aa, Homo sapiens
RRRPDSSDERRTGTAETQLISDSSEDSSAAGRLNAVYKGIEVLTLAAAPLKTLHRNEMTLCLLQNFLG

SEQ ID NO: 986198 - protein, 127 aa, Homo sapiens
  misc_feature (82)..(82): Xaa can be any naturally occurring amino acid
  misc_feature (106)..(106): Xaa can be any naturally occurring amino acid
  misc_feature (115)..(115): Xaa can be any naturally occurring amino acid
  misc_feature (122)..(122): Xaa can be any naturally occurring amino acid
TGDAVGKRRSSLPRWDGGRAETLLTFQTGQPGRGAPHIPDDGRPGRDTPHFPNGVAAGQRLQSRHFGRPRQAAAPCPRAPRXPSAPPAPHPISQHWCIRDYIYNTXLCGIHSTHXHCIIYEXKKINQ

SEQ ID NO: 986199 - protein, 44 aa, Homo sapiens
TGDRLLLTVIIVALKRLTYSTAEYTPRLTSSGVHNASLTLFLIV

SEQ ID NO: 986200 - protein, 117 aa, Homo sapiens
TGDAVVCVPVCVRAHCVSVCRLLSLSHVSLSLSLSLCLSPFSLFRTPSLSVSVRLCVRAPWDTCALRAGGWVSRTSPFLHGSVSPRLCLGRVARWQTSSPGFQFGGLRRPAQRWQWA

SEQ ID NO: 986201 - protein, 109 aa, Homo sapiens
ETMGVRTETLLTAEMLWPALRGAPHLLDGMAGGAETLLTLQTGQPGRGAAHVPDDGQAGRDTPHFPDGVAAGQRLHSRHFEEAKAGGCEVEVVAAEIMPLHSSLGTIEH

SEQ ID NO: 986202 - protein, 34 aa, Homo sapiens
SSVDDGARGLMGSCGVSAGSPSGLFAAHIHLAAV

SEQ ID NO: 986203 - protein, 95 aa, Homo sapiens
SGLQIADKIEKIRTGNGLDGKTRGPAVHVLSNRSQEDFQLGPSSARNPGPGFRIGAEMSSIVLGHSDTVTAVKDQGLERRNITSEVQDMKCYLHR

SEQ ID NO: 986204 - protein, 75 aa, Homo sapiens
MTTNYLDVLHKDNELLTRASRGAMGETHLLHRLLLLLLTLCGQDTGAWTTSYVPCAQGPELWCQSLEQALQCRAL

SEQ ID NO: 986205 - protein, 99 aa, Homo sapiens
VPPPADMYYRGFFFVLCPLPRVRPSPCEKTSWGDLLPPASPLSGGQNSPAPAFRGESGPLKWIPPNPAFKGTQGACHFLSEEVCAPPRSCQWRSSLHNP

SEQ ID NO: 986206 - protein, 126 aa, Homo sapiens
KIGCDDDFGFSVRRSTSKNFSDQSSRWLNSAAWSEALMPVSLGNIHVCIPSFILHSEEGLLKTIVFCSVFSSLFSKFLGRVKFLCRLTFMPLAYLRLIQFSRMASVQMSSLAAGSELPRGEACFSS

SEQ ID NO: 986207 - protein, 136 aa, Homo sapiens
EERAVSMNTDCLPFDKRHETGMPFITTLFNIVLEVLARSIRQEKEIKGIQLRKEEIKLSLFADDMIVHLENPIVSAQNLLKLIDNFSKVSGYKINVQKSQAFLYTNNRQTESQIMSELPFTIASERIKYLGIQLYR

SEQ ID NO: 986208 - protein, 34 aa, Homo sapiens
MADRAEGIRQEDAWGLCVNRDEAGVRGRSCRASR

SEQ ID NO: 986209 - protein, 42 aa, Homo sapiens
MILQMIGCIMCAVCIGVVLSNRGAYRIGRDSVVGKNVRFTPD

SEQ ID NO: 986210 - protein, 30 aa, Homo sapiens
MGTAVLRNGARPSLSDRLTHVQGPRVRTRE

SEQ ID NO: 986211 - protein, 61 aa, Homo sapiens
MEKLADSTVPQGALVLVHGSCESVQVPDDQDFRSFRSECEAEVGWNLTYSRAGVCVWCAVL

SEQ ID NO: 986212 - protein, 120 aa, Homo sapiens
QCLGRLWHGESREYYSCMCQKQKFFWSFPGSGVAGSCAEMSDQSRLHSWRTRESSVRQSLRYSPLMYLSSMSLVQADYAGNILLDTLDLDSPSEVRSTLAEQTMVCESWVPVLLGDPARV

SEQ ID NO: 986213 - protein, 69 aa, Homo sapiens
LISLEWQAFVMPLRGPHCLEHLAAPYTVPLGGCTAALLPVAVTDGAGWDSSMCVMAIPSAQLTKKLAIL

SEQ ID NO: 986214 - protein, 54 aa, Homo sapiens
IELGTMETRLRVCALRYSRAAAHLRAGGKILTFDQLALDSPKGCGTVLLSGPRK

SEQ ID NO: 986215 - protein, 39 aa, Homo sapiens
MCPRPRSNDIARCCSPLPVSVAGRKLWRRPVGSLDDPAA

SEQ ID NO: 986216 - protein, 71 aa, Homo sapiens
LQDPRQASLVPHNGHRIVHERCYAKRLSIRQVSGSCIRLINVLTAITLLTGKKHPITTYHRILCELLLDLH

SEQ ID NO: 986217 - protein, 41 aa, Homo sapiens
MTCPRRLLTRCDICLDASDMSVVNNYNASRVTLDGCFLIEF

SEQ ID NO: 986218 - protein, 41 aa, Homo sapiens
AGSSDLTSVTAADTAVYCARDSYYYDTDAYKRTLTTGARQS

SEQ ID NO: 986219 - protein, 39 aa, Homo sapiens
MLARLGLELLTSGDLPALASHSAGIPGVRRHSQPVAVCF

SEQ ID NO: 986220 - protein, 85 aa, Homo sapiens
MRLANGPDVQVKKFNEARVNGGSNYDSLKVAKCLVIYISDAHAWMNEITTVPTLIYIESTDNGRGLAGIIGGRRTCLSLSLVWHG

SEQ ID NO: 986221 - protein, 139 aa, Homo sapiens
VSLIPDRSSYSCADICPPSHYVPALPSRTQETPPAQMYGFLNRYHEWEAHNTKASSRSWNKVYSVINNQEMGFYKECKDCCIWNSLPQRGPCELERSCLQKWPLHYQKKKHVYKLRLHDGHEYLYQAKDDEAMNTWIQA

SEQ ID NO: 986222 - protein, 118 aa, Homo sapiens
PANYSHNTNPGDTYGPDGKGFLNRKHEWEAHNKKASSRSWHNVYSDQNNQRNGLLRKMQRLLLTGIPYHSEVPVSLNDAVCEVTLNFKKKKHVYKIRLNDGHEYLFQTKDDKAMTHGS

SEQ ID NO: 986223 - protein, 33 aa, Homo sapiens
GLTVQPRCGCTQGSDPHYLPAHSQNSHQRTLAH

SEQ ID NO: 986224 - protein, 35 aa, Homo sapiens
MGMVALPVIAALREAEAGESPEPRSVQDQPGHHME

SEQ ID NO: 986225 - protein, 71 aa, Homo sapiens
PRFAEQYGGLSSLQTPPPRFNRFSFLSLSSSRITGTHHHAQLILVLLVETGFGHVGQAGLELLTPTSTSLR

SEQ ID NO: 986226 - protein, 62 aa, Homo sapiens
YSSLAKLLVLSSLLYSWCFPSEDLLGVHQYSQSLLGQLFYLAASSQPSCPNIYFYKVSLLAH

SEQ ID NO: 986227 - protein, 50 aa, Homo sapiens
LIASPELKRCGMARACHQAVKILMYAFNLLFWNFLLLLLVYLLEATVAYA

SEQ ID NO: 986228 - protein, 141 aa, Homo sapiens
DLEIPKVDSDAHSMQQAVRSGAVPWPHIHQPNPAHSAPMVLCLCGHPLMAPVENPPDPGSPLLPRKVAVLTLALRPVSSQAKHGSKLTGALKEWPGSGPLCSEVHSPWLSVENLLGPRNLGCEYLLGVRLCFLKLHGPRRR

SEQ ID NO: 986229 - protein, 43 aa, Homo sapiens
IAQIQLDHGSITFQGQPTKPRATGGHGRGVALNHSPSHHARTV

SEQ ID NO: 986230 - protein, 31 aa, Homo sapiens
MDSGIQVKVQSSWLWGQCEEWKIEYVGYRSR

SEQ ID NO: 986231 - protein, 91 aa, Homo sapiens
GANATWNAIAENPPVLPLSSTVVESCVDYSLMVYVDIPVSYEIYSLICHLSSVPFLYIHLVAEPHRVPHVTCTPDLLKLAQFITFLTHPEG

SEQ ID NO: 986232 - protein, 57 aa, Homo sapiens
DGDVTRHTQDGSDDLLTPLRVELTALFYGLSLFSVLFFLRVLNWIHRTVRHQGVVSL

SEQ ID NO: 986233 - protein, 101 aa, Homo sapiens
LGLINIQEESTLHHVWRFQGGAKKMKKSYAMAKKNMHYRKKIKLAVLKNSKVHDNGKMGGLHGKCLLDECGAGGFMASHLDRHYGGKCGLMASTNQTSNRV

SEQ ID NO: 986234 - protein, 71 aa, Homo sapiens
GTLDGLPLGGTATVYVWTHDVYCGQRDRLRVEHATVYGGTVCWYVHACNFQPPCEDLTVGRLGSTLKRLTA

SEQ ID NO: 986235 - protein, 43 aa, Homo sapiens
CCGYSRRLPYGGPAPWGTYGRCRTLGRLTAEYRTPPDRTFLDR

SEQ ID NO: 986236 - protein, 97 aa, Homo sapiens
TLDDPPRWKRDVRWSTWNTGQRAELLAPVGQGEAWQIEYVGYSVTGRVLGLKMPPDLSLGLDDQHWDDDEQNGHEDAQNQGPDVQALGGGGIGLGPG

SEQ ID NO: 986237 - protein, 57 aa, Homo sapiens
MALRIEVANLDGAHRKVLLWQNLEKPRAIALHPMEGTIYWTDWGNTPRMEASSMDGS

SEQ ID NO: 986238 - protein, 52 aa, Homo sapiens
VISFFSVDHARTSLENIPENVGPRCVNALLVPMCPSSVVANKNRPAAATTHV

SEQ ID NO: 986239 - protein, 74 aa, Homo sapiens
MKLADPDLGLQPSELYENNSLLFMATLVYGSPEQTNDTLPLWESHDHGHGMNRPRCSVILEGPNPGAGPDHPGK

SEQ ID NO: 986240 - protein, 72 aa, Homo sapiens
GLLISVMKVVEKEVEVAVSISSALQSLTTMPLTMRGKSANEKADSAGVRPGAEAYLLSVFGIWCLVMQREWR

SEQ ID NO: 986241 - protein, 35 aa, Homo sapiens
TNQAPPQLGCWCWSASAHEDSNDQKQFVEGQNRQG

SEQ ID NO: 986242 - protein, 151 aa, Homo sapiens
RHLTSVRLTVTNTSQPVMTNTSMDNDGPTAKDTSDGHTYRMTQNRVTPGRPTDDGRCQTARRTRGNWDSDKKYPPTWQCFTVRKRERRRAEDYYRCKITPSARKPLSNRVRLVAVEHRHTSGLPYWPYLTADNFRKGDGAPASILQLNNIL

SEQ ID NO: 986243 - protein, 125 aa, Homo sapiens
GSNTSAGSTSWTPWNGLRKVDFWHSDPCTMIKGTSGHLWPPFMTPKSSRAFSSPEACRSMKLLYKASGVFDGIPHYRFVAPKSLLANGSISPPNDGFGPCLESGNSELSAPAGSVPPGFSPILTS

SEQ ID NO: 986244 - protein, 66 aa, Homo sapiens
QRVLHPGQRCVILPRLSEISPRQQGTDFHTELISHGKVSAIDTPHFGVLRKTTGHGTETEHGVFSI

SEQ ID NO: 986245 - protein, 98 aa, Homo sapiens
IRDLVITYGRYLAPFRYKMGWVSGRGGACRSLSYYSGGGAKLEHRSSKASRANLVRPDLSETYNPTPTPHQTQGLVLPGPLPETNDDQTDDNVPFAFS

SEQ ID NO: 986246 - protein, 40 aa, Homo sapiens
MTPPTVLDSYAPTDPTLHVPLLPHTVLTHVRTPTTYPITT

SEQ ID NO: 986247 - protein, 69 aa, Homo sapiens
KDIERLKQRIRREQKASISSLDGSTRLKPSLAMLVISVMGFLCSEQPDLDLNPGVSVTVPADGGHSNME

SEQ ID NO: 986248 - protein, 178 aa, Homo sapiens
YVGARALLRGHNQYAHELAKITSALNRGPELLDRWWTPVAQITQRKWEAAREAEQLRAYLEGLCLEWLRRHLENGKETLQRADPPKTHMTQHPISDHEGHPEVLGPWASSLLEITLTWQGNGEDQDPWTRSSVETRPAGDGPFQEVGGLWWCLLEMEQRYTCCVRHEVLPKPLTLRWE

SEQ ID NO: 986249 - protein, 63 aa, Homo sapiens
KCSQSVHPSLSAVTSYVVKFSSMGIIDLNSLLFQAKSCRPDSEEELLFSHILIFHLAYSCMHV

SEQ ID NO: 986250 - protein, 67 aa, Homo sapiens
VALVLTQRRSCMFFSAYARPAPVGICLLDVPCAAWFPTKILGDSCVHAHLISVDPRGLMPVNRTSCV

SEQ ID NO: 986251 - protein, 171 aa, Homo sapiens
  misc_feature (11)..(11): Xaa can be any naturally occurring amino acid
PRGSRGQRDDXHKGQTSLYLPRDGDDSLLPSRITLLLRVLPGYFLVRAFQLVDGHNGRNVLSNSSIMSNPLLGLVIGVLVTVLVQEIQHLNVHRCQNGVLFIAHCAGCHPHYHWGPPLDRQITNTMVALMQVGARREYRRAFCSEPPVHDFFTWLSVEVLLPVEVATHYLE

SEQ ID NO: 986252 - protein, 61 aa, Homo sapiens
PPGSRISQAGLGAGSQVLLDLSPAVLPSRLQARLFWAAVLLVFSLAILPAVVHRLLSKSSP

SEQ ID NO: 986253 - protein, 74 aa, Homo sapiens
VDSTTDSPYCSRLVTDDELRSGPTSDWYVVITSHSLTDGEDSPLASGAWKRRTTIPRQTVYRMSCRKLAQLYNG

SEQ ID NO: 986254 - protein, 34 aa, Homo sapiens
QETHLLLASEVVSAMADTSRSCLAWDTTVDMPNA

SEQ ID NO: 986255 - protein, 41 aa, Homo sapiens
TPRGSIYRHFLVGEACCFPIMRFLLHGGSASPGITFRAFSP

SEQ ID NO: 986256 - protein, 52 aa, Homo sapiens
MTVLEGMMMCPHDSGSRTCWQDVNNGELCSPQDWAVAGVDTCPPTLANAESL

SEQ ID NO: 986257 - protein, 41 aa, Homo sapiens
MDIVILIIFSWPLARSCLSFLTFISILFLTISFFFHLGVPS

SEQ ID NO: 986258 - protein, 43 aa, Homo sapiens
VVYYLAWALVMTLESLRAVLDCGRMSWRGLWYLLLPSVRRASA

SEQ ID NO: 986259 - protein, 111 aa, Homo sapiens
WGGISSSPLLPPLSPVHVVGGQQAWRVVLCFLDTLSVVVAPMGRVLWSHLEPQRLGNSSRAAHVRSRSRLAAGVSRLRPCTTKPLEGAYGLFGGAGGYIVYLQRLIVHHVS

SEQ ID NO: 986260 - protein, 61 aa, Homo sapiens
  misc_feature (49)..(49): Xaa can be any naturally occurring amino acid
LSTTPPTVDPRRWFLWDARTYVTTTLGNGVDDYLRVVVSTFGTPHYVTXVLLGTRGTRRLD

SEQ ID NO: 986261 - protein, 74 aa, Homo sapiens
RIPVDSDVQIIWTLVLTSLTHGRRGFGGCPRGRRSCRTGHLLLPQLGHLPTGVYQKVVPQIPVKSVGPHVAGVL

SEQ ID NO: 986262 - protein, 45 aa, Homo sapiens
IYCSSESYGHCSAQHYSITASGRSMKYRLQQAQKGTPMKPEHTSH

SEQ ID NO: 986263 - protein, 40 aa, Homo sapiens
LDVDIDEMMSLDGGAKCNDQYPYKKRRRGRARWLTPVIPA

SEQ ID NO: 986264 - protein, 55 aa, Homo sapiens
  misc_feature (41)..(41): Xaa can be any naturally occurring amino acid
SYCEELDGRTANDFSVRWVVVYLHPQHGRANDWTKDCDDDXTDDRTNRSEMTVTR

SEQ ID NO: 986265 - protein, 38 aa, Homo sapiens
LSVYVTQSANTQFDYVSGKLSLHRKECTQFHGHNSHSC

SEQ ID NO: 986266 - protein, 51 aa, Homo sapiens
VDLAGIPQAMHGMAVFPVSLHAAGASGGGSTSTPTHQGTFPSPGPGVTAAS

SEQ ID NO: 986267 - protein, 95 aa, Homo sapiens
RTHPSSKSKEHRALNTQNPREQKASISTLDCSTRLKPSLAMLVISVIGLLCREQLDLTEPLVFQYQFQPLAVFKHGVTFHWVPYVTHGSCMAKKG

SEQ ID NO: 986268 - protein, 99 aa, Homo sapiens
KCRVVSIVVNAAGSASTSRLYCGPSHQCFGGGRLIRVKPDIGSLRSESGACSCIGLVPSDAVGHHQQRVLAFSIVCIRAADHWGGSIVARELWFSGISL

SEQ ID NO: 986269 - protein, 62 aa, Homo sapiens
SGSSAFRAGTGSSISRVLGPSDSDWDRNHQLSGASSWPTTGLGTGPFHKCWSQVFRINLFPP

SEQ ID NO: 986270 - protein, 113 aa, Homo sapiens
MAERWEEHQHSASPAKDEYYSSNFPALNMEAVVEAAPQCQKMVNQFLSKGGTLCHVRNCAHACNPNTIVTAEDGTIKRSGADDHPVTPLDKHPTHTHIQPISPGSVDSCLYSP

SEQ ID NO: 986271 - protein, 56 aa, Homo sapiens
TIFWERPPDLTGNDLDFLSGRHLTGPGTTRDFLSGTTPDWTWNDSRLFSGQTLDFT

SEQ ID NO: 986272 - protein, 70 aa, Homo sapiens
YPPVYLPVNPRLASVRARSSHSTSAPWLPLARVRLLLRDGAGVWDARPRGGRADLQNPHAPMASPLVRLT

SEQ ID NO: 986273 - protein, 69 aa, Homo sapiens
YSEGRGVLSLWMLRKGGDRKRGDVTCGFLRKCRRQDEGWCDLWILEEEAGDRKRGGFDPVDYLRNALVV

SEQ ID NO: 986274 - protein, 39 aa, Homo sapiens
AREQIPRYTHHFLLGNAEPFEKRNLASVFKWFSIPNQKV

SEQ ID NO: 986275 - protein, 108 aa, Homo sapiens
VLCCYHAFVSEFATRGPVSPSAKQVDSRFCCLQQWLPSGKQWVMVGDGACGKTCLLIVFSKDPVSHEVYVPTGFENSVADIEVDGKPVRVGFVGHSLGRTDYDSPEAP

SEQ ID NO: 986276 - protein, 51 aa, Homo sapiens
DAEVALEIPQPFVHLTTAGLWWDGVTHLLASTCISFPAGPGSPASDFKSLV

SEQ ID NO: 986277 - protein, 136 aa, Homo sapiens
ATQLSGRRRACETGFYFYFYFFSPFYFLTTTRTGTEARAEADATAEVLVTLGVCVDDGGCCAQRPASLPSNAYNPRPQPIDRRRRQCEHSHLATPPRTVYNKTRKHDMACLKRQVCPVLGPTFSWASNGPAMLLPT

SEQ ID NO: 986278 - protein, 51 aa, Homo sapiens
RLTGEDRGGFGMFKLSFIIFTFVQHHGRSHVCICSVACSIQADSASTVSSV

SEQ ID NO: 986279 - protein, 56 aa, Homo sapiens
  misc_feature (40)..(40): Xaa can be any naturally occurring amino acid
LRRSTSRRTPPNDGTDATTYDTDWTWTVNTVYSLTDDVLXVPFTYLCWCDTSTTLF

SEQ ID NO: 986280 - protein, 106 aa, Homo sapiens
MVQPNQEGLSQVLEMKGAVAHHQKGGREGHLMTSLQAQRGLTSSRAALHTIRKEYLRVQDKRTPKTGPGKQREDPKPGPKKPKEKGGALSAVGSHQLCKGGYPGGS

SEQ ID NO: 986281 - protein, 46 aa, Homo sapiens
ALRELHCSVTPITNFAGQQSQDTVESLAWLTNLEELQVAIGSSEPL

SEQ ID NO: 986282 - protein, 48 aa, Homo sapiens
LYDGLRHALATVWCTTATRLPPGGPDDRGALKHWVTGGDTDRHASSGQ

SEQ ID NO: 986283 - protein, 34 aa, Homo sapiens
LDGSPLTTPKRSRTVVTAPAFHRSLYFVPDTHST

SEQ ID NO: 986284 - protein, 91 aa, Homo sapiens
MTTQEDKVITEMAAQIREVEQSRQEVVRSVLEVGFPRRIQTTSGKCQTQKRVFSTKKLERDDQPSSFQLTAALNLGPATSSRAGLDGAGPS

SEQ ID NO: 986285 - protein, 90 aa, Homo sapiens
PSLNLRSSRTEQDYHGNNTSSVSVLYTDRQPHTVSPIILIIIITQSLIRRLITTLWSNTAAQLHVVLTNGGSAMVEGQVLHSEYWCHLII

SEQ ID NO: 986286 - protein, 34 aa, Homo sapiens
LSVSSASHVPGMSLAALTHTIPHGLLYKSKPEEL

SEQ ID NO: 986287 - protein, 45 aa, Homo sapiens
MHTCPQRISSAPGQVRQVVVHFSRPFSTGTISITGPSTFPSPGPA

SEQ ID NO: 986288 - protein, 111 aa, Homo sapiens
SLPVEGKNSFANYCFQEFCEIMKNAYCSGETFQSCIYISELGISEAFLRPQDKEATQMGNEGLPSFTCVVDLVFTSFALGPPLTAGTLPTTVLAAAAYPAPTCVINATYLY

SEQ ID NO: 986289 - protein, 42 aa, Homo sapiens
QTEELMVWVITAPADGADGAAPFFTWHKSKKTDMLAFVKEIL

SEQ ID NO: 986290 - protein, 109 aa, Homo sapiens
STGSVASSFHAFNSSEMRAMTRVGKTVSAIERWKKSREVSPVSRKRSVVFAVILGISGCLDISQRMKGIVVRKTTFQRMKGIVVRKTTFQRMKGIVGRKTTFPGLGTHY

SEQ ID NO: 986291 - protein, 73 aa, Homo sapiens
RTDDVCYLGGLALTQKWAGSHSMRYFYTSVSRPGRVGSPCFIACGLLWTTLQFCAVRQLTPLSQSDGDRVAPV

SEQ ID NO: 986292 - protein, 67 aa, Homo sapiens
LTTIPLGGRDVAILKAGNMVTISNAKQLLTCKNTAFPVPSASLDEMSPSYVNFLKSSKQFKFSFPLR

SEQ ID NO: 986293 - protein, 35 aa, Homo sapiens
VFAFSASSEKQGFLFCPLTSGLAELALGGKILLLC

SEQ ID NO: 986294 - protein, 100 aa, Homo sapiens
KQLEVLLDYYTTIRYTYFEVVCRSENFGQNGEGNSTPYEQHNSNHCTYYSYLCVSPWPSIALAVNQNLLEASFSSSLKPFPRTQFYPKKRMIRGLGAETI

SEQ ID NO: 986295 - protein, 105 aa, Homo sapiens
NKEAMLYIYVEEYSKLDHSFIVSQPTFYLLKNDNMHSTIGEVVGEVVTLEITSCISFLGSNVPSIIAQIYITSVLGWNRCISSNYEHSKYILKSRISQRGQINSH

SEQ ID NO: 986296 - protein, 43 aa, Homo sapiens
GLSLSKGSVTGMSYHAGSTLGNEMPSTPSQELEGTGIFRVSKG

SEQ ID NO: 986297 - protein, 59 aa, Homo sapiens
MSRISELQPMSQATMSILEVAVIQRDIQHQPPGRGQDHLCCPGAPRIQKLIGRVEHVVL

SEQ ID NO: 986298 - protein, 53 aa, Homo sapiens
DKVGFSGGGKSNFNYNLEAATVAHAGNPSTMGGRSALIIYGQKFETNLGNIME

SEQ ID NO: 986299 - protein, 110 aa, Homo sapiens
  misc_feature (25)..(25): Xaa can be any naturally occurring amino acid
SVTDSCPPVTDSVPPAPTLSACEAXRAPASPHSLPTAFFFLKQGFALSPRLKYKSAIIAHCSLDLLGSRNSPTSASLGAGTTGTPRPANFLYFWKRQGLTMLPRRGSSHL

SEQ ID NO: 986300 - protein, 129 aa, Homo sapiens
  misc_feature (1)..(1): Xaa can be any naturally occurring amino acid
XPKTVSKKNKAGSITLPDFKLYYKATVTKTAWYWYKNRHIDQWKRLENPDIKPHPYNHLIFNEVDNNKQWGMDSLFNKCYNWLAICRRLKMDPYLSPYTKINSIWIKELNLKPKSIKTLEENLGNTILT

SEQ ID NO: 986301 - protein, 38 aa, Homo sapiens
EEEMMEWTSYTVAVKSSDILGAGTDASVFIIIFGEDAL

SEQ ID NO: 986302 - protein, 97 aa, Homo sapiens
  misc_feature (15)..(17): Xaa can be any naturally occurring amino acid
VQQMMQEPEDAENPXXXSEQSVVYPPNDHTSSPTRVFNQAELAGITEIEFRIWIGTKIIKIQEDSKTQSRKNKNHNKAIQELKYKISGIKKNLMDLT

SEQ ID NO: 986303 - protein, 137 aa, Homo sapiens
MGILCSRAIQSLKWPEKTLIDLYAQVVLEWIELRELGAARSLLRQTDPMIMFNQTQPERYIHLENLLARSYFDPREAYPDVRHHEPSRAAIAQALAGEVSVVPPSRLMALLGQALTLQQHQGWLPPGMTIALFRGQA

SEQ ID NO: 986304 - protein, 135 aa, Homo sapiens
AQFLVNHVLGFFPKNRLTGILLTQPLVSLWLRMVQTKDECDEYRHRDGDREQDGNTEGMNEEGRRGKGQKVGRRRKKETRRERKRERERACARERERERERERESSDAWMLLCVAKRTPGYRYSTATIMTTENHK

SEQ ID NO: 986305 - protein, 32 aa, Homo sapiens
MVRKSKKEVDHIKQLLWIPASLCCSLGETINM

SEQ ID NO: 986306 - protein, 43 aa, Homo sapiens
  misc_feature (2)..(2): Xaa can be any naturally occurring amino acid
SXSARTDMQRTQRESCKDTGIQYVSTKEKKKTETRRDRDGDPE

SEQ ID NO: 986307 - protein, 40 aa, Homo sapiens
YVSIVIMLCMAEASRNDLFCYIKPGSLHNDTLCLTFKDNA

SEQ ID NO: 986308 - protein, 180 aa, Homo sapiens
QDPVCLDLLRQVDPSHSATQGHFIYIKGRPDHRFLKQLHKMLVYVMPCGDLQTQRQLASSGNNIQDKEWAKTFMTYETPKATGTKRPNGANGTLLKLKRFCAAKETIIRVHRHPTEWEKIGQSIHVTKGLTIQRSIKNLNLQEKNNPIKKRAKDMNRHFSKEDIYAANKHEEIADHHWSL

SEQ ID NO: 986309 - protein, 92 aa, Homo sapiens
DAWHSRATLLASLRLHNLMANQPAAYLSLSKIDKLILMDKNHYGELSIQTDKSRPGAGAHTCNPSIWGGRGGRIMRQEIETTLANTVNPSLY

SEQ ID NO: 986310 - protein, 43 aa, Homo sapiens
SFSRGQLVEAVVSCSSCLVHRLHLLRLELQQLGLRWERSPSHA

SEQ ID NO: 986311 - protein, 55 aa, Homo sapiens
  misc_feature (48)..(48): Xaa can be any naturally occurring amino acid
  misc_feature (53)..(53): Xaa can be any naturally occurring amino acid
CLHTRKRAREQSRRKVARGKGYQFKTDGKNGLAGVKALRWFHQVDLLXGIFSXRQ

SEQ ID NO: 986312 - protein, 33 aa, Homo sapiens
TVYESSRYQMMQKPRVKGNRDPERQLRRKHDRR

SEQ ID NO: 986313 - protein, 70 aa, Homo sapiens
KQGIFRSVGRQASMAAGYTFMPHQGISHKARGQAHGVLVQGELQHMQCAGGHSSPISRPSDISSSHWRPQ

SEQ ID NO: 986314 - protein, 85 aa, Homo sapiens
SLATASATTPGNFGTVVEMGFRHVGQAGLKFLTSGDPPASATQSAGVIGVSHCAWSTSYFYRWFPMGGNLPKCGWCFLWNGITPE

SEQ ID NO: 986315 - protein, 99 aa, Homo sapiens
SLDVAGIRHTPPMPGYIFCDFFGEMGFPPVGPAQSSNSCTSGNPFGLGSPSCGITGVQRRAWAMVSISKVPTAIWTREGSGSTAGTLGGDPGLAHRPGK

SEQ ID NO: 986316 - protein, 79 aa, Homo sapiens
SYIYEVSCVPVRGDFGSAVSLEACEPPGFFEKRKPDFTKFQSRSAIRIGRHGTSSPVGVLRRFAVRCQCRLSARLIHRA

SEQ ID NO: 986317 - protein, 43 aa, Homo sapiens
GYGDGSLTACYDTSLNTHATYVGRTTFDTSLTTTDLLTCDLVT

SEQ ID NO: 986318 - protein, 160 aa, Homo sapiens
  misc_feature (157)..(157): Xaa can be any naturally occurring amino acid
PQGSNIREFKKPFNEQSLSYRSASVFLASLIRQPRLAVSGSGVTFLAFQRIFKPVQTCVIALVLADRVCYPSIFHLAVSMGQTSGVLPTRCTPDFLRVTSFIPLTPWSWTSAWIAGLCHDRQQCGDLKRSACVPGLNKRVPGRGTRAISVGISNVPXNRH

SEQ ID NO: 986319 - protein, 80 aa, Homo sapiens
MWFLQVGQAGGNSGPHVIRPPQRRPMLLASCKHEPLRDDHLESTVSHYGNGPSTLATRDRTRQDMHQDPSQETSGLHEGY

SEQ ID NO: 986320 - protein, 79 aa, Homo sapiens
VGGRNLRVNLREQRSPTFFSDVTGVETASSDPVPGGANSARAPFRLRSVSTDKGFWFQKFLNFSLAVIRSGCNFRDIST

SEQ ID NO: 986321 - protein, 173 aa, Homo sapiens
VDLRTRTAYLGEFKSLSAPEHWGGVAGGPSWEIPHWAGPKDLHARENSNHCQPENTGGIGWRPQLKGPSLGGTLRTRCQGEFRYLSAQEHRWGWLEATVERSPTGQDLKTSMPGRIQISVSPKTLAGVAGCRGPSLGQTPRHPYQGEFKSLSAQEHRRGWLEARLGGHSLGRT

SEQ ID NO: 986322 - protein, 69 aa, Homo sapiens
GGLTCQNGKQPLYVIWNQKRAGMAKTILSKKNKAGVITLLDFKIYYKAIVTRTAWYGCKNKGIDQWNRT

SEQ ID NO: 986323 - protein, 95 aa, Homo sapiens
MGYNWTGVKRCCDYVYQIMRVKDEDWWYVESQAGVELDAGLCPGAASQQLPSVFSPSGRMRCTKKSGPGQGPVLYVSRVTTSLGQGPESRAREQG

SEQ ID NO: 986324 - protein, 74 aa, Homo sapiens
ECENYNLVHDVNHNMLQNVNTTSAEGTTDQVDENCNSADGNHNQAEGTTTRQREPQQARVSQHRKVVKAIHPPE

SEQ ID NO: 986325 - protein, 75 aa, Homo sapiens
CTLIGGVYESDDQTRNVSRAHPADRPDHRLHEVGADQARYSTLLDNTLAENRRLTHYKSFWKNLRPWARDVRVPD

SEQ ID NO: 986326 - protein, 54 aa, Homo sapiens
MLPAPGPQAGGREIPASVARSVRLDTARPTNRTSTTDTIPTSVSNSAKDIRAPR

SEQ ID NO: 986327 - protein, 41 aa, Homo sapiens
MVLALHSFIDIYTGLFTVGNKLLVSLDLLLCNPDIISRLGE

SEQ ID NO: 986328 - protein, 137 aa, Homo sapiens
GSAGIHSRILACIATRQYRIAAMEAHTERLKANDSLKLSQEYESIAPGEQFTWAHSSLEVTKPKKRYAKVIAYDHSRVILQPLEGIMGSDYIAAKYVDGYRRQHASLATQGPLPEPFGDYWRLVCAPRSANIVMRTR

SEQ ID NO: 986329 - protein, 52 aa, Homo sapiens
MTAQDGWWGLVGHGSPFSGLAGDWSRRGMPCRMGRRDGRGPHSTLQQFDAAV

SEQ ID NO: 986330 - protein, 57 aa, Homo sapiens
MLSCWGHACVPGAGAYRVPMCCVWLGGPLVVVLLFPAVLDAHGLLGRLRVCGPPWAW

SEQ ID NO: 986331 - protein, 153 aa, Homo sapiens
VAVVCFRCVWISGVCVCMVHVCVGVQRVSMRLCCVRGCAVCVYALTWQQTGQWHLLQWGIGHSCPHRPSASPSHLSPSMITNPQVSSSFCSHCLRDMARSRGLSRRMSEVQGVQTDQVEAQHFSSQSRATQFPAGHAQCPSGQCPSQACPPFS

SEQ ID NO: 986332 - protein, 32 aa, Homo sapiens
VRPGQAQCHMHSSRKHLQCDNASWAMLVPPAL

SEQ ID NO: 986333 - protein, 87 aa, Homo sapiens
QRSRTDFTLTSSYGTTPRFLVTVLLTTGGLTLWTELYETSRHRRTRTKASVFLTADSPPAPDNCARVDTSHCWSVKPGHDTTDTETY

SEQ ID NO: 986334 - protein, 100 aa, Homo sapiens
MKRDTSDASRNVVSATEEGIFNLIDSNGLTFKQPHVVTVWASTALEPDESKPKTTSWVPNRRPQGENHPPQLIQPHQKAPGTGQENKAKTHPATMKDHSV

SEQ ID NO: 986335 - protein, 41 aa, Homo sapiens
GRFLSASRLTRETVSEQRRMLRGKPAVIPGIVRYELERIMS

SEQ ID NO: 986336 - protein, 42 aa, Homo sapiens
TCHSDKPSAILIIIIISCEMDSYDACESVYYTGTVCEGVPTL

SEQ ID NO: 986337 - protein, 55 aa, Homo sapiens
AGFKQFSCLSLPSSWDYRRVPPHHGLIFPYILGGGQGFHRGGGWSSISMTVMYPA

SEQ ID NO: 986338 - protein, 48 aa, Homo sapiens
  misc_feature (19)..(19): Xaa can be any naturally occurring amino acid
  misc_feature (31)..(31): Xaa can be any naturally occurring amino acid
  misc_feature (41)..(41): Xaa can be any naturally occurring amino acid
MAEFNQCSDLPSSGNARLXNVAKCLNVSMRXNFQIIKPVHXGRVTELA

SEQ ID NO: 986339 - protein, 39 aa, Homo sapiens
PLWTGSFYLLTDLFCFDTRHGFSTLTDNTYLHYLPGVLR

SEQ ID NO: 986340 - protein, 72 aa, Homo sapiens
GSTKTKDSDFKRHYVQHERAEDTKLGKFSIIYRVTISLGWLYNRGVAIFKGPKCSTVTRVYDWRKTVSAQEN

SEQ ID NO: 986341 - protein, 140 aa, Homo sapiens
MHWGHRRVPGLRILDRKATGGQWLQSFAGWPWFDTDNKKGMGVLWGHREDLQLSMIGLKFTRAFKEIGYTFFLYYSYLSLSLFLSPFCLGRWLGETQWKDVRSWPPFATIGLCASLLFTQLAFILIYYVVVDQFPVVHMG

SEQ ID NO: 986342 - protein, 39 aa, Homo sapiens
DCTFSGGQVLAAHLFVLWALAPAELKNATMASRLSRSPG

SEQ ID NO: 986343 - protein, 67 aa, Homo sapiens
EGNRGRGRQFSIHRESWLETPSEGNNNSQKRSLAPGQRPKGWATMDRVTEPWYSEEGAGREVRRPGG

SEQ ID NO: 986344 - protein, 173 aa, Homo sapiens
  misc_feature (1)..(1): Xaa can be any naturally occurring amino acid
XSGLRRLSCGFCGAWVLSGGALDSVSCGFCGTWVLSGHLRRLSCRFCGTWVLSGRLRRLSSGFCGTWVLSVCLRRLSCGFCGAWVLSGHLRRLSSGFCGTSLLSGRLRRLSSGFCGTWVLSGHLRRLSSGFCGTWVLSGGTLDSCLQGSVVPGFCLGALDGCLCGFCGTWVLS

SEQ ID NO: 986345 - protein, 38 aa, Homo sapiens
MPSLSVAPPAVPCSMGCLAIFILSALQQLVLLLQLHVP

SEQ ID NO: 986346 - protein, 49 aa, Homo sapiens
  misc_feature (6)..(7): Xaa can be any naturally occurring amino acid
MKHTLXXEEQECKAKKLRHFEEFEDTWLPYLTPKDEFHQPWQLKYSKLI

SEQ ID NO: 986347 - protein, 149 aa, Homo sapiens
TSSGGGSDGRHSDIPNATSLKTFRPPTGEGFRAWRTWIGTALPAGLPISSPTCSPLHSISSPGPGHQPWTQGAHSPLESIPSGITRPCSVAALPCLNSCSSGGADSDSSSCRPGLPSFVQVIGHPPRDHRASSEQALVQAGSYSRDSEG

SEQ ID NO: 986348 - protein, 103 aa, Homo sapiens
WSLLSEEVMWAGHRAHIWDLSTLGGKLGGSSEVRSSRPAWQHGEALSLLKIQKLARHGGAHLWSQLLGRLRRENRLNPVRRRLQWARMAPLHSSLGKNSETPS

SEQ ID NO: 986349 - protein, 37 aa, Homo sapiens
DRTLSVSLHVHTRHAVDMHTHFDSIQGDTHSGKESRM

SEQ ID NO: 986350 - protein, 165 aa, Homo sapiens
TQRMGIATSHPGLTYHNPWLTGYVDVGLIPAGAREIQHPTHKLGSQANTCAALIEHPKNSSSMVAAPSSEADYHVAGNTFTYARRGNWENLTSPGPTKEPVWIQVPASRGPGGGSRGGVPRPSTLHGRSRPGGVSPGSVTEPGSEPGPPAAASTSVSPSLKWPNL

SEQ ID NO: 986351 - protein, 37 aa, Homo sapiens
  misc_feature (4)..(4): Xaa can be any naturally occurring amino acid
AGPXAQESTLAGNMVKPISLKYDKLDGRSGSAVVPAT

SEQ ID NO: 986352 - protein, 51 aa, Homo sapiens
IAFDMAVREYCAWRKWRVVDNDEQFIEAAVQLAADDAQHAQTLGSMRPRDE

SEQ ID NO: 986353 - protein, 117 aa, Homo sapiens
FSFVIQLMECWEKKVERICEQPRVVGQLRCNGARCTMRTQFPEIRKQRELQERMQSRVGQRGRGLSMSAARSEHEVSEIIDGLSEQENRGGQQMRQRGLLIPAQMLVRLLTTQRITV

SEQ ID NO: 986354 - protein, 132 aa, Homo sapiens
HRRGVELERLMWRRPAGTVISGARGSMRLGERDLLLIRGGDLRHIGGGGNIPLGGMNLHGGWPRPGGQHGGGSDLLAINLSSIHVLQRLLGFIWILKLYVRIAFGQMGMHPFHGHVNHFNFPIGGKYLHDVI

SEQ ID NO: 986355 - protein, 97 aa, Homo sapiens
RSTVMAIWQQPLDALPPQTRGARRPSYSQYTFYYPIHSQHCKKVQKSDSGPQTPQQDLINLAFKVYNNREELQLLASAVRETPDTSPAQKNFKTPKP

SEQ ID NO: 986356 - protein, 105 aa, Homo sapiens
RSPLHTLHKMYMSNLVILFSIMKINVSICDFIFSVQETFQMQMPGQPPAERQQGQQRSSLEKGHIDPGLAGNPCQRGCGGACAGAAGRRGSGDPFPFLPPVPAQL

SEQ ID NO: 986357 - protein, 70 aa, Homo sapiens
  misc_feature (59)..(59): Xaa can be any naturally occurring amino acid
  misc_feature (69)..(69): Xaa can be any naturally occurring amino acid
DVGRLDSNLVYQTLPLNKRDTDTTMTCYYQLCQGPETYRRLTDHTATTTENTDQHWFPXNSWRLLTYPXR

SEQ ID NO: 986358 - protein, 39 aa, Homo sapiens
DLSDWQSVAVEGSPFSGSGMSGGERAGGQREGALIALAE

SEQ ID NO: 986359 - protein, 52 aa, Homo sapiens
QLAVPNKNSRSKPSERHWTMTLSTSNLKSYTSYLVSDLYLVPLPHALRVRVR

SEQ ID NO: 986360 - protein, 77 aa, Homo sapiens
EIMERCQPGMSGARAHMGQVHADARRPAAADAHCSCPPRSRCHTPPWVTVRQASLNQLGHSLLDSLEEAMGTAGVRT

SEQ ID NO: 986361 - protein, 40 aa, Homo sapiens
VRSGVGRLNHSTRIMAVAGAEQFKACLISLGLRRGESDRA

SEQ ID NO: 986362 - protein, 81 aa, Homo sapiens
AKQTWSLDPNFGNSIWSASMNSGCRACTVDVSVVVKGHAFKAHRRWLVASSSYFRDLFQQQPQRLVGSYRRLQQPQSFQQI

SEQ ID NO: 986363 - protein, 40 aa, Homo sapiens
LNTDFNVDEMASIGRDASRTFIAGRGEVTVWVSKGQADFL

SEQ ID NO: 986364 - protein, 89 aa, Homo sapiens
MMTVTSETQIFNVDEMAFYWKQMPSRTFIAEEEKSMSGVKGQADSCVRAHAASKFKLKPMLIYHPRALKNHAKPTLPVLYKWNNKAWMV

SEQ ID NO: 986365 - protein, 112 aa, Homo sapiens
PCTVEQSDDDMGDHQPLANAHDVLARSRSRANVLNKVEYAQQRWKLQVQEQRKSVLDRHVVLSYWGMESKVTRKKQADNGKERTGLGGVSFKYLVDSTKGGGKIQNGKQKLA

SEQ ID NO: 986366 - protein, 134 aa, Homo sapiens
  misc_feature (123)..(123): Xaa can be any naturally occurring amino acid
SSYWRNRFKYARTGDEVKKIGMQRFIKIEGKVRTDITYPAGFRDVISMDKRGENFGLIYDTKGRLAVHRITPEEAKYKWCKVRKILVGTKGIPHRVTHEARTIRYPNPLIRVNDTIQIDLETXKITDFIKFDTG

SEQ ID NO: 986367 - protein, 98 aa, Homo sapiens
KGIQATSSPGCGGPSENVRKLSRADLTDYLSTHFQGPFIGAGSSLDHGVYHQQLVSTSPQKHLRLDSHWPFCTMTLVPTSYSIAVFTVAVETRPPVMM

SEQ ID NO: 986368 - protein, 49 aa, Homo sapiens
LHMFLLHIFIHVVSSGYDGERGMGTERCMGTERCMGTERCMGTELCMGT

SEQ ID NO: 986369 - protein, 146 aa, Homo sapiens
VASSAGGSLAAQGQVKFLDPQTPGTGLSPTSPGMAVSPLHSQFSPKSHLYGPSGLPPPTGSSAWGQTSSLHTQMETGSHQGHRRPPGPSSPGMLGQHSWLTSAGIGFLGSFFRERLLPKALGQHLRVFPSFLRWAPISTRPPQPPK

SEQ ID NO: 986370 - protein, 60 aa, Homo sapiens
PCTVMVRNPPVTVPGLNGNSETSQDGQTGRYAGSSSDGNWGPGEETDWPAWHTPADSTSD

SEQ ID NO: 986371 - protein, 83 aa, Homo sapiens
PHTSREFTRHRDSSPHNKELSSKAQDSSPHNKELSNKAQDSSPHNKELSNKAQDTSPHNKELSNKAQDSSPHNRELSNGAWGP

SEQ ID NO: 986372 - protein, 166 aa, Homo sapiens
KQKGSRGLAMWSRLTGPQVTHLSLPSSCINGHKPGLRALYLLILRLLNGLNSQASHPICPRAIPEFGGTQGLNHQSTQVGSYKKPCEWLWLGPINSVQRRLTDYPGDEWPDVPTSVVPGDRGHLTCSPGTTGQARVSVTSQPDSVGHPRGRGLPGNRLAGVPERIP

SEQ ID NO: 986373 - protein, 114 aa, Homo sapiens
WVDSEDPQMHAENPTNLLEKSNLKTIIVKFTKVEMKEKILTAAREKGRVTHKGKPIRLTADLTAETIQARREWGPIFAIRKEKNFQPRITYPAKLSFVSEGEIKSFTDKQMGYR

SEQ ID NO: 986374 - protein, 143 aa, Homo sapiens
  misc_feature (49)..(50): Xaa can be any naturally occurring amino acid
PLFLETGSRCVTQAGVQWCDHSLLFWAQAILRLSFLSSRTTGTHHYAWXXLNFFFFFFFGGRVGPQGVPQAAAANLIPFRACIFPTGVIAQGCHPFFDGRWKILVPISRDGVHDSSGGGSREGKCRVINKAYLRVIREMAKKF

SEQ ID NO: 986375 - protein, 76 aa, Homo sapiens
PDDAETMPYRCTPAGDNELSKTNKQTKRIFDRCSQMKVAKNFGDCNIGIKKKCTGLMKSYNVHKYQGKQQLTEWTE

SEQ ID NO: 986376 - protein, 99 aa, Homo sapiens
MNDRVNKIAEDLKLENIFEYKQLVKLNTFFFLGFFRGFNGIYNGLAGSVCCSDVRGASLYSSLYVSQSYAVKVSTTGKQFFSPLGEYVVISYKQKEAHQ

SEQ ID NO: 986377 - protein, 134 aa, Homo sapiens
EGRVHPPARVSTTVIAEQCAGYEDADRQIGYTPNNQTSTPTGMVKQLKSTVSVVQLTKGFKYVSNLLISLKSCSGTVLFQKTLISLVHTCTFIQKLPKVIRTLNAALNNKENGIRFTSRNTASPQPCKLTLLTQ

SEQ ID NO: 986378 - protein, 106 aa, Homo sapiens
MTFDTRVTSIYLFFFFGKGVHSGWPRWECKGRIWAQGNLGLRGPSDSLASASRVAGITGTHHHPGLIFFGILRKDGGSPCVGPGVSGSRDLRIHPLGPRKVLGLRG

SEQ ID NO: 986379 - protein, 76 aa, Homo sapiens
GLTERQWYAQGQKHASMPEAYNPLPLKDTSQGLITTSKASHAHRRTREIVHSIRKLDRGQITTDMLVTKKSIFPHA

SEQ ID NO: 986380 - protein, 137 aa, Homo sapiens
VGSRCWPTALPLELLEPLLSRPPRPPGVERPISAILRKRTDSRSGSRPVPVCPSLHSSVSPVLPVPIHRLTVHLTHGWAVATPSRRDRHTWEGSSGPRLYREVFAAPSTRLVAEAKLVIASTCYYVHRPSAMPLPRF

SEQ ID NO: 986381 - protein, 31 aa, Homo sapiens
MQSIWEVIGHRPDDNEPCYQRQSSVATRVTS

SEQ ID NO: 986382 - protein, 39 aa, Homo sapiens
KFSSRDDEGPDMGSSKRSNEETDDYGKNSKWPLCLQSVL

SEQ ID NO: 986383 - protein, 76 aa, Homo sapiens
DVWRDISWEWCRVDSQITPVPIAASSSLDAQYSSFVDIVNMDKQIKSIDAGPVDACTLAFSPDSQYSGLRNSCGDS

SEQ ID NO: 986384 - protein, 44 aa, Homo sapiens
GPRWVDGHYSQTYWNLLHPPGFVWGSPAPSLEEVSLDRGQESET

SEQ ID NO: 986385 - protein, 71 aa, Homo sapiens
GKRYIGGHADNERVRLECAKTKQQSRQSRDNRTGFPRARYRARTTNYNSTRSRFYSGFNSRPRGSRRSPYA

SEQ ID NO: 986386 - protein, 74 aa, Homo sapiens
PHRQHRRQNEKQTRQGFTDFSGVSQWVQDKPLVMGNDSSGATYSVYIEMHPRLQVPTRLETPSPDVLAPAPSPT

SEQ ID NO: 986387 - protein, 157 aa, Homo sapiens
  misc_feature (76)..(76): Xaa can be any naturally occurring amino acid
AVVWVAGHTDMIGVIVHGCWRTGLIEGPLITSNPTGFSNRYIPQVIKLETPGTNSFFKRWEFHLERDIHKFRVVQXESIYQAAGITPFGHDLRADLMQAGGDVLGRCLTAKHVALEHLGQLITSYVGKVPSTVPPDAPHADADDGLGVQQCLALWLH

SEQ ID NO: 986388 - protein, 68 aa, Homo sapiens
CDSVPSLSPQDYPDALITNYYLWPAVHLANFYLVPLRYRLVVVQCVAVIWNSYLPGENIGSKTDSIHR

SEQ ID NO: 986389 - protein, 45 aa, Homo sapiens
QSFDEQQVVRLMGLLITEQARLEGYEASHRSLELHAGARSCSGEQ

SEQ ID NO: 986390 - protein, 80 aa, Homo sapiens
KEIIKSDGGKGEQNKPPVIHELSASPTQDHSYNNIGGSSPSYCSRTYLGFPVPPGQRGLCLRRHPCCVCTSCIVAPAYTQ

SEQ ID NO: 986391 - protein, 72 aa, Homo sapiens
IDTYHTIPFYDEHLGGSNTCTAIDEHCYQTSRHSCSGTIMTHGSLQLLGSSNPPASASQVAGIRGYAQPVPS

SEQ ID NO: 986392 - protein, 86 aa, Homo sapiens
MMSCCIAVLLLLVRGNVSALTQYIVCIESVSHCYKEVPKIASFIKERDIIDSQFLMAGEQLGTLRIMVAQGTQRGLTTVVGSQSGQ

SEQ ID NO: 986393 - protein, 95 aa, Homo sapiens
MKPMPLSEGKSLLLLEGHAAVAHPGSGPRGYPGSEKEIGGFSEEPEQQAVRLESSWLDFAPPAAVWTFVEHSGILGDFLLNMAVACPGMFGYSRE

SEQ ID NO: 986394 - protein, 52 aa, Homo sapiens
MYLRLVGSPLLQDQLCTKNKGPLLHNPEQPTQGSEALPAMVQSFALQHLDTF

SEQ ID NO: 986395 - protein, 52 aa, Homo sapiens
MRILMYTDITVLVAFKEPQQHADIRYTYVIEHFMGLADGDNRALLGYSSGAG

SEQ ID NO: 986396 - protein, 33 aa, Homo sapiens
SGPTAGVSQSTTLMEPPYGYERSGTPTQYNLPV

SEQ ID NO: 986397 - protein, 61 aa, Homo sapiens
QAQELCTCTGILYVPNKSYLHMRSMNERRAVMVTNTRAHRCSSFFPFLFFFGYVSPNNHQG

SEQ ID NO: 986398 - protein, 85 aa, Homo sapiens
HRVSVTSGYACGNMHVCRWGREAQWPHERRGGEVAHACRLGVRAGEALQKPRQNINAVTHLFSSKVTGRVSGAFLHKMQLSGDGL

SEQ ID NO: 986399 - protein, 104 aa, Homo sapiens
DRARWEVMPIIPAPWEAMRVDQLRPGAGDGLTGACEEATKQAWYEQHGCLFHLSAGGLSPKKESAKGGGLSLVLTGLGIGGGVWSNVLRAGVDLTKYILKGGEN

SEQ ID NO: 986400 - protein, 106 aa, Homo sapiens
CLPNHRRLKIAEELPKEPQGIIACCNPVPPFGRQRINERHLLIQQAREMPLLKSEVAAGVKKSAPLPSAERLENVLLGPNDCSHALRDGYPIIQTSGSVPVQKQAS

SEQ ID NO: 986401 - protein, 146 aa, Homo sapiens
PTPHNECPGTFWTEKDGSLVKSLILKPKSLELQPKVRTYAPVFCSNVAFSKTTHGPAPNPHPVPIKTPELCQQREKQLDIGDYGWMSERSSLTSEGQFDDVALERILARTAGLQGNITFLPCPFFISSFALRATFTRNKIPCIYRL

SEQ ID NO: 986402 - protein, 107 aa, Homo sapiens
SASHVTALWPTLVHCSHCSSPFIELLIVLFLLLPGTRATVMPPPVSCHPDTVSVYFPNPMLPLLAYTTLPTFNHSISTHTLPLFLSPPDCGLATPYCPWHTNLQDSS

SEQ ID NO: 986403 - protein, 38 aa, Homo sapiens
VYTPRLLFLAIPEPPDFNAAWIRKPLTEHTKRLWLLHG

SEQ ID NO: 986404 - protein, 82 aa, Homo sapiens
MTASRTWIHRSVIVRAFFYRLLIVENFFFFLLLEPQNVLDLEAMALYHWEQYILEDVHLPILDFNVRRGYLSVTLIYIASVS

SEQ ID NO: 986405 - protein, 44 aa, Homo sapiens
VLILKPSTQSIHGLGRSGPVLRQSLWSHRLLYSYPWVLPSGPGY

SEQ ID NO: 986406 - protein, 125 aa, Homo sapiens
RKATSSVGRVEGLQRWSVRQRGDEVGTPQPSRTNLSSSGTSISSPVHRLIHRVLHHQQSMCLSQCMICNPRSPMTPNIPDPNPEHDDDPGTPGTAVVDQQHSVEFDSPDSGLPSSRHSSVASGIQ

SEQ ID NO: 986407 - protein, 33 aa, Homo sapiens
MCPSARLSYSNPMLPRGSTKADPPFYSGLSIMT

SEQ ID NO: 986408 - protein, 45 aa, Homo sapiens
CPASLWSSSLACRRNSTLRRRSRWGLLPVELPSSFFSPAPYGVPD

SEQ ID NO: 986409 - protein, 142 aa, Homo sapiens
RRSSEIETLAIFICIIWGHLLAFREQTSQFASSVAGWVLRKLLTEPLYPTLPSTSTSLFLLLTLALCLQIRLPSEYVLSILSCDLSYEELCLPCFPFTSPWVCVSLCAQRHDLVVKQGICGTGLLMAGLLAMAGGRSWVGSL

SEQ ID NO: 986410 - protein, 55 aa, Homo sapiens
GWLKSFPHTRFSLRIPGLESSVNPLRGCLTRITIYDDQAYPFSQFLPFTLTSSSL

SEQ ID NO: 986411 - protein, 39 aa, Homo sapiens
SCHDRWSGAPTPKRGTLAPASCRYRCCSLARPAHPACFL

SEQ ID NO: 986412 - protein, 64 aa, Homo sapiens
RSPRWPGLTHRSLNWLAHFGEMASKVRLEYTVTTEPGAGHSAGIVSEKARVPQARIRLSSIHGC

SEQ ID NO: 986413 - protein, 109 aa, Homo sapiens
IPRWVDDPHRSFTNHVTFLSCSTIFHNFPTAPIIKIHDSSFWLAYLGAALAPPSIPLTVSLLLPPLRPTLVNPSSFLYSDGPIALAISSTQNAPPLALQWVGSSLPSQF

SEQ ID NO: 986414 - protein, 102 aa, Homo sapiens
PPARSEHRRGGKVVLFLLSTEHSRELELGIPGWVVTLAVWPARDAPCMSHRCCAKLLRTCTRVSEIRRMLPGLHTGQHEQHVTSRGPQPFAGCCSEAGNTLD

SEQ ID NO: 986415 - protein, 133 aa, Homo sapiens
RKLNTSKQNRHVHALIYENTLQETPRMMLGEGGVELQLENFLQSTGLKTERRTLSWVCYHHSSLDGSWQRDMLVPLDWKDEGLSGIFSVSLYIYGMPHSIGQFPLVFRSLLVSLSILVVGLASSAFGAQSNGL

SEQ ID NO: 986416 - protein, 43 aa, Homo sapiens
MEVTDEQGCIPICAKGYAYVEYENPDETREGTEAHGMEDKMMA

SEQ ID NO: 986417 - protein, 50 aa, Homo sapiens
MQIPQLGDYEISPRLVVGETSEPAGRVNWWRDSPGRLRWKESRTKDICSL

SEQ ID NO: 986418 - protein, 47 aa, Homo sapiens
IRLSCGMKDSSSVSAFQSVKSAEACWTESRCLVQLGERIQILVLSRT

SEQ ID NO: 986419 - protein, 43 aa, Homo sapiens
MGPTGVEERQPPDIRAAMRTHAHRALEVPVSCLGASRRGDRLG

SEQ ID NO: 986420 - protein, 62 aa, Homo sapiens
ASPDTQAMDNRITHHVVLASRHQQGSSTSLTWRTYMARDIDRFHNHDLTRTNAAITSIIWQQ

SEQ ID NO: 986421 - protein, 78 aa, Homo sapiens
ARTAEVSPSAPPALAYTPASVAASAGPGGHHTKTLCQGISAQHWQGVALLGVAGNSVDGLLMLLAVGRDLLHARFVVS

SEQ ID NO: 986422 - protein, 31 aa, Homo sapiens
MARRACFPFAFCRDCQFPEASPAMLPVQPAG

SEQ ID NO: 986423 - protein, 37 aa, Homo sapiens
LELQDPAHKRLLLDTLQLSTDSGGTTKLVNSEAPRAA

SEQ ID NO: 986424 - protein, 36 aa, Homo sapiens
MLFLRKAKIKSEIVESCIIEDVELLNRLVLVLTFGL

SEQ ID NO: 986425 - protein, 95 aa, Homo sapiens
SSSRFEFARYCLRPVLNHNLFFPLMVVTQALVRTAHVQMQLPGRWHAHAGPCAGLQWAAWCLTCWRELLPVAAPAPTSHLLPDEYFREKRLSLSP

SEQ ID NO: 986426 - protein, 34 aa, Homo sapiens
SLDLEALVSVWKAVNEGRRLRGTPGRRHQPLTAP

SEQ ID NO: 986427 - protein, 87 aa, Homo sapiens
PGRRGPGGRRQRGYRVGLSKTRTVCAIHARRVTIMPKDIQWVSRIRGERAYGIFLGGRSKDLFRATAVFIKSSCTRSPSDVRLPCAA

SEQ ID NO: 986428 - protein, 120 aa, Homo sapiens
DLHWCGGLSTMGVDYVTTYWLQHVVVSSSCNSAGGGGNQVHVHQAVRVQACSGQASKAAGKSQFHIHALFWVAGACMAGRQHLVLVQHCFQSTSAGGSVQSYRYSGITSQGSRRHPSSAV

SEQ ID NO: 986429 - protein, 40 aa, Homo sapiens
TCSGDLGSVTYGRYGDYGLTSGPNDTTTDRTRLPYWRGWV

SEQ ID NO: 986430 - protein, 50 aa, Homo sapiens
PHARIMRRHPRCCLHPSKASFAVLAADALAKVFDDAHLALPCAATLAWGV

SEQ ID NO: 986431 - protein, 74 aa, Homo sapiens
MWTEAHSTLHAPVRAKKASLPIGDPMWALGVAALGVLGNPWPGSLVLVSWKAVDEGLEGTGQPVPGLSSGGSLA

SEQ ID NO: 986432 - protein, 43 aa, Homo sapiens
MSHRKYYRYPDIGSLRLTSLRKRSQQAIVGKVTSYTLKDRPIP

SEQ ID NO: 986433 - protein, 135 aa, Homo sapiens
GHEAQLLFRSAAVGPSIYNISSSLSLLLHDPQTRISAPPGFSGAQNLKLEPEVLPGSSDCMTLDLEHSGPLRVFSCEDPRSRTSGPLQVCSWMTLKLRIYQLLSRAASCETLKLEHQFLPVVFSCMTLKLEHQLL

SEQ ID NO: 986434 - protein, 110 aa, Homo sapiens
EDHRKQLQQKSTNYALTLHQLIAAFKEAGLLFSSSQKSVALEQFFKEREQTRFHNGTNLQLQASFAGHILEISALLVMGTELARERYEVRKGGRKGKRRGEEQYDEWKTQ

SEQ ID NO: 986435 - protein, 59 aa, Homo sapiens
MEQSSRMDGNANWNHELLEALDCYSTTNLVQLTSPCAMPLQDVYKNWWYWVLFPVWPDV

SEQ ID NO: 986436 - protein, 42 aa, Homo sapiens
SDSRGSRRRQEPQEVEDLVDQVGLEELRVDVDGVCPAGKGGG

SEQ ID NO: 986437 - protein, 57 aa, Homo sapiens
RNTELRCGRFRFRRGPRSGARARERNPIHTVYVFSRPEWTALVVRKDSPIRSLADLK

SEQ ID NO: 986438 - protein, 67 aa, Homo sapiens
LEDPHSPTWMTVSSKLGMVCHLCIRIHGFNGMSEVWRNAPMQAFERSSFLSTTGGPLMSRMCPVMDV

SEQ ID NO: 986439 - protein, 56 aa, Homo sapiens
KSLQLILFPRVQRLLWGKRLWQVPITVPCRVTGRCGSVLVRLFPDIQEHWHRLLPP

SEQ ID NO: 986440 - protein, 38 aa, Homo sapiens
VTIASSASTLNLPTEPSKSPGQFNWWGPKSEQRLSDTR

SEQ ID NO: 986441 - protein, 66 aa, Homo sapiens
RDNHYGAVRPYDSLNYSRSLEIEMKIDTEVQMHSVMRIVKGYNNCCLGYHRKAIVDPARRNSRQYA

SEQ ID NO: 986442 - protein, 47 aa, Homo sapiens
WKYGLAAQSISKTEGMWKRENLICPARYPQEVSRTLINITVSSRNVE

SEQ ID NO: 986443 - protein, 52 aa, Homo sapiens
YGPQVNWQRERGQIQDTELVETDQQEIEPSRSGQLWWCLVEKRQYEYSIPCT

SEQ ID NO: 986444 - protein, 98 aa, Homo sapiens
MESQERIKAERKRMRNRICCLQVPKEEAGENRPAEGKSEKPVKAQNSELASTANMLREQVAQLKQKVMNHVNSGVPTHCYTQQLQTILKRDRRGLSEL

SEQ ID NO: 986445 - protein, 46 aa, Homo sapiens
RCAFPYWARKEERHGCGKPVRGQEEKEDYKLLRCSVNKLLELSDHR

SEQ ID NO: 986446 - protein, 156 aa, Homo sapiens
PYLLLLQPTIDGRHTCAVTFAAALPSQPYTVTVGKPVTLSACRVVGRGLQPKGVRVKETADFKVYTNGLLAVGELKVTVKGPKGEERVKQKDLGDGVYGFEYYPMVPGTYIVTITWGGQEHRAQSLRSEGGARVVALRRYVAWGPGLLRGLLTGTE

SEQ ID NO: 986447 - protein, 34 aa, Homo sapiens
RDEAKKKVEQPVIEEQLCKGSISVEEVYALTRYP

SEQ ID NO: 986448 - protein, 89 aa, Homo sapiens
SYQQPDSRTQQVQQQAADFQPGGPGSDPVAGGFGGPTLVDTLAVENAVGREVKAAQGLGVVAYAVALWKMSRTLLFPGRETVPYSRSQW

SEQ ID NO: 986449 - protein, 46 aa, Homo sapiens
GSMLNEYLEVSTAAHVSTELVQGRHAPKVVNTRRPGSSVYDYCGGQ

SEQ ID NO: 986450 - protein, 40 aa, Homo sapiens
GEEGALEAESVGVDEGEVPFSALYRPRSSWTTNWMHISRK

SEQ ID NO: 986451 - protein, 79 aa, Homo sapiens
DLIAYTSSTYKRYRKYKRSSKYKRGATYKAVEEVYALRKYQALRKYQAFRTYKALRKYTAYRSINALRKYNALRKYKAL

SEQ ID NO: 986452 - protein, 58 aa, Homo sapiens
APAKRYLEVSTVLTCRRNYVQWRHAPALLNTVDQAPSKRYLEVSMVLTVSTEPCTREV

SEQ ID NO: 986453 - protein, 152 aa, Homo sapiens
MHKLRTDFTFRLILPHTELFPKDVGKWSAYEQLTHDSSCDSENALARPEAQDPAQPCPFGSPKKAWKHCCKEQRGLLTSPLGSLKSGTLGGVESQTSVCCWESRGGIVTSSKWPSSPLSESLIMTSDSTSQQADTSEQEAVEAYTDMGMLST

SEQ ID NO: 986454 - protein, 86 aa, Homo sapiens
TFIAYTSQLFILLTAYTSQRYYTILTSLYILLKRLYYVVNRLILLNVFILLNALYFLLALQFLDALYFLNSKYFLNSSSFVRSLST

SEQ ID NO: 986455 - protein, 58 aa, Homo sapiens
APAKRYYGGQHWCSRVDGTCTWEACTCSGEYTYDHGSMLKLNYGWSALVLTVSERNYV

SEQ ID NO: 986456 - protein, 48 aa, Homo sapiens
MSDQAPALTDIWMVSTVLTVSDLNLYSGGMHLQGEYTSTMAPVFNDIL

SEQ ID NO: 986457 - protein, 51 aa, Homo sapiens
SCTVIVNWPSTNPAEGLQSHQCRTQLSWKEKKEAPELTNGGANSKAELAYR

SEQ ID NO: 986458 - protein, 43 aa, Homo sapiens
MQCNIESVDGGSQITTMTLHAEEGGQTRTGTMSCDLTANMRTI

SEQ ID NO: 986459 - protein, 112 aa, Homo sapiens
MRQLFKPDKPIGIQMEEVRSLTSSSFAKKLWYMKYCEKYEFSPRKNCLIVLMVKNTPTTARHALMSLHHCWVLNAGGHFIDENGSRLPAIPRSAKSGKSETITADVNHNLKD

SEQ ID NO: 986460 - protein, 79 aa, Homo sapiens
MTSEVQHTLGDGASAEGARDKGICWKWPVTVAAVEVQNFHGGAYRQQGPHLSVTNKKKGTRDVIAALTEEGTWARSAAM

SEQ ID NO: 986461 - protein, 85 aa, Homo sapiens
IESVEEGDKHHLTLLQKEEDKLEPAPEQNLMPNENIPESAAELVQLGFISFCRPEPVDFSARRDLEQVQFCQDQYPQLSRCRRCR

SEQ ID NO: 986462 - protein, 49 aa, Homo sapiens
RGVDPLSMSLVAKQGLWRIRCREDFTIRAAWGPKPAKTSVCDLSAAVSH

SEQ ID NO: 986463 - protein, 43 aa, Homo sapiens
NWVNIKDAKVPVGPGLAHCSESLRNFSRSTSGSCGESGAVGAA

SEQ ID NO: 986464 - protein, 32 aa, Homo sapiens
MHSCISQWRTKHNFMHIYMHYIGKMSIILKVN

SEQ ID NO: 986465 - protein, 107 aa, Homo sapiens
  misc_feature (23)..(23): Xaa can be any naturally occurring amino acid
EYKLYKYDYNSGEELQACKFALXLFTVPHLVLMENSMPVVQKMEHGDYVKRVEEKRMVFGNVCFLKKIAESLQSQRFVFQKTTEEGLEEIASENSDCIFPSAPDVKP

SEQ ID NO: 986466 - protein, 62 aa, Homo sapiens
IWCSPGRQAQWASVHSTQWADVAAGAGVDGVAVHGNGGAGAINAGHIGGVSASDLCCVMCSS

SEQ ID NO: 986467 - protein, 140 aa, Homo sapiens
MTGSLSRLLRTGLTRGPLSHLPRQVSTGTFPGIDLDFWTTHLRRWNPLGRTSQVRVVSESHLPSSGHYAVSVMILEQIIMQAGGDVLGRCLTAKHVALEHLGQLITSYVGKVPSTVPPDAPHADADDGLGVQQCLALWLH

SEQ ID NO: 986468 - protein, 46 aa, Homo sapiens
MSCTHNVSERASHGGASREENQAWPEGTSSAIPEELAHDRSTSCNM

SEQ ID NO: 986469 - protein, 51 aa, Homo sapiens
  misc_feature (1)..(1): Xaa can be any naturally occurring amino acid
  misc_feature (14)..(14): Xaa can be any naturally occurring amino acid
XTGKQCDLPDFRYXHFELYAVEGVERGSEEVPAELELHCCQCFTTSFLSSS

SEQ ID NO: 986470 - protein, 83 aa, Homo sapiens
YVMVVGSYDEGVRVEHELGMRTDCHWRSPAHPAAPPALVGCAQRLATDWGAAYHRWCHCTPVQPFSLLNASTTCARDSRVHWT

SEQ ID NO: 986471 - protein, 31 aa, Homo sapiens
MPLYSSLGVRVRPCLKKQTNKGTEKLTNLPV

SEQ ID NO: 986472 - protein, 103 aa, Homo sapiens
FLKRCWGELSVVLGQALFLLGLAGQLHVLPPRERDADRLPVQLVPVQVSHVQLGLVAVRHLHQGVLLLIEQDLHALHVTVDAEKNKEALGCDSLWVEVADQQY

SEQ ID NO: 986473 - protein, 95 aa, Homo sapiens
  misc_feature (39)..(39): Xaa can be any naturally occurring amino acid
LHQLTGIVEGEGIKCAVLIEVLLSAQLAREPLNTMGATXYGHAYSNICDVVDNLPLQQFWTLLSSPEEKIGNLDTLCGIENHKGAVSHLVKIKLN

SEQ ID NO: 986474 - protein, 40 aa, Homo sapiens
SPVQICENQFSSCSRTWTKSDNFLNQIADIGPEMKKKFAD

SEQ ID NO: 986475 - protein, 88 aa, Homo sapiens
PYGGTVFHQEADIAEQEKTTPTEPHVGNEPWLSESYVEGKCMTLNRSSCGTQGERKIPETNRWSRVLGGGGGDSVLSKSITPGVQPAG

SEQ ID NO: 986476 - protein, 120 aa, Homo sapiens
EVKQSPGGSFEAKKRQSCSRRGLEGAAVVFAPGAHDIEDHPLVVLDLAHLCDSDMTYTRPREKWFCFGFRVDEFLWAAGLSLCAQLSRPSPTRNYLLAFSGFRCLSRFPGLQFERGYRAL

SEQ ID NO: 986477 - protein, 79 aa, Homo sapiens
YSERATSRMELERRSSGLEFNEARQKYAGSNAISSDMFFGRDVNAEYEARSRLLHLSGGSAFSSSDFFDDLFGALCVAI

SEQ ID NO: 986478 - protein, 109 aa, Homo sapiens
MRTIPGDRNDRAKGSAGSCSCRGGSESQSTESFTEHEHTLGASAQFRVSVFQRKQYMICHIQLPEEKKPIKDSYTPHISHTHTHTHTHTQRSNVFKLQPLRVMAPWGLP

SEQ ID NO: 986479 - protein, 43 aa, Homo sapiens
KNSQDVARYCGAHSTDGRRCWGSSAVAATPAGVLPHYTQNAPN

SEQ ID NO: 986480 - protein, 57 aa, Homo sapiens
FVRYPKSPKIDGTRTPRDEMENEAQHNELKRRRMNKINNCIVSFRKSFQSVTQNAPN

SEQ ID NO: 986481 - protein, 37 aa, Homo sapiens
PVPDEAENPSSTSCCSKILIPYFNLYLQFLNISMQNL

SEQ ID NO: 986482 - protein, 72 aa, Homo sapiens
IRMKLSSVSSPEAVPLTAALEQVLALPKNSDHSLMLIYSAVICTDLSQPAVEEGAIDFLNEDGQDLQAMPQD

SEQ ID NO: 986483 - protein, 44 aa, Homo sapiens
CGFLPLCLLLASHCRTMAALAAQRVTLHSLEAPQEPALKSEFSQ

SEQ ID NO: 986484 - protein, 42 aa, Homo sapiens
MDVSQQAPGQSGMGAENGGYTNGMSSFSKMDLEQVPPTQNAP

SEQ ID NO: 986485 - protein, 44 aa, Homo sapiens
TTSTETSPCHNFRHCFGVAQMMYSMVWLCSAPGKSSHKAGYRDT

SEQ ID NO: 986486 - protein, 41 aa, Homo sapiens
ASRACLRKRHGNPCAITTTNGAINELLNTPMLITFCDGYLS

SEQ ID NO: 986487 - protein, 58 aa, Homo sapiens
LEDPIKRVLRGVCASGLHDEPKYSDGKLRERMQLLDGRINLSAVYPGRTTNVHAECAS

SEQ ID NO: 986488 - protein, 48 aa, Homo sapiens
TLSDDNLIEGGGTKFVCIPVARNITVIFHPLLRFIQEIEHALGLGPAK

SEQ ID NO: 986489 - protein, 63 aa, Homo sapiens
VLEDPPTGRLYWFWGRSGAYDKDGRGPMTGSSGGDRGGFKRFGGHRDYGPRTGADSESDNSGN

SEQ ID NO: 986490 - protein, 36 aa, Homo sapiens
LEDPNALEQGGLSVLDDSAVELMPAPTDLLGCAHPE

SEQ ID NO: 986491 - protein, 58 aa, Homo sapiens
ANAVLYSRQGGGLEPSVVAGRLPSDPRVHPPRRSRVHGLRQRPPTVSTRFRSQWTRRR

SEQ ID NO: 986492 - protein, 33 aa, Homo sapiens
VLWGGPLTLALECVTSRPWLVVSVASSSSRCSF

SEQ ID NO: 986493 - protein, 79 aa, Homo sapiens
RGSPAAHCNTKSQAVKYSSGSIALKLLICFKANDIEKAVQWLDTNVVDLLMKHIYKGFESPSDNSSAMLLQWHEKPLAA

SEQ ID NO: 986494 - protein, 43 aa, Homo sapiens
DLCDLVNKTTLPAWNGHWRGKLTKGSLYLQGEAHTYALRTPAP

SEQ ID NO: 986495 - protein, 57 aa, Homo sapiens
SRDPGGYGLQKYTILEVSSGCFSSASGLLPRLLALGFSSLSSFFSSSSYSTGTQYLQ

SEQ ID NO: 986496 - protein, 150 aa, Homo sapiens
RLSDVKIIRKVSSTAFTRATLRTLTLPSLRYIHQVGSSPADNSGSLWGPDIWRSMDGLIVHRSSGSTVGIFLLPRLTRMSPNGRAENCCTICNPIGSTLMELGWEEWPPLGRMPCKTVIPTDIHQRAPVIWGSPDYLLEFLNVCEKHSVQ

SEQ ID NO: 986497 - protein, 76 aa, Homo sapiens
CDSDVLNLTLSESPRYGMLGHRQQIENQQQILVAKMNSRLHISKSIRERRQQTVYFSEMNKLHEIEKNDVECPRRT

SEQ ID NO: 986498 - protein, 72 aa, Homo sapiens
TDAKCTLMDADGSEDEEGFGYPDTILILPSIGRYDDRWRERLGCISSKGKQVVGIGEDLMRPPQNSSFIQHL

SEQ ID NO: 986499 - protein, 181 aa, Homo sapiens
MTLRIPLGERREKISVTKLGRKLSAPTQNSPPSVSDILDLLSSNVVEIAENLSAKNKDTLEKLQASGDALVDRQSQLKETLENNSFLITTVNKTLQAYNGYVTNLQQDTSVLQGNLQNQMYSHNVVIMNLNNLNLTQVQQRNLITNLQRSVDDTSQAIQRIKNDFQNLQQVFLQAKKDTDW

SEQ ID NO: 986500 - protein, 49 aa, Homo sapiens
FENPRRGGWASTCVRSRTLFPLGVVLTDTCALWDVCSEARSRSCLLKGR

SEQ ID NO: 986501 - protein, 79 aa, Homo sapiens
MEPSDTIENVRQDQDKEGVPPDSQRLIFAGKAAGEMAVLFLSYNTPRTDVEPCAPGSCGLRGGMQIFVKDPCEPVEAPS

SEQ ID NO: 986502 - protein, 122 aa, Homo sapiens
VLSRRPRPMEDEAKDEKAEPQVGYYNHVGPLPQADPEVGTVAHQTNILNKMPPGPWGPRPVQLGPQMRMLSDLYDRVSVTASEVQQAESEVSDIESRIAALRAAGLTVKPSGKPRRKSNLPI

SEQ ID NO: 986503 - protein, 43 aa, Homo sapiens
CQISENHTNGLLETPDANLTLGHCLPTLTHCSQGPLTWVLCIL

SEQ ID NO: 986504 - protein, 33 aa, Homo sapiens
MVRLVFRPYTQVGRPICTSGPLRTSTRVSSGFA

SEQ ID NO: 986505 - protein, 53 aa, Homo sapiens
EIEAGSVLEPLWHTARVRQCTGESSAGLTDLPSEAACEGFMRAEKKNHAELRL

SEQ ID NO: 986506 - protein, 44 aa, Homo sapiens
MLLKFYKKARCAVAHTSNLSALGGRGGGIARAQEFKTSLGTHYG

SEQ ID NO: 986507 - protein, 33 aa, Homo sapiens
SHRELPLTTIAEKNSVFPPGSAFPPGPVTHRDL

SEQ ID NO: 986508 - protein, 51 aa, Homo sapiens
QLSSEQLTHVDSERRAAVVDVETGSQRQSGIDVATDDESPGTGSLQASPKA

SEQ ID NO: 986509 - protein, 35 aa, Homo sapiens
MKRRLGGVALDQGSHHSLRPVSSPQRQGSHVQQQQ

SEQ ID NO: 986510 - protein, 43 aa, Homo sapiens
ATPHSRPEQLSNELAQSADGQKTESALEQFEWQNKELGSKLQE

SEQ ID NO: 986511 - protein, 73 aa, Homo sapiens
  misc_feature (18)..(18): Xaa can be any naturally occurring amino acid
VAVAGVETGGAVMTALIXAQLHHPHQADAIFTTYSDNNPGLLIQVYEGERAMRKDNNLLGRFELKVHPSDPQG

SEQ ID NO: 986512 - protein, 122 aa, Homo sapiens
  misc_feature (76)..(76): Xaa can be any naturally occurring amino acid
MIVPLCSILVDRRKTLSQKRHGNVQKNVQAFHERAGSTTKILPLGQVRWIIPVIPALWKAEAAGSPEVLEFKTSPXKHGETPSLQNIKTYAGHDWRVPVIPDTQGAEAENRLNPRQPRLGYR

SEQ ID NO: 986513 - protein, 77 aa, Homo sapiens
STLEIPLWPPGLGGNFALSMTEKELDLCPGPTGLKDLEAHLVQLEPQALNVSKDLLVSLVNLVKLVLQVLVVQRQDK

SEQ ID NO: 986514 - protein, 116 aa, Homo sapiens
ALCTRALDPVMGVVYERVWCGTRTTVHVIQPKIMHDRGECRPGPRGVEEAPAGQKLSRIFQYGIHEAYVWPSPLYHLMTQARTGAKQALPARSEGTAGGPGAVPGKRIPNSSPLAS

SEQ ID NO: 986515 - protein, 37 aa, Homo sapiens
MKSAGVGTGVVGDGGLTQSGPRPQLLAKTKALGLEVI

SEQ ID NO: 986516 - protein, 166 aa, Homo sapiens
VRGRPERVQSFCEPGAFLIKCAPWACESIYRMRGVASDSGVCILPVDRWMKRKLQTDGSAVYDEGLARTQSHVEMSAHAGVWERLTGSSLITSYDLYSPRLLRDFLPLLRVVPPFQTEPMFILHVLIDVSCLPYHVARATEAHQNLRNVTGAHRLPLPPSGAHPYW

SEQ ID NO: 986517 - protein, 91 aa, Homo sapiens
  misc_feature (1)..(1): Xaa can be any naturally occurring amino acid
XTEVYVTTVFENYCGDIDGGRQMLVELALWDTVGQEDYERLWPLSYPDSEVILMCYSGDRPDSLENITLEVGPELKHFCPNVPKSVLGLGY

SEQ ID NO: 986518 - protein, 106 aa, Homo sapiens
TRTATLPLVSWSTLDLGGVVLLCDGIGHGIIGPMNSVFQLGELALLALSWASFFFLEDDDPRALASSLASFLMVDGNTWSILPWNTCPSTSEEAFTACSGNMKVMN

SEQ ID NO: 986519 - protein, 46 aa, Homo sapiens
MSMGHASLLYEIPVYYTLSCLCTYPCLDRVQGWIPDSSLLWNEQSL

SEQ ID NO: 986520 - protein, 105 aa, Homo sapiens
LSRIPNALIASCLSLPSACDCRRVPPRVTVFRIFLVETGFRCVGPAGLQLLTASDPPASASRGAGMADGVLLTQCSILPRLECSGVISASYNLHLPAACLSLPNS

SEQ ID NO: 986521 - protein, 99 aa, Homo sapiens
ISKNPKDKRLVWFSQSMTHGFQLEYGGQGSYPADVAIQLTFLRLMSTEAFQIMTYHCKNSEAYMDQHTGNLKKALLLQGSNEIEIRADGNSRFTYRGTV

SEQ ID NO: 986522 - protein, 86 aa, Homo sapiens
LHLSYGNENHQPPRSYVKALKHPSLGNENIQSATSASQSPREERTQLWFAPLPPGQYKITQTLAPLPGSGHHLTKPGRASGSYSTH

SEQ ID NO: 986523 - protein, 79 aa, Homo sapiens
VELETAECDRLPNQAQLHHPQRVPKIEVTFDINAKDILKVTATDKSTGKAKKITISNDKGRLTQEEIERMVQEANQSKA

SEQ ID NO: 986524 - protein, 66 aa, Homo sapiens
AARVLALFETEFCSIPRLVCNGMISAHCNLHLPGSSDSPASATGTRLHSANSASLAPYAEHLPSRK

SEQ ID NO: 986525 - protein, 99 aa, Homo sapiens
MIPQLVSWQRCKEKGIHTLLVGMEVSTAIIENSIEVLQNTKIRNIGWAWWLRPIIPALWEAKVGGSRGQEKETILANDDETPSVLKTQKLAGRGSARLE

SEQ ID NO: 986526 - protein, 43 aa, Homo sapiens
TNQRRQQRFQWILTHHATQTGNSEYHQSKIFGRPERQRPTRQQ

SEQ ID NO: 986527 - protein, 58 aa, Homo sapiens
LALEQGEVPPKRPQEEEEILFQEAFQIERAVFKRNRKEGGGDSSWLLHPTEGRAVSQG

SEQ ID NO: 986528 - protein, 47 aa, Homo sapiens
GSTQNQKIRYHKEVLLSVKAAMAKALMGRTFCCSSTRPLVPTTKEAE

SEQ ID NO: 986529 - protein, 58 aa, Homo sapiens
PELLWMELGEEEVEEESINRGRGAEETSTMEEDRVPVTVFDEEEPRPQLHPKQASKAV

SEQ ID NO: 986530 - protein, 41 aa, Homo sapiens
MDVQILCVLGILVLLKIGCCFLLWMADTEEVAGCRSGPFPG

SEQ ID NO: 986531 - protein, 75 aa, Homo sapiens
GTPATASDGAGGHYPKLTQVQKTKHSVFSLISRRKILSYIDTKKGATDTGASLKVAVGRKVRTENYLSGTMLISD

SEQ ID NO: 986532 - protein, 92 aa, Homo sapiens
PLQIDPTDAAVKTADLDPETTLVIIASKTFTTLETLTNARCVPAWLLDGLVAAGAIADTEQAGRDPVAKHFVAVLTALDKGEEFGIHPMNPF

SEQ ID NO: 986533 - protein, 154 aa, Homo sapiens
ATAYDGEKVKHKRSGAEAVLIENGASISGTTTRDFTQLNELQCRFPRPLEGLGFPCNQFGHHENCHNEEILNSLKFVRPGGGYQTTFTLVQKCEVNGQNEHPVFAYLKDKLPYPYDDPFSLMTDPKLIIWSPVRRSDVAWNFEKFLIGPEGEPF

SEQ ID NO: 986534 - protein, 101 aa, Homo sapiens
TVLDAFESGATPSCDAFWEAFNPQPLSKVCSRVGTSSLAFTKEKIAIGVLTFHVLRGLLGVFSPNHFNFFLDSCFCMPSPSFFPCQFPGDRYQLFLNGFPA

SEQ ID NO: 986535 - protein, 85 aa, Homo sapiens
GEKYLESVVYLDDEARNFSDGFSAGSGENRFKAECKMLARATGKWGGYDGVEKLVGATGVAEGDEDPSGASVAAFDPELRYGLCC

SEQ ID NO: 986536 - protein, 72 aa, Homo sapiens
RAFDQIRMAAISESNINLCGSHWGVSIGENGPSQMALKKLALFRSVPTSTVFYPSDGVATKKAVELAPNTKG

SEQ ID NO: 986537 - protein, 103 aa, Homo sapiens
TPQLVGCLRRGATPSWDAFWEAINPQPSFIVCSRGGTSSLSFSKEKNAIVVLTSHELRGLLGVFSPNHYNYFFGYSLLHASPVLFSLPVPWGQLPAFLNGFPA

SEQ ID NO: 986538 - protein, 112 aa, Homo sapiens
MAPGMADSASPELRHTMWPFFSSSIPRRKALVVQNWPNVVMCWDLLKALLSLAIKLFPWTTAALFTTMVMLPTFFRTALSVWYTSSRLPTSQMKKWRSLPICRISSHPKKLP

SEQ ID NO: 986539 - protein, 105 aa, Homo sapiens
VGTPGTGLDAFQRGATPSWDALWEAFNPQPLSKVCRPGGTPPLAFTKEKIGIVGLTSDVLRGLLGVFSPNHFNLFLDSHSCMPPPSFFPCQFLVTVTSFPEWIPG

SEQ ID NO: 986540 - protein, 88 aa, Homo sapiens
YVSDLCSQHGHNAEGLENAMRPWRVKLQGSQVVLQSHPTAVIQHSFHSGQVGLHQQLLRMGGSFFKTLTMGWKGRIKICLFALGRVLT

SEQ ID NO: 986541 - protein, 36 aa, Homo sapiens
CEKFRHCGLANQINQCRARCSLYNFFGKSGLPLRAD

SEQ ID NO: 986542 - protein, 80 aa, Homo sapiens
  misc_feature (5)..(5): Xaa can be any naturally occurring amino acid
PGTAXDVGIDDLVGEQAQDGLPRGVGPVVQPPGKDLEEDIFINRHPQGLGDQNAMLVQLGALYQAVLHALPRALNGEFPG

SEQ ID NO: 986543 - protein, 89 aa, Homo sapiens
MEVQIQTYRCKPVIRIRPDSGPPVFQEHLVGGSQGQGPSPLVTWILTTVVFTLAGVHTVIRTVLWCWYHERVRSHQGHVKMRGGAKTCF

SEQ ID NO: 986544 - protein, 89 aa, Homo sapiens
MATAAALRPAVHVFFGPVAGDGNPPHQESCKQRRKSGETLGPPQRYAYVMPKTRYSWLRIVPPAVASDANFKRRQKNRERGNCCAKARY

SEQ ID NO: 986545 - protein, 41 aa, Homo sapiens
ARYPVKTSVVDFPGGPVVKNLLAKAWDSGLTPGLGRFCMLQ

SEQ ID NO: 986546 - protein, 39 aa, Homo sapiens
TWISSTFQGLTDINWLAYKGSIPIVTLWFLFTFGVNIAK

SEQ ID NO: 986547 - protein, 142 aa, Homo sapiens
MPRKRTILNNPVMLGALALTTEITPCGGEDILADHVASYGVNYCQANGSSGPYTHEFDGDEEFYVDLHRKETVWQLPLFLRFTKFDPQFALTNIPVLKHNLNIVIKSSNSTGATNEDPEVPMFSKFPVTLGQPNTLIWFGTT

SEQ ID NO: 986548 - protein, 56 aa, Homo sapiens
GICLQPRICQHALLPQTAAREPFRKHSICSWHVPVLHRTLPVKVMVQFSIGQGTTG

SEQ ID NO: 986549 - protein, 128 aa, Homo sapiens
YRRSSNLTLILHQARTSNHTSSNTRHAHPPGITITNHPTPIINFIQTPDTLIHQASNLNLHPTPDTLIHQASNLNFITTPDTLIHQHKNLLILYDAIGTLDRLCRPPPQTAGIHPEADAPTDPEVRLG

SEQ ID NO: 986550 - protein, 37 aa, Homo sapiens
LGPPDDESDDYHADDHHEAVTAHVAVLDFADDLGTSR

SEQ ID NO: 986551 - protein, 40 aa, Homo sapiens
QFTASGAVHLSLQRQGSLQRQGLFTSVYSVREGRVLKGEV

SEQ ID NO: 986552 - protein, 44 aa, Homo sapiens
VITAFMDTGLLLGFAELLLALPAGEGLCHMHPFADLFCLCYPSM

SEQ ID NO: 986553 - protein, 38 aa, Homo sapiens
RALVNTCCNPAHGGTRVLDLHRLQSQLLAAVGEAIIAM

SEQ ID NO: 986554 - protein, 38 aa, Homo sapiens
NALIASYALIACNALIASYALIASYALIASYALIAYNA

SEQ ID NO: 986555 - protein, 62 aa, Homo sapiens
NALIASYALMPPNALIASYCADSLLNALKSSNVLRLRARATTLVTFDIFYQAFCAEDATHIE

SEQ ID NO: 986556 - protein, 60 aa, Homo sapiens
IVCGCASATGGKAEDAGARVGVAGYSADSMSEFSCHDTEPAFLVKQDAEAVLREDKSVDH

SEQ ID NO: 986557 - protein, 85 aa, Homo sapiens
NALQSPGKEHSFDITEMIREKNPDGSLSAAEMPLFKLYMDMTACFLAAGIFCVSILCRNTYSVFTIHWLMEPLAFTKSISLLSHS

SEQ ID NO: 986558 - protein, 38 aa, Homo sapiens
  misc_feature (16)..(16): Xaa can be any naturally occurring amino acid
QLVPHQPVSSVMEDFXDETRMHNGSELWIILCAIYELG

SEQ ID NO: 986559 - protein, 37 aa, Homo sapiens
MTSPYALGLKDADRCCTHTSSCRSTFSKWICWTRTAT

SEQ ID NO: 986560 - protein, 83 aa, Homo sapiens
NALTHSFVPELKQHLVCGENSTLTIDSSHASPVHKFKQHPAFQVTVSWASKQTHSPVPNVKHLTASEENGACTNLRSHTLDLS

SEQ ID NO: 986561 - protein, 64 aa, Homo sapiens
HTTCQENDNSHLYSVVHAASETCSLFFSISSSTCTLLEDSPQNARLTRPTPTVQINCCAQSSMS

SEQ ID NO: 986562 - protein, 67 aa, Homo sapiens
TARGALYAFDLPRPPGEKLTMQNLNDRLVSYLDKGRALEAANGELEEKIRDWNQKQAPDASRDYSHY

SEQ ID NO: 986563 - protein, 43 aa, Homo sapiens
LARYPTLDSLGLDSLSVIDIGVGIEEHSGRRVDQEQIDWFTSI

SEQ ID NO: 986564 - protein, 106 aa, Homo sapiens
QVPQMLAWVSGCCSRLSGAHLGVQGAVPGCQMLIWAYGCCSRLSNARLGVQGAVPGCQMLISAYGCCSMLSDARLGVCVLFQVVRCSAGGAGCCSRLSDAHLEVRM

SEQ ID NO: 986565 - protein, 100 aa, Homo sapiens
HRRQSEEGATRLGKMTHVLPSNLLTLFAPRDPIPYLPPLEKLPHEKHHTQPYCGIAPYISEIEDPRDARTPTCAETREERMLSTRRYKIERRQQDVETEL

SEQ ID NO: 986566 - protein, 74 aa, Homo sapiens
GAQSDPIEASQSLMAKFKQEREDNKYFLDTLVMEPAFIIQHFAGKVKDDIKDFRERNTDYMRPDIEDLLRSSDS

SEQ ID NO: 986567 - protein, 69 aa, Homo sapiens
RAGGLLPSLQTCPCTGPPLSVTHSAPDPFRGGLRYITPASSGGDGPLPRLAPCHCTGAGGTDVTSEPSS

SEQ ID NO: 986568 - protein, 116 aa, Homo sapiens
AGPRNCLGCSSFRNSQGSMMGTDQAVILTHICMGRAFQPSEGTHERQLAGQEAPGVPLIHNHHLVRNVDKVDALLHGLGVLGLTASTNHNLLRVCCWADRARTILGNATGTPRMLS

SEQ ID NO: 986569 - protein, 85 aa, Homo sapiens
QTAEGGNLLLQPRLQIQHDVAYVVLLLDLAPKLGQRLVHAANNTLYLLQMHAESHLCLRLHALQEANMLRRDCRCIYKPCMERRS

SEQ ID NO: 986570 - protein, 79 aa, Homo sapiens
MDLVHAIEALPGSGHLTALDQDLLLVKATSAATLSCLGESLNLLQHECAPGGPAQPEARSLGKHAVMARVQVTFHRAAE

SEQ ID NO: 986571 - protein, 56 aa, Homo sapiens
GSAPSGVQLSFGDRVVHVARFTSSHPATSERILLGVRLPVITATSLDYCSNQLVKS

SEQ ID NO: 986572 - protein, 47 aa, Homo sapiens
HRLLLSRAEAAEQYQQCAVMHVLVTDDVLSAVPAVLEPALPSTSSLS

SEQ ID NO: 986573 - protein, 53 aa, Homo sapiens
RVSPAPGQRRKRLAHLALEQRDAGRIDVGIGAADVHHGRDPQHPADARIDDAA

SEQ ID NO: 986574 - protein, 62 aa, Homo sapiens
PTERSMQQAGLTREYGSVCDCLVRVTDELTLMNSVSIIDYNPLSFERSRTGKDPTRTMSKNG

SEQ ID NO: 986575 - protein, 48 aa, Homo sapiens
TYRTWDMDDTKDARPGPQTSGQIEDTIYGGQGRWNTGEMDDMRDRGQG

SEQ ID NO: 986576 - protein, 85 aa, Homo sapiens
MSAAGGPRTLNSLRLYRGDPWMGGLWRPEATWPHLLLMATRRGQIWPELQLPGCFSGTSRQAAQALGLIYNPVMLLLTTPSQPAP

SEQ ID NO: 986577 - protein, 113 aa, Homo sapiens
RARYPGPSLLNQEKTEAVEAVERRLEFIDKEVKLPPSNLISVTELICGFRSDDSERIKKQITDLQDKQDGARTEMFALQQQSQQAQTVQAAQWVRRAVYDVKSETRELSHEAG

SEQ ID NO: 986578 - protein, 170 aa, Homo sapiens
PVNTVRGGQGTFFTLPELESLEPLMDGAGHPEGKTLEEGPADLKFDFQAQSPKELTLRKGDIVYIHEEVDKNWLQGKHLWRLGIFLVNYMKVLPAHDILNPIKPPTYQGLQFVEAVAQNTFMGDLQVELSFRREQHICLIRKVDKNWYEGRITGTGHQGVFPASYVQASR

SEQ ID NO: 986579 - protein, 148 aa, Homo sapiens
PWQLLRMLHLVAEALGGLPLLLEGLCYLGLLLFGLLLQATQYLILLLDGGIECGDSQVHIGHLGSQPGPITLGGLLQLFLGLAEVGDGALQVSDQARQLLLFFFEVAPLNMQLVFLLASISLQHLYPGLELCVVCGKSGCLLLQGFQL

SEQ ID NO: 986580 - protein, 69 aa, Homo sapiens
SVPQLLLRMQEHVNRVLWYLKVCIPSPFFIGKDAFGGMMDHAGKTESVWRQNLVSPDMGQFLGDNLPQA

SEQ ID NO: 986581 - protein, 36 aa, Homo sapiens
TSSSVPRTITTSLLTAAGVKAENFHSQVEILVKVLD

SEQ ID NO: 986582 - protein, 136 aa, Homo sapiens
TNPAGRLNRPSYGRGYGGKCEKTACLSGYKARKIYKSLILYNKWDLEACVDAALLATQMDRVNAIPLTYQQLDVLKHKLDELYPQGYPEYVIQHLGYLFLKMSPEDIRKWNVTSLETLKALLEVNKGHEMSPQVAT

SEQ ID NO: 986583 - protein, 72 aa, Homo sapiens
LARYPIQLLILHQNLPQLLVGLGGAKQHPIRHNHRCPTSWFEYSEKQRQKQQLRLFSFDDLQQILGCVLIVQ

SEQ ID NO: 986584 - protein, 87 aa, Homo sapiens
QDHIYSTFGPGTTLEKKRTGGGPFGFIFPPFEEQLKSGTAFGGCLLNNFYSKEAKLPWKGDNALQSGNFQESVTEPDSKDRPYSLSS

SEQ ID NO: 986585 - protein, 49 aa, Homo sapiens
VSAYRDQDEPWRCPATDPLDPYTLIQEHLTADIIVTGGHLGVAGLPWMG

SEQ ID NO: 986586 - protein, 89 aa, Homo sapiens
SKDLAELHIPLKEPGLYSINPINLTTFSSTYIPPFPANPDEGYELTTSSHEKTLGQGVTHEVAPNGLLLLPRKTTIALIKLRGLRRIHQ

SEQ ID NO: 986587 - protein, 78 aa, Homo sapiens
RGQSLFGAALPADGPLCKALQGLALRASAQAFFAGCTTIARKASRRGRLERIHRGYKNLVSHSHQASCGDEEGLALRK

SEQ ID NO: 986588 - protein, 91 aa, Homo sapiens
EGPGGLELEVQERNHNHSVPWVLLLAYLWVQVRNQTYCPQGIVDICCQPMEMIHTDSCAKMETVFDFKIWTKASLTSFLKGYTGFHIPLGR

SEQ ID NO: 986589 - protein, 37 aa, Homo sapiens
SLQRGSLQRQGINQWPVATLLPSLRDTKRHWLMEEDA

SEQ ID NO: 986590 - protein, 92 aa, Homo sapiens
NAYSFGYLREEPLYKSYDIISHCQPKAYHINPSSLYLFCRNAAGSLSLFYNNGTRPCGCHEISATGPTCEPFGGQWPCHAHVIGRDWSRWAT

SEQ ID NO: 986591 - protein, 41 aa, Homo sapiens
MFQGQVHHLLDVPALIFIGVYAVYNHPLIHEVAELAHDAAN

SEQ ID NO: 986592 - protein, 76 aa, Homo sapiens
MASLALPSSGVTVVRTLSTAGAPSAGRRMSFAPALGVARIVKCPCASINRSSSSRGGKLFLMRLMPAFLKEYRRVE

SEQ ID NO: 986593 - protein, 88 aa, Homo sapiens
VCRQGTTIFQLFFGKDQPLLVRRDALLVSDLCLDILNGVTRVHFEGDGLTSHDLYYNLHPTYETEHQVQGPLFLDVVDKLGAPIQNNG

SEQ ID NO: 986594 - protein, 73 aa, Homo sapiens
PDDVPVTLPDSTGTSLSSESILTPGGEFINSREEAKRVLSPAGSLDLTMDNPSSTKRVTAEEASKADEKIELV

SEQ ID NO: 986595 - protein, 101 aa, Homo sapiens
LPASIIGTFRYIAINARITACVRQYRIKFSMRLGHRFFFHNRIEIAAVRTNARFASDRVIYVWLVDEIALMTRYDGNTVFIIIDRCSFSVFTALKTTNDHK

SEQ ID NO: 986596 - protein, 114 aa, Homo sapiens
LLKRASSGWESRLHPGNWSPAQCGTGSRLRNTTEENCRSSEEEGSTPGWGREVRGADSKNDWQTLPEGSGGGGLDDEVGKCGGSPSPVAGGPKCSQVQARLARRLVANTEPGLV

SEQ ID NO: 986597 - protein, 81 aa, Homo sapiens
NTCFWDISGVMAHQLKAGRTRTGKTVSMIGDAVEGARRNWRVFVIDPKRIEYLGLREWPNIEMVATTVPDQVALIHWLWSL

SEQ ID NO: 986598 - protein, 71 aa, Homo sapiens
ANTGALRPTKTAGWTILGVLQDWISLREYPGAHQDADYQIILLLFVLFTSSAKKTTGFLVPGKPDPPSWSF

SEQ ID NO: 986599 - protein, 47 aa, Homo sapiens
ARYPAVQQGEALLAAVLPGDGGGLVVVKSLAVTDLFVDINERYTREE

SEQ ID NO: 986600 - protein, 37 aa, Homo sapiens
WIDMGLRQEEGDILCSSDKTAMNLAPLLPLLSTGSGL

SEQ ID NO: 986601 - protein, 60 aa, Homo sapiens
GRSEAPRVQYGCGTPEYLAPERADSDTSYTRAVYWWRTGVCCSTRCCVGESPFPGVRLAR

SEQ ID NO: 986602 - protein, 34 aa, Homo sapiens
MARTREAELAVSRDHATAFQPGEQNKTLSQKQTN

SEQ ID NO: 986603 - protein, 90 aa, Homo sapiens
PDFSRPLPDANAKQARKPGPKLESRFENLDVKRTDKMKVLIIDDEEDFRVVAASCLGLLGGVDVAEASSGKVGLEMALAEKPDVILLDLC

SEQ ID NO: 986604 - protein, 67 aa, Homo sapiens
SPGHHGCGREKDTVKKLQEQLGKGRGRQQLNRRAPLSEFPLLEQEVIVPLTKMPYTFLTNEPNNLHI

SEQ ID NO: 986605 - protein, 79 aa, Homo sapiens
VASTDVTIWPRYRNPFWSHRLHILSWVYPVWLVSQSGTCRAVPCRHRLNKEMTVGFSFLVLMSSSSDFSRSPPLQSLLG

SEQ ID NO: 986606 - protein, 85 aa, Homo sapiens
HLTAPLDFDSDIDPVGIATKQVNRTDRRHVLTTDQRPAIAESIRILSQYFLEMSLYPIFLQARINTQFLGDIKHLRSQQDLEMVA

SEQ ID NO: 986607 - protein, 34 aa, Homo sapiens
MGSESNSFTTTSVTPEGTSDSEVWEATVVTHIRT

SEQ ID NO: 986608 - protein, 99 aa, Homo sapiens
VNVTVQALGGDVLHDHVEDNDGACAADAGAAVHDDGPCVGKLSCRWLIWSRKLGTPQGSVGTQWSGQLRYWECQISRVRSPLPSGETCKVRSLVSVVSC

SEQ ID NO: 986609 - protein, 75 aa, Homo sapiens
CSVPLLSMAMRYEGWEVRTAGTGNAAVREAKDFQPDAVGLDMMLPDFDGLQVLRRMRDHDESVPVLFLTAKDAVE

SEQ ID NO: 986610 - protein, 44 aa, Homo sapiens
LSSAPGPATRAGVEPAPMLADGAAPGPLHSVAGTTHLLGAVSTV

SEQ ID NO: 986611 - protein, 134 aa, Homo sapiens
VRRRMMMHSGRKGADIMYTGTVHCCRKIFIDEGGKAFLNGAWSNVLRGMGGAFLLVLYDELKKVIYGPRTAPHTHTHQGNQENHVESSTVRTINLREIPVVFFPAASCLEMAGEGSRKGAHCDPTIGSRFRVLI

SEQ ID NO: 986612 - protein, 51 aa, Homo sapiens
  misc_feature (42)..(42): Xaa can be any naturally occurring amino acid
MNLLETVVREADSGLNCFPEVCRDARHVLSSHDAQTAILFPXSPQSVLGPG

SEQ ID NO: 986613 - protein, 40 aa, Homo sapiens
TYSYEIISSRDEQWLLLMEVNASHRTIMFIKLVTESAHPD

SEQ ID NO: 986614 - protein, 141 aa, Homo sapiens
SVPVSIPLCDPPALFEAGVMLPEHPAHDNMDEDDNVSMGGPESPDSMDPVEPIPTMTVQTTLVPNEEETFALEPIDLTVQETKAKRRFNVYVTKSQPDLSGKKMAKALCHLNVPVTVVLDSAVGYIMEKANLVIICAEGVV

SEQ ID NO: 986615 - protein, 68 aa, Homo sapiens
RLPRVRSDVEQRLPIAAFTDVQCRLQEQLAPVIAMEEVSESLSHSKTDRLGTEDPEKLFVLLMFLACN

SEQ ID NO: 986616 - protein, 109 aa, Homo sapiens
AKQMYLLEMNIWPGMCTLLNGVHRVQLGWPFNRSSMGSFNEARKHSFLARASRTRFRAEMFLCGRMGLRRAQPSTNPSLSSSCRMARSGNCSLTLTVCPAFRKPPPAIF

SEQ ID NO: 986617 - protein, 132 aa, Homo sapiens
MLAPVNVLGSTIGPPNTLKTNIPLMLTSQKVLPPLNAMFLNQTWVLDTILLTGTILLKRPFRFHGPPWFTDRAFIINLIVILNLHCTQSLGDRILHTGEVAPPWKAHFLQRNGSPPLPEPPTVPRSGIDKGS

SEQ ID NO: 986618 - protein, 74 aa, Homo sapiens
MGHILGPGDLGLQSLLRFGSLGTGTGTQREDDRSLHHNINMRTTETELVLCVQHKGVEVEDTTLFQQQDYHIRT

SEQ ID NO: 986619 - protein, 45 aa, Homo sapiens
PPSSYRCEMKPDDGQRFTIDVLTASTLCGKGESEPAIRNCVYCTV

SEQ ID NO: 986620 - protein, 34 aa, Homo sapiens
LAPQVGACVDSTDLVAGIERVRDADEATMKRWHE

SEQ ID NO: 986621 - protein, 134 aa, Homo sapiens
SIGYAGHVYCMTSAGPVPGHSEGMGRSHGMVQGMVQGRSRERPAPSGAKAQPAQGKAGQWHHWAMTGQGQRQERAEQAVPMVGARAGMGQSSGQDMSKARSVPEQEQDHDHWQGQCHDRTRVRTRGRARARARA

SEQ ID NO: 986622 - protein, 35 aa, Homo sapiens
ELGTQVGACVDSTDLAVGIERVRDANYATMKRWHE

SEQ ID NO: 986623 - protein, 106 aa, Homo sapiens
LGTHGFLAKTAQLVVVIAESTAESPKTTPPDGRPHHRVHVWASIPRTRSTQRHSIQERPTPNPFSVTTIRTLPALMKAATTTTTTMTATMPPVARLVHAPIATISE

SEQ ID NO: 986624 - protein, 43 aa, Homo sapiens
IPHVLTSSGLMDYCSHQDPELKRTVIQSPLVPLQTVLVIASLE

SEQ ID NO: 986625 - protein, 55 aa, Homo sapiens
  misc_feature (3)..(3): Xaa can be any naturally occurring amino acid
SSXPPLQAQGRDLVVFEPQFAQHRRIGALARHLPGTVVLTDSAAPGPAGSRRLRG

SEQ ID NO: 986626 - protein, 45 aa, Homo sapiens
  misc_feature (1)..(2): Xaa can be any naturally occurring amino acid
XXPPVCAMLGLRGEEPPKREAVSDPEYVFLLRRNDQPRAIAAMII

SEQ ID NO: 986627 - protein, 113 aa, Homo sapiens
SSVGLFPRSAGWLHFFLPVYPGAGFDRYCPVFLAFGEPLAEVGVKAIVIHPSGTEELTVNWTGIGYLRNYPLTGHLYTTPTVHTHRCRRAYEDGCTSITSLSQMSVRRSNHSL

SEQ ID NO: 986628 - protein, 116 aa, Homo sapiens
PLSGHLSPAHRIPTEEVSKRASAASVTALGVRLNCTCLSTFASGARSRSNSGRVLRLKLVFWAACIIVQAFLNISLIGTTDFLESPDEVNGSTRALRMPTALGRISRLILDLVAYG

SEQ ID NO: 986629 - protein, 41 aa, Homo sapiens
LVVFKPQLAQHRRIGALARHLRRTVVLTESAAPGPAGSRRL

SEQ ID NO: 986630 - protein, 38 aa, Homo sapiens
PLGREEGRRARRHRLVGGDDEALVGVEGGGIDSKGTSP

SEQ ID NO: 986631 - protein, 76 aa, Homo sapiens
FAEKDDGRMTTRLTSCGTGPPASLSRNYCSSYAVHVTVELDSQGTLGGSRSITMHVSLRGPGDHEGVLGLRGEEED

SEQ ID NO: 986632 - protein, 63 aa, Homo sapiens
SSSAPPRRGWQDDVRMQCGGRVAEIRGPHEVELAGGVSSRNVMSVGRLPSGSSVALTSFSQPS

SEQ ID NO: 986633 - protein, 108 aa, Homo sapiens
IRSHHSWRRSALLRCVPGHRAVQHLVPEETGDKPRGSGQCMELCGNDSVYAYRSSVYRKPGVAEAKIQYRSSGLGSCELAQGGCKEVVELEEGGLGGVLVIRVGKGLD

SEQ ID NO: 986634 - protein, 35 aa, Homo sapiens
  misc_feature (1)..(1): Xaa can be any naturally occurring amino acid
XDPDFLHFVGSVTDDAGFLVRDNEVVNTDGNREMV

SEQ ID NO: 986635 - protein, 53 aa, Homo sapiens
RARYPIVAINKDEDAPIFQVADIGLVGDLFKVVPTDRQAVTELAGVGKGVESD

SEQ ID NO: 986636 - protein, 67 aa, Homo sapiens
MLPGPKGADIIFTATAHCWRKIFRDEGGKAFFKGAWSNVLRRMGGALYLDLNKELKKVIYGPGSSTL

SEQ ID NO: 986637 - protein, 85 aa, Homo sapiens
VWFLLRPGLEYNGTVPESRLTAAFNSLAQVILPPQPPSSWDYRCGPPCLAFFFLERDRVLPCCPGWSQTQEFETSLGNMGKPYLY

SEQ ID NO: 986638 - protein, 62 aa, Homo sapiens
RARHPLGTCQFRGVKFVCCPLAEKSDNVDSADAEEDDSHVWWGGPDTNYANGSEDKVLKVAE

SEQ ID NO: 986639 - protein, 99 aa, Homo sapiens
PRKAGWDSNNSLDLSTFVHSLNWNQASPFSHIQGVLPVESTSLEALESRLVDFSCISYNRMTVMHYFIYDKLQSLTSLRKDRKQSINFCLERHLFARYL

SEQ ID NO: 986640 - protein, 47 aa, Homo sapiens
ARYPLSIIHPSVIHSPIHPYSFIVLKNELYKSETTGVLEEHIDGWMD

SEQ ID NO: 986641 - protein, 55 aa, Homo sapiens
MVTDEGLGGPHCSASGKYAGEVQPQAQSSQFDPAKAGDTANWRTPLTPHSPPSGF

SEQ ID NO: 986642 - protein, 138 aa, Homo sapiens
MMVLSSSINGQCAPLGWSCSSRTCSLLWAVSSPSATCGIWGTGGRLEGPEVTHAYNSTGNFTVKGGLAAMRCRRSDALAQCDCDTRRVRGLIVNASCPVVPLNGSMSFSTRLEAGRDVRYSWVLCDRCTPISGGPAIS

SEQ ID NO: 986643 - protein, 46 aa, Homo sapiens
SSPPNNRREALRAYARACVDCIHSAARGFDTGAVTLAMIEGSALGG

SEQ ID NO: 986644 - protein, 40 aa, Homo sapiens
QLGPFLRASACRLAILLLLLPVELCACGNLLFHLHHLELC

SEQ ID NO: 986645 - protein, 165 aa, Homo sapiens
DSRTSAATVAAAEAQRIGLAHVSRDVFLDDVRTPEAITTQLQQGVALAHKQGSAVLIGHPYPQTLQVLEREIPRLKGQGIELIPLRQMIAERGNQAMPAHGGHGLYHNLLTPASAYSSERDDVLHLLIGERAPVNTLTLPGQLDGFGTTVETLLPGFQVRPSELM

SEQ ID NO: 986646 - protein, 124 aa, Homo sapiens
QIPAVLPSGRARLVVTCLAERGQLNAWAHIDPVGVSELRLALGVLYLVSLRSCRPGADHMLPRALIPESADVGAKVVVETERSPHGLQGPKFPRETSRRWEKSPIRAVDGATALSEIPGGHSNG

SEQ ID NO: 986647 - protein, 33 aa, Homo sapiens
WTLRTSLFSSVFSGLVFTMLLLKPEEDSEKVQV

SEQ ID NO: 986648 - protein, 53 aa, Homo sapiens
MVSIGLLRGVSSPHAHGGPQHQYSRGHHNCSESLELQDPSSGLRVTMQDLGPV

SEQ ID NO: 986649 - protein, 49 aa, Homo sapiens
MDFWRTTAIYSQLSLSGCTAPFTCTSLLLEPPEGPGMPEGPGMPEGPGM

SEQ ID NO: 986650 - protein, 45 aa, Homo sapiens
GVEGATHRRGLTVGNTHMPLDAVLKTSDWVSGRLGVVVDCYIMRH

SEQ ID NO: 986651 - protein, 103 aa, Homo sapiens
VQAHPLLIAQHPEIACFLWRQKKAHLTGRSMVNGGTVAEKLDWARERLEQQVPLNEVFGPDDDYPTVSAVYHGQGYKGVTSRWHTKGSCPRKNQPRLRKGARI

SEQ ID NO: 986652 - protein, 41 aa, Homo sapiens
LSDVVMWTSRTHEDYIEFASLDGSNSPRCAEPGHPAHPYWP

SEQ ID NO: 986653 - protein, 61 aa, Homo sapiens
LAAHPGGIGSCGTKPCCCANVGRVVCWPANAPSQRLLAINCAFHSGSRFHSGRHGLSGLVV

SEQ ID NO: 986654 - protein, 45 aa, Homo sapiens
FSADSSPSMAGTPSVGSAFWSRCITWSSVMLPLLGGILHGPTDES

SEQ ID NO: 986655 - protein, 41 aa, Homo sapiens
MLSGGHRGRVGTSLAVAASVGRVVLLASNAPSHDACDRCDF

SEQ ID NO: 986656 - protein, 104 aa, Homo sapiens
VTYSPMDVSIAKSVHIGEHCGLVIAPPMSDHVSLVSTVCLALLQCYLEKLVLRAPRQCSYTSCIDRYVFPRTGMSRHAQVTGQLCTLVASDQVELMKLSMTGIS

SEQ ID NO: 986657 - protein, 37 aa, Homo sapiens
MAPVQAGFIWRREACEILTQAQVHPMVTCTLMTLVVS

SEQ ID NO: 986658 - protein, 109 aa, Homo sapiens
MSRHHKGYTVIATPYTTPRNEDGILEMIYPNDGWGLQQVLSVSHDKRIAGQGLEDVLYEMVKDSRILPRTNSIPELHCPALRRGYTITDLAANQHTASQPYNTQALDGT

SEQ ID NO: 986659 - protein, 157 aa, Homo sapiens
HETYYRILLGTITLITDLCERSPAVLRHFRKVVPQLVHILRTLVTMGYSIEHIISGVRDPFLLSRYFVCLRILGRNHQESSETMNDLLALVARITDTSRYCRDMRSCSETVLTIMDVRSAARLRVLAFDILGRFLLHRDSNIWYLALTSLLPQAPSV

SEQ ID NO: 986660 - protein, 117 aa, Homo sapiens
MQTFHVQNVIFFFVVVEMESRFVAQAGVQWHDLDSLQPPPPTFKRFSYFSLPSSSDYKCVPPCPANFCIFSRHGVSPYWPGWSRTLDLVISPPWPLKVLRIIGMSHRTDPLKFLNRY

SEQ ID NO: 986661 - protein, 49 aa, Homo sapiens
MRAHDILSSPCAIIKLGYLLSLPHDTLRSRPPISATDLPCAHPQTVRLG

SEQ ID NO: 986662 - protein, 36 aa, Homo sapiens
MISLRTDRDTTVLPQPGSGLKVRPLGPRSFLCAKAV

SEQ ID NO: 986663 - protein, 33 aa, Homo sapiens
HLTAPPAPLSTFIPCLREGDGQAVRRPIVMCPL

SEQ ID NO: 986664 - protein, 59 aa, Homo sapiens
MHIVKTFIGKVLPGCRYPLVYSISSPPTIPIPWHATCTKINPAITPCRATIWLRQHNEP

SEQ ID NO: 986665 - protein, 45 aa, Homo sapiens
SNAVHGRQATVVGDVCGLAGHGEIVPRRGITSQRQALGRRLAGGG

SEQ ID NO: 986666 - protein, 32 aa, Homo sapiens
MGGLSAELLMQLGEVVYGGARFRPLRHAGVRQ

SEQ ID NO: 986667 - protein, 43 aa, Homo sapiens
HAEQVREVVVQPWAVGVVPAGRHSSVIHVTGDEPTLHFHLYGQ

SEQ ID NO: 986668 - protein, 46 aa, Homo sapiens
NKVERDWNPIAEDRYISLGNGPSCPHVSSRRRPPHVDYSHRAAVVP

SEQ ID NO: 986669 - protein, 60 aa, Homo sapiens
REPLTLDDAENLRERLTLRKPLTPPALNPWLRFRWREGRDSVNLDHTFMRVTELDDEAFG

SEQ ID NO: 986670 - protein, 79 aa, Homo sapiens
LHSHTYILRRGHLLSITPNTPDPRILLMATALPVCSGSCAVCPGPLALSLHLNLVFRVKVPPVLWTGRGPPSEWGASDR

SEQ ID NO: 986671 - protein, 79 aa, Homo sapiens
MLCYEASQALTDATCRLFAPAGRIMELLMYSHDNITCGITSVAFSRSARLLLAGYHDFYCYIWDAMKGDRAGVLAGHHN

SEQ ID NO: 986672 - protein, 55 aa, Homo sapiens
LNTATAHNMSRVDMGHTQLLIGYQKHSLELCNTCAAHIPCMTRYHPKKESASYST

SEQ ID NO: 986673 - protein, 41 aa, Homo sapiens
TLSLWGARHFYFYASHNHSAGHHLFHELFLQNPPLDPHRES

SEQ ID NO: 986674 - protein, 35 aa, Homo sapiens
LGLVGARRLHWSIKNIKLSGSEHKVERADAVERAD

SEQ ID NO: 986675 - protein, 74 aa, Homo sapiens
SIERHHCPSESTSVTTILPSHRASPLSFRAIERHQCPTEPSSVTSVPSEPSSVTTVHSEPSSVTRWSFRAIERH

SEQ ID NO: 986676 - protein, 38 aa, Homo sapiens
MYATPPPEAGLGGWGMHSSEQDSQNGWGHRGGHLNEGH

SEQ ID NO: 986677 - protein, 72 aa, Homo sapiens
MTAHGPGLRRQLCISSPMCPSWSSALRRHAQMHQLASVEEPGSETEACGTGPFTVPPPEGWPAISHIPAPRE

SEQ ID NO: 986678 - protein, 95 aa, Homo sapiens
RQSDAHMGVWVLFQAVRCSPGGVGADPSCHVQHLGVQAAVPGCQMLTCGCGCCYMLSDARHVVRVLLKAVRCSSGGVGGAPGCRMLTCVCSVMGS

SEQ ID NO: 986679 - protein, 81 aa, Homo sapiens
FYTDPPGLLRSECNGTISVTATSASRFHAILLSQPPVQLVLQVAHQHIWLIFVFLVEMGFRHSCPQVIHLPRTPKVLGLQA

SEQ ID NO: 986680 - protein, 38 aa, Homo sapiens
MATKSKLEFSIYPRAPGFHSMYFMPLQRPSLTTHYHRV

SEQ ID NO: 986681 - protein, 70 aa, Homo sapiens
GTGEMNRDDRDHVEGLCGAFRHTWTGCFTIPICWGAAWGSWISRFSDARLPASGLGRLYAFDSSGVAITF

SEQ ID NO: 986682 - protein, 112 aa, Homo sapiens
WLLMSGCDCNILAGITGMCHHARLIFVFLVETGFHRVGRDGLATLDLRQSACLGLPKCSDYRHHAWPKRLVFSRNGTRRVRHPFLFFSYLRQSSGSVAWAVVYCRDHGSLRP

SEQ ID NO: 986683 - protein, 100 aa, Homo sapiens
LSLLRSGHHIKIWQKLKHEDVSKAGDKYTVLTLFAHDRVQFHNLVTVTLNSWAHAILLPQPPKWLKLQACYIMVAGWLLQLLTLHQNMAEAKAGRPEQAR

SEQ ID NO: 986684 - protein, 49 aa, Homo sapiens
LVEKGQIRPTMTRHIEGLTTQHVREATAAVESGTMIGKVVITLCSFDNI

SEQ ID NO: 986685 - protein, 58 aa, Homo sapiens
RARHPLSALIASLGCDDPDFSVGRRPGGGRSSAVLALISEERNDIVLTRRPLSLRHHA

SEQ ID NO: 986686 - protein, 43 aa, Homo sapiens
IKHKMLFTDYQKSEQQRNPRVLTDDKLIPVIGFLCFKYIDGES

SEQ ID NO: 986687 - protein, 94 aa, Homo sapiens
HRVYARLKPSSLQCAQEPIVCMHHDEAVLPVVFPEPIVCMQTEAVLPVVFPEPIVCMQTEAVLPVVFPEPIVCMHHDEAVLPVVFPEPIVCMHD

SEQ ID NO: 986688 - protein, 35 aa, Homo sapiens
QIIMRSGIDGMTTAASRHYKPWLCPVARHPEGPGM

SEQ ID NO: 986689 - protein, 48 aa, Homo sapiens
CFVGLREKDDIHEGTNACCSRRRGWRCRQLCHMPQMLSDGNPLVEHWF

SEQ ID NO: 986690 - protein, 55 aa, Homo sapiens
RIRLIDLAQIADHRVLRVDISYYYPELPMEADEGLMSRENSHAQSYPENLLQNVP

SEQ ID NO: 986691 - protein, 53 aa, Homo sapiens
YGTLAYLDLLAYLDLLAYLDLLAYLELLAYLELLAYLELLAYRGASGMRGASG

SEQ ID NO: 986692 - protein, 95 aa, Homo sapiens
AYWTPGISDLLAYLDLLAYLDLLAYLDLLAYLDLLENQKVLYEEKINLFKRIFSRCIWERLGDIIGEMSNPSIAHHTEFSLWINEGPGMPEGPGL

SEQ ID NO: 986693 - protein, 134 aa, Homo sapiens
NEDADFVLSVQTLLSGGHHQECAAHTDSIVREPKNKTSVAWKGTPSRLPCRLGWAAFILLLLSGHVLLIGPYYRVLIGPFYRVLIGPFYKTLASHRALIGAFLQSTDWCILQSPCSDRKVLQVPTRPRRSRYAG

SEQ ID NO: 986694 - protein, 57 aa, Homo sapiens
REHLTFRETLPVRQIITMRQPFSYDSRYIYIGRDTLQAQYQVLSETEAEHLSNDHAG

SEQ ID NO: 986695 - protein, 31 aa, Homo sapiens
MPRASTDVLVRVLIGVHVTVSSQCFPSRSIA

SEQ ID NO: 986696 - protein, 103 aa, Homo sapiens
TLQDPPVLLRSQHGRRGLGELLLNRVQFHLYAEHDCVSVIWMLVILEAHVGFPGGLLTYDLLNLSYCQCYGISITREERRVSGERGDTLVTYPEMAGWHALPP

SEQ ID NO: 986697 - protein, 49 aa, Homo sapiens
IPPVSRHNSFRKEELDFYKNSVLLSDFHVLICKTTQRISVPKPYSTSVL

SEQ ID NO: 986698 - protein, 105 aa, Homo sapiens
GPPGCRSPGFSGLSQGSRLAVFAAAVSPEGSPVINLLPAHYCDCLYYLFLYGLLYYGLSVSYWLLGQRLLSVPSLTDLSKRLAYKMAAGLQPSHAREGMQDGSYL

SEQ ID NO: 986699 - protein, 114 aa, Homo sapiens
NKTRSVQITPAPSRTTSPADITILTETAPPAVGRHNFDTAKRFAKRLAERFLTAGRTDPAHDVRVAVVQYSGTGQQRPERASLQFLQNYTALASAVDAMDFINDATDVNDALGY

SEQ ID NO: 986700 - protein, 126 aa, Homo sapiens
DPPVLSGLLACSLTFFLSFRRSLALLPRLLECSGTISAHRNLCLPGSSDSPASASQLAETTGMHHHAKLIFVFLVEMGFHHIGQAGLKLLASTDPPPSASQGVGIIGVSHCAWPQFLNFFPTKVLP

SEQ ID NO: 986701 - protein, 70 aa, Homo sapiens
  misc_feature (19)..(19): Xaa can be any naturally occurring amino acid
  misc_feature (33)..(33): Xaa can be any naturally occurring amino acid
  misc_feature (37)..(37): Xaa can be any naturally occurring amino acid
  misc_feature (70)..(70): Xaa can be any naturally occurring amino acid
GWFELRPRVVRLLRLQGAXIAGVSTGLASIILXVTMXTNKTAENQRSDPSSNTSISLHKETSGLHEYLCX

SEQ ID NO: 986702 - protein, 86 aa, Homo sapiens
AYKVQQQYMGKHIKLSISPSHVRAKDEIPENRDTIKKGLKYREAQQHCPSDVMQYISVQLQASLGLSHMCSTAMQAGATFPREKLP

SEQ ID NO: 986703 - protein, 121 aa, Homo sapiens
SSHETAGVFSSEASSCENSYRVTEAPSSIFLSGHMQTMGLGGQPQQDLRKDGHRPTHQATDNGARGANLSKTSGRTDKVYTPGHRQWGSGANLSTDLRKDGHRSTHQATDNGARGANLSKT

SEQ ID NO: 986704 - protein, 119 aa, Homo sapiens
  misc_feature (4)..(4): Xaa can be any naturally occurring amino acid
IPLXCQVYGSSHVSPCLLLIDDICHLNSVTVLVSHGSHRHCLRSVPACQAPYYTMNSSKGPGSHAFYYCSQPQHPVRSLNWGQAQCAHACNPHTLGGQGVQERHGQQGETPSLQDLSEP

SEQ ID NO: 986705 - protein, 139 aa, Homo sapiens
  misc_feature (134)..(134): Xaa can be any naturally occurring amino acid
QDAESSDPSILGPRNLSLLLSLLKAHACRPRSTSAPEWLLTPTGSTAHKFCPLSPHLATIEQDVITQQALAESSWQLQTLKSSCGHRFELKHSQVIVSPDILIANYPHDQDCSLLVATLLWRHSQAMSRTSLLXLAGAQ

SEQ ID NO: 986706 - protein, 97 aa, Homo sapiens
EATALPQPPTSTPHFDLWHLGAFYSPVTVLEGKREGRTSGSQESKTQSQHLNNDCGPLCFRPTVRAGKQRPGNAPGPELGKARLTVLRIGDSEASSP

SEQ ID NO: 986707 - protein, 124 aa, Homo sapiens
PHCGTMDLTFFTSFSLVLFQDQLVLMAVRGPTFPGNVVTGTGVLDPVHSPRINPHEVSGSLHEAVHRNIGCIEIIQDWSPGTRQVVHAVPITDSADGLPVVLVHREPLAVAWANVDVDGAEVVI

SEQ ID NO: 986708 - protein, 98 aa, Homo sapiens
MIIRIAFLGLFTSMFDFSLVNCCPGSIYSYSWENLRPSLALRRSMLSASARAYENPSTWSRIPGVWYLSLRISTGSEEWASKESFSPIDCSSLEDGEW

SEQ ID NO: 986709 - protein, 72 aa, Homo sapiens
MPLLVEPEGLEKETTFNSLLCPSGGEASEELSLKLPPNVVEESARASVSVLGDILGSAMQNTQNLLQMPYGC

SEQ ID NO: 986710 - protein, 38 aa, Homo sapiens
LDPITADPAIRIDHVNPAGVYFFTHALATYHHVHIVYL

SEQ ID NO: 986711 - protein, 90 aa, Homo sapiens
DSTGSPNLYSLREYRKKLRPLRSYAAWNCEDDHGVLLLDVTDILITICARLGLTNHDQYSLVRELIDETMEDITRTLSQDKTLLRTEYRL

SEQ ID NO: 986712 - protein, 88 aa, Homo sapiens
TSVLFLYLITILIVLGIIGFFFFHRGHFFLLSYFYYFEFTPICIVCVCSAPPNIRVILLRISRIHIVTLFSQGATHKLYPSELVNSAG

SEQ ID NO: 986713 - protein, 66 aa, Homo sapiens
AERASPEPQEWVPIIQQDIQSQRKVKPQPPQRERHPGILGLLSLPGSQQGKASDWDQCCSSSLLTP

SEQ ID NO: 986714 - protein, 106 aa, Homo sapiens
MSLCGVAPCGAGPPPALPPKQRQLEPPAGKDGHPRDPSAVSGVPWEGTLSLMGMIQLCQQEERYGQVVSVHHYHREEFESSLERGTILFQLHTIPISNRHETLQHF

SEQ ID NO: 986715 - protein, 133 aa, Homo sapiens
PVVSSPAVPVRSPICSGSETICVARVCCFAGVRSLRGSLVILVERVEKLESSYSSSGLPATMRGGRQSHNCCSAPPVGYHNTCLIPLHQPPHPPHTPPHTTPPPIDLHTHHTHIYTHHTHLHTQLHSYTYTDT

SEQ ID NO: 986716 - protein, 47 aa, Homo sapiens
CQRTSTSFGLNACVPVHVSCHQLCTVTSSSDVRRAAVWTSVPGMCFL

SEQ ID NO: 986717 - protein, 58 aa, Homo sapiens
FGGASVAFAPPDVPAHFQHQEPYGASSLSTELPVVWSPWLFFTVSLGSPWKLPHLRGA

SEQ ID NO: 986718 - protein, 69 aa, Homo sapiens
PIGARHPAVDHNPSFATATTMRRLDANRQFFLDIGSGLFRTATQCDELFDNGLGAGVVLSYRCIQGVDV

SEQ ID NO: 986719 - protein, 85 aa, Homo sapiens
NLYSLREYRKKQRPLKIRMLYGTVKTIIVYDSNTVTDMLMTICARFGITNHDEYSLVRELIDQKKEDITGTLRPDKTLLRNEYRL

SEQ ID NO: 986720 - protein, 51 aa, Homo sapiens
ARYPFQPLVAASFLGIRSWFCRRVTAAQEADPIDSVKSYPCVVDTDAGRCC

SEQ ID NO: 986721 - protein, 30 aa, Homo sapiens
MDQTLSLWGESVPRCAGAERKCMVNTHRVV

SEQ ID NO: 986722 - protein, 117 aa, Homo sapiens
DPGSIPFRGHTQVEITNLHLPALEVHVGLLSLTVHRKVVADTILQFQVDNGINMLAVQGLQGDVHPAVPQRAKLATPRLNVEGRLILRPFLEGDWALLNAPCGWDLADVPDLPRGMD

SEQ ID NO: 986723 - protein, 47 aa, Homo sapiens
RSGLRRAVVCPGSRSTPPALALWREESIETTVIVDKRSAAFYALGAA

SEQ ID NO: 986724 - protein, 32 aa, Homo sapiens
RELLGSLKTPLVRPYFVPFDLLGFFCRHTVYP

SEQ ID NO: 986725 - protein, 50 aa, Homo sapiens
ARYPGKASNSGTKNHPAMTAGTDSSHPTCRDGHRNHAHIGGRNNLALIVI

SEQ ID NO: 986726 - protein, 37 aa, Homo sapiens
SQLGTLLIISGVNAFSFKPYTCPKIPNKDGFGKAAIK

SEQ ID NO: 986727 - protein, 88 aa, Homo sapiens
VSDEVLQQLELGVGEVKVLVPDTRCVPVLVDGERSCHELVSDLDRKQQRSRVSASDGVAESHRKSSIPQSGLMTERVSEPTNSRTGTR

SEQ ID NO: 986728 - protein, 101 aa, Homo sapiens
EKFLSYRLAFFNADQNQAGKLQTRIDRGIGSLTRLVQIFFIDILPLFSSAIVALGLMYYANFYVGLVATSIIPIYFWLTFQQAKKLGGWRRNLRDGREKKS

SEQ ID NO: 986729 - protein, 36 aa, Homo sapiens
FLEKYKALRKYKALRVMESIQEAHRASHTADSEEGQ

SEQ ID NO: 986730 - protein, 71 aa, Homo sapiens
IRLGTLFLRVLRCFTSPRYHPHPYTFRAGPPDTTPDIPGFPIRTPPDHSSLTNSPGLIAGHNVLHRLLVPR

SEQ ID NO: 986731 - protein, 59 aa, Homo sapiens
LRIPLTPTRLTESSRPRKLRTCAEESRGPGVGLGKRHLSVTRRYARDGKAVLMSLRWRL

SEQ ID NO: 986732 - protein, 48 aa, Homo sapiens
WLPVSQDIALHAAQCFISIYSFAGAAMTDLPQTEGGLSQQQIPPSHSS

SEQ ID NO: 986733 - protein, 103 aa, Homo sapiens
MRDSDPDRNWVLPFQTVGSLLVQGMSNNVVREPQGFCLMLYPAVAELVSKLQDKALFPLLLFSSRRKESLLEVQAALPVVVGGVSLELQAALPVVLGGVSPGA

SEQ ID NO: 986734 - protein, 58 aa, Homo sapiens
LTRIPSQPAAGETGSSDATVVSVYVLLIEMSGGLHGAPITLRDWLRGFSNAGARQAIF

SEQ ID NO: 986735 - protein, 77 aa, Homo sapiens
FELGTQSSALDVRVRHLGRRLLTLVTAELVLQLALCQESGHLGLLDGREILGLVHRLTVHEKGLIGVQTLLDLLLKA

SEQ ID NO: 986736 - protein, 63 aa, Homo sapiens
SRALYPPRHWEIAGVPAVDWTYFPDADPAFPADVTARICQLAGTDGILGNCHASGTQVIDDFG

SEQ ID NO: 986737 - protein, 51 aa, Homo sapiens
VSRVSPSELLRHVVCLTDPLRTRKYDRLDLIRRSLIVCLQSLPTSQDRRQD

SEQ ID NO: 986738 - protein, 68 aa, Homo sapiens
GLDRSFTLYVHLNADELEALSDVLRLRLLDLFTWEVSSRPDLYHVFVNLVRQCTITIAPLAIEVMAIG

SEQ ID NO: 986739 - protein, 95 aa, Homo sapiens
RANGSRELVMKAAVNGVGADGHGTVEKHRLLWQAAFLIEAAKVIDKVLGAADGEGGDQHVAAFLVSLLQNVGQLLQGFVTGAMITVAVGRLHQQY

SEQ ID NO: 986740 - protein, 88 aa, Homo sapiens
DRGRVAWEQRYLWGHCPRRDFTWNKSWQAAACPVRLVPCRRFAGECAGSVASKSLLLSTVLRVRSSAYRGGQSLLGRNGYLSSNLRNP

SEQ ID NO: 986741 - protein, 138 aa, Homo sapiens
  misc_feature (63)..(63): Xaa can be any naturally occurring amino acid
APKRAGPLVARRPQLNSPVRRLSRCGFIRPKPWKSPGAKWVADQVACVRRAGALLGDAHTEGXQAAVWVAGTQVEVVGPAVAASEAFHLGLALALTSSITLAADAALGVTVAAYGPWHLAVSLAWLALAGVGIVTWGA

SEQ ID NO: 986742 - protein, 47 aa, Homo sapiens
RVRLGVACPLLLLAALRLGAGDVILFFAVLAFLFLFLFLLLLTSVLA

SEQ ID NO: 986743 - protein, 60 aa, Homo sapiens
SVTEDRISTPRVYAPRCTGTSKVWYTQDILLCQLTRDNASIRPIQYQTAALMNTICETAP

SEQ ID NO: 986744 - protein, 89 aa, Homo sapiens
MGIPGPVRGTATGEVSVPELWSIVVSLGKDFLIIRVYLILNFFTLLYRPNYKVSEKVLSSVAYIPGLKTSESFIFHIRTGPGDALESHL

SEQ ID NO: 986745 - protein, 40 aa, Homo sapiens
YRSRAVTYNFLSQYTHTSIIFHTKYFLSIKEYSIDKYSLN

SEQ ID NO: 986746 - protein, 45 aa, Homo sapiens
MVACCPVLLLGCSPYSALVLSSSCSPSSSFLFLFLFLLLLTSVLA

SEQ ID NO: 986747 - protein, 129 aa, Homo sapiens
MATRQRLHVSLGFPKSAADWPGAGPGSGATGSVRRGRISASSHGQVGWRPEMRLDEVLPELMGSLALSELLFRGEGPPRACSRMDQYQDEDEEALEGGDDAEKVEDDKLEGARSKGEEDQGPGQGQDPG

SEQ ID NO: 986748 - protein, 56 aa, Homo sapiens
RLQARCREIPSGRQVFLGPTGAKGLRGIPGFAGADGGPGPRGLPGPPGPTGAKGLR

SEQ ID NO: 986749 - protein, 31 aa, Homo sapiens
MGFLDVGQADLDLLTKVIRPPGPPKVLGLQA

SEQ ID NO: 986750 - protein, 56 aa, Homo sapiens
MSGTRYQRTPEVCGVLESLLETTPGWGCHPLPSASIFTPHPPCLRWEAELGGRVGR

SEQ ID NO: 986751 - protein, 48 aa, Homo sapiens
MDVVGEQTDCWFGCGHQGVTHRVLDQAREEALAPQLTISTGPDIRTGP

SEQ ID NO: 986752 - protein, 78 aa, Homo sapiens
LTDAFCRPLSLRGRSCAIQAPCPWKTLVPSHSEGDALNCSFGLSPSPGSWKFLQKSSLNLSLSKASLLQVHIRRTLRP

SEQ ID NO: 986753 - protein, 56 aa, Homo sapiens
AQCRDHGKLQGVPFDIHSDRGDCPEAAKDWLLLRLTPAGDMRHSRAVRCMARNEGS

SEQ ID NO: 986754 - protein, 46 aa, Homo sapiens
VGNGRTGGEVLPLDVVGGAGILAVLRQILVEELQLLDDDTGDHRVC

SEQ ID NO: 986755 - protein, 59 aa, Homo sapiens
REPLTLREPLTLRKPLTLREPLTLREPFNPSPLTDFPSMHTTSVVDGLYCARVKGYPRY

SEQ ID NO: 986756 - protein, 33 aa, Homo sapiens
TGYLGAQLMVSYSLLVSEYLLDRFKNKSYKFDL

SEQ ID NO: 986757 - protein, 58 aa, Homo sapiens
MRGALKPDYCPFIFCPGRMTSRNHLVQKGLLELEETVECKGLKGLIGANLEAKQVLST

SEQ ID NO: 986758 - protein, 111 aa, Homo sapiens
TVYKASASQLIMHQTNTIPSHLGRTLGLYGKDQQEAPLQDMENDGEQDLRCKYISLIYTNYEAHKDDYVKALPVLLKPFETLRAQNQCGKTFIVGDQISFADYNLLDLLLT

SEQ ID NO: 986759 - protein, 82 aa, Homo sapiens
WGEARDWRTFGRYLLSSRTRSIISAPEGDVRLLRHASARSYTYAVACHTAGRFVPDRYVALPPLVLKDLVCLSAIRSCCLTP

SEQ ID NO: 986760 - protein, 52 aa, Homo sapiens
MCHALVLTVSTELVHGRHAPESGELHCLTMAPVLTDILDGHALVLTVSDGYL

SEQ ID NO: 986761 - protein, 37 aa, Homo sapiens
MSPPVGPFFGGIAVQRGAHAVEPQPGSLLRFFHGGDV

SEQ ID NO: 986762 - protein, 33 aa, Homo sapiens
YLASLLVIVLLDVPWQIWSHLKKLRMSKEDVRQ

SEQ ID NO: 986763 - protein, 39 aa, Homo sapiens
SQAPSVLSRTHHKDCITVAQSTVNDADIRDNTTIRVIDR

SEQ ID NO: 986764 - protein, 39 aa, Homo sapiens
MPPAKTSTPEDFIRMTNVSLTMNQTQLLCPEMPDATTVR

SEQ ID NO: 986765 - protein, 39 aa, Homo sapiens
RPPSPRFLWLAPVALHEAAYPVHIGPDLTLMDEEAGNVN

SEQ ID NO: 986766 - protein, 67 aa, Homo sapiens
EDGTTKVTRALEATTEHIRQELAAFCSPEPPAKTSTPEDFIRTTNVILTMNQTQGLCPEIPDATTVC

SEQ ID NO: 986767 - protein, 61 aa, Homo sapiens
LVTSYALATTHLPRWWRDWSAGQQLSCSLQTGNVHDTVSAFTSGAADLLICFHQVAQPLPL

SEQ ID NO: 986768 - protein, 49 aa, Homo sapiens
TTGSGTTNGDDGLQSAGTLAGMFILAREHSNNTKQASNPGTTCKLADTL

SEQ ID NO: 986769 - protein, 52 aa, Homo sapiens
MSDPRILTKVRKRLSFSGSDRPLAHSAFIAVHHQLHLRLQFGAQSQAVIDDH

SEQ ID NO: 986770 - protein, 89 aa, Homo sapiens
  misc_feature (69)..(69): Xaa can be any naturally occurring amino acid
HGPFEHLLVIIQQPRGMAITCGIAQSNTPGSESRCFMHWLSVHSGTARSSQYSPGLAKIPELLNISAPXLLRPEPSSSLLVFQIVTDDV

SEQ ID NO: 986771 - protein, 77 aa, Homo sapiens
PGWSVPVLSHCTILEELTFFLASQLMLKLSVMNRDDLSRDRPLGAEMVYVADDPAHHARCRRVRRGRGSLPLVCAAA

SEQ ID NO: 986772 - protein, 42 aa, Homo sapiens
ASGSSSSSDQAQQIPAAMYHLHPRSIHLKADRQEPQAADCGS

SEQ ID NO: 986773 - protein, 48 aa, Homo sapiens
TRRLPGLYHRPHIRDIRRSNEAGQGAHPGLPVPCTLGLLLCKQLRVTR

SEQ ID NO: 986774 - protein, 127 aa, Homo sapiens
REENNPRLVSLTGGLRTLPALDVTIRRREAAGGVLGAPASPGLLPLSSFWNWIASHSDCEENYRRSCVPHSPPEESQLMACHYRRLRGLPAGPWSPFFSAPLGLLLFLDWMGSHSDCEEPSPGLVSL

SEQ ID NO: 986775 - protein, 41 aa, Homo sapiens
ESHQDICCCGLSSVTATSPSCRPRRAGRRSAAGNIVHVLAH

SEQ ID NO: 986776 - protein, 42 aa, Homo sapiens
MMESHGHPSAVAPTGGSSQRISVLLCTVWNTGLLLLQAPAVA

SEQ ID NO: 986777 - protein, 92 aa, Homo sapiens
LAATRSMLVTANGVALAGLLPVCSIRYLSRGSFCDPCCQRTSTCFGLKPRAMHVSGSRSCKVISFDGGCTRCPTCHNVFADFVMMPARWGLQ

SEQ ID NO: 986778 - protein, 138 aa, Homo sapiens
VRLHSFVSLSSSPDSYLDLDFYCGWKGDVAAASSLDSSLLHYYYPGSSSPKGGHYNYTDLYLVRDLCHIYILEYSYTPSDFFSHAPQPGHLATLTAPPTSDLASAGGLVGHPSVTHKLMNHVNINAIPSVHYVYYQVG

SEQ ID NO: 986779 - protein, 56 aa, Homo sapiens
MSTPNWALKPLNRPNVMTYMSVFEPISRLFEDVICRRKFAFTGTSLSIVNAKIVAR

SEQ ID NO: 986780 - protein, 33 aa, Homo sapiens
PYTGPVFHEQVIILPLHGSGTAAVNHLSGTESR

SEQ ID NO: 986781 - protein, 104 aa, Homo sapiens
FQARCCGLAGRSYAAAGYFGAGVPMAPLSDWPWRHWARLQPQATALLLGEQPLSWLALQGQVDELAADFQHQGVEPGCGVALCGKNSYPLLLAYLALLQCGVRL

SEQ ID NO: 986782 - protein, 92 aa, Homo sapiens
RASSKLTTEHSGPWRVTIRATNHYLNREFSLERFVYSDLIKCKVVCADRATAYYTDTRRSTVKNSNCKRSRGSCTSRTNAAGLDERISIAVI

SEQ ID NO: 986783 - protein, 121 aa, Homo sapiens
MCDFTCSAAYPAVSTPLTPPSQNPANTFRPEVHLLPPPSDELALTELLTLTCLARGFSPKDVLVRWLSGSQELPLEMYLTCGSRLVPSQGHHHLRCEPACCACSSEDHRRGILYSIPVACK

SEQ ID NO: 986784 - protein, 58 aa, Homo sapiens
RHRNSITISRVSTLRKTDVRVVTHSSAGTASKSASLPFYPASFVLRFKQPVIPSQYAE

SEQ ID NO: 986785 - protein, 92 aa, Homo sapiens
EIRNGARRTITRVYLPGYVLVRWTSLTLVGYLRHTPSVTGFVGQSTTPIPLTFDEVIKMLTPSVLARVSRENADKAPSPKAKPKVEVADYEV

SEQ ID NO: 986786 - protein, 57 aa, Homo sapiens
MPKPVFPIRLALKLQDPTEPSAFLKSPRGILTGSSNFTAKLNLFFFLLLLHIKPAPF

SEQ ID NO: 986787 - protein, 52 aa, Homo sapiens
VGLWVFLVSSVIAYPAMYLFQIIHQHIGRISQCKDYPSVISGYLGKNWGFFI

SEQ ID NO: 986788 - protein, 91 aa, Homo sapiens
LSSPQHPLSFQQPQLTPPSSAHPTILSRHPSILSSVQHPQLTPPVLSVTPASSASFQQPRAQATILSSTPPSSAHPSILSSLQQPQLRTIV

SEQ ID NO: 986789 - protein, 93 aa, Homo sapiens
TRYAENPCNTCESSADPASVHPSRLRFWVPAQVEGEDVLVQQLLVHQVVEEGQHVVDGDAGVGHALDAIELVLAMKVMPGCLVGLPKDLPLHF

SEQ ID NO: 986790 - protein, 103 aa, Homo sapiens
PCLLEIKKRFVPGRSVPMRRNLNDRQHPLKAGCVWLLLGGAHGVGQEGALLQMMSLVGAGGTLALPLLGAFESVAFGVSWAPPSPSGPILPSALRPRVLSGVP

SEQ ID NO: 986791 - protein, 90 aa, Homo sapiens
ISSDRVSTDCMSWQLLDSEDYSFMAVDQEETVLSGTMYQDEEPHPVLEAELRLDLNSVHCRMLPDTGFASISWSFLSPLSGNTITAARTF

SEQ ID NO: 986792 - protein, 57 aa, Homo sapiens
GPVSTDVARTCILHLSTYFQCVTLSGNSLAWVQIAAIDYCDAHAVSSQGTCFPGKAQ

SEQ ID NO: 986793 - protein, 82 aa, Homo sapiens
MITSGVLDGDKTVTVEFKHDDRFNEESGALLHCALLYTSCAGQRRAGLGRKCFIRFGIEDGEEWVESTKRIDMARDWLISLF

SEQ ID NO: 986794 - protein, 68 aa, Homo sapiens
SSGIFTLRLPMPLPFARGTDRGQWLPQAPWAASLCALCRVQHIGVECLRFSRLPPVQLLMDLPFLGLE

SEQ ID NO: 986795 - protein, 69 aa, Homo sapiens
GASTDVRAIYGCAVPVRMCGPLRYVLGGRQGRVMDRRPRVTWLMLESLVVSPRSARVEVGPVMLIATGS

SEQ ID NO: 986796 - protein, 50 aa, Homo sapiens
PVPEHACLPAGRRVFTTALHASLSKILTLVRAELTSKYRYSWNLVDAYTP

SEQ ID NO: 986797 - protein, 88 aa, Homo sapiens
KKQHTRWTLSMRLLLEVTYEAIVDRCESGIREMLRRGLLLLTWNRQCFLFLVLVEPGAGTTYPPRLCPLTGQRAQGGVGHGVGRSFPT

SEQ ID NO: 986798 - protein, 34 aa, Homo sapiens
MRQSLFVGTFIGLFFDLMKLFEVGGSPANTRYLF

SEQ ID NO: 986799 - protein, 50 aa, Homo sapiens
TVLEVDGYAEERGVKADWDNSSRSEEGGSISDHSREEDATEEEAAEEDGE

SEQ ID NO: 986800 - protein, 38 aa, Homo sapiens
LFSRRDGVSPVLDQAVLELLTLNVIRLRWALRKAACEI

SEQ ID NO: 986801 - protein, 59 aa, Homo sapiens
KRDHKQPPGDLSKPGDLSKPGDLSKPGDLSQPGELIKTGDPDAKPGYLIKPGRTEQAGC

SEQ ID NO: 986802 - protein, 35 aa, Homo sapiens
ARPPHLDVAPEIDDHQVQGVKLLQTRDVVVTNLDA

SEQ ID NO: 986803 - protein, 70 aa, Homo sapiens
MVAGSSPAGCAIWRSGNLSKQCNMVGVAQLVEHRIVAPGVVGSIPIVHPIFQSARPKAWRFCFKLQTTRT

SEQ ID NO: 986804 - protein, 103 aa, Homo sapiens
MKREFTLSPRLEYSGMISCSLQPPSPKLKRFSYVRLLSAGTTGVRYHAQQFFVFFIQTGFRHVAQAGLKLLSSSDLPALSSKVVGLPAFNPLSSTESDLSELG

SEQ ID NO: 986805 - protein, 40 aa, Homo sapiens
PLKWHMANVIIYCWLFIYRQHAVLLLHPQWMKTCGIMLQP

SEQ ID NO: 986806 - protein, 58 aa, Homo sapiens
MSLVDSSHDAKMLWVQQCSDQVMARKTSLYLQCHDKPSEIVEDKAYYIADNGRSQVIT

SEQ ID NO: 986807 - protein, 87 aa, Homo sapiens
RACCADLDAEGAVGCRPLCGWADNECSVSRVRSLVTVVLPIFPLPSLYLAQRAPAEHCTVSWTTKREPSPRENLVPSSTVDHPYTAF

SEQ ID NO: 986808 - protein, 160 aa, Homo sapiens
HTYFAFLYMLLTVYSMRRHTCTMRYMEDDPVNRTLFIKGISKYAESYKTMMHFEEAYPNCTVLEARPCYNAARLMFLDAERKKADRWKLYFTNLQSKENVPTMINPKPCGHLCCCVERGCEQVEAIEYYTKLEQKLKEDYKREKEKVNEKPLGMAFVTFH

SEQ ID NO: 986809 - protein, 59 aa, Homo sapiens
ARYPFVKLNGTRGYRHDATPFCEIYQSCNCMGVSQSETLFTVKLAPSCSTLERHGRFWG

SEQ ID NO: 986810 - protein, 36 aa, Homo sapiens
MGIGGVQDLLIRGLRGDLCTKSPHHSTAKCHENGYQ

SEQ ID NO: 986811 - protein, 55 aa, Homo sapiens
RSSVGSEAVHNIGFLEDQPLLQGDVFASQHAWGVLRRELPLDFSCRLLGLLWTRM

SEQ ID NO: 986812 - protein, 46 aa, Homo sapiens
MSATASDVGNCFGCRQLLRMRQLLRMRQLLRSRNCFRCRNCFRCRN

SEQ ID NO: 986813 - protein, 117 aa, Homo sapiens
MSAGSGYNGPGDTGSYLEVKGEDVQYTAQVSDWGNRVGPVTEIGKPTERGVMGLEAYPKVWQVLKTQPGEPRFQCSLWDLYSHRESVDALSVGGVGSGDWPVSTKREREDNIQAPGL

SEQ ID NO: 986814 - protein, 115 aa, Homo sapiens
YRFPTLSLWGVLSHGIVWLLEVSSFYERTAMDVLSGVSSYPADCCKSLWCSGRMGDTRCCFSFILSPHSISTSQVSSGSGASSFSGSSSDSSDHSLFLFQPRDLHRGLGSTPGAE

SEQ ID NO: 986815 - protein, 84 aa, Homo sapiens
LLLYRSSSTGGSDVNLTIDSTGTDTTYSDSEKDRITIYRDNNTITLYMNMIRVRDPDTDVYYCGKGDGTGAIDYWGQVVLVTVC

SEQ ID NO: 986816 - protein, 66 aa, Homo sapiens
YNSSSYPVPITVCWSQRKVYALVGSCLMPKSGTSRGEAPVTPAAMLNQHVLCAEAACEAREGHQLV

SEQ ID NO: 986817 - protein, 111 aa, Homo sapiens
RIPDALRGEPETENHEADECMTSFYDIVQHCPLMPYVPGHHLVIFKGYTLELLTSDDPPSSASQSAGIIGVSHRTPAPLLFRIKCERLCVAEVVWSLLISPTFPPPSPTER

SEQ ID NO: 986818 - protein, 67 aa, Homo sapiens
LTTGEGQAGQEDRAAHRKPSTEWTDADYWFMKNRTSLIGQRSERQGFTNFFTEVHKQVSDIFIGGER

SEQ ID NO: 986819 - protein, 63 aa, Homo sapiens
MKVSPYALSALFSICLCASRSFNVLPGILSLTVLFRVQGRRECSCSLCAVYFVFPQRIAPASP

SEQ ID NO: 986820 - protein, 75 aa, Homo sapiens
PCLMMKTMVLLERVLLLYMFSGGDAAALERQVYMERYQCHMHGLVPIKTCPFEACTPLLISLSTLIYNGALRECL

SEQ ID NO: 986821 - protein, 122 aa, Homo sapiens
FPDALSVGEAGSSWPAHPAPPSHGHPPESVPTRLMTTAERGSGRTWDAWETWDAWGSGVWSPAPGPSVLPRAERPSLLLLGVLPPCPYVPAVEGRPSCGCPVGLQGHASRTQQLSPLPHRES

SEQ ID NO: 986822 - protein, 176 aa, Homo sapiens
CTVRRGQEDSDRAKSTKTACGGLIIQPTPSNLIPHVLPLCFPGPLQRYFQAHLLMVLMEAHQLLLQVLNLGLQVSLAQSEIIQDPAQAIDVGLHQLPHGQLCLVPAQGQGQQPRVKQNAELREGLKLAGTFQPSVKLMESCPRAYEDRSSPAPAPRVNSLGPEVIGSQFGIINVHN

SEQ ID NO: 986823 - protein, 140 aa, Homo sapiens
VPMHMLNTCKDIYQLGDGGAKFLMSAKCQPCQYALVKDGSLGPAVVTVFCTGTQPTNDTNILKTHFAAAVCFWRWGLTLSPRLECNGTVIAHCSLKLLGSSNPPTSASRVAGTTDACHHNWPIKKIFVFVETVVSIRCPS

SEQ ID NO: 986824 - protein, 74 aa, Homo sapiens
GWLDEEQQKSNASQFPHYSSPVPESLISLLMRVKSNAYVLNEIAQEYESRKIQTSCRKLIANAQASREKGPEPH

SEQ ID NO: 986825 - protein, 65 aa, Homo sapiens
VSSAPWDQAGSEGKPVPKALGTTLSEAELMVNPQCKRCLQACEEVWAAWGVSTQPSMSSTLAGRG

SEQ ID NO: 986826 - protein, 72 aa, Homo sapiens
RGRWELTKLSSPIGSCSSSEEQAARMGHCSSFEDSCEMPCSCSFYSVCGSGPWFPSWSCGGFPGLGSTLVFA

SEQ ID NO: 986827 - protein, 67 aa, Homo sapiens
MRSERTKKATPEVAHRAGAEAADCHLRCQQQEERFDAIEATVHKVHHEEAVVRRDVATYSEQLFYTS

SEQ ID NO: 986828 - protein, 36 aa, Homo sapiens
YTHGEPTHGGTYTHRGTYTHRGTYTQGNLHTQGNLH

SEQ ID NO: 986829 - protein, 73 aa, Homo sapiens
LQGQRERRQTLRARSGHRDPSGQQLFIKHLLRALGQILETQAEHDPSLCLELLVGWEAPLNQIISTHGKECGT

SEQ ID NO: 986830 - protein, 68 aa, Homo sapiens
SVALATTARAENQDSRLQVYNVPAHELRARVLDVEQIAHSYLRGHHPTGLDGRHRQPVDDTRIDTAIA

SEQ ID NO: 986831 - protein, 58 aa, Homo sapiens
RDPPEPLTLNDPACLPFECRVVTGPGQFKLSGVQQLCGGIWNRGGGGSAQFHHGAMTM

SEQ ID NO: 986832 - protein, 35 aa, Homo sapiens
RARYRCFRCPRSSVGMSVAGGISGTVAAVLTLPFD

SEQ ID NO: 986833 - protein, 76 aa, Homo sapiens
  misc_feature (56)..(56): Xaa can be any naturally occurring amino acid
EIAPLHSCLGDRARLHLLGDGHDLPQAQLQGYLILPVRQQQLYRPLVLTVLDEDVXAAVQERRICRLIQVLCYRDK

SEQ ID NO: 986834 - protein, 30 aa, Homo sapiens
MVALLSAVSSPGSEEDHSGGSAVSSGKGSR

SEQ ID NO: 986835 - protein, 56 aa, Homo sapiens
IEGTHPFRAVCDGEIELMVIADTRSGWVYGPPEIYVNHAVTWDDLRVCSDAVCITV

SEQ ID NO: 986836 - protein, 67 aa, Homo sapiens
ISRIPPPALNLTAATPHTGSSESEVRLMEDADYAMLPCRGRATPAQIVTHTIHNSKHRRRTVLLVLL

SEQ ID NO: 986837 - protein, 126 aa, Homo sapiens
YVVDAYCNYGVMIAMYHWRDEGSPSVSYKLITATGCPEQQGGSCLHIENEGASCLSCEISKGYPQRRGLIFTFTKVTMLNLFTKSSPFFFVTPSIFFLVEDFLKLSLPEHFTMSPDCQGTLAKRRA

SEQ ID NO: 986838 - protein, 72 aa, Homo sapiens
IPQFSCGRTGSLHILHAGSWEPCVKELSPPLPSLCWIPPEPRESYLAASSPLDVTLAPQCLSIPNHAAGDSS

SEQ ID NO: 986839 - protein, 66 aa, Homo sapiens
MSILESTASGRSTRQRAANATKYDDDVTKLLLKGCPFPGGPALGATFPIGFPLKEFCQLPHFPRSQ

SEQ ID NO: 986840 - protein, 64 aa, Homo sapiens
GTEKSEQEEEKEDLERVGYCLLEQPEAKLTVAERVHAGRIIHKLFVTSQRAAAMTPPEEELKRM

SEQ ID NO: 986841 - protein, 50 aa, Homo sapiens
MVPIQTELFIPAFLEYMARIQVEKVSVGQSTCASVPTVLHFFLALVLDLR

SEQ ID NO: 986842 - protein, 161 aa, Homo sapiens
MAMASDLRQNHGTNTLQRVAILSELCTDETKGQKLERVPTMRSQMGKWVETLSTWSSLDYRPQVISVLLGGKLCGPVMGPPCGGCWAVRGLILPEALPPWRLAQCAGYHPVALFWPALSPRLQGQNLEAERRTSQIAPGFPGASPVPLCHLEPGPASPWVP

SEQ ID NO: 986843 - protein, 33 aa, Homo sapiens
KEQCVEMYTDGQWNDRNCLYSRLSISSSSYACR

SEQ ID NO: 986844 - protein, 64 aa, Homo sapiens
  misc_feature (58)..(58): Xaa can be any naturally occurring amino acid
PYYSENLSVPREQSTGAHFCPSAGGRIKDVPEPQDPMAGPSMMGWAQGIVRRDQASSXVWDRCR

SEQ ID NO: 986845 - protein, 92 aa, Homo sapiens
DCVDGENKTDMFQTVDLFEGRDMAAEQRTLMALGSLTVTKNDGHYRGDPNWDMKKAHEHTREFTESQLQEVKACHWPSDGQQLRHFQAGMTG

SEQ ID NO: 986846 - protein, 36 aa, Homo sapiens
MPDNLLTTLDDTCDLLDPLVQETNKQPPQTVNPIGH

SEQ ID NO: 986847 - protein, 74 aa, Homo sapiens
VRSLNTQPIPRFPIPIPERQAFPSLSSLQKIRGLREKNYSRARCVTPCNPSTLEEAMIADHLRSRVRELAVDNI

SEQ ID NO: 986848 - protein, 70 aa, Homo sapiens
  misc_feature (7)..(7): Xaa can be any naturally occurring amino acid
QRQRVMXEVDSEEDVGLSHKDRAEAESSGRGNHPSGYQGGTSHLLKKCYCECQERRFGEMVFSIDFLRIF

SEQ ID NO: 986849 - protein, 114 aa, Homo sapiens
LKGGRRQKKMKEEEEERRRTDEEEREGGRNEEEEEEEEEEGGGDGQEKREEEEEEEEEEESKEKREDVAVAVAAMVVMVVVVAVAVAAVVAVMAVVAVAAKAVGLSFPIGSMSL

SEQ ID NO: 986850 - protein, 84 aa, Homo sapiens
IHALSRKVNYIHVLSVYSAWVSTFTSPQSAAIQLRSMIFLRIQGHGRYNSKFSLPPLGISSASQSRKLHAQALSSRASALLCPG

SEQ ID NO: 986851 - protein, 50 aa, Homo sapiens
SKLAGGGRRPVCQCSPKPPPGYLARHTAPPLVSQPHLLTSVQMRSSGPSW

SEQ ID NO: 986852 - protein, 33 aa, Homo sapiens
NDGPQLLPLGLCVAVRATPRLYMSGNTQVSMLV

SEQ ID NO: 986853 - protein, 53 aa, Homo sapiens
MASLNDGPQLNDGPQLLRRLRQESCLNLGGGDCSELEIAPLHSSVGNRLRLCL

SEQ ID NO: 986854 - protein, 40 aa, Homo sapiens
MVLLTGSASELREQSRNHNLWPGMVAHACGPSTLEAEDHR

SEQ ID NO: 986855 - protein, 105 aa, Homo sapiens
MIGPQTTADNSRTWERTQVQYASWSTIPSKWQQTLQNRELTVKRQIESKSKNNINEKTPQKSPFKGQQHAGHGWLTPIIPASTLVGRGRRITCGLEFETRLASYG

SEQ ID NO: 986856 - protein, 89 aa, Homo sapiens
RGPPTMVSADPVFDVWRILKEDMEMKRLNLYQLCVIGQDVGQLLHNSKASNMINSDSDQLTQRWDALVQRRADTLRPRETRGGTTQGPR

SEQ ID NO: 986857 - protein, 80 aa, Homo sapiens
TSFLLVVASAAVLACEPHQAADNRTTQVRRCELLLDWVPPPFQRSSLSVCCPSNITHIAIQAFRVGVSLQVRSPNTSWLE

SEQ ID NO: 986858 - protein, 57 aa, Homo sapiens
ISPERHWMTLMHGSSSPGVSLRIKLMLSVMNCWKKTLCETGLDWDPPGADPDNPPHA

SEQ ID NO: 986859 - protein, 42 aa, Homo sapiens
RGSPRINPYRLGLALLNDIERRWDRGQFGKEWEECEDWNRKK

SEQ ID NO: 986860 - protein, 67 aa, Homo sapiens
LVRFHTVFIPKTEKKKRFNWTYSSTWLGEASESWWEMKGTSYMAVATENEEEAKVEAPDKPIRSRET

SEQ ID NO: 986861 - protein, 118 aa, Homo sapiens
RLVVGNFIAIPAFSAEIGSTPGSTLHGLCPATAPLPHGSRLDRGRLPAVSLHAVLDTSQGRWSTAYCTGGAPVTCHCPALHSCVLSLKDVAECFYRKSEYFPTSGEPTNGHYSSGSHG

SEQ ID NO: 986862 - protein, 44 aa, Homo sapiens
QTPGRFSSCCEACQVKKTELCPPTLGGSLNFLFLVCFTVDKREV

SEQ ID NO: 986863 - protein, 53 aa, Homo sapiens
LFYGENKLTVYARIYLPRNVFEIDTYEQLRELDGKSSHLDTDIISLISKEMGV

SEQ ID NO: 986864 - protein, 54 aa, Homo sapiens
ALWYEQWKESGHQLLRLGLHARRRPDSVLSPTRGPWEKAQRPSALMGKWAHHYG

SEQ ID NO: 986865 - protein, 50 aa, Homo sapiens
CPGYTDVVEEQTDCWFGCGHQGVTHSVMRSGQEEAQPPNNHPTGPTSVLA

SEQ ID NO: 986866 - protein, 155 aa, Homo sapiens
MCAQLEGSGMIWLTAASASRVQAVLLPQPPSSWDYRCEPPHLAKFLLLKKKKNGHMPVVQLLGRLEWEDRWSPGVGGGMELWSHHCTPRGDRVRPSLKKIETIKGNYTEIREHKSTITEMKTLLEGSPIDWGRQKGPYLGQPSERDGSIGAHIME

SEQ ID NO: 986867 - protein, 62 aa, Homo sapiens
LLGLLSLDLAARHMLRVSGSHNHVTRMFTEYLNVLRDKNHPEELRKILIDPKMVELAPDNDL

SEQ ID NO: 986868 - protein, 43 aa, Homo sapiens
MTNHVRTCLDKSSEGETMEYQYEPAIPLLGVYPREMKTYVTQE

SEQ ID NO: 986869 - protein, 102 aa, Homo sapiens
  misc_feature (52)..(52): Xaa can be any naturally occurring amino acid
EVCGVTVLGWDVLMREQEVHDAGLTAQPGSVTRKRRWSMEVSAVSFQHFIFXLSHSLQKKELEQTKVKYLNEKGHLTSLTARHVAGPRAQRYCVVNWALERS

SEQ ID NO: 986870 - protein, 38 aa, Homo sapiens
RSYKHTLVVPNNNLIYCCSQKDMFFTCDFLPCTLDCNC

SEQ ID NO: 986871 - protein, 69 aa, Homo sapiens
ELPIIQQSSFVVIYPIELTARPQTYSLLTPDRPALSTVSARVNPHRMSIVGLMDQQNVVYAYYRILFRL

SEQ ID NO: 986872 - protein, 51 aa, Homo sapiens
TRNIWEIMKPCCQIYNMEIASKINFLMYKNQENRGRNAEACGLDIQYENTP

SEQ ID NO: 986873 - protein, 185 aa, Homo sapiens
ADTISNTTQIHTEHDIYQTDINHTQPYITTQIYSTHRHRITTQHTDPHHAQTRTDTDTNHTHTRTSGHGCRAHTDDTSNKQDADTQHTQTHTYHHTDTHHTHTPTHHHKNTHHTETHTPITTDTCHTHTHTSPQIPHTDTQSPPITQIPHTHHTDTHHTHITTWMHTTHTSLHHHTDTQHTHTHT

SEQ ID NO: 986874 - protein, 117 aa, Homo sapiens
DGTSLQDVINLTFKGYNNRVEAAKKQHISELQSFASTVRQTPATSPAHKNSKRLNRSCQGFLQNLLPEELATSARNLATRPRNACSPGFLLSRVSHLCRTPLKTGLFNSPGSHFQSP

SEQ ID NO: 986875 - protein, 61 aa, Homo sapiens
ELGPTSHIYIFFESTPYPTLVVYHPYEASSQNAWDAGTYFLFYTLDRLPSPTHSTLFVEVA

SEQ ID NO: 986876 - protein, 75 aa, Homo sapiens
  misc_feature (71)..(71): Xaa can be any naturally occurring amino acid
VQFIRVGLVNVLSILEEGDGRCVALQGPFQLMHSTLSLLLNPPSTLKLSVRGYRSFWGRNVPFLPLMGYTXTNVF

SEQ ID NO: 986877 - protein, 122 aa, Homo sapiens
MLMGGSPGQQESAYYCSLLISCCLLCRGWSLGSEHAEHTRRTGLWVTSLPAVFPGQVRRTLFITGLPRDARKETVESHFRDAYPTCEVVDVQLCYNVAKLIYLCKEKKKTEKSLTYYTNPQV

SEQ ID NO: 986878 - protein, 140 aa, Homo sapiens
MRSTEYAHFFKSLAWYSLVSLSQLGRRAGLRPYHRRDYGVAFQGRPHLIMYMNMCDGRRMHECHQCQKAFTTSASLVTAQVDIHSGEKPYECSDCGKAFNEPSALRSHARTHLKEKPFDCSQCGNAFRILSDLNIHMRVH

SEQ ID NO: 986879 - protein, 69 aa, Homo sapiens
RYRDGTHYLNPNHWDLSAECTVPGHLCLTFLEESSYIFHMRLYYYIHPHQLVHTEFQLSSHFSHTTFAL

SEQ ID NO: 986880 - protein, 84 aa, Homo sapiens
RATDVGILLSLRIRFTQVRYDSLSPVTGLYRLDCGAVSETQLGFAAMSSHLNRAIMFQKHMIKPSNTAIQGKLSSFHTLVNRYR

SEQ ID NO: 986881 - protein, 57 aa, Homo sapiens
MLVLSPGSLISLEGHDVSDTLAVTVRVQRDSFLRDILGGSRGSSRWYLSVRILEVMV

SEQ ID NO: 986882 - protein, 102 aa, Homo sapiens
SFNLNSDPEEPDGWRAGPVGCSDSAHYIPTLSFVPVTVPAYWQIHMERVKVCPGLTLCAKGCCCHPSDTGTSLITGPIEEIRALLAAIGGIHLLAVEYNLRV

SEQ ID NO: 986883 - protein, 63 aa, Homo sapiens
RGLPRRVYSQLHYLNHHHRDPLTQYSQLHYLNHHHRDPITQYSQLHFFNHHHQDHIPQYNLPV

SEQ ID NO: 986884 - protein, 72 aa, Homo sapiens
LYSIVEVYSTGSLYSTGRLYSTGRLYSTVQVVLHRAGCTPLPSSSWLVGGDLACPRPDFTLIELLWYSPQQF

SEQ ID NO: 986885 - protein, 32 aa, Homo sapiens
MALCAPLTGSVDRAVVSLGADTDAIRREDQSS

SEQ ID NO: 986886 - protein, 128 aa, Homo sapiens
REDNDRQVYSHQVIHVPEKGHDLIPFYGYIVFHGIYVPHFRSPAGNRQEFEVDSMSLLLYCNEHIAACVFIIEQFIFLGVYTQNGITGPNDSSAFSSLRNGHTVFHNELIYTPTDSVKPFLFQYNLPV

SEQ ID NO: 986887 - protein, 49 aa, Homo sapiens
QVLQHRQPLSYWMCFTSASSSLQVSFVANLGLGNIKQKEFWEAQFQLRY

SEQ ID NO: 986888 - protein, 73 aa, Homo sapiens
MRKELPVGLPSKQMPPSFLYERAEPSEPIKPLFFINYPASGMSLQQCENGLIAPQRSPNSSHFPGTTVGVIIQ

SEQ ID NO: 986889 - protein, 35 aa, Homo sapiens
CERGSYCEGGFLLRRRLLTAKAVLTAKAVLTAKRF

SEQ ID NO: 986890 - protein, 87 aa, Homo sapiens
SDGYLQTVPSICCYPGSKVASTFSAAPHSWYQFTVLVCFHTADKDISKTRQFTKERGLLDLQFHVDGGGLTIMVEGKKEQRQCSLTL

SEQ ID NO: 986891 - protein, 53 aa, Homo sapiens
IAVRLINAVTASTPLTIQRRSSQQVTLLSVKPRTPPWQNTEEGNLLAGAALDA

SEQ ID NO: 986892 - protein, 37 aa, Homo sapiens
VGTDCINAASDCINAACWKLKCEGDKSAGHQGAALDG

SEQ ID NO: 986893 - protein, 126 aa, Homo sapiens
TGRLYWFPLCSALARGRGKADSNGGGIPASVASRQAIQLTDLGLYTPTRRNTDADTRLAFGTHTGHVLKKAGQPVRGPGIKGGEWGKGTHPSEGEEEGLGCGRSREMATRTQSSLVPEIPQYNLPV

SEQ ID NO: 986894 - protein, 55 aa, Homo sapiens
FTVLVYVTGTHTSVCSTCVGGFIDLCIYLFRNGLALSPRLEYSGVITVHCSLYLP

SEQ ID NO: 986895 - protein, 40 aa, Homo sapiens
VGPTYQCRLTCISAADHPTPPTASNAAKRDGGGIRIAPLE

SEQ ID NO: 986896 - protein, 98 aa, Homo sapiens
VSAMRRLTLVRRITRVMTVVHPVQFSPGKPGIQNSKIEPPKKQQRERDAAIVPSSPRCTGKSTSGAISTTKQDTVETFYFDTWWISFPKTWLGGHRRA

SEQ ID NO: 986897 - protein, 95 aa, Homo sapiens
DYGGSPWLHVIIAFPTSYKVVITLWIVNLRVCVLKTIFWSEMDMMDPLMYSRKPGGPTAVDRKVLRSICMHTKKRVCSFRGNKIGLKDVITLRRH

SEQ ID NO: 986898 - protein, 37 aa, Homo sapiens
AVKDGDYKRETLVDGDIVVMIGGRTGRDGIQGASGSS

SEQ ID NO: 986899 - protein, 102 aa, Homo sapiens
ACFQPERTTVLIVVHVAEIHMHLVALGFAVCAQRVVTEIYPLRGCTPAAASAAHTPVGVSIPVLRSARFWIAGNLWGQRAAISPRSPSPGLSDRSRLVRAGK

SEQ ID NO: 986900 - protein, 113 aa, Homo sapiens
TTIYDPRLTTAEGWEGDKDKKLQIGCSAYCSGDGSTKISQITTKELTHVTKKPNTTCTPVTYGKIKEEDAALPSLHTLVILRKMKTKKKEAKFDILKFNRTRRLRIQPQNSSR

SEQ ID NO: 986901 - protein, 79 aa, Homo sapiens
DQKGPEGQLQAAQAASACQGRPDKKAELETAGGVCVRLEEHGAWPHPLGNNQGPHPPPEQGPLFEEDTEGRGPRPLSSH

SEQ ID NO: 986902 - protein, 70 aa, Homo sapiens
WVIMTHARTMGAAIPETEQTGPASEDMDIGLINLFHGKQTISLVDVFLTSQQFCSASDFVSSTMSPRVEP

SEQ ID NO: 986903 - protein, 75 aa, Homo sapiens
VRHAGLSHDAGISHDAGMARPLSLHVAAPHGLSRSVADFLDGGSGLSNVQKQNLPGLPKAYTWNWPSMTSAPSIH

SEQ ID NO: 986904 - protein, 82 aa, Homo sapiens
DISKVIQCAYDISQGMPSSWITSTPAEKKQWPLSPHPHLHPRTSLDIGAGPLQTLIPTPTEPLAQVPLVHDTLPGSQVALVT

SEQ ID NO: 986905 - protein, 99 aa, Homo sapiens
WLGPFAELAVVVTCMEDKNSCPKLLNFQTSSTSSAEANKKPSAQQRGKEPMDIPGTLSPCPQPPHRKHVVRTADVNSVLQTPSFRQILGNGLRARSSQA

SEQ ID NO: 986906 - protein, 57 aa, Homo sapiens
KKRASAVYSPPPLMNIAVVVGYLENVIMEYEFQILTEKFLDKCYLEFEDTEENKLTY

SEQ ID NO: 986907 - protein, 53 aa, Homo sapiens
MDTCTQKFWMLAERSITTQCYSHCTSMACGNISMTSHLFKIQKAGGLSYTIRV

SEQ ID NO: 986908 - protein, 110 aa, Homo sapiens
MDKHSVSWMRTTCSSRLVYRSCVVQKLSFLSIPLTGDNTGKQALWECATVEQHSRSVVFHLTPCPAYVHKVKHGGSSCLYDLSTVIFLCSPCSCVLARSLCWMCTVAFLG

SEQ ID NO: 986909 - protein, 62 aa, Homo sapiens
RAPVRAQVSVPTRETQESFRTISLLSPHSSPWVSFCLIHSRRLSSVYRQLLIFISSPDLSKP

SEQ ID NO: 986910 - protein, 92 aa, Homo sapiens
RAGPHPTVSRCANTSGDLVIHFMEEIDKEISEMKLSVNASSLTYPKEMKLKCEQIFIYKYVNCEVISSHGKLETFQISNNGGMCLMTYCTTI

SEQ ID NO: 986911 - protein, 33 aa, Homo sapiens
VATRTAHCFGVIPCFLSYHVILEFGKMAQLLGS

SEQ ID NO: 986912 - protein, 40 aa, Homo sapiens
MLGTGGGQGNKQLIEVCQQVNCGAEQVLPGLVKTMQDIMG

SEQ ID NO: 986913 - protein, 33 aa, Homo sapiens
MPQTPARSPGAAGGFVAVTELIRSNDIVLIGFA

SEQ ID NO: 986914 - protein, 105 aa, Homo sapiens
  misc_feature (59)..(59): Xaa can be any naturally occurring amino acid
VYSPEISRPFGHSRISREVRYLTDAAVRTLVRAETSAEFFASPQRYVLGASADQMEAMXDRWRAVTGRVLALSPNDEGENPVVGQFTQMSMEPHLSMYRQLAQNF

SEQ ID NO: 986915 - protein, 55 aa, Homo sapiens
CVLGMKALGEIDNFSVIEQMVGTTNEHQPDSETVDIYQQLVSIFINISRSLTDTY

SEQ ID NO: 986916 - protein, 111 aa, Homo sapiens
  misc_feature (3)..(3): Xaa can be any naturally occurring amino acid
RIXRVVVWVEVETLRGTAVEESWKAPCCALGGCQCLLDGDEEEDCEITHTGTAVTAADIAAKTVFHLPGTVSADTTGADTIGADMIGADAVAQTVSVQPRLVQPQLAKPRL

SEQ ID NO: 986917 - protein, 33 aa, Homo sapiens
  misc_feature (1)..(1): Xaa can be any naturally occurring amino acid
XKEGRKEGTKEGRKEGKGKGRKEREEDDEEEED

SEQ ID NO: 986918 - protein, 47 aa, Homo sapiens
  misc_feature (3)..(3): Xaa can be any naturally occurring amino acid
GSXALANDNTSMGVRRALTAGATLPTPENKAAVWEKIFAVDGDVASN

SEQ ID NO: 986919 - protein, 64 aa, Homo sapiens
MSECTEEADDGPDKGKDAEAAEATAYGALKAENNEGGSGRATTAKSSGTRQDSDSSATCSANQV

SEQ ID NO: 986920 - protein, 79 aa, Homo sapiens
KIVKNILEADEEALQAAYDALAVADPFSFGPDTYIPKLAPRLASQYDSKDPGVLVALITMNFLTLQPGEAIYIPADGIH

SEQ ID NO: 986921 - protein, 60 aa, Homo sapiens
LTRYEAREDAADCDRREQQACGDRATTDDDGADRGEEHHGLAEGHRDEVDDEAHADVGRA

SEQ ID NO: 986922 - protein, 78 aa, Homo sapiens
TIAVQQAVGTPARILRRSFLMQMIVTILPAQTMSLVVGVLAGWAINAAIGSTDAKQSFDPTIAVLPVAMWVVSVLAIM

SEQ ID NO: 986923 - protein, 34 aa, Homo sapiens
MPLPLAGSSCARASTRPITFASRRSQSSSVAPAM

SEQ ID NO: 986924 - protein, 36 aa, Homo sapiens
MRRSSRTPASSGVEHSRALTPVAIRTISSMRRRVSD

SEQ ID NO: 986925 - protein, 74 aa, Homo sapiens
LGTAADAALRADENPAPRPAPLHRPGNAQNRLIRLRLLAFPSHDFGVMGNQRPDHIARHFVAHTGPVKETRRRR

SEQ ID NO: 986926 - protein, 41 aa, Homo sapiens
MSEREIMPLYSSLETERGLRSQTNYKNLSLRNKCMGDPLAV

SEQ ID NO: 986927 - protein, 116 aa, Homo sapiens
MNANWQDSSFSIKISKLLPAHIHFLPASTACTHIPLFSNTKPLGSDPAPSFLHDSGAPAILLPTPASPSSPFSKHLSTISTLTSFRIFHLTIKNRPSMVAHTCCPSTLGGQCGQIA

SEQ ID NO: 986928 - protein, 123 aa, Homo sapiens
QDAIKVYCNMETGETSVYAHSVQMWTRRTGSISKNPKEQMRHVWFGVEHDTMCISSIEYGETGLLTLPLCAYQLTFLRLMSTEDSQNIIYHCKGNRVAYMDQQTGNLTEGPVPPGLRRDRDQC

SEQ ID NO: 986929 - protein, 52 aa, Homo sapiens
MKMEAELVPSEVLMHQAIQTIEFCLGCVSNTGSYLRLWALSLAHAQLSGYSV

SEQ ID NO: 986930 - protein, 73 aa, Homo sapiens
  misc_feature (62)..(62): Xaa can be any naturally occurring amino acid
RHRQLGVGQAQGPQAQVEAVLETLPRQNSMVLMAWCMSTFGGDVGSASFFDHPWPPCLFLIXSSSPVQRECCS

SEQ ID NO: 986931 - protein, 68 aa, Homo sapiens
NRESVYHGKVDVQGYWYDATWLLSDEKMLSMSGRKRKSKSTMRYFLMPCQNDYQLKRPVVASIGKDVD

SEQ ID NO: 986932 - protein, 37 aa, Homo sapiens
MDRGVTGTVAVDGTYGWSVGPWFIDVALAAVGPTDNH

SEQ ID NO: 986933 - protein, 66 aa, Homo sapiens
AAAGCWAGRTWLAKSGPTIAGLLGATYLAALGASHGLAKKTGAWPAVITVTAATCTACHFLCDTKA

SEQ ID NO: 986934 - protein, 47 aa, Homo sapiens
LIGQVDTKPYLGAVTRPLAKMAARGLVGLAERSADAVVAATPTVGER

SEQ ID NO: 986935 - protein, 52 aa, Homo sapiens
DPRELQTGKPVRSCCWINQVSNEKAGSSALACERDRDGIWEDTELSVEAQGG

SEQ ID NO: 986936 - protein, 128 aa, Homo sapiens
  misc_feature (59)..(59): Xaa can be any naturally occurring amino acid
VFTTAVHASLFEIRRHVSTALPPNIVKLEPAGLLWMILYPTMLACLLVDEYYTTAAHAXLDKMRRHLSTALDLLKIADLEPGRRVFTTAVQASLCKFRRHVSTALTSKYIYSWSLGDSIGYSTTPACM

SEQ ID NO: 986937 - protein, 53 aa, Homo sapiens
RTKGEGPPKGEGPTKGEGPTKGKGPTKGDGHNKGDGPTKGEGTPKGDGPQKGE

SEQ ID NO: 986938 - protein, 72 aa, Homo sapiens
IDPPTGAITAGGPTSLFPDALNPQLYLTAWYGKPTVETGVPSNIYTLDTTGLTQVTNGKDKARFVLSPGQRY

SEQ ID NO: 986939 - protein, 39 aa, Homo sapiens
IDLTTKNLGCPWREHVGLYTENGNQESLETVSMHHALSQ

SEQ ID NO: 986940 - protein, 42 aa, Homo sapiens
TENEELFWALRGAAESFGVVTNFYLRTQAAPEILTYFQFQWG

SEQ ID NO: 986941 - protein, 35 aa, Homo sapiens
FYDVGVVHSPKRDGLTKLVRIEGANLDRIKRSNIK

SEQ ID NO: 986942 - protein, 49 aa, Homo sapiens
SASAGFTGATVCAKTVSPAPTARASASARVSCAANRSPVSARRSTRTSK

SEQ ID NO: 986943 - protein, 106 aa, Homo sapiens
DHRPQLHAFGQRLQGDLDLHSAGVGRHGGRHFANFALGLDAGVIQQADGDRRIRRRLHQQRLIDVEHRIALAVLGQAENRHGGLHHLAHFRLARSNHTGRVGDQGG

SEQ ID NO: 986944 - protein, 37 aa, Homo sapiens
RGFRAYATALTAVYRLYQWIPPPPCGKRRSVNAVRQG

SEQ ID NO: 986945 - protein, 173 aa, Homo sapiens
SVRRRRRCCSDGVFDVGLMRSGSSSFNIQKPMPEFRYLHVVVKFCIFISKLEVFVFGCTGPSLTEYHYYFHVVGYSETERIVVCMCRVRRKKERNETGSCRSPIKADVYTSETAPPAFSVLAVKPGPIVMFVLFTSNWTWGLGLRQLVSTPPALGPCLRLQPERCGPDPGAVA

SEQ ID NO: 986946 - protein, 33 aa, Homo sapiens
QNESGSVDTSGERVTGLVGDRPAGGQLGCVERI

SEQ ID NO: 986947 - protein, 110 aa, Homo sapiens
LLAGCLRAKDLADLLASIWYFRGSLVHVITHHVTPWTQLHIAVDNHPCQLLLDQPRVVNFLPKLGTISGMIYRLSNDASHGTCRVRRHAKPSIVEDVHGKLEGTMRVSVE

SEQ ID NO: 986948 - protein, 125 aa, Homo sapiens
RFDETLISISMTRSICGQIKSRVSGTLELGAKANGIHQCLLSQTLANEVDDEILKELFSQFGKTLGVHASKHPSGKSKGFGFVSYDNTEDAHKAVESRMNWKRYTWYNHICEAVHTTKVQRLAEL

SEQ ID NO: 986949 - protein, 97 aa, Homo sapiens
GEVIATAVVQGPAVRKKAKEALVVASGYACDAHCFQGHPRLEVPVSIGGSLETSSFPHPSNAEGCGAPTGLSVVYGTTGTDHSGTGCQWPVVNGQEP

SEQ ID NO: 986950 - protein, 97 aa, Homo sapiens
TFDDTHLIDRNIFRVMYGGWYNSRAQLIVHLLQPLYKTFGHYTDVKATLMLQKRYNEAAIRSLTQGLDNVHKQRVAQVLNDPKNIDKQQEPLESPSN

SEQ ID NO: 986951 - protein, 35 aa, Homo sapiens
SCDDYIALSKELDVPVRMRVGTRLWLGDANAYRVT

SEQ ID NO: 986952 - protein, 104 aa, Homo sapiens
MTASRSHTYSLVGQIEEYSERIHVVIINNVVATEETGDEAERGERKGLGDVTHCLITSFCDYKIPPNETCIIFMIENTRKSYLFRLSGVIKCDRMSSFIVWSQL

SEQ ID NO: 986953 - protein, 65 aa, Homo sapiens
MLYGTVACTEVGPPIGLLNKTSPSKVASLRRTPARPPEAFLSRAFNGIPPATIILYFEHYMGLPM

SEQ ID NO: 986954 - protein, 49 aa, Homo sapiens
SIVYINTNNSRLTVIDLAPCDVVCPTPGIRLRLQPCLLPVNSLHPYMAH

SEQ ID NO: 986955 - protein, 63 aa, Homo sapiens
PDRPLQRPLVNTSPLQRYKPSAATYALRSSNPRAMTLSGTSAAALTRDRCSAHPALQRAAKTA

SEQ ID NO: 986956 - protein, 130 aa, Homo sapiens
TTQYAKANAHTDRSGPRRTCSASLQPMSDGWALTPSTDIMSCDMGPDGTPPPRVSLATRYYGKDYISLNVWYLRSFAPAADTVAQITLRFFYATGNAEDFRTYLEGECLELLRKYLEIGKDTLQRADPPK

SEQ ID NO: 986957 - protein, 40 aa, Homo sapiens
  misc_feature (3)..(3): Xaa can be any naturally occurring amino acid
GSXRFHHPYHQQVAAMLDGMTSPFILSVHSFTPRLASDPA

SEQ ID NO: 986958 - protein, 64 aa, Homo sapiens
VSHWVTVLTAKRFFMTEGDSCCVVAVRRYSEIRDEGELPPGSGAVGREMTKEEELQLRKEKKQQ

SEQ ID NO: 986959 - protein, 48 aa, Homo sapiens
MYITRGSLYVLPSTALTQLTRVIISRFCLVYRARSSLSHGSSRIVLAV

SEQ ID NO: 986960 - protein, 85 aa, Homo sapiens
DYGGSSSASEGLPMGPWVGTTGRTLDTLQSHRGDAQVVLEQQLFPLEGVQVKVTPEASLKAVSVHVRVASEPKNKSLRAGRCNDS

SEQ ID NO: 986961 - protein, 83 aa, Homo sapiens
TSISAVDYGSLANSLHLEDSFTWYNNKLTRVPGGLAEHKYIQVVYLHNNDISVVGSSDFCPPGHNTKKASYSVMILFINPVQY

SEQ ID NO: 986962 - protein, 63 aa, Homo sapiens
LCKRLSTCDVRQEGKTYSTKGALTARREGPPPQQQAPPPPPAVQAPGRNTCIFSSSSSTRRFA

SEQ ID NO: 986963 - protein, 37 aa, Homo sapiens
QVSGGQLGDDLMDRDAYLKLTPSDDHELTTLESVRPR

SEQ ID NO: 986964 - protein, 66 aa, Homo sapiens
VLHHTGEMWRALENAALPCNLAAAFYCNFNDTGNQAVRWKAIKKFYNRLPKFLRKPFAVAVVAPEE

SEQ ID NO: 986965 - protein, 60 aa, Homo sapiens
VADYGGRWLTTGEGGDYGGRWLTTGKVADYGGRWLTTGEGGWLRGKVADYGGRRLWHGVK

SEQ ID NO: 986966 - protein, 49 aa, Homo sapiens
NRHALRRQTHRDLLPTRGADPNASKQSDGRQTVPMTAACSIAGVESSGI

SEQ ID NO: 986967 - protein, 50 aa, Homo sapiens
ADAVVVLEIPITNYDIQTVPVFGRKAPSSWTLCPFEKFPSFFEHFLALFH

SEQ ID NO: 986968 - protein, 40 aa, Homo sapiens
RRNGHPIFNNAQGTDRGFGMPWLFPVLPEELSAAFLCYVE

SEQ ID NO: 986969 - protein, 37 aa, Homo sapiens
PDTRQHEGDGVGGVEGDGVGGVEGTGQGTVTSCRASR

SEQ ID NO: 986970 - protein, 63 aa, Homo sapiens
MIRKKQTKKGNRLVCDGLDACSTSERADALASIFIIQCPLPLHSSGAPCHSHDAVTAWSKQNL

SEQ ID NO: 986971 - protein, 89 aa, Homo sapiens
MAASVSGKEVVDSKGRMCTICYQGLAVSLLVVCVCQRDEETTEEHLGVLISLSLELIPISRDTVEKCCHYTDQDKETPISVQLESLRRT

SEQ ID NO: 986972 - protein, 129 aa, Homo sapiens
PTSPKGNSHILGVEIRCSAFTWHVTGLPGTGDTVWAAGSVGCFVVYRSPEASWTGEKLLAVTFCPIALQVTVRWLLGEKALEHACDDHVPILEGAVGLVGDAEETVTTVPWPQTSKASGVQPLLYPVVL

SEQ ID NO: 986973 - protein, 107 aa, Homo sapiens
DPGPMHSLSCAGSLVDMRGGCGRPSSSQYAYAMHRHDAVCLCRNEVRLLQVTKGRAGTTRCSQSHTRHLSHTLQAVRDTSEPVGTVTACSLSVVPPFLSVRRACLVR

SEQ ID NO: 986974 - protein, 42 aa, Homo sapiens
PDYRQLGVGQAQAPQAQEEAVLETAVPGSNSDRCEMVLGAMS

SEQ ID NO: 986975 - protein, 112 aa, Homo sapiens
TDISQITKTHHFQKTLPLILEFQYLTQCYELTWHDLYIILSATLSPVRRGPYLDPSSGACQYNSSPGSCPAYWCQAVPNQDPTRRSRYAGIPGPSTRHNHHCRLLMLCFPPL

SEQ ID NO: 986976 - protein, 123 aa, Homo sapiens
PVLVPTGVFSRDYYRCHVMVVTRRKTVGPGQGQVALVPRWPSVPGGRVHRLLRKGNYAERVGAGAPVYMAAVLEYLTAEILELAGNAARDNKKTRIIPRHLQLAIRNDEELNKLSGYSGGYRA

SEQ ID NO: 986977 - protein, 50 aa, Homo sapiens
SRSYWTFSERESRFTIRFFTLAASSPIFSSLIYIAFILVQVQVALCLKSQ

SEQ ID NO: 986978 - protein, 61 aa, Homo sapiens
MYQLSYRLEYKLHNIRDFSLIYHCNPRAQNKPAPHYVEYLFVEQFKKTQVTLQITHGVLIH

SEQ ID NO: 986979 - protein, 97 aa, Homo sapiens
GPSGNYSRKLNAQIILPTFIIACVFIRYRCCDTEDYEYMELASGAEVMEGLPEARIHGPEREMGDQRTADLQRAIAGHKEGTSVCYGLIRAWGLYTG

SEQ ID NO: 986980 - protein, 43 aa, Homo sapiens
MSLKIRCNTNLQGFPHHKKEVMLHVLAVDDVEKLKRIQRCCQN

SEQ ID NO: 986981 - protein, 85 aa, Homo sapiens
  misc_feature (67)..(67): Xaa can be any naturally occurring amino acid
  misc_feature (69)..(69): Xaa can be any naturally occurring amino acid
  misc_feature (81)..(81): Xaa can be any naturally occurring amino acid
MPDRNWVRDCMESRAWWLTPVIPALWEAEAGGSQGQEFETSLVNMAKSHLYQKYNKLARHVWQAPAXPXPLRRLEAGEITXEPGR

SEQ ID NO: 986982 - protein, 76 aa, Homo sapiens
GPAVVPLLPAQCLPMPRPQDTSAMCSVRGGLSNGSREECYCGHVFWDQVSTVTQHHVTQQADTWRSTVSALPWTMG

SEQ ID NO: 986983 - protein, 54 aa, Homo sapiens
GASMDPVGLLDSDGLTTRGVWFGFWPGFSLIIVVIGIDGASERASGTALAFVLL

SEQ ID NO: 986984 - protein, 67 aa, Homo sapiens
IRHCRALRGRFHPERMISHDTFRASAHSPSTRHLHPSADDNIKTPAPSVCGGRFHPQSDDNLKIPSE

SEQ ID NO: 986985 - protein, 50 aa, Homo sapiens
DPDALSVVVIGSASRFQVSELPVLPLVSCRRVLVDSWQSTHIGSRPHSIM

SEQ ID NO: 986986 - protein, 108 aa, Homo sapiens
MLEDIRMTGPVVTSYLSGFHTLGSYIIPCDTEYSEGPVVIGHLAPGTDREALIIYPPQVGCVLNLRFTGYGYSILILHGVGVVAGDEGFGWLCIDCDRRDCGPIEASV

SEQ ID NO: 986987 - protein, 79 aa, Homo sapiens
SALESHDNSTGTSLVRTPPWHRGECTPHLQAVRRWREQPRASQAWAATLLLIPGPSCTVFLPWSRSLLGLGSETRGNAS

SEQ ID NO: 986988 - protein, 83 aa, Homo sapiens
YSALFRGAPGCAGVCTQVGGQIPSMAELMNLIYRKPTLLPHGLQHGKRLSCCVSSHGSPLASFHGRSRSPTTVPGSLPAPSSS

SEQ ID NO: 986989 - protein, 38 aa, Homo sapiens
MCIPRGRVSLANVLSSRTCYPRFIEFLHFDRITRSRRG

SEQ ID NO: 986990 - protein, 71 aa, Homo sapiens
MMVILQPSGVSGCGMAAGEDRTLPGGALACGHTQGWVCACCWASSELCGPSLSIPARPCSSLSVLVHLTHL

SEQ ID NO: 986991 - protein, 75 aa, Homo sapiens
  misc_feature (61)..(61): Xaa can be any naturally occurring amino acid
PRWSDDHALLEEQSKQQSNEHLAAMFASQANVVGPWIQTKMEEIWAHLLLSLNRDPGRTSXSHLEAVCNAASVVL

SEQ ID NO: 986992 - protein, 42 aa, Homo sapiens
SRTCYPCTGTDSRLLVSASQDGKLIIWDSYTTNKVHAIPSAL

SEQ ID NO: 986993 - protein, 38 aa, Homo sapiens
WTLRIPSDVYRQTGLANRVLDGWLLALGDPLGRITRSR

SEQ ID NO: 986994 - protein, 114 aa, Homo sapiens
YKAMKEKTSEFIGKTSGTKPVAHIDHISADTLGSAEFAEEVNLNGSGKLLKIYRLCQSWKNSLQLLFEVLTNWCLQKLSAPFMMPYVSSLFSEERGLLLQEVMLQKIELALRIH

SEQ ID NO: 986995 - protein, 101 aa, Homo sapiens
FEIRASGPACRRRASVANAECICEREGHPAGATDGALGSPHPPVWHEPPQPVINWTVRYLLGISGPSFPPISGLKSPEVVFPALKPLCLGHLCVLPATVIR

SEQ ID NO: 986996 - protein, 47 aa, Homo sapiens
EYYWGGTELCPREPVWLGPRSGLNTVLASALWAPPRLLQPWKALCPS

SEQ ID NO: 986997 - protein, 34 aa, Homo sapiens
VKGGGEDGPLPTTVVSVSLELEATVTHKPRSAHK

SEQ ID NO: 986998 - protein, 119 aa, Homo sapiens
TALRNLVYPGSEWLCNSLMVLAMVGDAAAGSLTDVSMVELGVLESEDERLLYELVVALQLINLWLVVDDAPLILPQVVSWSSRVPCIFNGESPISSILAWIQGLDDIRLGSKLVEKPLI

SEQ ID NO: 986999 - protein, 35 aa, Homo sapiens
RGMKFFSSSADDSSFLLYIDQKEKARVITEEGEEF

SEQ ID NO: 987000 - protein, 55 aa, Homo sapiens
VDRCVWVERGLPGPLVSVVDLVAVVSLAQIVLLVPRSPAGERGSPGPAGPKGSPG

SEQ ID NO: 987001 - protein, 82 aa, Homo sapiens
MTGFRLRQADENKERKNENEEQNLREIRDYIKRPNLTTDWGYLENDVGDMEPQLEKHTSVISSTENFPKPSQDRPQPRFNRT

SEQ ID NO: 987002 - protein, 104 aa, Homo sapiens
MGQMDSLRAEDAAVFYCAVCSNFSCAIFDYWGQGTQVTVSSASPTSPKVFPLSLCSTQPDRNVVIACLVQGFFPQEPLSVTWSESGQGVTARNFPPSQDASGGL

SEQ ID NO: 987003 - protein, 85 aa, Homo sapiens
MSKSCAYLVRHFYFLQKGYTHRQFGHESTPNKGDRVIYNLTHLPYCCFRFPLAGTGPHILYWSRLISNLELLKEAKVEGNKGRRK

SEQ ID NO: 987004 - protein, 41 aa, Homo sapiens
VDVLHAEGNKRWAVWTLQMMVSDGLACTNAHYVVLWCFSCI

SEQ ID NO: 987005 - protein, 79 aa, Homo sapiens
EEGSVVGSYLPLVVSAGAETHATVLKAQFPSVAVEEVGVITLDNLPQFCGPEHETVISMGIADPRRPPSRLIISHQGCL

SEQ ID NO: 987006 - protein, 68 aa, Homo sapiens
  misc_feature (34)..(34): Xaa can be any naturally occurring amino acid
SRTYYHDKELTFANTKSSPPAQRPLKEEEDDGAXPLVCDLCLSVCAGLTDTHESYSEKGTHEKQRFRQ

SEQ ID NO: 987007 - protein, 47 aa, Homo sapiens
MGDANITTQVPQIQKEIMRVIGTQFTQTEGAPALVPPLLPQGPSDPL

SEQ ID NO: 987008 - protein, 39 aa, Homo sapiens
DRHLHSRDHAVWNIKTISTMKVMQFQAMKRKASSPVHPS

SEQ ID NO: 987009 - protein, 41 aa, Homo sapiens
MPITHILASIGPQSRRSQSMQQPPKPFSQQHTTPTPWRDED

SEQ ID NO: 987010 - protein, 35 aa, Homo sapiens
IIKCLCQGPKLPTYKVLPLTGSKTSASEQASGKDE

SEQ ID NO: 987011 - protein, 101 aa, Homo sapiens
AVLSRHSLQQCRRMVDAALATCSPEEARTVVLELADPSVEVLVSCYMILNPLKPPQRGLYACSAGEDNGAMTKTAVVTGASSGISAVTVPRFNGRWLTVIC

SEQ ID NO: 987012 - protein, 104 aa, Homo sapiens
SGAVAGSRTPIDEARRQNRRIATVVSWVPEATSARSRVSMLVLPPVPMMSRDVSFRPPMCSGSSEDVAAFLSQLTIVSSTFVTSVSSVIIRLVPPSRLDDSSHR

SEQ ID NO: 987013 - protein, 33 aa, Homo sapiens
ETPAACCMLWVTITTVKRSLSSLTRSSMARVEI

SEQ ID NO: 987014 - protein, 56 aa, Homo sapiens
MTADASQIGGREVNFRGSRCGRGAGVRVEHTNHGEGNGLRTVSGGVVDDDLRSDPG

SEQ ID NO: 987015 - protein, 39 aa, Homo sapiens
MSGRGAAGGARGRGGKFKKYTRGGKHNLQSLSLAATGST

SEQ ID NO: 987016 - protein, 97 aa, Homo sapiens
CYLRYVIDPYQLAEFEAYAKVWIPLVEKFGGQHHGYFLPSEGANNIALAMFTFPSLAAYEDYRERSKTDAECIAAFKLAEDNRCILSYERSFFRPVF

SEQ ID NO: 987017 - protein, 97 aa, Homo sapiens
MPRQTDDLECPKPQDIYVPGRMNESNRTYFEASKDSVTSGALVGGQKLPAPPACLPSSALASPIPVLLSLPVSPPHTHTVALCLVLSVPEPPGSDAL

SEQ ID NO: 987018 - protein, 66 aa, Homo sapiens
SRSGGGDIVDAAVKATEPRKAETPPCWCSAHTAKSLALCLILSLEGILPHCVPSLVGNVFGPKDNE

SEQ ID NO: 987019 - protein, 102 aa, Homo sapiens
AGRSGSARDSRVTSPLFHELALSSRLQPWMSTGRARGSNHFPVKTSQKQATTTTTTPFLRFSSRVNVFRKKRIPIIPPHSVCISASRSLLGPLLCPRCSVSH

SEQ ID NO: 987020 - protein, 64 aa, Homo sapiens
IATANQPAIDKEWNDCDEPLLGRGDCMTAEGHWEAALADRTAKQATKDDEDGKEVVPPGYTVVD

SEQ ID NO: 987021 - protein, 42 aa, Homo sapiens
MTQACMHACMLSVFTNAVHASLYKFRQTREHRADLQISLSWS

SEQ ID NO: 987022 - protein, 103 aa, Homo sapiens
MVSNLGAQVDRGESSDLEVQTDGAASASQVAGITGACHHTQLILVFWVEMGFHHVVQAGLQLLTLSDLPTLGSQSAGFTGLATAPGQLNIFLDYGRQVGYSRE

SEQ ID NO: 987023 - protein, 34 aa, Homo sapiens
MYPTWFTFIKTKASLGETLATDIHVKMSSEFRTP

SEQ ID NO: 987024 - protein, 33 aa, Homo sapiens
EWTHPHSMTAGGKEETFLYSPPITVLPTHSCTP

SEQ ID NO: 987025 - protein, 143 aa, Homo sapiens
EQDEEDQEAEEYACVQEADCEDLRGAVWGWPYLLTVSMTVAVTDPNVPGIGVRAFVCPTGDPTRWASDGLYTSRPGAIGLCSGRVRRGWARSTDARSRCYTKMQFSSVPFTSIVSQSRSRMEPSRGWVLPVWHWSCPQMASLE

SEQ ID NO: 987026 - protein, 67 aa, Homo sapiens
MRELPRPALGKFKANSISSLAVQPAGGHRKVVLKLLIKLLTSGYEERGDKTNQGISELNGQFSGMGK

SEQ ID NO: 987027 - protein, 84 aa, Homo sapiens
MITLLTQVDRHGGAVQEPLRQFGERLQTARKARMKDKVGKLTVKMTGVMVVTLLPVLLILTAGPGFLGVIRMLARMKEDIDDLD

SEQ ID NO: 987028 - protein, 37 aa, Homo sapiens
DDVEVMFDPVATDHRWQRQGYLTVESQHPVGKRAYRM

SEQ ID NO: 987029 - protein, 69 aa, Homo sapiens
VAGWNYGFSEEGNLTPDKLHERGIGSYLLSESCRQKGSEKARGVMQPWDAVRTDLSNLAKLTGNEPTGK

SEQ ID NO: 987030 - protein, 45 aa, Homo sapiens
TRRAYDLYAARKAGLRCEAADFLSEYATEDMDLAWNRFDGGVHAG

SEQ ID NO: 987031 - protein, 64 aa, Homo sapiens
IVLGPSLIFWNNSQKWKYKAEGLVWWLKPVIPALWETEVADGLSPGVWDNMVKPHLYKQYNLPV

SEQ ID NO: 987032 - protein, 36 aa, Homo sapiens
PGTLSLTLPGDNNASSKGYGGADALLPDKTVGEGRA

SEQ ID NO: 987033 - protein, 55 aa, Homo sapiens
EEECQRSRYCSTTGRQEIGGTPSAAVDHGHEANSSDHLSELAQQTGELGYQRGLL

SEQ ID NO: 987034 - protein, 51 aa, Homo sapiens
MAQQAIGTAIKNAKAKSGEIVMMDVTNGEVLAMASMPTFDSNKPGKAKESQ

SEQ ID NO: 987035 - protein, 41 aa, Homo sapiens
PIIDIMRCPGNDMSLVHAALRCAGAPTSRCFRRGSESPMPR

SEQ ID NO: 987036 - protein, 34 aa, Homo sapiens
WLQPAGAETFLRLLREGNDNHDGYAAAGRYSVGW

SEQ ID NO: 987037 - protein, 136 aa, Homo sapiens
ITGAPLYQAAQDSAARIPGGRSLGAARPHSLGPGFGSAGYARYGRFGDLSAFSEGGRSVPCLLLVLRDNGLSFLLLELPICHLIHIVAFLRQREVGFHLQHHRFRHIISLYFLPHLQPLLPLFLIRDNHHQYNLPV

SEQ ID NO: 987038 - protein, 42 aa, Homo sapiens
VWRTRGLLKLMLVGILLAIVNQTTGVNTVMYYAPKVLEYAGM

SEQ ID NO: 987039 - protein, 157 aa, Homo sapiens
DVGQLGNRHHLHTAELAGSTMRTGTYRHPPSLTGTYHAPTLIHQYLPVSTLAHQYLLHPPSLTCNYLHPTSLSCAYLKLPSLTCTYLCPPSLTYTYLHPPSLTYTYPHPPSLTCAYLHPPSLTCTYLHPPSLNSTYLCPPLLTSTYLHPPSLTCTYL

SEQ ID NO: 987040 - protein, 40 aa, Homo sapiens
YNHILDRDERLWLEERIEAGQPKPSRAEQKYILQKLNAAE

SEQ ID NO: 987041 - protein, 103 aa, Homo sapiens
GVLGIDELVHVFLFFETRSARSPRLECRISIIVHCSLELLVSRDPGTCHHTWLIFKFFVESGSHCVAQVGLKLLASSDPPSSTSQNPGITSVSHLAQLVQPAG

SEQ ID NO: 987042 - protein, 59 aa, Homo sapiens
SISVPGAKLDRLVLPETSHPARILRGPVHHEQPADPAGTQCLAGKSVTSHGQPTSHGQP

SEQ ID NO: 987043 - protein, 74 aa, Homo sapiens
MIVSFVSYDRMQEENKPINGLLERHSYGRSIKAERSWLHDMKSPYFATLVMVDSLAQEFETRLGDHDITSPCSD

SEQ ID NO: 987044 - protein, 54 aa, Homo sapiens
EERGDVGYAAPREDAACGQSVDLGERRSCRQALGRSSREAELALEWACVTRWRG

SEQ ID NO: 987045 - protein, 39 aa, Homo sapiens
TVSWLMALIGVCLQELHCMGPTALPHKQLWSRLLRPLAV

SEQ ID NO: 987046 - protein, 40 aa, Homo sapiens
HCSITLWNDCERVTQLLSARLQVSSAYLPVSPIYFYNTGW

SEQ ID NO: 987047 - protein, 64 aa, Homo sapiens
QQRGLTWLVTTPDLLICLLGSQSAGITGVSHCSRLTFFIFLKRLNLTVDRGLSPTPDLVDPPAS

SEQ ID NO: 987048 - protein, 49 aa, Homo sapiens
VDPETLCRRLQTDEFQLHTNVNDGTEFGGSIYQRVNKKLGDRYSIYAWH

SEQ ID NO: 987049 - protein, 51 aa, Homo sapiens
TPPPTPPDLNQDFSGFQLLVDAALTLVAKIAIQASEFVRVQIVAGESFIKL

SEQ ID NO: 987050 - protein, 101 aa, Homo sapiens
NVTTHCQSCALENAEDGEQRRGPRGDHLVAYVPCLNDCGPYGQCLLLRRHSYLYASCSCKAGWRGWSCTDNSTAQTVAQQRAATLLLTLSNLMFLAPIAVS

SEQ ID NO: 987051 - protein, 53 aa, Homo sapiens
DTDSKYYKGSLSYLNVTRQGLLAGPPETRWRWPAELTLMQKEELDESHCGHEA

SEQ ID NO: 987052 - protein, 40 aa, Homo sapiens
KADVHKLASQPSLPQDQPAEHIHLVQVDLPVETCGMTFRI

SEQ ID NO: 987053 - protein, 47 aa, Homo sapiens
YRSAFDQRMDPEYSVLLGKDLVVGHYKQSGKAAGESGDIRPLEGLVL

SEQ ID NO: 987054 - protein, 37 aa, Homo sapiens
MIRIHQFQLFYCCVEHRNKDTPDFRLFYFCDRNTDDK

SEQ ID NO: 987055 - protein, 61 aa, Homo sapiens
PTSPTVAAPAYSRALSLATQQRGLGDPGTLRDRWLRVPVMSTTIAPWRADWSMTNGWLWCE

SEQ ID NO: 987056 - protein, 105 aa, Homo sapiens
VGPAYWALGMTCRVKLSYATRRSPSELLPPPMLPVGPSHKLSNIYYCTRDGRRESVPPSIIMSSHKALVSGKPAQSSVVSATEKKAVIPAPPIKRWELSSDQSYL

SEQ ID NO: 987057 - protein, 126 aa, Homo sapiens
VGTCVLGDVSQLPLFFFKKLQNPVSSPTNTEQFWFLQVIGWSNSIFSFIICIFLPFSSFPSFFLLFILILIYICFLKSNFLFPLMDSLFVVPHAPCTSSSAVIFFHSSLLFSQPLLHSSMLSLILL

SEQ ID NO: 987058 - protein, 49 aa, Homo sapiens
MIVKLDYVRIVRSYVVPDIHGTSVNEASYDGHYSSYGWVLVEVSYYLIT

SEQ ID NO: 987059 - protein, 160 aa, Homo sapiens
ESQISSLALSRDVPAISPVCPSTHLYSSVPVPPIVYFMFLFTHLPMCLSHPSLFHVPFYPSLFHVPIHPSLSHVPIQTIVSMCLVHPFLHVPIHRSLSHVAVFPSLRGARPPIPSSMCPSIHLYSMWASHPSLFHVPIHPSLFHVPVQPSLFHVPVHPSL

SEQ ID NO: 987060 - protein, 81 aa, Homo sapiens
GYPPALLPVVQAEFMNSSFNKAVTAEAPGDGHNVRIPQTDGRGLAEKAHLCTEARVGGGGGAVFAKMKAFPFYCPQGGDPG

SEQ ID NO: 987061 - protein, 120 aa, Homo sapiens
WAYVLACETRDASDRSKKIHILEIYPSSILSKVDVNGKAQLCCTFRDFMRIRLWRSGSSILRHVLHRIIVLLYIRSGPFHAVHRQTKYLRWTDAEESPLLGEIDTKDRVRPILAGKKRDS

SEQ ID NO: 987062 - protein, 72 aa, Homo sapiens
MSGYEEKLQSNPLQHLLEDYVQVTKEAADDKSVAKAAQEFFQRLALGDVQALSLWQKYRDQSIEEYTSGLQA

SEQ ID NO: 987063 - protein, 33 aa, Homo sapiens
RTAYWAYWHDLQWKLQLRYQEISKRTQPPPKLP

SEQ ID NO: 987064 - protein, 82 aa, Homo sapiens
  misc_feature (67)..(67): Xaa can be any naturally occurring amino acid
GYKTDEYQLHTNVNDGTEWGGSIYQKGNKKYGDRVSSLAWTARRQITRRFENSSHSIRMDPRRRASXAKREHTPRLIRFTDT

SEQ ID NO: 987065 - protein, 82 aa, Homo sapiens
VTGRMVRGKHDHGSMRANGNSMGLTVFLMSFFLCTKDISRRNMFLWQLFDSAINLPGDNDRKVFYYLLGGSGKWDEGYDVQG

SEQ ID NO: 987066 - protein, 70 aa, Homo sapiens
LLESLEERCVQSHARGPTMTVTGRVALVDLGRVDHGLGCELLCLAPEAGRVERNILGGCVLMHRGSDCCR

SEQ ID NO: 987067 - protein, 96 aa, Homo sapiens
TVDQSCMKGTHGRSGGGSKPSWEELSLSKSVLSAGHDITGCSHGTHVAITVSHTWGQTQHLDGNAVDSLSAHQRAPYAPHADMLHQPEAVAFLLAS

SEQ ID NO: 987068 - protein, 67 aa, Homo sapiens
AGRVSGLAGRELVGVHRTDPQWENGAYETLVMLETVPRSGEVYTWQVEHPSVTSALTVQWRARSDSA

SEQ ID NO: 987069 - protein, 38 aa, Homo sapiens
FVLTPGGSGSALELVISSGPAADFFPTPDDVVVGFRTP

SEQ ID NO: 987070 - protein, 150 aa, Homo sapiens
HQEVLPRTPNLHLQVRTGNWMLLQAAAPASLPTSSPAAPIATFSLLPVGGAPTVFSFGSSSLKSSATVTGEPPSYSSGSDSSKAGPGPGPSIFSLVPPSKASLAAIPEASPVVPSDASFSFGSSGLKPTLESRPVPSVFAPNITMNCVFP

SEQ ID NO: 987071 - protein, 57 aa, Homo sapiens
VDQSSQQTHVVAADKMEKHVPLESVPPEQTPSHSLPLCCDNIGARGDGVFQTGPTRS

SEQ ID NO: 987072 - protein, 46 aa, Homo sapiens
AQVYRPELDETCLFNTWGAGYKINNLYDGTFVLDEHFRPLWGAFRS

SEQ ID NO: 987073 - protein, 53 aa, Homo sapiens
PTAYKSVSEWQEGGDGDTYHDVSFMTLTHSLPHHYQAMQRAACSSPQVTRRSG

SEQ ID NO: 987074 - protein, 45 aa, Homo sapiens
AYASSTVMRKLLNASLPDYDCHTSRPSTPKLIIGIDTAIETTTRH

SEQ ID NO: 987075 - protein, 46 aa, Homo sapiens
YSSNDDAPGFKNTPTNAPATLEYTASYNANQKYDDKNKWNLGTKVV

SEQ ID NO: 987076 - protein, 78 aa, Homo sapiens
MHHGCELGMHVFPGAPRRGYWEGTFVRRLTQGQLLFLSMFFNRCLYLPFQDLSSNAGPSSRFLLPLACGTHIVGVNEG

SEQ ID NO: 987077 - protein, 151 aa, Homo sapiens
MCSRRRSSCSSSNNASHARDANTIAKVGGSNGVVASIGRGVIPQSSGKLPDFLCGNKIRVCRRVGAPNVMRTDRHVSQAIPDPHRHRIPRSILIAHTGERMSVQLSEGQTFGPRAINVTRTTLVRYAGASGDFNPIHYSDRAAREARMDGV

SEQ ID NO: 987078 - protein, 42 aa, Homo sapiens
SRGRTTNHIRNNEDSRIFSLEKTTRRLQNKMISEESSRGPHK

SEQ ID NO: 987079 - protein, 37 aa, Homo sapiens
LHPGVNHLAEHVGGMLNLLTSTQLRVRTIGLKYRKLN

SEQ ID NO: 987080 - protein, 61 aa, Homo sapiens
QRYIWQQSGSTSEQGDTDRFAVELFIDVTLLGLEKRSQNGFLSGDIIAFTWGGGDDDLDGL

SEQ ID NO: 987081 - protein, 56 aa, Homo sapiens
ICVMEFREDLLELISRQHALVDERARRERSKVHPSFMLGTPPQHERYTFQVHANTT

SEQ ID NO: 987082 - protein, 122 aa, Homo sapiens
  misc_feature (121)..(121): Xaa can be any naturally occurring amino acid
ILWLVVGRVQCRSRIEGMIGHTDSVRLPWNHKEVTSAVTSAGMSIHASDSVEGAQREIQLWFQSSELVSWADGGQHSSIHPSLRLKLPLPPHPPRRTNYLRQQEPKPTSKPACPKPLTTHXP

SEQ ID NO: 987083 - protein, 77 aa, Homo sapiens
WYCPSSRFSGGLQRKMSACCASPSGSVIDSSAVPQPAHSGVPEEFAQDVISTIGQRFELRFKQYLRNPPKLVTPHDR

SEQ ID NO: 987084 - protein, 48 aa, Homo sapiens
MSTSAVAVGVKPEWVQQKVCQALAGYLREGFVCSGELAKPPAQQLPKR

SEQ ID NO: 987085 - protein, 49 aa, Homo sapiens
MNERGGSQDAIEVEQHGMELLIEGGRVHNPHAIHHVGKGHLDSISRRLL

SEQ ID NO: 987086 - protein, 33 aa, Homo sapiens
VPSRSTSGPGVRTSKPSHGGVIRSRFSASEKNA

SEQ ID NO: 987087 - protein, 128 aa, Homo sapiens
VYLLLLYLALALPCLSALPCLSALPCLSVYLVSLLYLVSSLDQLHITTKISSGTIEILVIVAADQTLVTKCGANEANAVEHSQNFPLFSFVLVIQQVFDNGSIYNPEVLDITEETLHSRFRRGCPAMF

SEQ ID NO: 987088 - protein, 48 aa, Homo sapiens
NQRFYHSREWKSVRDRVILRDEGLDMGHPDYPINGRIYIHHMNPMQPI

SEQ ID NO: 987089 - protein, 49 aa, Homo sapiens
YSDVGSDIIVRISDFLQVRQVTTLGSTLHCLPSMSAQYFVNGVNNRAED

SEQ ID NO: 987090 - protein, 104 aa, Homo sapiens
  misc_feature (42)..(42): Xaa can be any naturally occurring amino acid
MELAVIPRLPWKLSVGGSVRRTYPRPMSHRSGTEVASHPVLXPGNYSGDSFFIFYFLEMGSHSVAQAGVQWRDLAHCKLCLPGSRHCPASAFQVAGTTGVRQNA

SEQ ID NO: 987091 - protein, 33 aa, Homo sapiens
KDQEGVVVGTNRRRHLRVHQAYVGQHLLHDDAG

SEQ ID NO: 987092 - protein, 106 aa, Homo sapiens
  misc_feature (18)..(18): Xaa can be any naturally occurring amino acid
TAGKLQVDGHVALDTSSXRVHSAVAELTRYLWRQLQAAAICILGLLIFRSIRSRLTLTTGTSRTIASMRKFKALISIARRSVMMIIAIGSIYRARVIITSGRRPMA

SEQ ID NO: 987093 - protein, 42 aa, Homo sapiens
MLIVIMDESLQSHYGESSMAISYVITCPRQSSKNILGLPNSD

SEQ ID NO: 987094 - protein, 36 aa, Homo sapiens
DEYITPAQKKSNYYGTWQKIVEILILVEVHGIGNSD

SEQ ID NO: 987095 - protein, 78 aa, Homo sapiens
MNGQQARHNLYQKVMALYGISSMLTPKALSLWNYLRKDLRLVTDLETKKSFDPQHQGSAIQIIEEPIQAHYMKDYSSR

SEQ ID NO: 987096 - protein, 60 aa, Homo sapiens
YVRLLMIGHPGWARPDQLCRFTDNEFHYLSTSTTIGVDFKMKTKQVDGIKVVDNRSRDTS

SEQ ID NO: 987097 - protein, 70 aa, Homo sapiens
MIPKGALAVAVAQVCRVVPLVADGICQCLAELLLRQILLDTLLGRMLPQLVCRLVLRCSMDNSAGPREWL

SEQ ID NO: 987098 - protein, 40 aa, Homo sapiens
MEVSHILARVICTQRTHTSHVLARVIARRNSPRTSSHASS

SEQ ID NO: 987099 - protein, 43 aa, Homo sapiens
RSRQLVQDDDMLYWHKHGDGLERPPSPWRYGSLLDTDMLMSEL

SEQ ID NO: 987100 - protein, 43 aa, Homo sapiens
MAEATRRCVERQNSQHFAICRSVSELADGCKSVGLKDRKQMRV

SEQ ID NO: 987101 - protein, 64 aa, Homo sapiens
KTNCWRTCDTCGIDCLAADDLLITKWRHRGHADRPAVCAARPGDTIIVESPVYFGLLQAIEHLG

SEQ ID NO: 987102 - protein, 47 aa, Homo sapiens
MALAPACRSTPCCYNAFIQEQSLGYHYNAVNDLLDYVSNREVFAYEN

SEQ ID NO: 987103 - protein, 38 aa, Homo sapiens
RQCVSDVLLCVDSLRLSAVRRVCAGPRAVCSQFHSSRR

SEQ ID NO: 987104 - protein, 63 aa, Homo sapiens
NAPGRNRTVRCRPNCMAAVQCDRNLLKHSQASAYSCSDSRMSTPYLRTKREIIQFLTAGSRQS

SEQ ID NO: 987105 - protein, 39 aa, Homo sapiens
DIIDLYTRDMSGDLRGPENLRSTEVAEMLNTIGAQTFRS

SEQ ID NO: 987106 - protein, 89 aa, Homo sapiens
PCCAGPRVRHQHGDVPTPSVILPAVRSGSSSSTRCVFYLPLALLQVSLAARFAAPWAGPAWRAAGALGHVVAFVVFALCLVQARRRWQR

SEQ ID NO: 987107 - protein, 58 aa, Homo sapiens
LPVLRHRPTAVFQRAGFGELIAAKNALRAEVYNRYSWVLSRSETAATLYPEMMQQSDR

SEQ ID NO: 987108 - protein, 51 aa, Homo sapiens
GTDFHAVSQGAVSVTAVAVSDLTRTSHACRYGRQMDGGMGGAVVRAWVLEP

SEQ ID NO: 987109 - protein, 51 aa, Homo sapiens
ITHRRQVRSLSASEAKTVALWVADNQLTLLQLDPHPPTLAWHSGTAAMAGE

SEQ ID NO: 987110 - protein, 52 aa, Homo sapiens
SDVPGYSRTPDLAHMEEKKEGNWHGQASGYSEALWGAGSATCTISPFSQNPR

SEQ ID NO: 987111 - protein, 44 aa, Homo sapiens
LEDPLFAPRFQELYQSLLSWPLAWPIVFRVVQMRKVTVRAPLMK

SEQ ID NO: 987112 - protein, 53 aa, Homo sapiens
PVIAEPGLSGTVLVEYRIERSRMQLPLMATQITKDKEMPRLRRVGLSSFDWAE

SEQ ID NO: 987113 - protein, 32 aa, Homo sapiens
MSTLVSPLPVLSRPYAMAAAVGSLMIRSTTAQ

SEQ ID NO: 987114 - protein, 64 aa, Homo sapiens
AARSTPGPLPYHMAKTPSTLRSARTPACWVPMTAVAAMSSLMLGRNEIWLASSAFCAFHIAMST

SEQ ID NO: 987115 - protein, 43 aa, Homo sapiens
LWSDLSDPGMANHARSCEMNRWSAPARPAGRQQISTCALTETS

SEQ ID NO: 987116 - protein, 38 aa, Homo sapiens
GCSEDPRLVGVARAASSSARQARQRGMQGRTFGGGLGD

SEQ ID NO: 987117 - protein, 102 aa, Homo sapiens
MDSRFVTQADVAVASLRLIEGFALPGPRNSLCLIFPSSVEPQAPDTSGHFFFLGILRKKGPPRCKPGLLYSSNLVIRPLQPHKVLQYRELDTEKKPKRVPEL

SEQ ID NO: 987118 - protein, 42 aa, Homo sapiens
SPEYIAFWDKLKRGEYDAGRYRRIHKDGGDVWLQASYNPILD

SEQ ID NO: 987119 - protein, 44 aa, Homo sapiens
SRYPVVFSQLACSQNQVLHSPADVALLQRKSKEVGHVLDAISDY

SEQ ID NO: 987120 - protein, 75 aa, Homo sapiens
ESSTVAVAVRWQLLPQQPQLQQLPLRECQWRVLQHVMWDGPWPPVACLHTLVVNAGGPMGSPRWLYTALLHDSPK

SEQ ID NO: 987121 - protein, 33 aa, Homo sapiens
SEYSRACLSHSPSSDHKLILSSCAAVNFISATY

SEQ ID NO: 987122 - protein, 45 aa, Homo sapiens
PSPKTPGKGGEAASGCRRRACPFTDHAALLLVQAGLGGRQLVIAA

SEQ ID NO: 987123 - protein, 53 aa, Homo sapiens
LQRGRTAWRRREGVVGKLLRRISAARLAGGRVAVGRTDAEQLPGLFLGTEDGR

SEQ ID NO: 987124 - protein, 38 aa, Homo sapiens
AARADYCASRPPLAQNMKIKVFNSPQKDLVKDFKSAID

SEQ ID NO: 987125 - protein, 45 aa, Homo sapiens
SWSSYRVLMFPMEASAPFAGLVTGTRSALLPARRIGRAFLWNSRP

SEQ ID NO: 987126 - protein, 42 aa, Homo sapiens
PRGDLLLHRLGVGDDEAVAFIMSEGLTLTAAIEKPVICWTVF

SEQ ID NO: 987127 - protein, 53 aa, Homo sapiens
GPRQRAFLYCNGLRHTAGGSDGAGCWHLRNRKAGNLLNAQPAVGQVLRGALKA

SEQ ID NO: 987128 - protein, 37 aa, Homo sapiens
MMYQWVANWRVDYKLAASCHVVQLAHSPVSVAYPYLY

SEQ ID NO: 987129 - protein, 58 aa, Homo sapiens
QVGASSQQHADGGHTHGNWGEGAVLSDQDAVDVAEYFTHMPRPDFPPKEKDWPDGKKP

SEQ ID NO: 987130 - protein, 72 aa, Homo sapiens
AAVGPLVATFTDLGHFDFVGADVRHGNVFGRSGGRGSCCCCRFFFRFRRRCSFRCACRFEDHDQFAGFGFIA

SEQ ID NO: 987131 - protein, 30 aa, Homo sapiens
MARDLVEEGVGVALGVVVDVLQLGIDPAVA

SEQ ID NO: 987132 - protein, 135 aa, Homo sapiens
KLCVLWRSFMSADLLSLVVDRRLSLRRRWLGASRMHLCVPSLGALTCVGRKRLDGLRVLELHPDCARAVVRRSRQHHQAIGRRVAADPLDLAHLAAHGLYARDEVVLDVTFTHGGPAEPEWGSTPWRYRSASTWP

SEQ ID NO: 987133 - protein, 34 aa, Homo sapiens
NRAGPGCDGRYFVFGVHVCQHRHAQLALDLGQDL

SEQ ID NO: 987134 - protein, 80 aa, Homo sapiens
RAAAAKCRRRCSCVPFRRPSRAFIHKNLRILRFIAERLPQLFRHHGSDLAVGFNVIAHAVGLAAVPLGVQQRQRRRLRYI

SEQ ID NO: 987135 - protein, 36 aa, Homo sapiens
SVTAWLKSQIDGSAHLQLMCSPLPKAYGLLLQMYLM

SEQ ID NO: 987136 - protein, 40 aa, Homo sapiens
TITGLLRVKNTLQHTDHDIHRGFEAITTQPILPTNDGAEF

SEQ ID NO: 987137 - protein, 57 aa, Homo sapiens
WVAHLLATVSLNEQVEHVRLIGWNVHALYKITVPFHLKELLCATYSYLVTVYDPFKL

SEQ ID NO: 987138 - protein, 47 aa, Homo sapiens
NTIWYTSSLIGVYRDVSFILNLVQFHTKTMTTSVVLRSSNGQAGSTR

SEQ ID NO: 987139 - protein, 38 aa, Homo sapiens
PCTGVCRARGDGATGSVVLGLVLVVLVGLLLGRLRVFG

SEQ ID NO: 987140 - protein, 58 aa, Homo sapiens
YLFVTGIPGASAPRTTRRGRSSEPVAFSEQEIEARVAHIRALMQDDQQEDAVTALHEL

SEQ ID NO: 987141 - protein, 50 aa, Homo sapiens
MSVLGVDDQATFTLVQKCEVNGQNEHPVFAYLKDKLPYPYDDPFSRTTAQ

SEQ ID NO: 987142 - protein, 140 aa, Homo sapiens
LPVTSFLWYSWYAHQAQVAEELAERGRILARALAETSEYNVISGNLTDLRLTINGLVQSDKSIYRIDVVDATGKRAVRVTSESAADAEPHYYEAPIRKQVVWINLFTDNGIPHVSASSDTRPPTLTTEVVGAVRVTMSPA

SEQ ID NO: 987143 - protein, 41 aa, Homo sapiens
ELVRYQAAAAAAAVGLLYHLVLFNLQKPLQFGNLAFQISNA

SEQ ID NO: 987144 - protein, 45 aa, Homo sapiens
AVRIGLWWLLTDGSMTLWTQHILLCTQSGSQQLVVVFEPWGPGTA

SEQ ID NO: 987145 - protein, 48 aa, Homo sapiens
EGGQIACASIVSEIVEMELDGGRADRCGFIVSDIVNVIYRTRSGSIGL

SEQ ID NO: 987146 - protein, 39 aa, Homo sapiens
YLTTRSEEPLQPRQPYRQWIENVRIKLDSIPAQAQGPGQ

SEQ ID NO: 987147 - protein, 44 aa, Homo sapiens
IELGPTFTRAPLGRGRLGQAGDEAAHVVAADGTGLVRRLARGRQ

SEQ ID NO: 987148 - protein, 62 aa, Homo sapiens
RRRGTPYSRRFGLIDGTADVLRAEQGLQLELSGQRRRAPSNGMLLEELEEIPEIGTRLRIGH

SEQ ID NO: 987149 - protein, 119 aa, Homo sapiens
DLRDQSARTRNVRRQRPEHLSQGPRGTFDPKQLLITLNENADLSTFLHESGHFFLEVMADLASQPNAPQQIVDDMATILKWFGIKGDEQVGGSDSGAPLAQQDAEAVSEAIYKEMAADD

SEQ ID NO: 987150 - protein, 30 aa, Homo sapiens
MSRSKRARSSASGLRRQQRIVADDAVVART

SEQ ID NO: 987151 - protein, 44 aa, Homo sapiens
VDRAVAAPVRPGGHSLPPGGGALGQLASIDPRGLDPRLAKTRIV

SEQ ID NO: 987152 - protein, 55 aa, Homo sapiens
  misc_feature (12)..(12): Xaa can be any naturally occurring amino acid
QLGTRCMSRIKXRQWQSGGGVSGFELLGPGTLVPVLKGIGIHRSRGMHISRTVIH

SEQ ID NO: 987153 - protein, 56 aa, Homo sapiens
LLLGDGATTCFVRFKVFAAADVKVVVANSAGVLRPPCVLNSDYSVTLNPNQDTSPG

SEQ ID NO: 987154 - protein, 65 aa, Homo sapiens
WFGTTTAARGGIDYQYFDDALALAHWCDVLVCAMPGGAGRGIMVNAAVLRELGPGGYLVNVGRGS

SEQ ID NO: 987155 - protein, 55 aa, Homo sapiens
RYLLVKARIASLLSADGAINTEDPKPQLAQAAIQGGECVARQIVHLELGEPLEKF

SEQ ID NO: 987156 - protein, 36 aa, Homo sapiens
SVPGASCAKQVRCSRRFWSMPGLTGQEAVACSACRI

SEQ ID NO: 987157 - protein, 47 aa, Homo sapiens
MAPSWNDRGLTRTMFFCKTDNLKAEQTTDEFDVNQRDTPNDLVEVRT

SEQ ID NO: 987158 - protein, 34 aa, Homo sapiens
ILFWAVCNGHVKMRGGDAPVYGSALNVPQQDGTQ

SEQ ID NO: 987159 - protein, 33 aa, Homo sapiens
CRYPGGVDSAADRLRREHGVAHGFMQAGGHNVG

SEQ ID NO: 987160 - protein, 61 aa, Homo sapiens
  misc_feature (36)..(36): Xaa can be any naturally occurring amino acid
GLFGYTPDEIVRLSRRWRRCQRAAGGKRRLKLVCSXVSYWSVLYRRRAVYSAAIRLFPQWK

SEQ ID NO: 987161 - protein, 78 aa, Homo sapiens
FLITIILVHMDVLITHLVERHDSCALRATGHLIRLMTKSRNSCDLRSKARTSQRKPLSIKANGTISRSVRPLEMEQYS

SEQ ID NO: 987162 - protein, 39 aa, Homo sapiens
SSVLFFMRGITPLLEHGLATSWPGSLKVDTQSGVALTAQ

SEQ ID NO: 987163 - protein, 57 aa, Homo sapiens
  misc_feature (13)..(13): Xaa can be any naturally occurring amino acid
TRIQLDRRPIQHXAGRAGDVLFDLLAGDAPAGQHFMAGGDHAVGDRQMAQQAGLLDQ

SEQ ID NO: 987164 - protein, 70 aa, Homo sapiens
GPPSRHDFALIGANVRRRFDGLRHGAIFTGGDAVAHFRQIDKHHIAQQFLRVFGDAYGVNAVYLLNEPTR

SEQ ID NO: 987165 - protein, 51 aa, Homo sapiens
MLGPSYAAAAIATWKRAALGDVLRDLAAIQEVLVLLRRHLRPPGAFIGLRQ

SEQ ID NO: 987166 - protein, 69 aa, Homo sapiens
MDVGFMRLADLLNGDILMPGDAGCAIRQALWCPSPTLSSVGFTSAHTALACGQRPPLFFSLAWTYLNET

SEQ ID NO: 987167 - protein, 98 aa, Homo sapiens
SAGYSLKSLGKTQPASIPCRDASYGYEGVVFHLAVRICLAVTVLFHSSILIVLEDHLLVHELRRIGQVRSSAIHVYSVIGTFKRAVPCCRSFLESTCR

SEQ ID NO: 987168 - protein, 35 aa, Homo sapiens
YHLQPEVLISQRNSAFSLPGGCRNVAIVEHLLDDQ

SEQ ID NO: 987169 - protein, 51 aa, Homo sapiens
ADDARNTRNEISEISGSSRGLQADIDNIKNQRCQVGWPLIGEAEERGELAL

SEQ ID NO: 987170 - protein, 36 aa, Homo sapiens
SSVPDSVVMAEAPPGVETDLIDVGFTDDVNKGGPGL

SEQ ID NO: 987171 - protein, 70 aa, Homo sapiens
PIDMKAKQAQMDQQLAAELSAAFQADSVPRSSVCCARTPGGESSLMSNPISLASCKAVKEGLSDQEHFQV

SEQ ID NO: 987172 - protein, 47 aa, Homo sapiens
LLGVIRSHVGAIRHQAAAHSVVRHSNSSAFHAAYHHASVPHGIKAVS

SEQ ID NO: 987173 - protein, 41 aa, Homo sapiens
LGPSTARRTVWGSSVPPVVMHGTLSGPAQPCAGGMTRGGDS

SEQ ID NO: 987174 - protein, 91 aa, Homo sapiens
RLHDITRVLCPTMKFTRKGYWQVQLDQSGGGQRELTRVQERAVSAICGHRALPIMDAARMDEVRELAERPYGAVTLDSGAEYIDPLVMKVS

SEQ ID NO: 987175 - protein, 100 aa, Homo sapiens
SRGDLVEKAGRLAHLSDYNIQKESPCTCVPSQSGMQIFVKTLTVRTSPFEVEPSDTIENVKAKIPDKEGIPPEQQRLIFAGKQLENGRTLSDYNIQKEST

SEQ ID NO: 987176 - protein, 101 aa, Homo sapiens
  misc_feature (56)..(56): Xaa can be any naturally occurring amino acid
VTSRILSVGRALFKDHLSVTLWLLQRVSVLLGCASMEPWEDFTCTGAYPESKTPLXATLSKSGNTFRPEVHLLGGAVGRKLALNQLVTLTCLATRLQPQGR

SEQ ID NO: 987177 - protein, 118 aa, Homo sapiens
VDEMSDISAAPTGPHLYKLLLQPTTNPHTSDRHEALLHGDVGKPSEPASEEGSESEGSESSGRSCRNERSIQEKLQVLMAEGLLPAVKVFLDWLRTNPDLIIVCAQSSQSLWNRLSVL

SEQ ID NO: 987178 - protein, 133 aa, Homo sapiens
  misc_feature (67)..(67): Xaa can be any naturally occurring amino acid
TLEDLIDLTGLRSCNARHAVRSPAQVETAMRRSSGEPTWRPVREWLRDDLENGKETLQRRDAPKTHXTHHAVSDHEATLRCQALSFYPAEITLTWQRDGEDPDPGHGARGDQACREWDLPRSGRPVVGTFLLG

SEQ ID NO: 987179 - protein, 34 aa, Homo sapiens
NLWGWLSPKAGEREDADRASPKGTDAELVHTHSM

SEQ ID NO: 987180 - protein, 68 aa, Homo sapiens
SDPAGRIHSTIRPGLIGERITSRVESQALTTDWLYYPNLVAGKTRLQLASPHRTNESRGQPTQLSAVH

SEQ ID NO: 987181 - protein, 127 aa, Homo sapiens
VIWTGVWLRGQVHFHYPIPLVSPDLSARANSTKFSLFAGGMLRVHLDIQVGEHANDYAEIAAKRHVDVRCRYDVRQLVEQVEQIQKEQNYQRWREERFRQTSESTNQRVLWWSILQTLILVAIGVWV

SEQ ID NO: 987182 - protein, 122 aa, Homo sapiens
NLDSDLTGHFLVHVFTLAYYEYSLNAVDYTTKIQSTTWYSIMYEWCTEIRIYHVRLVCYQVHTINSIFLIIFNHSHLGYVNHSSTWTLTALQQYNLPVEYNLPVEYNLPDEIQPAGEVHPAD

SEQ ID NO: 987183 - protein, 50 aa, Homo sapiens
QHIKYKIAGMWYFLYPCYSGAKVQSHLNQEDETAVRSHHCTPAWATAKLS

SEQ ID NO: 987184 - protein, 75 aa, Homo sapiens
KLVDLLLIHEVLNPCVLDAFPCSQHIVGRLNARAKLKGFLASAGNTFSSFIPTIKRRKDDYFKALPGQLKPFENL

SEQ ID NO: 987185 - protein, 119 aa, Homo sapiens
GPRQVVLVTETRKGLMCKRMPGRQAPQTVCLFYDKNYLDFAGWKNSKCHFLAIWNYCRVCIGVKRHCRSKIRHLGFRSGVSWRGFKFLRTQAKGARRRNGRWKVAHQCKQANPEYNLPV

SEQ ID NO: 987186 - protein, 73 aa, Homo sapiens
GSHSYLIGLAQALQEQKVAQAHAFQDVTLEPLSGKVRQSYWPLTKTMGPRAREAFESTMLQPRKQAQCLCFPH

SEQ ID NO: 987187 - protein, 83 aa, Homo sapiens
MTDQHLELCPKPKQETTTSKSTSGLTDKHGAPVDSDLSDEDQTPFSRYPTTTNNSLLDLDDLTVTGQRLVTVMNLKITGSDAL

SEQ ID NO: 987188 - protein, 68 aa, Homo sapiens
MAWAYSSLRGAHLLVMYGIVYNPPVLRDAHCIQPYLARRPKLQLSVYTTNEFPPWLLRNNIRPGKRMA

SEQ ID NO: 987189 - protein, 86 aa, Homo sapiens
QDLNSILTSTSQDVRHAWTPPAVHPRCPGDPSKSTHNYSAKDSILRRPGRMFTCRRPALGGLLNSPQPFPRFQASPQACHHAFFTF

SEQ ID NO: 987190 - protein, 76 aa, Homo sapiens
TLSGYCHIACPACAQLQSWGQDSHPQGPTGEALCRSWAMSHVTDIIALVMGTPYNSTVLRSIFIKWSTSGPPLIRG

SEQ ID NO: 987191 - protein, 37 aa, Homo sapiens
RGSLQHPNQRHRIPEQRHRIPRGCAWTADAQRQRCVY

SEQ ID NO: 987192 - protein, 69 aa, Homo sapiens
WAAEAATRKQRITDTESPYQELQGQRSDFYSDLNTQRPYYQGARIMTVRNIITVIQALPKPISQGGRGS

SEQ ID NO: 987193 - protein, 78 aa, Homo sapiens
MVVVVVAVVTVEAGGGGIIINNIMVAVVAAAAVVVCHTGVQRALGSHSPMVEIVHTPLYWPTLTMCASPVCSRRVLSH

SEQ ID NO: 987194 - protein, 154 aa, Homo sapiens
RISWQMLARGCGAIPGCQMLISAVWVLFHVIRCSPGGVCAVPGRLMLSWGCGLLSHVVGCSPGDCGVLPQSVILSAGFVVIASRLLDCSPGVVGAVRRLSVVPAVVVGAAPGPRILSWECGCCSMLSNSHLGVQGAVPGCQILTWRCGLCSTLR

SEQ ID NO: 987195 - protein, 87 aa, Homo sapiens
IELGPAEQLADLTLVFGTAPGCQMLAWGCGRCSRLSDVHLWLWVLLQTIRCSTGGVGAAPGCRMLTWVCRVLFQAVRDSPEGVGAAP

SEQ ID NO: 987196 - protein, 54 aa, Homo sapiens
HTSDALVMNYGGSLFCFGKDFDKVDSFLGLVQCRSVVVSCGFYVPKYHPVTRPI

SEQ ID NO: 987197 - protein, 54 aa, Homo sapiens
PACDVKALSQQNVSIDLATFMKLRTDAVLPLTVADCAETSWDPTLEGLEGGVSG

SEQ ID NO: 987198 - protein, 115 aa, Homo sapiens
SGSYCIPSQGYYSSISIRQLTAFCGMKLLEYCPSCVPRAGLLSRADAWGISTKSTCFQNPFIAQCSCYHTSHSRTEHSCSLPLSAGLVSLAGPSASRYRSHSYPRTYTTVHSWFQ

SEQ ID NO: 987199 - protein, 81 aa, Homo sapiens
MVHYVGLSVIILVLILCYVHVKQLGQIEVHVLVAKAEEPVANVGLSPGSLELYRYEMAMEMSNSFDSNSLSSQDCLAELFC

SEQ ID NO: 987200 - protein, 136 aa, Homo sapiens
ESRGSLLELRSPRLSCYIDWFTPAVVMLCVVKSGAVTTGVSETVFLPREDHLFRKFHYLPFLPSTEDVYDCRVEHWGLDEPLLKHWEFDAPSPLPETTENVVCALGLTVGLVGIIIGTIFIIKGLRKSNAAIPQGV

SEQ ID NO: 987201 - protein, 40 aa, Homo sapiens
FWDDADDSTGRGTTFYQEYETFYGEHRLLVQQAEILRLAK

SEQ ID NO: 987202 - protein, 167 aa, Homo sapiens
VLITALLVEPEGSRRKHNSTPYFVHQVMRLLEELSLKLPTNVVEASARASVSVLGDILGSAMQHTQNLLQMPYGCGEQNMVLFAPHIYVLDYLNETQQLHSRGQVRRPLAISTLDTKRQLHYKHYDGSYSTYGERYGRNQEKPWLTAFVLQTLAQARTYIFIDAAHI

SEQ ID NO: 987203 - protein, 92 aa, Homo sapiens
PPGALASSGADPVDLASFGEFLSCIIVGCDDSSMEASQLIISSAFATRPSLYFMSVWLLGVRVHDCYQFILMFTWPRYGQKDSLQAGFWVLL

SEQ ID NO: 987204 - protein, 108 aa, Homo sapiens
MGTAEALALILQRCRRAPEAERRRSPPESYTAETSVTGEDPNCVDTRAQGPGKGHFACLQGMACLRKLLPHCRFRSNNSFLTEEEGGRDIIPIRHSRKLGPTGAFGGR

SEQ ID NO: 987205 - protein, 44 aa, Homo sapiens
MSQTLLVIRRLSAVLKTQLMRRIIGVVFQCLDWKNPSVNGRRTS

SEQ ID NO: 987206 - protein, 33 aa, Homo sapiens
DAGPPLMPWWGEVACVGLLPFVEFPIIIERLGW

SEQ ID NO: 987207 - protein, 75 aa, Homo sapiens
LCLGCDADRAWMKIVSGRGNHLGSGGRPARPSCHGSCTCTVFTWSRVCGARWCPKQDFWKALELFVTERLVQVLI

SEQ ID NO: 987208 - protein, 68 aa, Homo sapiens
PWCPLVAFGPTQHPPATLGPTQHPPDEAFGPPSTRLMSLWVPRHPPASLGPARHPPASLAPTRHPPDE

SEQ ID NO: 987209 - protein, 37 aa, Homo sapiens
MSWSHHGYVDIGRRIVGDMRHAVCAFNLRGIADVDPT

SEQ ID NO: 987210 - protein, 149 aa, Homo sapiens
KPGRMSSWGCGVFGLGLVLAACAPVGPLSVYMLHSPCWDQPQCWAFWGMGQRVRCLVWLMYTPCIVEPSTDPAGLKVLGKLAGPEWLVEHTSGCGHGLELGVGAAGKAGICARIWTVVLLLLQPDLPCLLLLLQALDGQVPLHLQVPLL

SEQ ID NO: 987211 - protein, 40 aa, Homo sapiens
  misc_feature (15)..(15): Xaa can be any naturally occurring amino acid
RYRFSPASDRSAACXTMTRVNIITGLGPVLQIAEGCAQSG

SEQ ID NO: 987212 - protein, 57 aa, Homo sapiens
MWYGSEYGNKRLGAHAASNAGGVRCSGCVMAVPYSKDIHAVPAHFNAGGGQALPLYR

SEQ ID NO: 987213 - protein, 83 aa, Homo sapiens
IELGTSVMRAELAVRTAGLRAVSASIRRSMSPPGSSRPSCGERALPGLAGVVAVRLHQLRIAVPAGARDLDEHGRECSRDAVT

SEQ ID NO: 987214 - protein, 72 aa, Homo sapiens
MQIGLYSAIPYVAAAVFMLGFCAQLRRLRERRWHTLVPALLAGVALCIATAAPTQFALSLTAITLATGFMWA

SEQ ID NO: 987215 - protein, 53 aa, Homo sapiens
RCGWPSFGSCLQMVRHTSRGGDAVVAQADAGAAQHVLVAAAAQVFRQAGPQQH

SEQ ID NO: 987216 - protein, 60 aa, Homo sapiens
ELGTLIDLVLQRRERSSWRSRDTVEHLVADVSACSLLTASAILSLFWLVQVFALVHGVFD

SEQ ID NO: 987217 - protein, 54 aa, Homo sapiens
MSWYRMRVRQVAVAAVVLDQFDAADWRRLGDEPGDAGAVAEFDAGARAALGQRD

SEQ ID NO: 987218 - protein, 37 aa, Homo sapiens
RIELGTYTIAPPGISCRALLRYSSENDLFTAPALKTA

SEQ ID NO: 987219 - protein, 37 aa, Homo sapiens
MDSKLLDYYNHELVYLREMGAEFAEQYPEGSRCRLGM

SEQ ID NO: 987220 - protein, 73 aa, Homo sapiens
VSTCAHDVDRELVAVQACSRIGEYTSTRVHLNDIWRVEQGAQVIDGSCSKEACTASGEYTSTMEACMHDRGTA

SEQ ID NO: 987221 - protein, 37 aa, Homo sapiens
SWYLDVLALLEATSMEFEHIKCPHSKYGCTFIGNHGH

SEQ ID NO: 987222 - protein, 38 aa, Homo sapiens
IDVRKRREWRRVRLYHGPALQPARCAPMLPMLFVHAGV

SEQ ID NO: 987223 - protein, 68 aa, Homo sapiens
SRCMCAGPEGSAGGVDEQRARRCCDAACSSASQSSPSSVRATGTTLQPGQAQHLQQVGVGRLLDQHGI

SEQ ID NO: 987224 - protein, 56 aa, Homo sapiens
GPPTRRTDRGGRAAGFSAPKTSASWLGYNYRLFDPLPVHGGRWVRLAGAPAGRRGL

SEQ ID NO: 987225 - protein, 54 aa, Homo sapiens
PSQPAACRRGRFTFSAWVRADQPAGEQLVSPAAMAGNALLIGINQGVPFVEVNG

SEQ ID NO: 987226 - protein, 88 aa, Homo sapiens
MGSPGITPEVGATMHARDVSHCDAFFGQVAQIQRFPTDLSCSYLVLHSGVELLRSFLSPDVESMSYRGVHANWTKYVLADFALGTGSL

SEQ ID NO: 987227 - protein, 44 aa, Homo sapiens
AAMGVVGGEEQGVGSVDVVGQAFGLVGQPEHVAQFRQSRCCTDL

SEQ ID NO: 987228 - protein, 43 aa, Homo sapiens
TRAVIVELGAVDDARDDLAHVIRLARVGGDDAVQLGRVVARLA

SEQ ID NO: 987229 - protein, 61 aa, Homo sapiens
VLGPPRRSVFAESQPQAAAEKIGILLAGSVGAIRMTISPPRPILTFLLICFSLNIGAVLIS

SEQ ID NO: 987230 - protein, 46 aa, Homo sapiens
MRARYRPPGGIGSYYCTPRDTSSSRTFGQSDPAGDHTERVSCTIHV

SEQ ID NO: 987231 - protein, 92 aa, Homo sapiens
LEDDGKPMIKEAMEEAVVESMMVHRHISKTDGPHTHSPSMSGLHSTFLAMDTEEGVEVWVVNDAPFRYHGKCLRGATSERIQTCVRAAVCWL

SEQ ID NO: 987232 - protein, 81 aa, Homo sapiens
MTGSAVHGGSSLIAFAKPISFISLMSAFLRCRGTGGSVPCWFLMQALTVVCSSLYTSMDLCCSGNVDHTLGPEAPTCSPGG

SEQ ID NO: 987233 - protein, 103 aa, Homo sapiens
LIAGSPLRQRPSQLFTVHSADPPAPCSHSLIRFIAVLTNPQGDYDMSTGKFTCKVPGLYYFVYHALHTANLCVLLYRTGFEVVTFCGHTSNTNQVNSGGVLLT

SEQ ID NO: 987234 - protein, 71 aa, Homo sapiens
RLIQDPMESKAQDADRCAEKAGFHLKADEDLVSPSCCTLHMYLYSSPKCTITGDHFWSVPYPAGLALHNLR

SEQ ID NO: 987235 - protein, 93 aa, Homo sapiens
MVISRYLPGFSNHVNIIHVSVAVAVVGPWQVEDHLPEICIHLPLTQITLALQPACSAYTTEHSLDIMVGVCGTVHIWVLHRELSMLLSPSDVY

SEQ ID NO: 987236 - protein, 68 aa, Homo sapiens
ALLVISYRIPCQIMRQEQMMQNTVFLDCQGVFLGHASIWVLSETCIWSLLAVGARYTVNPARLPTLLS

SEQ ID NO: 987237 - protein, 41 aa, Homo sapiens
GRERPITLPFSVQAGDMHLFSNLDRDPSTDNHAPTTIIHEA

SEQ ID NO: 987238 - protein, 79 aa, Homo sapiens
GLSTLAVHVCSGEPRGHHATVSRRVHSIVFWVAVMACTVVMSPSTIPKLSLDDLGPRVVLKQLGGARECHCLMIFEAVV

SEQ ID NO: 987239 - protein, 52 aa, Homo sapiens
REGVIYISLYAGFIDLVSRVTAVSGAILINPGVSIALVTLTDILAKRLITSC

SEQ ID NO: 987240 - protein, 41 aa, Homo sapiens
VLPARLISNYVATAHAGSGALGPRRASAAVDALYHSAFPSL

SEQ ID NO: 987241 - protein, 40 aa, Homo sapiens
LSKLQAAAETPTSTFHPGKSTGTEPPAPVPYQNYYDREVT

SEQ ID NO: 987242 - protein, 54 aa, Homo sapiens
WLHTLQEVVAEALVGLAGNVGPYGSGDSAPLNEAMAVLQHHDASQRAPLCQSCS

SEQ ID NO: 987243 - protein, 38 aa, Homo sapiens
PFPPVRRDEKVERHEIDSPKESYGPWYSNPTRKAMNWI

SEQ ID NO: 987244 - protein, 35 aa, Homo sapiens
  misc_feature (26)..(26): Xaa can be any naturally occurring amino acid
MLIHQVIQISDFTPSTTDTLRSNQSXPTSQTPFHT

SEQ ID NO: 987245 - protein, 137 aa, Homo sapiens
SFPHKDTFRLELSVKMMLSTLWFSSHEQFYQIPSTFSESEEKESHFVMAQIPGQYPWDRGTCLVIINVLVCLCELNQEAVWMDVDVSHPQYIHPFGAPQRISHPLHLTSWRTFMKNPVLYCSIAVCLRFRCDVPSFS

SEQ ID NO: 987246 - protein, 104 aa, Homo sapiens
GDWPTVAYYYFSQLGTFPRSRRTLIDGASCMLDAICLLSPINIPEYTEPANVNNRYLRTIASMCKLKALDISIARMIVSCMIIATLASITIGARAYNYSQSRQS

SEQ ID NO: 987247 - protein, 76 aa, Homo sapiens
RFSVRVELNEVSVNGAGFPVVLIQTSRDEYRRHLRTMSNTTGGPPVRHMGGDWCFLDEKITEDNFCFNGFTNAGNI

SEQ ID NO: 987248 - protein, 109 aa, Homo sapiens
MLRVPVSIFIPAKINLLYLVVVVFTGISMVPIYLPVDTALFKGRDLESPCARLIREDIMDLPELFIECGGSSFCGCVLLSIVHLQVPVDEVTLSKTNHFHARKTEDYFP

SEQ ID NO: 987249 - protein, 74 aa, Homo sapiens
MALTVETTGQCGAPDDLIFATAHPSDLSPNAITVLQPQLEPCEAMARKCVLWSPWEAGGWVQLDYDPLPPDPSS

SEQ ID NO: 987250 - protein, 192 aa, Homo sapiens
TAVQLHPVGDSVEDPGLSKLGSMWMQILARTVGDVRRDWQLLQDARRARSWAEDEKQKAETVQAALEEAQRAQGIAQGAIRGAVADTRDTEQTLYQVQERMAGAERALSSAGERARQLDALLEALKLKRAGNSLAASTAEETAGSAQGRAQEAEQLLRGPLGDQYQTVKALAERKAQGVLAAQARAEQLRDE

SEQ ID NO: 987251 - protein, 131 aa, Homo sapiens
HRTMLCPQKCGRLHPPCRACYGSPYAAPALRMAPASPAPEVWAGHPPQMRMVTGDILTDITGHNVYEYMLFISDRLRMNRYGSITFGNAMKYTSASFGTKAPPMVRKIAVRRAAQVFYNNKGYHSMPTYLN

SEQ ID NO: 987252 - protein, 56 aa, Homo sapiens
MARPNISFNNGCFKRGPALLTDTMGVKQQFSTFGHELVRGAIADATTQEISTAMNG

SEQ ID NO: 987253 - protein, 37 aa, Homo sapiens
TTLKTKPESLVAEGKKAALIPKEFTLDKQTTEYTIDQ

SEQ ID NO: 987254 - protein, 41 aa, Homo sapiens
AIKGSPVKLTATGAKAFAGFYRAGEPMNPLSTNLTLSAEKV

SEQ ID NO: 987255 - protein, 59 aa, Homo sapiens
LFDQVDVRQRLGLEGPPMMQELGLEEAAIVSMRLGLGEVNLSKVQWPGGEGCGGEELVS

SEQ ID NO: 987256 - protein, 92 aa, Homo sapiens
MVAGWYAVRDKIKPDLLDNVVPSDEGMYTMQTHILYTGGTLGMVSTPDGLAPGADLTGWLTQLLSGTELAGAFETQSFEHLIDSANATPDDW

SEQ ID NO: 987257 - protein, 80 aa, Homo sapiens
SIRHVAEYLKLANSADKQQAARIKQVFEKKNQKSAQTILQLQKKLEHYHRKLREVEQNGIPRQPKDVFRDMHQGLKDVGA

SEQ ID NO: 987258 - protein, 89 aa, Homo sapiens
MPRLTTSSSSKKNRGVVEQARTLAEEELSACQKSLVLLPQFGRTKLIYLSHSGSWAGTRRVIKVLCEVHCWEPLEHRYKRSPEVFAGGK

SEQ ID NO: 987259 - protein, 36 aa, Homo sapiens
HLRPPSSWDYRHASPHLANFLVKTGLRYVAQTGPRI

SEQ ID NO: 987260 - protein, 99 aa, Homo sapiens
EDPFTKSAVYDRGIGQDSAEADYERWFWTDLSKRSLSFDKPQSLAEKDEFEHKRKELEQVCNPIISGLYQGAGGPGPGGFGAQGPKGGSGSGPTIEEVD

SEQ ID NO: 987261 - protein, 104 aa, Homo sapiens
MFPPIQKCFHVHLWETHDSHYFSPLTLKLVKIQKGGELSLVGPFPGLNMKSYAGFLTVNKTYNSNLFFWFFPAQIQHEDAPVVLWLQDGPGCSSMYGLFVEHGP

SEQ ID NO: 987262 - protein, 51 aa, Homo sapiens
SLPQAPKVLGLQCVSHHVWPYCSTLKDWCLFLGQLSSHQTVGAVDTLGEGW

SEQ ID NO: 987263 - protein, 37 aa, Homo sapiens
RYPVYGEGIITAAPSRREGVTAIASTSAESMPPDRPT

SEQ ID NO: 987264 - protein, 39 aa, Homo sapiens
PKSRELGRIGHVLHVEQHCIGVIGQDHIALDVERGGAAV

SEQ ID NO: 987265 - protein, 32 aa, Homo sapiens
MDDWQIDPIALHIVTPPGRRRPARVQALIEYL

SEQ ID NO: 987266 - protein, 43 aa, Homo sapiens
RYRCVSARLTLVSIRTSRHFGPKWLSISPRVVGVSSTVSCSQA

SEQ ID NO: 987267 - protein, 42 aa, Homo sapiens
DRANVNRSLAEGGAGCSGLSADLARPMPEMGEKVDFHLLLLT

SEQ ID NO: 987268 - protein, 40 aa, Homo sapiens
TITAGGYAVRGINPAIVINEDGGMIKHWRRNAALKAMPLI

SEQ ID NO: 987269 - protein, 37 aa, Homo sapiens
MRVAREVPIQSRFGYANGRRQFRCGNAADFHRWIQAL

SEQ ID NO: 987270 - protein, 94 aa, Homo sapiens
SQQRPKNSRFTDSLHYAPGKPTDTQCLALRAAVWDGPCGATVEKLLKALGAHPSHQCGLDVRQGVKGDYFRALRFNDCPAGFWICLGPGVPFFW

SEQ ID NO: 987271 - protein, 72 aa, Homo sapiens
  misc_feature (16)..(16): Xaa can be any naturally occurring amino acid
RLVHGGGCSVDGLVSXSSETLLGLHVSTLLQVQPCLLSAHGTVQQGTETHLFTGQNSRFEGTMKLRYASSSP

SEQ ID NO: 987272 - protein, 87 aa, Homo sapiens
MVPILNGNVSAANAKIILQCCTSCYETLYLRLATLSEMLGPAGAGSYQTLRYSPCRNTVLRVGYGRSPGLACATSSVPPAGTDVIKN

SEQ ID NO: 987273 - protein, 98 aa, Homo sapiens
AACSPTLEDPLCEHPSRAVNPPGDKALFLWNWTYLYRGCTRSVPTGGDVNISRLRLGTRAQAGPTLVERPRLGAKPGPLAEVKGGLKNDVELKRHSYR

SEQ ID NO: 987274 - protein, 113 aa, Homo sapiens
RRGIKRSEDSKVSKCTPMDPGLRPLRALSFQEKVSCFEGGQGMPGVGSVPFLSDLEKKGPTMGLGATLVLWFFAGLVLRGWEDRLLIFFPKRPPASRAFWRKPTNWRTGSLRK

SEQ ID NO: 987275 - protein, 36 aa, Homo sapiens
IPDQPQGCYYIITQKYLAVSTAVTEVSLRDNRFLAV

SEQ ID NO: 987276 - protein, 44 aa, Homo sapiens
SAMFVTCKNWETNPGTAWEIITTKPQIHDNSQRYHCRQITLFSI

SEQ ID NO: 987277 - protein, 67 aa, Homo sapiens
MSPSYVLYDHLFLYVTTKSFDAHYNNLSSSIEEHRGIHILTITRVYSNSSWKELTDITLWVRLIFHN

SEQ ID NO: 987278 - protein, 77 aa, Homo sapiens
MLAGRLYRYPRVSPVSQAGLKLLGSSATARLRPPDSAWDYSAEAIVIPLCDSITQLVSHLGGLQVSLDHGLPALLEF

SEQ ID NO: 987279 - protein, 118 aa, Homo sapiens
CLLVVSRRSPFAMFPPHLKTQLMYVHYINRLVEVTISVVTIVKMQKYAFDKIQHGFRMKNPQQTKNRGHFLVVKNMFNKYLLFTSLLYSETLEAFSLYQKQGNDVPSPNFFSSLQLTS

SEQ ID NO: 987280 - protein, 119 aa, Homo sapiens
FKDPQTVDRLGSVMIVKEMPSADSGPRQVASKQCHPWAEDLVEPIKKHEVPAKSDVYCEVCEFLVKEVTNLIDNNKTEKEILDAFDKMCSKLPKSLSEECQEVVDTYGSSILSILLEEV

SEQ ID NO: 987281 - protein, 109 aa, Homo sapiens
MSENTPGFSSSHSQGRSSTLTLRVHPGLIHQGMPPKYFSTSPPFAHLHCLCASAPAGGLQGFPISSAPARLGPRPSVHPPHLSHLAHHAPAPPSSFCFFPSLWAFAHAC

SEQ ID NO: 987282 - protein, 82 aa, Homo sapiens
YEIPLVSEDNDYWYGQAAGARVGDEYRFVLMNGGQVISRIDPYARHVTNSIGNGIITDPNSYDWEGDDFTAPPTNELVIYEM

SEQ ID NO: 987283 - protein, 32 aa, Homo sapiens
VKTLEQVLGVTLLVRTTRNLALTESGSQLYEE

SEQ ID NO: 987284 - protein, 46 aa, Homo sapiens
MHTLLDAERVGPAYTEDGMLLARRKTREALAAIAARIRPGMLEEDA

SEQ ID NO: 987285 - protein, 78 aa, Homo sapiens
QEDRVQRVNAIAIEQLRRLSGQQTRVFPGRRVPMGRRKHRQKRQNRIDGMARGRDGAATAARTRTRLTHCLGESPEDP

SEQ ID NO: 987286 - protein, 177 aa, Homo sapiens
AAGQTWVFYGCQGVQAFQVICTDQKVLGTCSDNLKHLILELLSATGGVREPQGFLVAGGVADRERSELLSDAERLPMAGGDLVKDRLPPAVRGVRDLERRRIASGERLPERLRGNSGVRDLKRRRIAGGVRDLKRRRVTGEVRERDLLRVTGDVRDRNLLRVTGDVLDLDLLDRRSQ

SEQ ID NO: 987287 - protein, 41 aa, Homo sapiens
QEVDTDEENQDEEETTNSRLAHIRTLASTLRVDRRTLDPNK

SEQ ID NO: 987288 - protein, 136 aa, Homo sapiens
DIHARYARSYVVGVHPGQRLTLRDLGDLLDLGRRHKASAVYLDGVDHNNDELRTIHIATRTSTTTAATTPAMIRLRFLRRRRRSSIATLMSETGIKPCPPEAHQNRANYSDISCAKGDDEVPRTYLFSEGLRKVLL

SEQ ID NO: 987289 - protein, 33 aa, Homo sapiens
TNCEIEGTGILLSSLLSELGSLFYYHRHPVRVF

SEQ ID NO: 987290 - protein, 121 aa, Homo sapiens
RLLEFSNHHLVWLSQARDVVATLESREVVYEVKMRQVPEFNSLPIPLFQIMLGIFYNVLTGMSLADVPFTEKDCENGPQNIYNLYEQVSYNCFIAAGLYLLLGGFSFCQVRLNKRKEYMVR

SEQ ID NO: 987291 - protein, 107 aa, Homo sapiens
MSIFIPQLSAGCACGMTAETQEDGEYVGRGRRPVPLSDSGLTQKETALESNGIQTYFNQRDPWSDGAVKKEDDSQVCGLGDGSVGGEYTRDRKGRDFWWDKTAGAPF

SEQ ID NO: 987292 - protein, 40 aa, Homo sapiens
MGQKVTQAQIEISVVEKEDVDLGTVCLKPVYTYYITYFWY

SEQ ID NO: 987293 - protein, 136 aa, Homo sapiens
LSAPDSWKLTAIRAEYVSLRWTLAVLSSYISLTGLEAIQRTPKIQVYSLHPGKNVKSNFLNCYVSGFHPSDIEVDLLKNGERIEKVEHSDLSFSKDWSFYLLYYTEFTPTEQDEYACRVNHVTLSQPKIVKWDRDM

SEQ ID NO: 987294 - protein, 56 aa, Homo sapiens
RFAPVQRRQVAVSPALIVPLSNGKRTSDDSAAMVVLPQPLGPSRSDEFVFADRQVD

SEQ ID NO: 987295 - protein, 65 aa, Homo sapiens
ASPSADAENRTQAPLETAGKAPPPLRRAPSAIRGRPSVGPGRALRVRGAIIVPFTSLIRPLAVLA

SEQ ID NO: 987296 - protein, 33 aa, Homo sapiens
MGRYLGHGGLSCLKELLIMCPAAIAGPTFLNPA

SEQ ID NO: 987297 - protein, 38 aa, Homo sapiens
QAQSPQSTLGLQCTHHHIWLIFWSRLDIRYVAQTGLEF

SEQ ID NO: 987298 - protein, 179 aa, Homo sapiens
MVYNEDQINRGISTLTVPHRYTASSPTETTWIKSGTTPNYNELRVAPDEHPVRQTEAPLNPKAGREKMTQIMLETFNTPNMYSSHTRLCYPCTPLAVPLDIVMDSGDGVTQHCDPSTRGMPSPMPSCVLDLAGRALTDYLMKILTERGYSYTSKEERDIVRDIKEKLCYVALDFEQEIP

SEQ ID NO: 987299 - protein, 40 aa, Homo sapiens
SRHDDTLEQWGERMGASARTLARCMKDETGMSFHNWRLQV

SEQ ID NO: 987300 - protein, 69 aa, Homo sapiens
MTEALLSHGESRPVCSIPLVLWMRTLGQDLGPIVEISMTVIREPDPCDFRGFVQIFSHRPYFNHLKMYQ

SEQ ID NO: 987301 - protein, 76 aa, Homo sapiens
  misc_feature (71)..(71): Xaa can be any naturally occurring amino acid
VGSWYVYIFLGPEPKSVVQQYLDVVRIPVHAVHYWWPGLPPVPLGATTSTVYHPTRCVDNMTMGPSFAPCXRSKWN

SEQ ID NO: 987302 - protein, 136 aa, Homo sapiens
MSILDISIMTGFALYRMLVLALSYLGYLVVLTAPYADPIPSELTTPSQQYFYLRFALPNGYFILSRLIRVQFQWSLQLKAPVHTVLFKMPLSSYKPLACTSSSTFIERRAGMGCLPSFWHCVVSLFPLGRSVYPVI

SEQ ID NO: 987303 - protein, 68 aa, Homo sapiens
VGTSSAEFMLPADSSIPSQLDRIDVVVASTLSITVISGQFLSVNAGVRSYVEVVLFGLPGDPKRRYRT

SEQ ID NO: 987304 - protein, 162 aa, Homo sapiens
ADSKDPHTVEQVALDAIKVLLQHGGLAETCVYPTQSPWWAKRNCYISENPEDKRHVWFGESIIQMVVPVRAMAAKAPSLPICALQMTFLRLYVTEGSQNISYHCNETVLCLDGQHTGNLVKALVLPGSIEIEIRSEGDSWFTYRRPCRWMHDSLRSLWSDSD

SEQ ID NO: 987305 - protein, 39 aa, Homo sapiens
LTDCPAASCAAERAGVVDDPVDAGGRIDAGASNVCIVER

SEQ ID NO: 987306 - protein, 51 aa, Homo sapiens
GKVGWVGGSQLGWRDVYRTADRANVEARIPGLGAPTSNGATLMMGRREVLV

SEQ ID NO: 987307 - protein, 66 aa, Homo sapiens
RLVPVCSQLLRPVIFVKLTCQCPGHACFARLSHGLLRAVLLAPPGPASGSRWALPLPERLPHSRFF

SEQ ID NO: 987308 - protein, 68 aa, Homo sapiens
QLVLRVLIRTQPGHRIGYPDLFWSVFTTINITGHAIEGVLLLAGAYLVLTLGTSWALNLWYARLRRKG

SEQ ID NO: 987309 - protein, 40 aa, Homo sapiens
PDVLSRRITTQISKDTGATLVVENRPGAAGNIGIALVKRA

SEQ ID NO: 987310 - protein, 76 aa, Homo sapiens
TVRFGSVSKQTIYQVVWRHPCRYNGALSKFNAGGLGAPVHQEDPQRVSPLPGFGSGAPSWELTAAVPMIDAPEPEG

SEQ ID NO: 987311 - protein, 53 aa, Homo sapiens
ELVPLIVNETDIALDARWIAWPGYCLERCAEPHLRAGRLRRVLDEWSPAGAPL

SEQ ID NO: 987312 - protein, 52 aa, Homo sapiens
RPLCPVRPTAVLKGLHGDVLAFRVDAAELGVLWSLCPVGPSAACHVRNNGTC

SEQ ID NO: 987313 - protein, 70 aa, Homo sapiens
EASLDIRRMEGQLDGHFGRVGALAAILELESIGHALADTRHASCPCGFLLDVPCSSGATAAARVGYTLRL

SEQ ID NO: 987314 - protein, 82 aa, Homo sapiens
  misc_feature (69)..(69): Xaa can be any naturally occurring amino acid
  misc_feature (76)..(76): Xaa can be any naturally occurring amino acid
WYQIPFHQTQGSGVPSSPPNGISPIMAQHVLWIWDWALCTLRRSSQVLNSPPAQLSCLPSCRGQQESHXARGDLCXDGNGGS

SEQ ID NO: 987315 - protein, 33 aa, Homo sapiens
MRIPGSGGTKRKAGHIDDGRTESVYGWFCIQSL

SEQ ID NO: 987316 - protein, 33 aa, Homo sapiens
VQNPFHQRGSLEGSGASSRGSILLVFGTEAMIK

SEQ ID NO: 987317 - protein, 38 aa, Homo sapiens
VRYVFCSALGIELLRVSREMAHDDNAELINDRTALAAG

SEQ ID NO: 987318 - protein, 38 aa, Homo sapiens
MRTLPEDEAPSDSCSFKQSRNIISIHRIDFIHLRSKLW

SEQ ID NO: 987319 - protein, 37 aa, Homo sapiens
  misc_feature (27)..(27): Xaa can be any naturally occurring amino acid
SSVQSQNHGLISAESEMIFSGMERGIXGISSRSRLCQ

SEQ ID NO: 987320 - protein, 66 aa, Homo sapiens
VVVGLFAGRDLAPDVTPAPCAFTSCISQLSDGLQIVALAMGLFGVADFLKNINQIGGDTKVTSTKV

SEQ ID NO: 987321 - protein, 58 aa, Homo sapiens
TGPHCRYLGIFRAEWADYYRLKRVAPKTLLAELQDQGEISPVRVEGLEGQFYVHGSLT

SEQ ID NO: 987322 - protein, 69 aa, Homo sapiens
VPVHSGSIRRPRELSTLSGCAAHAQRMATADIFQDPMSSLNPRKRVRDIIGEAPLANGIIARRDYDDYV

SEQ ID NO: 987323 - protein, 63 aa, Homo sapiens
NCRLGWRESGWSGDGNAMLASGVSSLQDTHTGANVESRYFWSRGTNDPMWATINDECSAGSVL

SEQ ID NO: 987324 - protein, 50 aa, Homo sapiens
MSWSQYRKGSQGALFLPLSGDQQAGAAGAATFQHLVRPLGVGQRKFLLVS

SEQ ID NO: 987325 - protein, 64 aa, Homo sapiens
AADAHFFIEMLGLMDVERRQAGRGVCVASAPLRTLRNLPISFSLLMSRRAVAGEMSNAAITSAT

SEQ ID NO: 987326 - protein, 96 aa, Homo sapiens
NFEDSNHDLLPQKPYDWKALFLVALAEVPVIAHACKAAGVNRVTAWRAREADPEFAKAWDDAMEEGVDRAEQEAFRRAVVGYEKPVWYKGVPVGTE

SEQ ID NO: 987327 - protein, 54 aa, Homo sapiens
MPRFTIIQPFSSSDQQIFGPALHAEHRPIAQRQDLLGNRPAQARVAHHRILNAV

SEQ ID NO: 987328 - protein, 55 aa, Homo sapiens
RENGKERKRRSELSKVNLRSTVPEVTERTEPRTSRLMGYHDRVYSHCTTVSVGIS

SEQ ID NO: 987329 - protein, 55 aa, Homo sapiens
GVREKEEEGDGEEEDGDEDEEGSTTRNPSQDVTVPCPVPSTPPSPSLSTPPSLST

SEQ ID NO: 987330 - protein, 103 aa, Homo sapiens
GPERMAWTAVKGHSVGALLYMIPMTQNYILRTLAWCPGDPIVAPMSSTHGVMNYVALFLEYYALTLPSPVTTISIFITTRSLLWWLPMHYLLFLMIFSLFHHD

SEQ ID NO: 987331 - protein, 82 aa, Homo sapiens
MTHVNNHAMDMLQDMLLYSIQWCNPWDSQRLPLCLPEILESVTLSLEPKEAGLSPTNEVINQLLHHVWCECALHRTTKSGTE

SEQ ID NO: 987332 - protein, 57 aa, Homo sapiens
MYGERNIRSLWAEPGGGLWYTHRPNQHLNISYTIGVAGPWLNFIFITLQMNAGKSTA

SEQ ID NO: 987333 - protein, 126 aa, Homo sapiens
ARLVAYFNIEFTRCHKRTGFSTSPESPYTHWKQTVFYKEDYLYREDGRVRSVGTIRHAAQRPQNNSGPVTSPITCDFTGPACAELVLAPPHYRDALEARALPPWTMPRVLSRSYGGFGSSPLSLVH

SEQ ID NO: 987334 - protein, 145 aa, Homo sapiens
ERERVRQPWGPPRCRTVYLSSWREEDGERVVTEITLRWFNGQAVHGNVPEVASATSCICGPFPRTSRGSSMGGDPGAGHPRGSILATIPERGTIGVPLITGMAASEALAPLPFTPNRDRCSWQDLSSKPPSLSCPILPRLPGSIM

SEQ ID NO: 987335 - protein, 47 aa, Homo sapiens
AFRRRYKKIGTGIARPPSSAAWRVEPDAGTKRALQSTLVPDALTTGA

SEQ ID NO: 987336 - protein, 66 aa, Homo sapiens
SERERQTGYFNSLCADTAYGPTWVINADSGARDESFNIIPTPQQMDPVFLLSSLLAVHKIPAGYTS

SEQ ID NO: 987337 - protein, 103 aa, Homo sapiens
MNDQNTNGVDHGAVYPSPCTARRHLKTTIPPAPPTLLKDYLESVYLRPYHDLHWSLSEECDGSFSGLYSASGYRVDMSPEYCPYFVVHHMPLATIRFRSLLKQ

SEQ ID NO: 987338 - protein, 113 aa, Homo sapiens
GAEDILSSPLVRKRRVVIVDPETGKEISMYQGYRKGLIDHQTYLELSQQECQWEENTIFFLDGVVKSMIIDRRFGRQYQIDDAIAKNLIDRLALDQYRAGTLFITEFADMLLG

SEQ ID NO: 987339 - protein, 39 aa, Homo sapiens
ESVITPPDVYLVWTNLGAFGNVFHSGIDDIGDPPAGETQ

SEQ ID NO: 987340 - protein, 68 aa, Homo sapiens
  misc_feature (63)..(63): Xaa can be any naturally occurring amino acid
SRVIPRCGYKARLVQGACLVCTETVHSDALLALILKGRLQEALRRCAPDVSPGADVWGVPELXNSVII

SEQ ID NO: 987341 - protein, 48 aa, Homo sapiens
MPHGAAAARVDVEVRAGGEAGAARGAEAEVARNERPRSRERIWCQEIS

SEQ ID NO: 987342 - protein, 42 aa, Homo sapiens
DSCCLSLEFPGTAQPAATVVTVIASPLPVRPEPPVRCPAGGQ

SEQ ID NO: 987343 - protein, 118 aa, Homo sapiens
LVVLSSVPLGAFLAGYGHSWPPDRDFPADFFSTGMQQMLLILMKALSFKKVSLLRCLCWGHNRIIAAAKYPSYIHKMVIWGANAYVTDEDSMIYEGIRDVSKWSERTRKPLEALYGYD

SEQ ID NO: 987344 - protein, 62 aa, Homo sapiens
DLEYPPGAVFSTGLLCCVIEDDADEALEIYSGPAVYLRTGGKGRQQQQKQQLPQTPPSCLKT

SEQ ID NO: 987345 - protein, 112 aa, Homo sapiens
QGIGIGWLLLRLRTLLDYGPYAAFSVCMRCVCILRKVISCVVSCNHLHPCHCHRTVSSPSGTHLPCDSPFEPHPHTLPVCPWQPQIPSLFSISSFVIWRMLCTWKRVVCNLL

SEQ ID NO: 987346 - protein, 52 aa, Homo sapiens
MLACVGSWLDREKCKQFVDAAHAPAADPVCPGGWDAHTTCQALGVCGTMSSP

SEQ ID NO: 987347 - protein, 49 aa, Homo sapiens
  misc_feature (31)..(32): Xaa can be any naturally occurring amino acid
  misc_feature (41)..(41): Xaa can be any naturally occurring amino acid
PRGVCPPGAGPIPPGEHLNPCEQHTLPPVLXXSDLNWMQHXHNPSAEHL

SEQ ID NO: 987348 - protein, 50 aa, Homo sapiens
ARYRMRYGVLYTHSTIFIPSPGSCTFRAAFARIATARHSAPTAPAGSRFH

SEQ ID NO: 987349 - protein, 96 aa, Homo sapiens
TSGKPGKWEWLGIGLTWRTPWSGQLTVGAENVISRGKNPFSPRNESNDDGTVPYVRYNRISDPTARFFLQWLLTGAERRPLRMRDRDTRIALFGGS

SEQ ID NO: 987350 - protein, 50 aa, Homo sapiens
ARLACSAQLAAALCTGWEIICRRLRQHRLHLSALIAELSQYDGFRYVQLS

SEQ ID NO: 987351 - protein, 37 aa, Homo sapiens
MPVLDAPRGVLFFGFTAALLMRYNSTSSVLREIRSEM

SEQ ID NO: 987352 - protein, 112 aa, Homo sapiens
  misc_feature (83)..(83): Xaa can be any naturally occurring amino acid
RTGFLLMWEEIDKNGKGKKRRGQTIIEGKNEGEEQKGKKIIYPPCPRLCRELLDQRGPEVLQDSLDRSYSTPSGCLDLDLIIXTYRSAFYVLEQQRVGLAVDMDEIEQYQEV

SEQ ID NO: 987353 - protein, 70 aa, Homo sapiens
AGPHRRTGLTAGCGQDLARSRRQQAGDGAASVVLPEPEPPTTATTSRGFDVQVDAIERALGAGAREQALV

SEQ ID NO: 987354 - protein, 67 aa, Homo sapiens
PCSSLTCIAIREAATSNLKKLVENFWEGVGPCYNHPSKVLAMSGFPNYLHRYYYAASVLNCACLRVC

SEQ ID NO: 987355 - protein, 86 aa, Homo sapiens
LRYLRIPAPLGAKEKCSSSQVDMCQRITLLWTRRQINREAFVQFARRVAERLWNRERKGEEEGVGERGVRSLHCVHAQGPVIELEA

SEQ ID NO: 987356 - protein, 155 aa, Homo sapiens
  misc_feature (64)..(64): Xaa can be any naturally occurring amino acid
  misc_feature (89)..(89): Xaa can be any naturally occurring amino acid
  misc_feature (105)..(105): Xaa can be any naturally occurring amino acid
  misc_feature (135)..(135): Xaa can be any naturally occurring amino acid
LEYPLQSSLMSRICISRSAVVVKLLPRSVRIFMRSHVRSRPCPGPDAGLACGEGIPLCRWAQCXVTPVTGSPSRMPDGTDQRRTGYSSXAWIATVHVLRVLRGLXNDDLGHLSRRFGPSGFQGGPPVQQLRVCSXREPTRTLTCTNGVGGQIFSH

SEQ ID NO: 987357 - protein, 175 aa, Homo sapiens
KDPRPPAGMMLECVEKNRDRIVSSKDLYGYTKNDWEAKSAQEILIFWFQKIVVDTSVTNTGQIIYGCRISLLAYGVYPNVCYHKEKRKILNTEGRNALIHKSSVNCPFSSQDMKYPSPFFVFGEKIRTRAISAKGMTIVHPLQLLLFASKKVQSDGQIVLVDDWIKYQYLMKLLL

SEQ ID NO: 987358 - protein, 109 aa, Homo sapiens
  misc_feature (101)..(101): Xaa can be any naturally occurring amino acid
SSYRRLCWLASWIWIRHIWEILGVEWKHSGRCVQADSRTWPGTPLLVTWVHTALRPALLAGQMVWKSPPCTVIIVCLVVPCPLVLVLIITTTVTMMGSGGXRHGTAAFS

SEQ ID NO: 987359 - protein, 80 aa, Homo sapiens
RSVSEKQLNELNIMTQHRAKLLTERELLLDWWTGSEEAEEGAESSQEPVAHTVSEPKVDIPRDSGCFEGSESGRDDSGAV

SEQ ID NO: 987360 - protein, 39 aa, Homo sapiens
MASTRVGLTEDKLENQETARAVSGENPWLENPGAQTGFP

SEQ ID NO: 987361 - protein, 68 aa, Homo sapiens
AYGTMGLRAPAQVVQPEITDSLDTSVTKQCMVLYEALLKGEWDLNIWTPAAEVQKKTYAFNCHRLKRK

SEQ ID NO: 987362 - protein, 127 aa, Homo sapiens
MRFLQLYHEDLLAGLGDVALLGLFGKVRLAFGSAEARLPARRLRSFCGACWAAVAPMCCAWSTRAAPVFISAQKGSTFLQRLEAQFQCVFGTERLLTATLDTGLEEVDPAEALPVLPGNADVYCGPQ

SEQ ID NO: 987363 - protein, 176 aa, Homo sapiens
FKVGLFRGRLRELWVLLEGEASREGPLHILLVPPVPPSCGGSLGGRRVSGRASQETEEQGCPPSCLRAHLRSKPHAQGSGAAVPSLVSFSGEGGILGSAGFGVKMSLPGRACPSHACAPFGIIYSISRPGLGLPTRGAGLGASAGICYRFCGGPGALEVPAYAHLDTCSAHKAATA

SEQ ID NO: 987364 - protein, 71 aa, Homo sapiens
TRLHWCCVKRLRWRESRWRLVGDTRVLGRDDVLGLDASGGVVSRDQTRYIPEVESTGLADGLHEGVRGESG

SEQ ID NO: 987365 - protein, 85 aa, Homo sapiens
VITGSYSSLCWFFWYTKAWRQVSLPKSGKLQESGRRVKKRGSRASQVGLERQLGGENSKSAARLQDAAGEVNEGGSRGTGAQNSV

SEQ ID NO: 987366 - protein, 57 aa, Homo sapiens
  misc_feature (36)..(36): Xaa can be any naturally occurring amino acid
SAAPLHPTTEEDLSTESVASQARLGGLSGSDCLEMXRETTAETIEGLVEELLKREGA

SEQ ID NO: 987367 - protein, 43 aa, Homo sapiens
  misc_feature (4)..(4): Xaa can be any naturally occurring amino acid
RVAXALHTLMLRRCTAHFSSALKASVFFIWGQLGESDTEEGAA

SEQ ID NO: 987368 - protein, 41 aa, Homo sapiens
LLLLFSATDRARQRSTDTFEERERQSHHQLDPLTQNITPIL

SEQ ID NO: 987369 - protein, 77 aa, Homo sapiens
TSCSSSVAGLQVPHHARHFLHFSRDGFTMFAGWSRSLDLVIIHLSFPKCCDYRHEPPTPAMPFLKIQVLPSPGGEGP

SEQ ID NO: 987370 - protein, 106 aa, Homo sapiens
MAGPGLDPDPTPSPNSAGGEDAGGRLVKVERSDTAHAVGEEGIAQGTTHEHVPRCSIGDHLRKGRCVMAGPGLDPDPTPESQLTLVVRTLAAALSKWNARTLRMPS

SEQ ID NO: 987371 - protein, 63 aa, Homo sapiens
  misc_feature (40)..(40): Xaa can be any naturally occurring amino acid
  misc_feature (49)..(49): Xaa can be any naturally occurring amino acid
LLLPLHCSPAPGEPLHRGYSMRCPNSSVSLLTPSCQVYHXSDSTIFNSXLSQTPSPGPFQTVP

SEQ ID NO: 987372 - protein, 91 aa, Homo sapiens
MPLLLSRSCLGLLGKRSWVTPPVQGLSASSTDKMQFHATKLLPSPLAPPEVRCCARLGVLQRHNTHPLHQSQRDNQDVALRPGAVAHACNP

SEQ ID NO: 987373 - protein, 43 aa, Homo sapiens
LSCVTECSLWITAQRQLSSCCAYLCCLLEVCVSTPADGAAICF

SEQ ID NO: 987374 - protein, 109 aa, Homo sapiens
SLLLLFKYTQIWCCSGTAGAHYIELLMNTVSTYQISSALLSSWLGAVVTPVIPALWQGREGWIARSGVRDRPGQHGEALSLLKVQKNWPGVLVHACNPSYSGGWGGRVA

SEQ ID NO: 987375 - protein, 38 aa, Homo sapiens
  misc_feature (37)..(37): Xaa can be any naturally occurring amino acid
SPTYAWVQSDSAVPGSATEEARTFAENNGTALPGDLXP

SEQ ID NO: 987376 - protein, 67 aa, Homo sapiens
  misc_feature (52)..(52): Xaa can be any naturally occurring amino acid
  misc_feature (56)..(56): Xaa can be any naturally occurring amino acid
SSSYPTLCVGGGPEGQALVTWEGHCAKDTNNKFRELKNPKPNWRKPMQWDHXLTRXPLCLLALVASV

SEQ ID NO: 987377 - protein, 34 aa, Homo sapiens
QDLCCSSSAPRVLELRACHYTRLTFVFFVETGLA

SEQ ID NO: 987378 - protein, 54 aa, Homo sapiens
MLSIDSRHCIEKHCENPCPILFRSNYRCMQPPVTYPLLLNRSRPSHVDPLRVVS

SEQ ID NO: 987379 - protein, 40 aa, Homo sapiens
VSRFVGRAVIIVAADESTISWGPHRTFGELGYGDHKPKSS

SEQ ID NO: 987380 - protein, 45 aa, Homo sapiens
LTGYWHLVGRHDFIYRAACVHVELDPLIGIGVITIERAYPLRLGS

SEQ ID NO: 987381 - protein, 56 aa, Homo sapiens
MLAHADDLGAAQRRRALGAAIADQHRVALARGQRVQRRQQVRHEAGAAQHGAVYEA

SEQ ID NO: 987382 - protein, 57 aa, Homo sapiens
PRARHWRRLTSHVDVASDLGSGGDGVQACALKLGVIVFGNNQRVISNHLRFVLEFVH

SEQ ID NO: 987383 - protein, 92 aa, Homo sapiens
LKGWTGSQLSARDREQQPTPDLKPTATQVGKRVSSQLLAPATGCAPRGPGRLQAESVGRAVLVPAMWMVCYPRGSRRNILRLPRSFESTCSG

SEQ ID NO: 987384 - protein, 57 aa, Homo sapiens
RRCPNLNRRTRTTPTLVRFPSRSPPQMRAADGDVAKVYIPARQRSVVRQVQTLGDPC

SEQ ID NO: 987385 - protein, 56 aa, Homo sapiens
SEDPGGRNWAGHVSSLHTLLQLLGAPGLQVTRLPWWMMSGYMCLGGRTPHDLFSSG

SEQ ID NO: 987386 - protein, 41 aa, Homo sapiens
RLFGRQDTGGWGRVHIVTPSRRYVWPEACLELWASCQPERG

SEQ ID NO: 987387 - protein, 39 aa, Homo sapiens
NPVNHLSRIKILPLSTILSYIISYSIRFTASELIHIRYL

SEQ ID NO: 987388 - protein, 67 aa, Homo sapiens
RREAVVNSHLSGSAQLCTEPVPHLDELLFIQAEADDFLAASFSFLWSRCIDKVWGARATDRRCRKSS

SEQ ID NO: 987389 - protein, 38 aa, Homo sapiens
GAGCQNAGWVDGFQESNRGSGEEVGAAAHVSDYGVLGP

SEQ ID NO: 987390 - protein, 72 aa, Homo sapiens
LTGSSAPSLFSNGDTDTFPREEKSMVCCLANNKNVGSRVGKAVAIGIFHVNHVQKIQGCLSSCWVIPNQFFP

SEQ ID NO: 987391 - protein, 57 aa, Homo sapiens
IWKSMRHDLIEEYHGAPPRALFILLSHCSSSSRGWSEDSGKSTTSSRQAEKTRSGLY

SEQ ID NO: 987392 - protein, 89 aa, Homo sapiens
ERERQSTNHLDLSKTYDNHVGTSEGSSPEPEPESSTMALDVTRQTTGLGPSAVFAEPRRQCHTDPQHDCQFQIQIPAPRFADPAGRAGP

SEQ ID NO: 987393 - protein, 35 aa, Homo sapiens
SSSSDQESHVIIIYTICSSTSVVSTTSAGPYLAQS

SEQ ID NO: 987394 - protein, 51 aa, Homo sapiens
MATQGGVSLFHDRHIDRNKQEARYGPPACNYLGPCLRRGKPGEERSVTDDV

SEQ ID NO: 987395 - protein, 152 aa, Homo sapiens
MSLSRPPHSAVGASAPAAPVPLPGVWLRLAVPPRALWLLAASALRAFRSVCRRPLALALLLPPSGIITRPGSAHVFCPGVAHCSVQASFITITASVFQQSLLAQSSLHPSAWGDFCTMELSRQSITVAVLSTQVIFHHTTLIVSSSSSSSCW

SEQ ID NO: 987396 - protein, 163 aa, Homo sapiens
LRGRASAFTAFRPPPPAVSLRPLGSSAPPLPPLSAPAVPLVLRRLPLAPPPPPSGPPPLSPARSPHPSSTFPHSVGAHPSPAWCTFCFTCIGQQPHHRTCIPPAASLITLGRPHAQFIPVVNFSAHSCFPPHQSQGIVQAPLFTVCHSSCNIHIRALLPFCSR

SEQ ID NO: 987397 - protein, 49 aa, Homo sapiens
GSEDAYDGKDYIALNEDCALGPVVDIVSQITQRKWETAMRRSSGEPIWR

SEQ ID NO: 987398 - protein, 36 aa, Homo sapiens
YASCDEHGYTHTHMHTQCRYTHTHMHVCACGCLYVC

SEQ ID NO: 987399 - protein, 58 aa, Homo sapiens
KCIAYEHACSLSYSQVLKQEDLLNLGGEVQRAMIVPLHSSLCDRVRPCLKKYKVFNQQ

SEQ ID NO: 987400 - protein, 138 aa, Homo sapiens
RCEHASIGSRLLSGSTIGPWLWLCAQPTDVVQVRFQAQARAGGGRRYQSTVNAYKTIAREEGFRWPLERDLPNVARNAIVNCAELVTYDLIKDALLKANLMTDDLPCHFTSAFGAGFCTTVIASPVDVVETRYMNSAL

SEQ ID NO: 987401 - protein, 70 aa, Homo sapiens
ADLQHEGPHEDEGDQTQQQQLEAGVSDVTQRQRALLEAGDQDKAHQDGAKERQGQHEVNWEQQSFLGRNY

SEQ ID NO: 987402 - protein, 33 aa, Homo sapiens
RAYDGERQHIARVCGLEKVTCKNGQGNCYKSNS

SEQ ID NO: 987403 - protein, 62 aa, Homo sapiens
FFIERHMGEDQVEMSRYTEARGLPRWTRLTTAEGAYDERVYGMFNIQTLEEAVQHGCCMMKY

SEQ ID NO: 987404 - protein, 49 aa, Homo sapiens
MRTVRAWACPCLRVNAGVGVCSACICVCMSVCMCVCVTLRVWAVLCSGK

SEQ ID NO: 987405 - protein, 37 aa, Homo sapiens
MVIVCRDSHSRMRAPLGCTVEWTDSGQYHVEWGVKAG

SEQ ID NO: 987406 - protein, 35 aa, Homo sapiens
QLETSGIILLLSCTIQCAVTSPRAVYTVNSQFSAS

SEQ ID NO: 987407 - protein, 71 aa, Homo sapiens
HQLAGAGMPLLRHGLWTALTLVLGRWCPTSPVASQGHQWLSWRVARCGQAPLGSDQAAGPESSTVYYLRDQ

SEQ ID NO: 987408 - protein, 99 aa, Homo sapiens
VNTLMTMKNIKIGGEESATSQEYLISLQEESRSSTSAVLESVTTHLTAQLRISYKAGRTPSYAKSITHRPLQTTWEVWSFYLVDKPAKETTQAQRQGET

SEQ ID NO: 987409 - protein, 115 aa, Homo sapiens
GSVRFLLKGGIQVCVPLPRQSLCVTNLLGGLAVRRACYGVLRFLVARGANGCEVVVSGTLRGQRAKSMKLVDGLMIHSGDPVTLPTLTLLCATCCSDRVCWALKVQIMLPWDPNR

SEQ ID NO: 987410 - protein, 54 aa, Homo sapiens
CSAVWNTLIARRILYICFPSVTFPPLWSAGSTGRGKPSEACSSFCSFQPKQEAI

SEQ ID NO: 987411 - protein, 72 aa, Homo sapiens
RAEEAVDEAAGQVTLSMPSKEHSMSRRRQEKPSDEQKRKAQVRRLEGGSSTDILLPSSWSLPGWMHMCVALG

SEQ ID NO: 987412 - protein, 142 aa, Homo sapiens
  misc_feature (15)..(15): Xaa can be any naturally occurring amino acid
PLAYSIVGHSGQCYXYLAHGHEFIVLVLTTSTGRGYVQCVHEACPKGRSEVATGGHPVMQVGFQAAASLMMVIGHHLSTVDNGITSNIGRGPFPEAPEPFLSGNGLVGIDGALVSPTTSSPGLSLESDLYHIRGLGHSHSQG

SEQ ID NO: 987413 - protein, 142 aa, Homo sapiens
WAGPGNILSSGFVCLLHVTCYAHLPAMHCVAGYGSAGCSWCTGPRSASCLGGKFLAVTPCPLSLQVTLSELLGEEALDQAGDDHVPIWLGAAEAQREDLGAGRGCWNTECTVRTRPSPLYCLSSILEEPSTERPGDCPMVTQ

SEQ ID NO: 987414 - protein, 46 aa, Homo sapiens
MSFPIIDYSDLLIILVSLIISIFEITPLTGINNLQLVYYVYPQDSD

SEQ ID NO: 987415 - protein, 120 aa, Homo sapiens
DRRVYRRVTAWDPTGRDEKCVALLQLKFFGIVPHGLPRKISLLFGPDSTHSYVQRQIVQRWRNQPKNLPTPGKHGTKTEVPPKSMWKSVKQPFTLIRQYFFTFGYFILCQWAVSWGLSWS

SEQ ID NO: 987416 - protein, 74 aa, Homo sapiens
MQEADMLFAEDDGCQRVEGVSQERPGRSYAFNMKKRRGEDEGLKGKDQPSAVHRSKVLGQRVNEVISSGWTPTP

SEQ ID NO: 987417 - protein, 58 aa, Homo sapiens
GPRLSSTSCSHFLQCTRGHPGALNGVDCAIFGSPYPMTMALSVLVTIEMCNALNSLSE

SEQ ID NO: 987418 - protein, 34 aa, Homo sapiens
SWYPTGGCTQGLLFSAKLADKRLPAPPGSTTCRW

SEQ ID NO: 987419 - protein, 79 aa, Homo sapiens
ARRSMLRTGAHEEEHGEDRGHAVQRGDRMPVSQIRTVSSSAHVGSPLAFSVAKHLQGEGQEDGADDTTLLGEKLQAGQV

SEQ ID NO: 987420 - protein, 46 aa, Homo sapiens
MACPEAIFAFMCLGWPSGFPEELETVFRLTCTTPVPASSSERQCPP

SEQ ID NO: 987421 - protein, 85 aa, Homo sapiens
LSFCGPRSSDCHPGGPGPVERRLGSIVTTSVDLTCVPIVRYLLQVSRLVLRLWGRQALRPPPLFKSTGLHTHTCTYSCMHMYTRS

SEQ ID NO: 987422 - protein, 111 aa, Homo sapiens
CVIRVFRVCTLRVGCAVLWEVRASRCSPGESPEQDEGVPGFHKIPVPRTSPPRVHLPLKPSEAKLAPAGRRSLTTVLCGPSGSHCPSPSPCAEARHLQPSCPQPQLPRPEA

SEQ ID NO: 987423 - protein, 43 aa, Homo sapiens
MFPPRGRYRRVEGAAVALKLWRGPEIGSPGLTKGADLGGSSNI

SEQ ID NO: 987424 - protein, 41 aa, Homo sapiens
CDPERIRFAFNSESEFGSEASSPYYFGPPAKNGVAAEVSPA

SEQ ID NO: 987425 - protein, 66 aa, Homo sapiens
GLRQQEEEEEEMTRREDGLALNYERKLKSAPEAGGEKYFSVGLDKCWQEPHLLKRACILKTSATIT

SEQ ID NO: 987426 - protein, 44 aa, Homo sapiens
RQDTGAHVFTYGCPRSPAIEAQHLLKRKPDIGDPARGWNGEESF

SEQ ID NO: 987427 - protein, 33 aa, Homo sapiens
FQHWDELKAFFGRGGQGWCTPWLLALGLPQCPG

SEQ ID NO: 987428 - protein, 51 aa, Homo sapiens
NWAGAWELWTPAQLSGPQAWQVTRLPWWMMSGYMCLEAAPRHDLLLRLRLP

SEQ ID NO: 987429 - protein, 61 aa, Homo sapiens
VLEDLWRQDTEETGDSAAVPVLVCGLEEPSWRVFPLLGLTEHEQGASPVGSPEEGCDVGAG

SEQ ID NO: 987430 - protein, 84 aa, Homo sapiens
MSIRVCSSLQRGQDWVSKMRRLEERWTYSETRLFAGGFLVSNFQFWPGLFQCGKAHGPPHWELFLGGLHPILERGGEEGGQQKG

SEQ ID NO: 987431 - protein, 39 aa, Homo sapiens
RREGVGGTATFSGRPSSGTGAWFPISMSCSFSRREADDF

SEQ ID NO: 987432 - protein, 42 aa, Homo sapiens
METPLDVWSRAASLVHADDEKREAALRGEPRMQTLPVASALS

SEQ ID NO: 987433 - protein, 181 aa, Homo sapiens
LGILTRGVRVVPGCQMLTWGCSVLFQAVRGSPGHVGAVPVCQMPTWVCGFCSRLSDAHLWVWVLLQTIRCAPGVVGAAPGCRMLALGLWVLLHAFRCSPWGCGLLLQRCQMLTMGYGCCPMLSDAHLGVVGTAPGCQMLALGLWALLQTLRCSPVVVGAAPDHQMLTWGVSVLLQVSNARV

SEQ ID NO: 987434 - protein, 44 aa, Homo sapiens
IQTDPLAYELGTFPELNAMSMGYGKENLKQNQTQPYTWVGHGVS

SEQ ID NO: 987435 - protein, 40 aa, Homo sapiens
AGKLWMRGLSMEPWHVAHTVYWDGVSVAGGNEEVLGVVAA

SEQ ID NO: 987436 - protein, 63 aa, Homo sapiens
RLPVLCGDGLLSGTERQKENSSPSYQIHTIERKRDEDINSYGGTLGTLRLRFNCEITGMYEIR

SEQ ID NO: 987437 - protein, 35 aa, Homo sapiens
GGHVSTSTGGELPNKGYTCAPYDIGQVVSALCSSH

SEQ ID NO: 987438 - protein, 148 aa, Homo sapiens
APGRSKYPMAIVPVCPMCLPLRGRFTSLQQQHEEPMETSIRMQRRKRSMPVAQEDTTCRQQQQQPDTSSKIRQSLKTMETSQAGSKDKKMDQPPHAMKAKVKNSTVDLPIENQLIMADRQRDAQLVTIATEGQMIMQDKPGARSGMLL

SEQ ID NO: 987439 - protein, 42 aa, Homo sapiens
SPFCLDSCVHPSAYLERGYQRRHVLCPYYRALSNLASRTQGQ

SEQ ID NO: 987440 - protein, 88 aa, Homo sapiens
IGKSDLATTHQAQRSIRDAISLTNIPNSFDNYSMLLEKLEIPNSKKDKENKNPGCTAVILHRIKTLGSMLSFVNKAAVFWAKRMRPNT

SEQ ID NO: 987441 - protein, 71 aa, Homo sapiens
MEVSTVAHVSTELVQCRHAPAVVNTRRPGSMLAIFGGRRGAHVSTEHEQEGMQRSGEYTSSWRHACVLGYW

SEQ ID NO: 987442 - protein, 41 aa, Homo sapiens
LGGDWTALLLVPVDFLGAFVGSFIARISRGRSVREFVIGVV

SEQ ID NO: 987443 - protein, 53 aa, Homo sapiens
LVSEAVSTDNGRHHRSLCSSGGINMAKTLYQKLYDAHVVHEAPNETPLLYIDR

SEQ ID NO: 987444 - protein, 51 aa, Homo sapiens
RYDKNYAIKRFRCISICASLSLLGKYTVRPRDRMDGLLPDATYKRKPTGIT

SEQ ID NO: 987445 - protein, 65 aa, Homo sapiens
EPDVRSHSWSLSPLQAESGVGLDDVTVNYLDEGDLREYSLLPEVGGQVAVGLIPGLPGEYANVVP

SEQ ID NO: 987446 - protein, 85 aa, Homo sapiens
MGQMAMGGAMGINNRGAMPPAPVPAGTPAPPGPATMMPDGTLGLTPPTTERFGQAATMEGIGAIGGTPPAFNRAAPGAEFAQTKS

SEQ ID NO: 987447 - protein, 40 aa, Homo sapiens
VSIVRICWPFGVVAHLFLLNCSHRPLVSSPPQWPKATNSL

SEQ ID NO: 987448 - protein, 67 aa, Homo sapiens
VEKKKEEEDDEEDEEDEEEEEDEEDEDEEEDDDDEEDGSSAVFVFLGLEMHLTPPGTQSHSYLREKN

SEQ ID NO: 987449 - protein, 93 aa, Homo sapiens
WNLTVTKYHNVNLQIQVTMTWIDEALHKSWDETINVHESDMGKWQIPATMSTGLEKNEKSMVREFPWMFGSHGNCISYYNLGQEYNEIVDITV

SEQ ID NO: 987450 - protein, 36 aa, Homo sapiens
MSHSLFLLLLILLTVRAFLLPELQYAFVFCTSCLYR

SEQ ID NO: 987451 - protein, 43 aa, Homo sapiens
EGKSKKKTKKQHKKHSKKKKKKSGSSHKSRVTSRNKSKNEFAE

SEQ ID NO: 987452 - protein, 50 aa, Homo sapiens
EYRSMRTEFGMQIRGSQRLDHPSMMVSLCLEDGRQAYIINNSIITTTKGE

SEQ ID NO: 987453 - protein, 65 aa, Homo sapiens
IPERQDEKVILEKREVNYEQEERVNSRSKSSKRLGVVANTLTTSTLGGRGRRITRAREYELMSYM

SEQ ID NO: 987454 - protein, 49 aa, Homo sapiens
AATCMQNDRQQTHMLYVMQDHFSRAASIIDELLQDRFFTREPRIPTTTC

SEQ ID NO: 987455 - protein, 114 aa, Homo sapiens
MGLSEYVRAPHQEESQPTWMQLGTIGLLETMIRLPQSMCHNPGSCRPPQSLEKSLLWSTEGKYRIRQQNRLKSWSSTCLQIPAFLACECSMTNSRKSAISIFHKNVMCYTYAAR

SEQ ID NO: 987456 - protein, 48 aa, Homo sapiens
MVRHLASYVHNLMHGDEDEEPESPRIQKYRRVSFKGSGLPPSVSLISC

SEQ ID NO: 987457 - protein, 50 aa, Homo sapiens
MAEVSKYVSGFLRIIYSLRVEWESAGRTHLKVDGCISQNWTGLLKRGTEA

SEQ ID NO: 987458 - protein, 45 aa, Homo sapiens
ACEDRGLVQVDDGRKMYLSQAVLVGEVTIGGVLYKICRKGIHGYR

SEQ ID NO: 987459 - protein, 36 aa, Homo sapiens
MCGLFESNGTKGMYSLFIKSSENQGYEVFQRNAKYR

SEQ ID NO: 987460 - protein, 102 aa, Homo sapiens
WEHPILHRRILGTIRHISCAKIEKPYIEEYWPYRNTEQTHVIHKGNVINTATYKEIPRKLGVVAHTYNPSYLADSGGSTEVQEFETSLTNMEKPSLYLKIQN

SEQ ID NO: 987461 - protein, 83 aa, Homo sapiens
MPHGNMHVSTIAAEDDLSTSFPPTRDTSSTTITTSQISSSFSLFIFTFLSAILSHRCSRSIEGKQHFACNVPLLVASGVVAPP

SEQ ID NO: 987462 - protein, 44 aa, Homo sapiens
QRRVAYIKEHKSGAVARLELRGRSGVTTTSTSGVQALLRPQPPK

SEQ ID NO: 987463 - protein, 85 aa, Homo sapiens
RSSLNTGYFWTRQFYATDLHIYPYTSTTASFYFYFFEMESRSVPQAGVQQHDLDSLQPPPPGFKGFLCLSPPKQLGLQVCTPTPG

SEQ ID NO: 987464 - protein, 51 aa, Homo sapiens
LPPLYKLQLQQLQIQQLQLQQSSSYNSVQFTTSLHVVFINVDLTLFHSSNC

SEQ ID NO: 987465 - protein, 40 aa, Homo sapiens
RSHSSQEILAAPFLPGAFSILSSSNTTLFIFLTTHLTRPL

SEQ ID NO: 987466 - protein, 71 aa, Homo sapiens
RVTGYGRRIYRDSNGTGGLKTGQPEAYVRRDFSWTNNISPASPFQTTIPRLAKDSQTHGGSHVPEELLDRP

SEQ ID NO: 987467 - protein, 76 aa, Homo sapiens
QLVVVSRADLSVKRTKRKANTVCTYYDKWELKQWVHMNTKMKTSRHWGTPKLGRDDIGYNGTGNTCRVVVLVRQIH

SEQ ID NO: 987468 - protein, 94 aa, Homo sapiens
INNYISNGSKTNSPIIITGSDAHITILALNVNGLNAPVKRHRLANWIKSQDPSVCCTQETHLMYKETHRLKRKGWRLIYQANGKKKKAGVAILV

SEQ ID NO: 987469 - protein, 90 aa, Homo sapiens
RKPYDITKRSMRDSTRASLIGWEEHLAVKHFSVKVSWNSGHCYYSSRAPFDLFGNKKEKNNIKLYVRRVFIMDSCDELIPEYLNFIRGVF

SEQ ID NO: 987470 - protein, 71 aa, Homo sapiens
DPLGETVAWADGYKHGPERAAYQCRRWSVCAAGGVWHLVITLAPQARLGFCTVKGEDVPLALGTLGGVELR

SEQ ID NO: 987471 - protein, 170 aa, Homo sapiens
MGHSSNYVEGVCMQEIVEGCTGALHILARDVHNRIVIRGLNTIPLFVQLLYSPIGNIPRVAAGVLCELAQDKEAAEAIGSLREPQVLCQSYFTLGMKGVATYAAAVWFRMSEDKPQDYKKGFQFELTSSLFRTEPMAWNETADLGLDIGAQGDPLYRQDDLAIVLSRWCI

SEQ ID NO: 987472 - protein, 47 aa, Homo sapiens
SVALPAVLRCPFLETDILEIYQWARAQRCSLVCTAPVSYTEGLATVF

SEQ ID NO: 987473 - protein, 67 aa, Homo sapiens
THRVRECLGTHRRENAAEHTVVAEEERREITQGGERQVNAQEKTPGERRKKVDSQVNAQGERRGNTQ

SEQ ID NO: 987474 - protein, 104 aa, Homo sapiens
  misc_feature (81)..(81): Xaa can be any naturally occurring amino acid
CEPGFRGVILFTQPGGLVRCRGWHSEVFAWPCCLAVSSAYVVVGLNTDRSMCCPGGTPVAVGAEGPLGSAAGMVRGLTRGXFVREGGSQCLRPPSVAGGTNSLR

SEQ ID NO: 987475 - protein, 40 aa, Homo sapiens
CHNDDAYLLWSVTRTDAWVIKKPLLVLVGPDKGKDDEVLL

SEQ ID NO: 987476 - protein, 115 aa, Homo sapiens
AILDRSYDPQTQVDHPAACLSTSSTSACLAPDIPPSGPATCKPRQGACHSLHSSSSLPSLQSKSLSQRQVRGRMKPLVRHWTLVGGPSLRWGLRAWMHMTPGKLQAAPYSTSTVV

SEQ ID NO: 987477 - protein, 56 aa, Homo sapiens
MRISFTLDRLEGRGLISLYELYAESSLPLTCLPVSLHYLDELLLCSPSLKDSQIHT

SEQ ID NO: 987478 - protein, 59 aa, Homo sapiens
MIPYSLASAVACCSIFLLPEHHAAGIVLGVALALSCTPAFRGAGIAGVSHCAWPHTQPT

SEQ ID NO: 987479 - protein, 58 aa, Homo sapiens
RASGLEFKSRISGRHPYDDSLSKGISTEYLWALGDVVIHFHKRFIFDLLAIFFLPMAA

SEQ ID NO: 987480 - protein, 49 aa, Homo sapiens
MTLDSIVMDPKKDVLIEFYAPWCGHCKAARCPCTTALAKQVQRANKGPW

SEQ ID NO: 987481 - protein, 54 aa, Homo sapiens
KVILMRIPVATSTNRNISPSVLLDRVHSSQLSPRTDTFHPVSSSYRLGTAARNS

SEQ ID NO: 987482 - protein, 47 aa, Homo sapiens
FVLRSERAVVSCSMCCPGVLAITLVLAVFVASLASLPLRGMLSEAMA

SEQ ID NO: 987483 - protein, 64 aa, Homo sapiens
DDTHTVGRSWRYPPGMGAGRWRYPQSGRSCDTQSGRAAIPNRGRANDPPTCEVGGSESNRNMVM

SEQ ID NO: 987484 - protein, 53 aa, Homo sapiens
WPCRERPSYQFMSFLFIIFIIFILLFLLLVIIFFLLLYLVMARPRFSSVLLLP

SEQ ID NO: 987485 - protein, 39 aa, Homo sapiens
SATSTKQKPPHMKYTYTRSTSKINHTQNTPHTFHVGYTR

SEQ ID NO: 987486 - protein, 76 aa, Homo sapiens
  misc_feature (50)..(50): Xaa can be any naturally occurring amino acid
VLRGSRLGLVELGKCCCRYPQTVIQDAGRYPPRVAQDAGRYPQKWCRTLXDTHQAMVLDAGRYPPYSGSWTLCDSP

SEQ ID NO: 987487 - protein, 101 aa, Homo sapiens
DPHSSHSIISSFNLIICTSLFYSHHAHLIIPSHSIIPFHHLISFHLISFQFHGLPLGAMETPKPQGIEVPIGTLPRIKALTGNQLVFHSFRSSNSPGNGYG

SEQ ID NO: 987488 - protein, 37 aa, Homo sapiens
MELPKTRPSLRSSISTSFHKFIPATFLSFPPGCKTTM

SEQ ID NO: 987489 - protein, 38 aa, Homo sapiens
MASAAMEVARLSEQSSLAGKVDRRWLIMPLREAVVEVY

SEQ ID NO: 987490 - protein, 36 aa, Homo sapiens
MDSQSISGFACRVVHHTFWVLTRVRVSTSPPYGGVA

SEQ ID NO: 987491 - protein, 30 aa, Homo sapiens
MRGSPEPGDQGLSELRFVSPRSVGDGIDTQ

SEQ ID NO: 987492 - protein, 121 aa, Homo sapiens
PLEYVTEMLRISCFFCSPSTKSLLREEIVDPLYGIAEVEIPNIQKQRKQLARLVLDWDSVRARWNQAHKSSGTNFQGLPSKIDTLKEEMDEAGNKVEQCKDQLAADMYNFMAKEGEYGKFF

SEQ ID NO: 987493 - protein, 48 aa, Homo sapiens
TEYSQRGHEVGEAAAEAQIMTFQKYGQGRFRPMKQTREQETPPELFLF

SEQ ID NO: 987494 - protein, 69 aa, Homo sapiens
  misc_feature (48)..(48): Xaa can be any naturally occurring amino acid
MWPSDSTHRFIPKRTGNRYSNNPLYTNVHSSTIQSSQNVEGTQMSTKXINGETNGGIHKQRDIIQPSLV

SEQ ID NO: 987495 - protein, 59 aa, Homo sapiens
LQQLLFTLGQGTWKAWRASRPPPVLVKKKIYWEHRHTYEFKYGLWLLTCYNSTAERGYP

SEQ ID NO: 987496 - protein, 81 aa, Homo sapiens
DGYRKYDVRRERTSLGANFDFKINDKNIIKAGAVYNWRDDWDNRYRLRFNKVTPIYDKTDESLITGYKADLRAQTKGGIDT

SEQ ID NO: 987497 - protein, 67 aa, Homo sapiens
  misc_feature (4)..(4): Xaa can be any naturally occurring amino acid
  misc_feature (30)..(30): Xaa can be any naturally occurring amino acid
  misc_feature (35)..(35): Xaa can be any naturally occurring amino acid
  misc_feature (44)..(44): Xaa can be any naturally occurring amino acid
  misc_feature (52)..(52): Xaa can be any naturally occurring amino acid
  misc_feature (56)..(56): Xaa can be any naturally occurring amino acid
HGNXLHDNGGGCIDGGEQPWQVESGSRYAXRAINXEPVGIHADXGTRQLPIXCSSXEIEQCPDRSLI

SEQ ID NO: 987498 - protein, 139 aa, Homo sapiens
RESLNEAAIQAILYLAVVAHPLDRSVRIGEHHIMKFAGCTWLAHDEVQLLELLHPATPGVHGTFPEKPRFSRKRAGVLDRYDGMIGHTRPETKQHVPCRLSLRISVNNLHGNGQCPRNRAEAVVGFSCPFQRFGNVGEV

SEQ ID NO: 987499 - protein, 64 aa, Homo sapiens
MSGRRLYTVLRVQEKEGTITSLLPAVTCTHSGEQDKVLLSYSLPSTKDTPKDQRHQARKSDKRG

SEQ ID NO: 987500 - protein, 35 aa, Homo sapiens
RGFALPRQWEEKESSCQVPGGRKLVERLGLEKLDL

SEQ ID NO: 987501 - protein, 67 aa, Homo sapiens
  misc_feature (65)..(65): Xaa can be any naturally occurring amino acid
MLRISVELASAPRARVRAAARCLGSSEAAQDSSSVDLELPPLWEEHVPSELQERLIQTEGRPSQXRA

SEQ ID NO: 987502 - protein, 35 aa, Homo sapiens
MLLLIEHLALRARNYEYLIRLFQEWEAHRNLSPAP

SEQ ID NO: 987503 - protein, 46 aa, Homo sapiens
MDPLWFLCWRVALVIGTLRFVFTHQLRSSTQHKTTSKDDTRQHKNH

SEQ ID NO: 987504 - protein, 60 aa, Homo sapiens
RVGLVLEAYMRLDEVLPELKASLALSEMLFRGEGPPCACSRMYQYQMKMRKPCKEVMMLK

SEQ ID NO: 987505 - protein, 65 aa, Homo sapiens
MIDGTCTGRHAAVLVNTRLTRLHVYDLGAVITVLTCLTELVYEGMHRTGEYTSICKHACILGSWT

SEQ ID NO: 987506 - protein, 110 aa, Homo sapiens
VLPLIAPLAHASHAERRLKRVSSEQDIDRTLINWKPQRKEEIVAEVNAVEGGRVSASAQLHQFLLGLWCQEANKGTLLGGLKPLQCLACLETHRLCHSDCALIVNGADEV

SEQ ID NO: 987507 - protein, 43 aa, Homo sapiens
MHECVVILLVACILPVVTPPGVVNARCAVSSFCRYSADRYELE

SEQ ID NO: 987508 - protein, 42 aa, Homo sapiens
EAVSPKYTVTPAEPCNSLLATTPILPHMHSGEAGNWALCCFT

SEQ ID NO: 987509 - protein, 94 aa, Homo sapiens
MSAEVPPFSVDCSVSLACTIDKLRTGSYRQIFQPEQVITSKEHAGDNYCRGHYTIGKEIIDLVEDRMRKLVSTTYKYAFNVGEKFQCNLSGVPD

SEQ ID NO: 987510 - protein, 107 aa, Homo sapiens
AAGHLRIPFGVRPTNQVVYLRCTGGEVGALLPWPQDRPLGLSQKKVGDDIGQGTGDWKGLRITVKLTIQNRQAQIEVVLSCLCPNHQSPQGNTKETERNRKKLNTCG

SEQ ID NO: 987511 - protein, 55 aa, Homo sapiens
GQALKPGQALKPVETGFRHVGQASLELLTSSGPPASDFQSAGIAGVSNHTRPKIV

SEQ ID NO: 987512 - protein, 45 aa, Homo sapiens
IRYTATVAGTLSAREHSGQAVTAVFRSPPGTGRVRGDVWAPAALG

SEQ ID NO: 987513 - protein, 88 aa, Homo sapiens
LEDPYHFCCVRRARTVCSTIQTMSLVRVAHSATSCERWCPLAVRTGWRSRRRGKQRLVLRFVVGVVADKTLAGCQVDLLGHQLLLVES

SEQ ID NO: 987514 - protein, 37 aa, Homo sapiens
SDSLGATRLCPSEIIGECVRLTLAALVEPRIRKALVS

SEQ ID NO: 987515 - protein, 33 aa, Homo sapiens
HLQQRCRYTVTPGLDRAARTWRPGTSVFFLNSP

SEQ ID NO: 987516 - protein, 51 aa, Homo sapiens
  misc_feature (44)..(44): Xaa can be any naturally occurring amino acid
LRILHTATADPFTDSEDRAARVAVLTHTSRLARSEACAPRSWCXGTSSNRI

SEQ ID NO: 987517 - protein, 35 aa, Homo sapiens
RPSRAVHLNYSQKGVIDVFLQLGKDTQVCMGHDEL

SEQ ID NO: 987518 - protein, 32 aa, Homo sapiens
LAAQCIVMDLETGHPHGAIYEGYASPTPSASG

SEQ ID NO: 987519 - protein, 71 aa, Homo sapiens
AAVEAAEKVGTVSETVGASYREVSCVDSQEGRSAEPGPGRAVRLRRMPCWLERRIRKRVRKKKGEQKGPAR

SEQ ID NO: 987520 - protein, 38 aa, Homo sapiens
LVMKDNGRSCPPVMRFARGDAGVLDAEDCQTLTKTICA

SEQ ID NO: 987521 - protein, 32 aa, Homo sapiens
MGSHVAGCSTLTHDLPLTSKVLDDSVSTVPAR

SEQ ID NO: 987522 - protein, 43 aa, Homo sapiens
RSAQADRQHIDSQTRVTEEDAGRISIQSTVKDDEESKCTRAGG

SEQ ID NO: 987523 - protein, 42 aa, Homo sapiens
YHKGKLPPNLGNGADLPNYRWSQTLSELDLAVPFLCELPAES

SEQ ID NO: 987524 - protein, 74 aa, Homo sapiens
TGLLRVAVSACEAGESLEPGEAEERWAEIAPLHSSLGGESGIPSQKETKKTQKKTCRWSTVFKVLSTDTYNPVA

SEQ ID NO: 987525 - protein, 66 aa, Homo sapiens
RRPSKKRLETYYKVTEPCHLPSIRNCGYCCAHGQLLMGSGGHVSSPRVCTHHGGPKVATLDAVYRL

SEQ ID NO: 987526 - protein, 169 aa, Homo sapiens
GQALKLRVARRGVPGRGLLRLAEFLSVQLGAEKNWGGPADWASLAKSPSRLTVDSQLLGLSGMASKAPGGRQALAPGGLSQPPRGPGPPLQMDSHSKKKGLSHFTAVPGEPLGDETQGQQPLQLEEDQRAWQRLEQLILGQLEELKQQLEQQEEELGRLRLGVGATDSE

SEQ ID NO: 987527 - protein, 42 aa, Homo sapiens
MKLSSPFSISPSLAVDHIHNRRNSTHFFDPGGGDPFYNNNYS

SEQ ID NO: 987528 - protein, 35 aa, Homo sapiens
PGSQQAGLNRECDGVVCARVGVCDGCAECWRYCVY

SEQ ID NO: 987529 - protein, 91 aa, Homo sapiens
MRQEGLLAPPTVAHTGEFRPVLECEDGGGQLQAGRVSRQAILLPLPQGEPPSRSQGTGCRAPELHPAAVVAGTQEELALEGCAWQAVESNE

SEQ ID NO: 987530 - protein, 129 aa, Homo sapiens
MEGQTSGWTSMAGAKKQQLGLVLGRSQGMTEGGDCKTDEKILGSTLYSSGKARGDPLTKQISDNQYCFKNWVLGDGIVMAYDNVLQKLLEEYGSDDTRNVKETTEYLKTSWINLKQSIADRQNALEASV

SEQ ID NO: 987531 - protein, 77 aa, Homo sapiens
APLDEIVVNWCNGTFGKVVECLDHARVKSQVALKIIRYVGMYREVVRLEINVLYINQGEGQSKTMFLCVLMSDWFNF

SEQ ID NO: 987532 - protein, 40 aa, Homo sapiens
TNRNNGFEKNIVLASLYLITALRLYNLYADFDLCIEVNCI

SEQ ID NO: 987533 - protein, 127 aa, Homo sapiens
MTGSNSHITILALNVNGLNAPVKRHRLANWIKSQDPSVCCTQETHLMYKDTHRLKIKGWRKIYQANGKKKKAGVAILVSDKTDFKLTKIKRDKEGHYIMVKGSIQQEELTMLNIYAPNTGAPRFVKQ

SEQ ID NO: 987534 - protein, 81 aa, Homo sapiens
RSRTGYVSFHCHGHFSPNSTKNWNISTDSNAKERPKNNVTNIELKEEWKREGFMLVRGSKGQYVFEDYHLIKAHWLYDKPP

SEQ ID NO: 987535 - protein, 57 aa, Homo sapiens
RFRAGTEASHPCKQLMDFCNVVAAETGRVIYVSDSVTPVLNQPQSEWYGSTLYAQVH

SEQ ID NO: 987536 - protein, 39 aa, Homo sapiens
YRAYLAAQWCTPGFQPLKRLRHENCVNLGGGGCRAAETM

SEQ ID NO: 987537 - protein, 51 aa, Homo sapiens
GLGRPLHETCPCVGVLWTVTTPPGWDSDSATSRQDQPCSPQLTYRLTWYRR

SEQ ID NO: 987538 - protein, 34 aa, Homo sapiens
HLHEEEMRGLLIVGMFYHMPMLHIDYRITNIKQE

SEQ ID NO: 987539 - protein, 41 aa, Homo sapiens
SVSTNRRIKEVQENLAECGGACLESQLLERLKQENHWNLFV

SEQ ID NO: 987540 - protein, 103 aa, Homo sapiens
KLTRESDGVFHAATDVNIKMTTFSEKCCLDVPFSVPAVEGNDSILIWFPFNPLVVRVRWYLDVTSDWMFTGKLLKWSFGAKMNSFPSSKKFPSWSLSFISTAL

SEQ ID NO: 987541 - protein, 35 aa, Homo sapiens
ASGEPGTHIKRIASGSSEEAAYSNPSLALVHPPSH

SEQ ID NO: 987542 - protein, 70 aa, Homo sapiens
MEPTMVSNRKYVPAFRRSGWLPHRVMIAQVRIRVVTKNMCNMISSVAVNVIIKEICREISIERKSFFRDS

SEQ ID NO: 987543 - protein, 89 aa, Homo sapiens
AYLQCGDCDERPWSRTLPAPRCSRILRKPMSVEMNVNVLDFVALSAHVCILCAQEQGTRCRYEDYVEGLRVFDKEGNGTVMGAEIRHVL

SEQ ID NO: 987544 - protein, 139 aa, Homo sapiens
TAGLSVSHCIRPLCPLLIRGFRTVQSNCNWCPDSSPSIEAEVPLLLASHRGPLIPAHLLELAGMRTRGPHQCHMIDRLLAVAGACIEGKPRYPHQNAVSRKDHMGLHSPHKSSSFSILHRPYTLYPVARSRSRISTGVM

SEQ ID NO: 987545 - protein, 60 aa, Homo sapiens
MEVGVAGPLGAPVYQGRKQEAVNSITQLPSEDGKSCVGKTDRKHNNAEDEELEHYRSHES

SEQ ID NO: 987546 - protein, 62 aa, Homo sapiens
KYVDSMRDTPVDTFWNIILGGLVLDVQVKQKARKDLCYIPSVLAIYYHLEDLTTPIHVCISY

SEQ ID NO: 987547 - protein, 132 aa, Homo sapiens
LELSPPNVDSAMASSCVVLQGSLDLWASQDSANICINHLVHSTIVVLLREAALRLVPYNSSYFRKALSVQMQKRPTCPPGASFKMFSLLTLSRVIPGMFLKALLNTIFLIIYNARAPALDTATVSHACVHFF

SEQ ID NO: 987548 - protein, 40 aa, Homo sapiens
PVDLSELIEQNRRAAAEGSDDDPITAAADQSPLLQERDLI

SEQ ID NO: 987549 - protein, 97 aa, Homo sapiens
MRSPTNVNLSDIRRIGQRNQRNLCQQLQHHLVNANVVSRHTSHGYNKIPADDHNLIGVTAELVDTLYAKVRGKMLSPVSLPSVCVRLFSNQIRQSRA

SEQ ID NO: 987550 - protein, 30 aa, Homo sapiens
MPYSKASAPGGLPVLCFPPGTMRSPPGYPR

SEQ ID NO: 987551 - protein, 98 aa, Homo sapiens
CGLMRRRTFASCCATIYPILSGYNSPSLVLCCLLCQLLEGCTVARIALAREVEAAEVVIMPLRSSLGDQIKTLVSNNNNNKDQDLCQIDTLSCASLMG

SEQ ID NO: 987552 - protein, 57 aa, Homo sapiens
SGPVLPHKQFTLGLTPAVYSTCFDKSLMRCIHYYGTIQSGSIALKILCATPVCGGST

SEQ ID NO: 987553 - protein, 34 aa, Homo sapiens
RGRQQQNAERRGYFLFYSLVGSFPYSSHYIYTHN

SEQ ID NO: 987554 - protein, 76 aa, Homo sapiens
MAFGRHGSATVPGRRVLRLVLVFSESRSFLLLPIPDFVALGVHDLPRSHRDRFDTGRGPDLDGRVGLSLEVEIPIR

SEQ ID NO: 987555 - protein, 54 aa, Homo sapiens
LGTILAVSYNVVLCRVCTMSSDEFGKYNASRVPPSGEQRDELLGLRAREQIISY

SEQ ID NO: 987556 - protein, 71 aa, Homo sapiens
YWHSSQVTIHVTQPSLSVKSFPVVQLPLSLGFQLALPAYWLLTAEDSYDSEAIQRNRFYFKINLDVKAGTR

SEQ ID NO: 987557 - protein, 76 aa, Homo sapiens
LNESWSVSTVLMCRRNLYTGWHAPDVVNTRRPGSSLTIFGESARCSRVDGTCPGRHAPAVGEYTSTCRHACMLVVL

SEQ ID NO: 987558 - protein, 44 aa, Homo sapiens
MAIIRKVRKQQVLERMWRNRNTFTLFVEVALGILYKSELAGNSS

SEQ ID NO: 987559 - protein, 30 aa, Homo sapiens
MYFAGTWMKLEAIILSKLTQEQKTKHRVYS

SEQ ID NO: 987560 - protein, 51 aa, Homo sapiens
VYPQTAYNQWTVTVIIKEICKEISIAEVEYFLVIVVHWISGVCLPVCGGST

SEQ ID NO: 987561 - protein, 63 aa, Homo sapiens
CEYTSVCTQQKDGLIATCTEADATWMLNRLPILHTCRPCVHSNCWFLCYIPCSGSDWDGNTNC

SEQ ID NO: 987562 - protein, 38 aa, Homo sapiens
TVLSQTECYHPPTECYLLYCQVQCGGCPLFVESVSAVS

SEQ ID NO: 987563 - protein, 37 aa, Homo sapiens
FEMLYRAVWYVSKEEISRFIEQLPPMSDYGLRNKKSW

SEQ ID NO: 987564 - protein, 59 aa, Homo sapiens
MSSTQKVYYSLYFTRCILLHHHKADIIHGKCLTHEETEARRWHVLLCVTMSNELSVEVA

SEQ ID NO: 987565 - protein, 104 aa, Homo sapiens
NCTGLVLVARGWAWPWACAGLAGSAQRQWRLAFFFAASAGGTALNRNNAAMAAASTRGEYGIKKLPWNTDRGACTIRARTASVKAQSAWWRWGFSQPRRRARSA

SEQ ID NO: 987566 - protein, 90 aa, Homo sapiens
MSASVHESGVLPPQTEWYLHKQSAISTNRVLAPQTVCGYLHTDSATSTPRVRTSTNRGLPPQTECYLYKQSAPPQTECYHPQTVVRSSTN

SEQ ID NO: 987567 - protein, 167 aa, Homo sapiens
YSRAVRRISRMEHSFRGGGGGSSVLEGSGAGRRGERPSGPRPSYPRGIRLKQHGAAWLSGLSEANASLAERDDAAKDCPADPVGPSPQDPSLEASGPSPKPAGVDISEAPQTSSPLPSADIDMKTMETAEKLARFVAQVGPEIEQFSIENSTDNPDLWFLHDQNSSA

SEQ ID NO: 987568 - protein, 71 aa, Homo sapiens
HRVTLCSLSSVVWDDIYRCREFSEIAEIMAFTLPPLLVRGDAAAIGESFETIPDRKIVRGSDGITSTIYQR

SEQ ID NO: 987569 - protein, 44 aa, Homo sapiens
SWYQSHGGLTFPEKPGLSLVSERDEKATMALEKSLVLAPSACPD

SEQ ID NO: 987570 - protein, 101 aa, Homo sapiens
TCYYQCGVSNSITLLQPPLPGFKGFSHLSLPSSWDHKHAPPHLANFFCRDTVSLWSGLELLTSSDPPAAASQSAGITGVSHCAHPEPYFFCSVSGNSENAS

SEQ ID NO: 987571 - protein, 102 aa, Homo sapiens
TRYLLIAQGETQETLFQSPSSSLIGDEMRFRQWLYATPLYFPVSTSLLINDRSVLITGLVRLCFGESNTAGLECSNRLAIGMIIDMESVPSSLAICPPLFPY

SEQ ID NO: 987572 - protein, 43 aa, Homo sapiens
YSRDAPAVIVWVRMKSAYISSKDRFSRIKVGSTNPVSNPFKFE

SEQ ID NO: 987573 - protein, 39 aa, Homo sapiens
MRTYYCMDTDTSYFPPGIACCRCLVSRCFRGHTQREMIH

SEQ ID NO: 987574 - protein, 63 aa, Homo sapiens
  misc_feature (33)..(33): Xaa can be any naturally occurring amino acid
VRSYRMQEIKCVGLYYQMEKSFMSKNESRSCAXMYCGCGYFNEKEIIRRLCEKIGAAEEKRLV

SEQ ID NO: 987575 - protein, 36 aa, Homo sapiens
MYIAATGAWTFPDWNLRILGLKCPELRCCWSEQCLR

SEQ ID NO: 987576 - protein, 54 aa, Homo sapiens
CSILEVVHVLLGKPDQLLPVVQHLNMVEAQGADDDDVAIIVVAAGGRSFGQAGI

SEQ ID NO: 987577 - protein, 68 aa, Homo sapiens
GYDVSGFGASREIDDGDSSSTQPRSQEGPEGVQVAAHAERDRWPESEPLGARCRLHRVHGAVVEPPVF

SEQ ID NO: 987578 - protein, 44 aa, Homo sapiens
NVCCAVISRYMLLNRESLPHLECRFIEVKKERVLIQMLLDLELS

SEQ ID NO: 987579 - protein, 72 aa, Homo sapiens
RRSLNSDKVIIGGGMCYTFLAAQDIKVQQSLLQEEQIDKCKELLEEFGSKLVLPVDLVAAASFAADADNKIV

SEQ ID NO: 987580 - protein, 71 aa, Homo sapiens
VSENPYSQQANNTMNSPFLVTPQWLAQHINDENLVVIDVRMSPVGLTPKKDMLAEFERGHIPGAVYFDIDE

SEQ ID NO: 987581 - protein, 94 aa, Homo sapiens
MTMVSQSIDNLSCVRPENVMKEAVQHGRVQAMLSMSSTCCPGRCGARARSHLQERRMCVSVAELIAAQDLDEKLSSSADMDRARCHLTGYFGAW

SEQ ID NO: 987582 - protein, 107 aa, Homo sapiens
VRLESRSFPRLRSEGFLGKLTYAKAPMWGREGFLGNCLFFSSFLRQGLAVSPRLKCNGVIIAHCSLDLQGSASQVAGSTGAHHHAWLVFKFLVEMGLAVLPRLVFNV

SEQ ID NO: 987583 - protein, 125 aa, Homo sapiens
YRQSLKGSQGDIPQKGLGHVRGLVGSTSIPLPFPLLLPYPFFLVSLAYRNKGSSKGRTFSSPILLFSVDPLTHFHSSLRVGPQLVLMCQCLITQVGNSDDGPKRARGPSGYRGPAENSKVSPGSA

SEQ ID NO: 987584 - protein, 98 aa, Homo sapiens
GEVSYSAILQGRVSTGSTIPQRGILIGIQQSFRSRFLGVAEQLHNEGFKLYATEASITIWFNAQQVYLTSQLAWASQYGQRSQTVVFHSETSMRAWQD

SEQ ID NO: 987585 - protein, 33 aa, Homo sapiens
SDIWRSALVLTCLTELVHGRHAPAVVNTRRPGS

SEQ ID NO: 987586 - protein, 71 aa, Homo sapiens
AYARMSRNTVVDLVLCTPGALARNLGCRLRQHQHDLFVWEHRVSSPLPSASSATILRAVKASSLTRLWFPM

SEQ ID NO: 987587 - protein, 38 aa, Homo sapiens
VLHLNDIWSVSTGAHVSTELCTVKACTCSGEYTSDHGS

SEQ ID NO: 987588 - protein, 87 aa, Homo sapiens
  misc_feature (15)..(15): Xaa can be any naturally occurring amino acid
MIGSGGSLEVTRLHXRVLEVSTVLTCRRNLYSEACTAVVNTRRPGSMLARLGGQRGAHVSKELVQGGMHRSGEYTSSWRHECMLGYW

SEQ ID NO: 987589 - protein, 87 aa, Homo sapiens
MLIVHECRSNAVVDWCSARHGALVESRRSVRSIQHDLFVWEHPVDSPVPRASSATILRAVKASSVDQALFPDDLGQALQVFLHLQGT

SEQ ID NO: 987590 - protein, 33 aa, Homo sapiens
  misc_feature (3)..(3): Xaa can be any naturally occurring amino acid
SSXGTAPLWEYGSWYKACKVDSPTVNTTLRSLG

SEQ ID NO: 987591 - protein, 47 aa, Homo sapiens
TAAAGRGGQRAAEPQLQTWLRAETAETVRRASELDNPFQDPAVIQHR

SEQ ID NO: 987592 - protein, 58 aa, Homo sapiens
LLIIGVWVEMSRFIAGMFIITSAILHKGFYDTTGYLRLQGGGYNFLQLEKAIRYLFID

SEQ ID NO: 987593 - protein, 67 aa, Homo sapiens
GAGAHHDLPRLDATVGPELSSSNLPGAYREITSMTEGSTGLVSAQGHRHIPMTQDIGDDLARRLAGI

SEQ ID NO: 987594 - protein, 56 aa, Homo sapiens
VDGAAYLSVFPIISSSVSGDFDRSFLCPVITLQATALTTLDHDFCARFADPAHEGI

SEQ ID NO: 987595 - protein, 97 aa, Homo sapiens
  misc_feature (71)..(71): Xaa can be any naturally occurring amino acid
TAASSCDQEYNPAEHYGTYQKHIYEFLQLNKPESVSLALTKDIIDRMINYTFKKRTVRLKKFPWIGFDAWXTKFETSLINYKAFWGARGLTGLKSET

SEQ ID NO: 987596 - protein, 74 aa, Homo sapiens
MRYRRAARADDEPKPVERGGTLSLSLFNEDYWDNNRRSQSVSLSYNNSWEAVSYGLNYTFNQNGYDSNGNRSSI

SEQ ID NO: 987597 - protein, 106 aa, Homo sapiens
TDKEVYKHKEDSSEELICVYYLVPSEGWVVEVQDIFQRLLLLIMIFFSAHLENIIPELRKPFLTEAPVEQDFSPFLTPDPPSAAADASPEPGSLSDSLDVQIFPAP

SEQ ID NO: 987598 - protein, 72 aa, Homo sapiens
MEVSTVLTCRRNLYSGGITGVGEYTSDQAPSIGYLEVSTVLTYRRNLSQGGMHRSGEYTSSCEAMIASARVL

SEQ ID NO: 987599 - protein, 56 aa, Homo sapiens
IPTSTFSAYPECPDVYSDYPDAYYHIKHPIICRLIHFLYSSQFKYLLIFSVSFVRR

SEQ ID NO: 987600 - protein, 72 aa, Homo sapiens
NNIMRLTQSATSDAGSALKKQRKVMMAGRGGGVCNPNYSGGWAYRCAPPHLANFLVSTFVEMRSRYVAQSGS

SEQ ID NO: 987601 - protein, 48 aa, Homo sapiens
VPLDVVRAACCRRQVRGWAATIRTARSIISTRLGKCITVTEPGRFCGA

SEQ ID NO: 987602 - protein, 39 aa, Homo sapiens
SRKTALLLVANCRTAAVGHTDKIGRLKELCEQYGIWLFV

SEQ ID NO: 987603 - protein, 71 aa, Homo sapiens
DTSTNSVGVHIIIVLRRRIIDATVSCVLYLSCQQNSNRGCKPVGIYQNDCAGQASRGLDDNGCYYEGYVVD

SEQ ID NO: 987604 - protein, 54 aa, Homo sapiens
MTHLDSMIYFYRKTKQRSQVLRSREGSEGFTLITSGPFWSPVGARIHFPSVCAW

SEQ ID NO: 987605 - protein, 72 aa, Homo sapiens
ADVDIKGPKTDMDGPEVDVHEAQRGTEEAQYDKAQVQRCRASKQRGAEVDVNLSTARCCCHQDPRWMWKSQM

SEQ ID NO: 987606 - protein, 53 aa, Homo sapiens
MWWVQYRNQYYVDIKSQVTFTETRRYRLSPILENREHTLEQVLMQSDLFVEVA

SEQ ID NO: 987607 - protein, 40 aa, Homo sapiens
RCIGDTFQRKVTVVITATSKKLQEDTLAYTTTIHVRNSDV

SEQ ID NO: 987608 - protein, 56 aa, Homo sapiens
EPTSRHWIAEKEALRSLLGVLPDLVVEILGVNKCRLSWGLVLESLQQRLYEQAFDR

SEQ ID NO: 987609 - protein, 44 aa, Homo sapiens
VLQLLLLLFDEVSLQQKDLFVEEKEIEELKSERDTLLARIERIE

SEQ ID NO: 987610 - protein, 122 aa, Homo sapiens
RYKLNCLDGASLKLTGVIVDDGHKSVAKVWLLSQRCLSTSLVCIRVAMWKTALHDVIVPAVGEHGVLNTHVQASQVHLVRLAVLQLDEPAQARQELRVPVGAMLIGQDGELAVALAFSRWVF

SEQ ID NO: 987611 - protein, 62 aa, Homo sapiens
IAVIHQREHFPHMYLSVAETQQKKKISGHISLMNIDVKILNTILANQKAYPPRSSQLHRWLF

SEQ ID NO: 987612 - protein, 58 aa, Homo sapiens
TGTKCYSTNSHIHTPHTSISHIHIMHHTHHIHTHPFPRTSISTHHTHSTGYTLFVEVA

SEQ ID NO: 987613 - protein, 166 aa, Homo sapiens
SSVPVLLHKAVYAEKWQCRAVPTPVINPYQLSYLLHVTFMVAIPQTQNRAAYYPPSQIAQLRPSPRWTAQGARPHPFQNMPGAIRPAAPRPPFSTMRPASSQVPRVMSTQRVANTSTQTMGPRPAAAAAAATPAVRIVPQYKYAAGVRNPQQHLNAHSTGLFVEVA

SEQ ID NO: 987614 - protein, 39 aa, Homo sapiens
RDGTLIAQDEVYVVNEKFGIRLTDIITPAERMRKLLRRI

SEQ ID NO: 987615 - protein, 33 aa, Homo sapiens
MSTCPQSCSFPGTYIELVMVGASNSFPVKALKT

SEQ ID NO: 987616 - protein, 78 aa, Homo sapiens
MGERSEPGCASIPAKHEQELAHLSKPWGRHLQMTWGGHSFSTGPPEGQADANSSPGTVGQRAECAVALLGAYGELGGL

SEQ ID NO: 987617 - protein, 38 aa, Homo sapiens
MDTLKTNLKRGTIVFQIPSLRRVVNRKIASVTEEKSAW

SEQ ID NO: 987618 - protein, 73 aa, Homo sapiens
VESSVYASCLVCSAVIIVATVKIRGVAYCIRYIPENALYVTLIAFASVMIWNATGAHCSEESQDESVEGRIRS

SEQ ID NO: 987619 - protein, 73 aa, Homo sapiens
YISSVTHDSCIFVRQIRTCLNLVSIAMMSCALQWCSPPTSSKLTIGFGADDDRIVETAVGLDRVIQKESESGL

SEQ ID NO: 987620 - protein, 38 aa, Homo sapiens
ELAPDLMSSGIPRQDCATFKWSPCPIIRDRHGFICTEP

SEQ ID NO: 987621 - protein, 83 aa, Homo sapiens
GGGGACCAKALEKGLRMGSCVLRWRIFTSGKLCVLISMRSINAFEVSGSGRPCNANICKARDQSRASFPFSLTMKRASGEGAP

SEQ ID NO: 987622 - protein, 63 aa, Homo sapiens
AGRRAEIGVKAIDQGRFSGFVNACCKSGALEVMVPQGRFGYQPQAERHGNYLAIAAGSGITPM

SEQ ID NO: 987623 - protein, 33 aa, Homo sapiens
EPGPPSTATTLFFMVLVLGRDLLLHSVGNARYI

SEQ ID NO: 987624 - protein, 33 aa, Homo sapiens
HSFFSFIRHPLFVNIFYSVPPLQSSIIIFFSFS

SEQ ID NO: 987625 - protein, 67 aa, Homo sapiens
ALWCDEARGVSSRGYDSCDIAEIVERRFEHQVTSYARARTAADAHAGESPLKSHTASNEGSRTIRIS

SEQ ID NO: 987626 - protein, 45 aa, Homo sapiens
LDRQALFLPWMECGLGLLGSMNSCGVDCVKRIPDSTAMWWSCCQS

SEQ ID NO: 987627 - protein, 59 aa, Homo sapiens
MIFLMVLGATLISFCMRSAMPGYIVVPRIGHVSIEVLPDVYITLHDAVVSGFMDASRLH

SEQ ID NO: 987628 - protein, 42 aa, Homo sapiens
  misc_feature (16)..(16): Xaa can be any naturally occurring amino acid
DQLGTYSRIQDFCGRXIMMSLKKRVLGYKTLALVVEYPMVCR

SEQ ID NO: 987629 - protein, 46 aa, Homo sapiens
APVQDVLGKSRARAQRRRRRCGEQDLQTALLQLRRWTRTDSRAVSD

SEQ ID NO: 987630 - protein, 45 aa, Homo sapiens
RKRVNWVVRIVSSGHFAEVYQLKELWAETMGLLDIELSHLQRDVV

SEQ ID NO: 987631 - protein, 35 aa, Homo sapiens
SARTGDILNIQANKRGMPLYWISPEAVKPAEEKSA

SEQ ID NO: 987632 - protein, 38 aa, Homo sapiens
HSDCTTLSFTDDGDLFTDLYLCVQTQLTTFVRLLHLLT

SEQ ID NO: 987633 - protein, 39 aa, Homo sapiens
PGTQQGADVTQEHSKKHGHTSLNTRQRNNLGRSSETGGK

SEQ ID NO: 987634 - protein, 68 aa, Homo sapiens
PVPGQLHFVRQIRTGLNLGPLQDVMRPPAALTTNKLEATIGFGADDDRIVETAVGLDRVSQKESEGSL

SEQ ID NO: 987635 - protein, 67 aa, Homo sapiens
SNLYTLARASFGLQNTKSWRTGTGTQAQLKVQVSASGGRTCCTNALRKLYSLEIRGQGFDWPPMVYT

SEQ ID NO: 987636 - protein, 71 aa, Homo sapiens
ARARNSNYGPRRVWAALWLRGHCCLAGGLRRWKLKLHTSSPSRRRLIWPEEALCALALVIPPEPAREGPYS

SEQ ID NO: 987637 - protein, 48 aa, Homo sapiens
MVRGQPGRLARHQVGGQRLCRLRIRHRATHQERQAVEVLGHQSLKAVW

SEQ ID NO: 987638 - protein, 34 aa, Homo sapiens
VVPGDVIWNLGTMRHFQMEPLPHFRAAMVHMHRA

SEQ ID NO: 987639 - protein, 78 aa, Homo sapiens
TTGVRNSLNGVMRIPCKNWLFLKSNNSTYVSQVVGVCHDDVKRTLPTFLHRQSCERRFCDGVSFYRRGKWEVKETVKP

SEQ ID NO: 987640 - protein, 34 aa, Homo sapiens
MTLFFSPLKKLDTGAHHQTQLILYISKDEFVRAW

SEQ ID NO: 987641 - protein, 38 aa, Homo sapiens
GPACTFSSPSSSSLFVNIFYSFLLFIIIIIFFSFSFFI

SEQ ID NO: 987642 - protein, 38 aa, Homo sapiens
MVMSYTVYRLLWIFFLFFFGTTLTAGRSSGGQESNLGP

SEQ ID NO: 987643 - protein, 81 aa, Homo sapiens
LGTFSHDSRSGKGSIIPIQIPISRHGQRPWLCHKMVYSLSFLWAECWFPPIYPAQLYPSLQLVNLTSPDFPGSNEGIRATL

SEQ ID NO: 987644 - protein, 104 aa, Homo sapiens
CEDDHISRTHSIIAVNLSSVGAASTADIIIHAYNLTLCYEQTVRDCMLWTKIRNDNLTDFASMGLTTNFSACNNPASATGTRNTAEMPHISHSFRASYVMKVFL

SEQ ID NO: 987645 - protein, 64 aa, Homo sapiens
MLGRNLIRLQHYYFIFNFVFCLFRATPVASGGSQARGLIGAVAASLHHSHSHARSRIASATYTT

SEQ ID NO: 987646 - protein, 59 aa, Homo sapiens
ELLLERLQEVGEGEAQGPGRFLSSLWERVPQNNFLKVIAAALLLPPSSPWLQGEELEPG

SEQ ID NO: 987647 - protein, 55 aa, Homo sapiens
QDYALEIAHCLLYSRRKSDGRRLSQSSTTAAFTGLFIVWVAWVGRDISVSRQVHL

SEQ ID NO: 987648 - protein, 67 aa, Homo sapiens
  misc_feature (5)..(5): Xaa can be any naturally occurring amino acid
MVSRXGELSVGRRKRMWGRPCLGCPVGSGATCEDVDAGGRWREEGVDAGGGRRRPWMQEERPLLPDR

SEQ ID NO: 987649 - protein, 47 aa, Homo sapiens
MILYYIVPHAEVVIFETCCGYGVTAWCENLHPLPRIFKGQRELTGRR

SEQ ID NO: 987650 - protein, 39 aa, Homo sapiens
PAIAASGVPLWRSGTNPTKNHEVAGSVPAFVQWVKDLVL

SEQ ID NO: 987651 - protein, 48 aa, Homo sapiens
EQDLIHDQASWCCKSSVYTTAVHASLYKYRRHVSTADSKYRKLELVDS

SEQ ID NO: 987652 - protein, 58 aa, Homo sapiens
MMEFCDHKKYRVVLALVEHVLGQDSILNQSNSIFGCIFYTLQLLLGCLRTRWASVLML

SEQ ID NO: 987653 - protein, 73 aa, Homo sapiens
LGRMSGSININWILGAAETTGKQWGACWSCMVWRYWKKGVQPTGSVSGERKRSEGCTWPLGSSGLPKGNGLKF

SEQ ID NO: 987654 - protein, 141 aa, Homo sapiens
LGLQARATALGLNINNLISGHNLSVAQPYSTDTLNETIKLLIFQTPIFLSLSKKVIVDFFDDTPTPMEYHHSAAFLLLPSMFKLLFLCARSTQPWIQPNALSAPHFYGASDLAIPLSVFVINQNILKGPYLLNILPPSDKN

SEQ ID NO: 987655 - protein, 55 aa, Homo sapiens
RLERLGMMLIFAGIHSNTLFVWSSVHVFRWYIYNEYGNQLTPVFTEIIIPKDRSY

SEQ ID NO: 987656 - protein, 45 aa, Homo sapiens
  misc_feature (31)..(31): Xaa can be any naturally occurring amino acid
STLQASVTKEESEKEQPAWRQRSSCAPMLQXGECRYRGDTVCISH

SEQ ID NO: 987657 - protein, 102 aa, Homo sapiens
  misc_feature (15)..(16): Xaa can be any naturally occurring amino acid
LHDLMLGGELQAATXXQVSVQPNFQHDKFLGRLVQRGASPSNSAWLREQEGGVVQCASSVVAPATGLVALNPDPPPFLRETPSVRTRNQCWLKPGGAPLGLQ

SEQ ID NO: 987658 - protein, 38 aa, Homo sapiens
WRTRLYDRRKGRAERMTCVVPLQKYPQPKAEEEDRQVR

SEQ ID NO: 987659 - protein, 69 aa, Homo sapiens
AAALGMRSQRVGHPRLPSIYSVLGFPLAGTLSSKLTQVSQPTKISLRHVLIYGQTNQSTEKLSNLSKVT

SEQ ID NO: 987660 - protein, 39 aa, Homo sapiens
TEATVPGLVQPNFQQDKSWGAGSAGPRFNSSWLREKKAA

SEQ ID NO: 987661 - protein, 50 aa, Homo sapiens
QLGPICVIARKQNIAVDRAALTEANVSDYMQHVLDPEKSKVIRYELPAMN

SEQ ID NO: 987662 - protein, 47 aa, Homo sapiens
EDKTDKFLDSSKRREMQAMTCVSREVLPESRLKAQELREKLSEAARS

SEQ ID NO: 987663 - protein, 69 aa, Homo sapiens
MRKFHIKKDLEIKHSDEPKHNSAKELVTNQSLSERSSRGGARRKWGHRSVTGNHFKGNILDFCPTSEYG

SEQ ID NO: 987664 - protein, 56 aa, Homo sapiens
MSGWTEITDQNMTRVLREHRLWLLMVVGNAWFCVTVFSLSLSLFRAVPAPYGSFQA

SEQ ID NO: 987665 - protein, 41 aa, Homo sapiens
PGLSACVIWLVTCLVFVFNFIGLWLTYSVVVVSGYSTVIQL

SEQ ID NO: 987666 - protein, 78 aa, Homo sapiens
MTNNTVLDLKDLIFLENKSAKTQGSNALKATELLQQKNPHHGVKAIKSRPNENSPKAGREMLLQLLGHCTYSGRDRYY

SEQ ID NO: 987667 - protein, 83 aa, Homo sapiens
MRSDRNYEIQKTNLGSYFGQKQYFRKKEKEEAKEDRENDQSQRQEKNTKIQYTVPTMNIHELKEKVFTYLELIRQAENNTGEN

SEQ ID NO: 987668 - protein, 44 aa, Homo sapiens
GTNLQGRQHACGDFFGHPLHPIKRRIERQIIQNLSLAIGIHISL

SEQ ID NO: 987669 - protein, 77 aa, Homo sapiens
GAGLSGWCQQFLFSHCEQHQNKNHFTHLQVAELIQSYNKCMCMIWVVDEVLCFINVMDVPHKPTHVLSKHVCRSSFC

SEQ ID NO: 987670 - protein, 51 aa, Homo sapiens
MQSTALNWYQLHNAAGNPLHSIRIHCSMLHGFHFIQPGYIAPCCMQSTAFT

SEQ ID NO: 987671 - protein, 56 aa, Homo sapiens
  misc_feature (1)..(1): Xaa can be any naturally occurring amino acid
XGSLQVLLPFLAPYTLVTALSSEANTLSTNGIHLLEKNSSRKQITPMFEWPSSAVL

SEQ ID NO: 987672 - protein, 82 aa, Homo sapiens
SLGRYSGWVKILSVTSWTHTGYVRITICGCQIIPGIYVLTEVLAKLSLYTVFLTLAVAVSRDYFQRGRSAVCVCWVRPALYR

SEQ ID NO: 987673 - protein, 50 aa, Homo sapiens
  misc_feature (2)..(2): Xaa can be any naturally occurring amino acid
VXKRYPTPEEKEEDTSKGIEGQFSLIVNNPIPPGVGSSTDWKLTGSDRSY

SEQ ID NO: 987674 - protein, 47 aa, Homo sapiens
MAARTLWLGRIRVFSVKSPKASGGPDHCLGPEVCLPFPTHLKSCGLG

SEQ ID NO: 987675 - protein, 50 aa, Homo sapiens
MAVWYVDTKLKEDLLDVLDNWMKRILTSNLLMATILIRFLSKYPLLRLDL

SEQ ID NO: 987676 - protein, 72 aa, Homo sapiens
LGRVERSHTAGQEAQLKVLNTANYYSEYKSKPQLRITSHWSELVSSKGLHINAGGSGEKGTLLYYWQRCKLV

SEQ ID NO: 987677 - protein, 65 aa, Homo sapiens
RLERSPRNKCISTPCNKKDEGNKRSRSLSCSVKTFTSSKALVQKLPSTYTPGDKSPEYNTSTIQA

SEQ ID NO: 987678 - protein, 35 aa, Homo sapiens
MASRQCLVAGVLQQQGCAGRWYRLLLVSGPWEVVV

SEQ ID NO: 987679 - protein, 101 aa, Homo sapiens
ATVGVSDDTTRVSEGSNTKATGGSTNMIFDGSGDSAPHRFQHRLHLISTDIVTTGSDNFNTSVVVGTWCCCKGIQNLCHGWFWHYCHRPLFTRNLMDTSRV

SEQ ID NO: 987680 - protein, 108 aa, Homo sapiens
ERDLPKVLDHRDLLYEQLSKYLQVRNVMERLQEAKHSELYMQGDLGCNFFVDTVGPDTSRIYVALGYGFFLEVTLAEALKVIDRKSSFLTELSNKLTKDSIDIKAHIH

SEQ ID NO: 987681 - protein, 39 aa, Homo sapiens
EVQDPGKVFDEARTEAQQSKQQFVVKVGKESRSQCDVGL

SEQ ID NO: 987682 - protein, 70 aa, Homo sapiens
STSETHISYTEHSLNRVWGRVDLELTTASRTSQRQYAYWGVVLSGPAPYSHSRRQGLEVDSTPQRVLTRD

SEQ ID NO: 987683 - protein, 157 aa, Homo sapiens
ITLIAGDPCDSWYAAVVPAVPRTDQQQGGDEGDRIDGPEFVFERDIAKPGTHGRFSLIAETVLARCHYCAAIQNSAFDMGQMRRINRWQASRKSAGRTRCCAAPGLPLFRYRCKATSAQYFGQVSGFIATILRAWGAGCVEAGLGRIVSQHSKGLGE

SEQ ID NO: 987684 - protein, 101 aa, Homo sapiens
MATRINSIEKTLNDLMELKTMAGELHDACTSFSSRFDQVEERILVIEDQMNEMKREEKFREKRVKRNEQNLQFIWNYVKRPNLCLIGVPESDRENGAIRVS

SEQ ID NO: 987685 - protein, 84 aa, Homo sapiens
  misc_feature (74)..(74): Xaa can be any naturally occurring amino acid
GDSKDPRGGQIVESGVKTCPGNTLRLYLYKKLKISRTWKHAPAVPATWEAKVGESPEPRRRRPQGAVTVPRYSXLGDIVGTPTL

SEQ ID NO: 987686 - protein, 122 aa, Homo sapiens
PGRFPGFMRLNLGACCPRQTANRRGPPGRSARQQQGDQDRLHRQQRDFARMQQVLAHGIGVEQHFARQAEVVLHHLQQVQRQATAVDQQGAGAGDHGGEGVELFGARDLALFPGVLFTFLRG

SEQ ID NO: 987687 - protein, 67 aa, Homo sapiens
TLPVTTKEIKTCVTKKQDEPWMTAHGDKEIGGSSEQQKSHFSPVSQKKTRQTVEAEQRPVLCLVSAL

SEQ ID NO: 987688 - protein, 51 aa, Homo sapiens
ATVDFDKDKIIKWAHGGFMPNGIGGLIASFAGGDVAFGGIEIIGITAGKAK

SEQ ID NO: 987689 - protein, 78 aa, Homo sapiens
TVELSVVFKSPDICSISLAQRETVECNTFLPKLTGRLAVSAQTSAHAKGRGFLFLLSLHLRFPDKPEDSNFSTHDKST

SEQ ID NO: 987690 - protein, 36 aa, Homo sapiens
WCLAVLYLSHDRGVREQVLGRGVWCKLNLRIEEGHQ

SEQ ID NO: 987691 - protein, 102 aa, Homo sapiens
DEYFSKTETKLIIFSTEVCIPIFFFWIPGFAPGWITVAPPRLQSLDLLGSSNPPTSVSQVAGTIGMCPSYVWLPVFLILRDNDFGELSPLFTSSNQLQFYRG

SEQ ID NO: 987692 - protein, 47 aa, Homo sapiens
DLEDPSNLIASSLRQPGNMVRPVSTKMQNYLGMWHAPVVSANREAEV

SEQ ID NO: 987693 - protein, 66 aa, Homo sapiens
DPPREIHHVLEDRVGGQGEEFFMEVDIGVHAGFGIAGIQVFAHVHQGQAQLADFLAADRLGHQADD

SEQ ID NO: 987694 - protein, 40 aa, Homo sapiens
VIVISSDGLLAGLASSNKAVNQLFGISYSGYDTPQSWFPV

SEQ ID NO: 987695 - protein, 79 aa, Homo sapiens
SNNRVSEDLDLYRMSRSLGTPSSSCRSGLTAHTGLQQFGGVSLIVCSPFMSRILWMYRDSSRNTISLCLLSYHSQTRVE

SEQ ID NO: 987696 - protein, 76 aa, Homo sapiens
MQLPRWQLIGGFLGPMYVVVLTLATPHIGIAMTMIAILSGQVGKSVLIDHFGWFGTERKWVNGEALDRVGVDCGGS

SEQ ID NO: 987697 - protein, 68 aa, Homo sapiens
GFRRSDLMGDLRLDHIAAVDRREVGAGGPVLGLMLDINVEFTGLEGFKGHVAVAIELHFDLVVVIETL

SEQ ID NO: 987698 - protein, 80 aa, Homo sapiens
IEYNTKTQGFLVRSVERIVNMSWGEIHPPPKGTGRDHYLTAVTRVDNQLVEIIDVEKILAEVAPTSETISVGVVDAETPH

SEQ ID NO: 987699 - protein, 78 aa, Homo sapiens
DRDDTGRLLTESQAKARQVAMKEAVTQTDAERGKIVKKEAVTQTKAKAWELVAKTEAKREALTQNKAETHILAEKETE

SEQ ID NO: 987700 - protein, 33 aa, Homo sapiens
MGDAKGHRRKAGAAAPKRQRHVPGRKVMPRHSS

SEQ ID NO: 987701 - protein, 92 aa, Homo sapiens
LKRVNWDGVDFSAHFQGSPPAKSLCAECSRGLSAPSLSESAVGPVEACCLVILAAESKVRLSRPTYSELGSSQTLLMASPTLATPSTVLGTA

SEQ ID NO: 987702 - protein, 99 aa, Homo sapiens
RGSLYRLRRRGIQIFDVAVLRPFPTRAHFCFHGQIRLREQKNPPATTHPTELRLRVSVALYPPSADDHTSHRAQVEGLGSPCPRHPADDHTSHLAQSCE

SEQ ID NO: 987703 - protein, 48 aa, Homo sapiens
MIHMRVLLHALIKCEWTSNLAEAITLAERKYSDEKKRVDELQQQVKLY

SEQ ID NO: 987704 - protein, 60 aa, Homo sapiens
  misc_feature (15)..(15): Xaa can be any naturally occurring amino acid
MRGSSFNGLGVHESXMHHVEGSASSDLQDWQPVVHISLPSPELFSVQSHCVIDERTDVLS

SEQ ID NO: 987705 - protein, 91 aa, Homo sapiens
MGQMDVEVTRNAPRYWPKASRIKHTEGSENRVLILPGDKVELGKAIVDNLCRPGTYTASRWERTGTGVVQGSSKSTAYEAIQQLKKSTIEN

SEQ ID NO: 987706 - protein, 186 aa, Homo sapiens
GQMDNKIQAEVVSDGDEELIQSWSKGHSCYAKRLVAFCPCPRDLWNFELERDDLGYLAEEISKWQSVPEEAEHTNLKNLQTDDAVENKNPFSREKFKLAAEICIGNKKLTINHQDNGENVSRACQRPSQQALPSQAQKPRRKNGFMGQVQGPPAVCSLGTWCPASQTCQTWLKRAMYSQAWFNSEA

SEQ ID NO: 987707 - protein, 99 aa, Homo sapiens
TNPNRIEAVVLKHIEGGALYLEPERPLTMIKRMITARFVHPGQLVYNASLLGSAAQFVAYILRSSMLVICRSSFQGAHTVAGFLGNQHAQNMHGLTWGA

SEQ ID NO: 987708 - protein, 53 aa, Homo sapiens
GSDGQDVTSDNLLGDEVFQGRLGSRSHSCRNILDCSYTSHKGQGARSAPSIGE

SEQ ID NO: 987709 - protein, 76 aa, Homo sapiens
MKLRRLCAFAFVPTLFLTSINLHAEQLGQYGNTWNIQEQDAIDMIKGRLGEMEKRGELTKYWNDYRDTQLAGRLGL

SEQ ID NO: 987710 - protein, 159 aa, Homo sapiens
KDGSDGHEEARQYAIPSMESTLNQSAIDRRHLISDPHHRVRYTTTQEPAQVRSCTACSLRPRRHRAAGQCLSGMDHILNKQWGPTLLELQSVPGLSKPTALYRCGSRVLDTWNPQRANYVNTALVGQQLGHRYRKQIEQIAASEWSHTATNLVLKGPSR

SEQ ID NO: 987711 - protein, 39 aa, Homo sapiens
TGKMGQIGPWGNTEWYEGWGPPTVSSKPRVSDSHVMIFL

SEQ ID NO: 987712 - protein, 61 aa, Homo sapiens
MPCRVDVYSRYCGACLPVLSIRRHVSTVLSSKYVKLEPGRRVFTTAVHASLYKFRRHVSTV

SEQ ID NO: 987713 - protein, 100 aa, Homo sapiens
GSCTSTAQLLDYRFTAALFIANFLQEMESHSICPVLQCSRCNLGSHATYYLPGSSNSTASASESLGPTGIAPPNPANIVFLVETGLGHVSPGRSKTPDLR

SEQ ID NO: 987714 - protein, 130 aa, Homo sapiens
ITLLDGMESLQHGCSSLLLEGFILLIMRMSRQEELKFLHIALWSCSRKPRAASEAPEEEVSLPWVHLAYQRFRSRLQNFSRILTIYPQVLHSLMEARWNHELAGCEMVWPSSACPEQALWCFQLHSVNGE

SEQ ID NO: 987715 - protein, 119 aa, Homo sapiens
RSSVGCVLLTSEGRIFKGCNIENACYSVGIYVLNGPAIHKAVLQGYKDFRPIAIASYVTNWPVYMTKPDGYVYCHDGLGTADLLTLRPERPAEDPVTAREWPLPVTATLKNFIQMSHRP

SEQ ID NO: 987716 - protein, 48 aa, Homo sapiens
  misc_feature (18)..(18): Xaa can be any naturally occurring amino acid
  misc_feature (33)..(33): Xaa can be any naturally occurring amino acid
  misc_feature (45)..(45): Xaa can be any naturally occurring amino acid
RSLWGKAVNGGLKLVVSXQLCVYLGPRGSLSPXGDLSTPDAVMGXTLR

SEQ ID NO: 987717 - protein, 61 aa, Homo sapiens
IPTLSVGQGERGYKLVVTPWAVLLGGTTLRTQRFYMSSYWRILSTTCMLVHRATPYSVEVL

SEQ ID NO: 987718 - protein, 48 aa, Homo sapiens
LCDGPHGAPRRIYIQAHIDRDVLIVLVRDAKNLVPMDPNGLSDPHRES

SEQ ID NO: 987719 - protein, 37 aa, Homo sapiens
DALCGDLHESSQIMSRSDQVQTAGWHGGGLYPVVDVA

SEQ ID NO: 987720 - protein, 49 aa, Homo sapiens
SSLWGFWLWRAHSMSNLHSLPGLNRFETQHINMTFPSNAPTAMQVINNY

SEQ ID NO: 987721 - protein, 49 aa, Homo sapiens
YRPPFLGATLNSFIHVLMYYLLWFVVSPFHSVHTYQWKKYITQGQLLQF

SEQ ID NO: 987722 - protein, 121 aa, Homo sapiens
ASVLKYAESPWTAGTLYTYTENWRVFKALIAAQYSETQVRVALRTTPLSILGQTNRTPKYLRKFPAGKVPASEGDDGYCVYESNAIDYYSEQRGAAGTYSRGSSPGGAVCELMLIPDIVPH

SEQ ID NO: 987723 - protein, 63 aa, Homo sapiens
SPESNTVICSEYQYIDFYRFSYFIFLDQTHSMQKFWGQESTSVPQLEPESQNRQCCVTQGIGD

SEQ ID NO: 987724 - protein, 97 aa, Homo sapiens
MRSSTEQPERDFISDNKKRGQAQWLIPIMPALWEAKAGRSRGQEFQTNIVKTHLYDDYKTNYPGVVMHAYYPSYSGGYSRRITLAQECQRLGLAEDR

SEQ ID NO: 987725 - protein, 66 aa, Homo sapiens
IELAPIPNYASVTLKQKKYPTHSRILATKNNGNNDKAILQHFSFYKFTARIKVKKRELHSYSFYLV

SEQ ID NO: 987726 - protein, 47 aa, Homo sapiens
MPVTRIILPVPIRFDQPQLSIRVPTELCLIANASAQHDSYLLAMQQC

SEQ ID NO: 987727 - protein, 81 aa, Homo sapiens
VCICQWQISILNEPMQTNATTSAESRYRSICEWTHGGARLSRTPDMLNPHTAEKVGHVMAMAWTPPESNTRVLSCSREVRL

SEQ ID NO: 987728 - protein, 85 aa, Homo sapiens
ELQTRDTFNSIMKVTVDIRQDLYANTVLVGAAPPCIRALLDWMQKEITALAPSNMKIKIIAPPERKYSVWIGGSILASLSTYQQM

SEQ ID NO: 987729 - protein, 31 aa, Homo sapiens
MPLEYTLKRIYTQLSKTPKQTRYYNLATPFS

SEQ ID NO: 987730 - protein, 93 aa, Homo sapiens
MTSEICYHRGVDLSVLSALRKSSFASKRPCEPHQHSRKATLPQKRLTNNANPQEIFHGSDKANTARSRRVQLPQEKENNKQDEEAEKPLPVKP

SEQ ID NO: 987731 - protein, 80 aa, Homo sapiens
CYRAKLRTHAAMGIPSPSDWRNPKKKPATTADADRLYHVNPSFVDLLPWVDYLPAEKAMLLEDGVSRAAFFELTPMGTGD

SEQ ID NO: 987732 - protein, 80 aa, Homo sapiens
CLAEHFHTLFTTEPCIDALKQTLVQLAVMGKLVPQDPNDEPASELLKRIAEEKSRLVAKGKLTTAELIAKTSFFEEKPYA

SEQ ID NO: 987733 - protein, 58 aa, Homo sapiens
MLVGDSIGSRFSLHEQINVHTWQLCLVPRSSSTDGQDYKAVPVVDDLINHYVVVFSVD

SEQ ID NO: 987734 - protein, 40 aa, Homo sapiens
MLKENFKKGSSVARDLAVNTLRWEPQWSAVATAVRATAKA

SEQ ID NO: 987735 - protein, 45 aa, Homo sapiens
QALELLTIYAWEQGSGVPGFGHCRRFPDVLALVTLCRVLCIPCEV

SEQ ID NO: 987736 - protein, 34 aa, Homo sapiens
FFAFYMCSIFAATTHVTVDCELMSHFFREPVLKT

SEQ ID NO: 987737 - protein, 113 aa, Homo sapiens
MLRAICKRVLLLVTLKTAGLLGPVEGSVVTEKTLMRLKVVGFNTLNLNTGIDHFLKLFSAPKIMAMDSSMQGSPDYKDLPRDVVVLPRPCLSSCGSQAVNPKMSAPCSDHSSV

SEQ ID NO: 987738 - protein, 58 aa, Homo sapiens
HGLWSHLIVPDATRTIIERTFNPFSGMCVYSPSRERTSLLRLWEPVAALDAAATSVLA

SEQ ID NO: 987739 - protein, 37 aa, Homo sapiens
MTFTLKHVALSLTQAGCEISALSRTVDLVVAQVMAFD

SEQ ID NO: 987740 - protein, 43 aa, Homo sapiens
HYPKLHSFLQVDRVFTTAVHASLYKFRRDVSTVLPSKYRSAGA

SEQ ID NO: 987741 - protein, 79 aa, Homo sapiens
RERVPQKSIPALIQLTRLVERLPGGLTFSMWANYTVSPLAANISQNSYISSPHSLLLAVLLRTALRIPLECQFHGFLPP

SEQ ID NO: 987742 - protein, 132 aa, Homo sapiens
RLRVLYGQCDYCTGSCEPIRLQVPVEVVNMYQPLYLVATTSPPQLLACGPTVHQTCSENTYVKGLCFLFGSNLRQQPQKFPEALRGCPQEDSDIAFLIDGSGSIIPHGFRRMKEFVSTVMEQLKKSKTLFSL

SEQ ID NO: 987743 - protein, 66 aa, Homo sapiens
ILQVDLSIPITLLTGKTSKACVSARFLMQRHHYQIPWRCFSTQHKLMIVHQDSHPSSPGQSYCHDF

SEQ ID NO: 987744 - protein, 91 aa, Homo sapiens
MSSARYLITRVRSENLGLNVKLFAIDYIHAAELRLQYLTDFLFGIFTKLTDPFRHRFVNLAGNLFNFFRVNHVISFSQKEVLFLSVIADAV

SEQ ID NO: 987745 - protein, 144 aa, Homo sapiens
YEPNRSDRDDIVPELDEHGFHPGNQHNKPSWRQQLKSMQNQSVQAKQRRRATKARKAMSKLGLRQVTGVTRVTIRKSKTILLVITKPDVYKSPASDTYIVMGAAKIEDISQQAQLAAAEKFKVHGAAVSHHFKHTTQTPTVHEE

SEQ ID NO: 987746 - protein, 81 aa, Homo sapiens
TNPNRWISLSSFFLSPKELTPRFSKRDSSTTRPFMLPSDFIFSGCSSDSTVLFKCHLCHECKEQHLLLDPNVYVVWDVMFH

SEQ ID NO: 987747 - protein, 52 aa, Homo sapiens
DVYGLATAGICIDMVAWDRYDDRGSRDYDRCAMIPGYGMWQQEHYWHVGICR

SEQ ID NO: 987748 - protein, 135 aa, Homo sapiens
YNLIAARYLVKHILSYTSNSRRRLQRSYECFTYRLIDIVSNAVQLVLGFLFTFDVDLDIAPSLVTAFCSFDWGESTGAGCRLTYSRVRFAICSTSALLSFVFCSVAALGSKFFKLSKGSTRLMMKSSPGAIRVSG

SEQ ID NO: 987749 - protein, 69 aa, Homo sapiens
MRERACKQADDWLGIPQGDHPQIKIVDPNVDRALCHDLPDPKFPKAKLEARVFPCGPKLTPKKATMLRG

SEQ ID NO: 987750 - protein, 66 aa, Homo sapiens
YIFTILQALSHSIAPAAPGAHTASGIPVHSQAQHSQPAPGIPRHTQCFDAQLRHCRQHSAATASQF

SEQ ID NO: 987751 - protein, 34 aa, Homo sapiens
REEAGLWILLPEQWLPSWKKLVICWLMEPVELTC

SEQ ID NO: 987752 - protein, 113 aa, Homo sapiens
KDPLHLIALREWCSACVITQDVVQEHLVQRQNLVCNANSGGVGAGHIRVGTVVDVQQLNLGTFEHDVLATRDAGLGNSAVTSSISGLKPLRVFLALGQCLIKLDGWLFVVTHQ

SEQ ID NO: 987753 - protein, 78 aa, Homo sapiens
FSGLAEERIHLEVDGYLSEAKSHKRHYSASSHIRSEFISKELKKKQRWIHAITERIIEVQGMWEDTSKGYSITVIVRV

SEQ ID NO: 987754 - protein, 84 aa, Homo sapiens
AVINLIAKKIDSVLEERRVKKYVKKHTQFIGYPITFILEKDERRQLSDDEAAGREEVSTEEDDKDDDEKPKIEDVGTDEEDDSD

SEQ ID NO: 987755 - protein, 39 aa, Homo sapiens
ELGTDYAPNGGVGVACRQLMWLLSAILWASLWMDRMCSR

SEQ ID NO: 987756 - protein, 68 aa, Homo sapiens
GHCVVAGAYGVIAYQPLLSGKHMGECYYGAGKWGPGVPCDGCAGLWLHWRGAQAKDMTPVKPEPPTEI

SEQ ID NO: 987757 - protein, 40 aa, Homo sapiens
SVPLQALEHVVDTCLEVYKPVKQRWFLAIKPPREEFLNSR

SEQ ID NO: 987758 - protein, 45 aa, Homo sapiens
IADQALSSANSEVGTSCVLHHVQKLAGPVTPVETILQRCNLEEIS

SEQ ID NO: 987759 - protein, 43 aa, Homo sapiens
RESDLSKFWALEHTSCGQDVGACEMATCDGINAEMYEMARCRG

SEQ ID NO: 987760 - protein, 88 aa, Homo sapiens
MSGVMMSLDEITVCVSIACSDLGVSLTMPSTCFLACLEPWGTKPYAQTGQSLEADVLLVPLSCHDRPVDHPTHTHVSCMLPCLRVLPQ

SEQ ID NO: 987761 - protein, 185 aa, Homo sapiens
AYPNCFGAGTAVVVAVAGGRSGGGSSRREGVSLVALSVCFNRLEEPEVGLGSSELRQVVLGLRTKLALEGVKFHSQEPPGGIATTGVRETMVGCEWRPEDRGKKDEIQELAGARQVKRENISDSWQHFGGLGPGVGLGVENSVNLEEVQLGTGAQGRPVGFVNNNNGLGFLVKFLVGGFCVTFIF

SEQ ID NO: 987762 - protein, 173 aa, Homo sapiens
MCWNSCFEENETMGNERLSGKLKAEAYQKYVGCSQDVPCVLEDLPQIAAKIAAPLTNGRGDSRSSVETHSKVTLEVNLTCWTETCLPLVHSQLTGVDLSKDTLIKKATGVQVVEATLHAHSLSNRHTRPYLPDNRINPPEKTGTILPLVTYISQGTTSAVCTRPYYLAVFLSR

SEQ ID NO: 987763 - protein, 37 aa, Homo sapiens
RRQFQPRVPISSSISFYTGKTTPTKDTAAQAILPDKQ

SEQ ID NO: 987764 - protein, 76 aa, Homo sapiens
MPIVVYALSSAINMVSSRDAGVPPVLPNGWCENGPGRKTEQVYKLPLLISNVIVPVNTRTALQPEQPYVMTRLVSA

SEQ ID NO: 987765 - protein, 46 aa, Homo sapiens
LEDPRLRLTAGQLLLQVSRRVGLGSERPPVPVGQLQASPDHASLGL

SEQ ID NO: 987766 - protein, 34 aa, Homo sapiens
CLGSVMFAIALGGVAATFSGSLAELPSERLNPVV

SEQ ID NO: 987767 - protein, 74 aa, Homo sapiens
QYPSMLVMACRVDVYSATGVLSSLDKYRRHVSTVAELQISYKLEPGRRVFTTAVHASLYYFRRHVSTVLTSKYR

SEQ ID NO: 987768 - protein, 48 aa, Homo sapiens
MRLKERSHLHTIKAKTKQQVLMGKLQQVLQEIWLRPLVKVATLNNRFS

SEQ ID NO: 987769 - protein, 42 aa, Homo sapiens
GTGLSDVQRLGPGSGEASWCLGGTALTVELVSTPGPRFLRGG

SEQ ID NO: 987770 - protein, 53 aa, Homo sapiens
YGVSDAPMSLLHLQARFPTSGWRLQFYWADVEGLGSSDVVSVYHWTLGLHVHS

SEQ ID NO: 987771 - protein, 86 aa, Homo sapiens
MAGAGQSQAHCQCTSPPYKAPTTWPLLQPVHRCKPEPQPWLQPPAFLVRPLSYRSGSTAISVTATHPQQGKPWCRRLKVSPHPYWP

SEQ ID NO: 987772 - protein, 37 aa, Homo sapiens
SRAILDCLREDTSSTLSGSCITPCYRAVYQGAGRSIL

SEQ ID NO: 987773 - protein, 52 aa, Homo sapiens
CGTAPLRLIEATSMGECRGAWHWIRTWSAQVAERSYLRNDATISNGRNRRAV

SEQ ID NO: 987774 - protein, 37 aa, Homo sapiens
MSRIFRHESSQPLVAGDAGRESQTRRRRRVAEDQTVD

SEQ ID NO: 987775 - protein, 68 aa, Homo sapiens
MTKQGSSTPPQNFSSSPAIDPNQEEIPDLPDKEFRRLDIKLIREGPEKGEAQCKEIQKMIEEVTGDIF

SEQ ID NO: 987776 - protein, 45 aa, Homo sapiens
  misc_feature (38)..(38): Xaa can be any naturally occurring amino acid
TDCAGVVFSLGALKASKGPQPVGVCALAALLGPVRRAXAVRGYRA

SEQ ID NO: 987777 - protein, 36 aa, Homo sapiens
LEDLLGFDRYAFWLQLLMPINLRPYGVNENLESRDW

SEQ ID NO: 987778 - protein, 35 aa, Homo sapiens
LYVSIVIGIKQTNRSTIVLMTLPNPPLRETPKNDQ

SEQ ID NO: 987779 - protein, 195 aa, Homo sapiens
  misc_feature (186)..(186): Xaa can be any naturally occurring amino acid
RSCSVLSILETLTCLWCLNFPFCRMNRFLIGKPLRTLILCPPVQGEHLSHGCPSAGFLGSWVLQDPARDFNNENSAKEKDLEKPFAAQLVPWAQLDKAMGTSELFSTHTQVAGTASFLQWGEAGGLGCPQVGRQSRASKQGRQEPGVCPGTADSSLRSLAIPVPWASQLAQGWSHKPYAHVLPSLXMITQWGESP

SEQ ID NO: 987780 - protein, 87 aa, Homo sapiens
VHYSPEETLCALFPQEEIPCALFPQEEIPCALFPQEETPCALFPQEEIPCALFPQEETPCALFPQEETPLCIIPPRGEPMCIIPPRG

SEQ ID NO: 987781 - protein, 36 aa, Homo sapiens
MTFLLISLLVSFSGRAGCLEFSVKETQDSPLFLCLW

SEQ ID NO: 987782 - protein, 32 aa, Homo sapiens
MRFHHVGRASLELLTSSDLPASTPDIKMIVPR

SEQ ID NO: 987783 - protein, 55 aa, Homo sapiens
MAWRPEQAWPYLGEQVQGLVQVGVHARGGLVGDLDGVLQNALGDDVGRQTEWRVP

SEQ ID NO: 987784 - protein, 137 aa, Homo sapiens
SHYCILAHFTAADKDIPKTGQFTKERGLLYLQFHLVGEASQSWLKARKSKSHLTWMAAGKESACAEKLPFLKPSDLMRHIHYHKNSTGKTHPHDSIISHLGPPTTRGNYGSYKMRFEWGHRAKPYHSTPTPPKSHVL

SEQ ID NO: 987785 - protein, 79 aa, Homo sapiens
CPTYNALPVCISNHDCLELEIQNLLFTSRRNVLSRTSPSCPRSSTSQFAKEVPPKFFKHNNMASFVRQLNMYGFRKVVH

SEQ ID NO: 987786 - protein, 117 aa, Homo sapiens
EFPALWGQAVGMEWSKCEIQVNGVETPCPLGAGEEWKIEYVGYRSRAELLASMMPPDLSLGLDDQHWDDDEQNGHEDAQNQGPDVQALGGGGKAWAPVTSPTIFLSLDFTEYANAMK

SEQ ID NO: 987787 - protein, 57 aa, Homo sapiens
DSEDPEFGSLGGLADRLAVSLHEFSSIRVRPARGARFIAVGYVDDTQFVRFDSDAAS

SEQ ID NO: 987788 - protein, 77 aa, Homo sapiens
  misc_feature (27)..(27): Xaa can be any naturally occurring amino acid
MVVSESGCTTVGGLETFDSLTDLVEHXKKTGIEEASGAFVYLRQPYYATRVNAAYIENRVLELNKKPELAFFAGYQV

SEQ ID NO: 987789 - protein, 59 aa, Homo sapiens
DKDEKKKQDQVIEAKESFQRCLENHEKMTSTTRYKKAEQMFGEMEVWDAISERDRLGSV

SEQ ID NO: 987790 - protein, 42 aa, Homo sapiens
LEQFMSPGHALLLSCSSEPQLYRVLAALCCILCHLASNQAKQ

SEQ ID NO: 987791 - protein, 97 aa, Homo sapiens
RRQGRRTRLNKIRLDLLGCILRTVEALLSHSDETGGPYNIQVMNTLPLEQIAVKKPTKSHQNQVGHESDLWSSSCYTPEQHHDSFTNAMATSGSYPI

SEQ ID NO: 987792 - protein, 56 aa, Homo sapiens
QVISVPGDSESQVIQCPGDPVSQVIQCPQVIQCPQVNQCPQVIQCPQVIQCPQVIQ

SEQ ID NO: 987793 - protein, 60 aa, Homo sapiens
AVIYRIRRGRPERELQQRWNAQQRELSTRTSEDEETIVATKIILRATTSGSRVNSGVRSH

SEQ ID NO: 987794 - protein, 50 aa, Homo sapiens
TIEGDSTGQSKALRIPQHNLQTYWEAEAGGSQGQVFETQPWAFPIRWRLS

SEQ ID NO: 987795 - protein, 202 aa, Homo sapiens
SLADGAAAVQRHSSHPRQWAAGQRRSTLPRWLGSRAEALLTSQMWVAAGQRCSSLPRWGSSRAEALLMQGHFKKDCPMRNNAAPSPMSTMPRQSLDSTLPQRTKVLWARSPQPDDPTTGLRVPGASTSSLMARKLTSSWTLAWLSHCYLLSWTAVLKVCYHLRNPGTACNQVFLPTPQLSLGDFATDSKYAYLIPHCHTAIW

SEQ ID NO: 987796 - protein, 47 aa, Homo sapiens
VTVFLNQVEFRELVRINLQNFLKKENKNEKVLKHIMEELDTNADKQL

SEQ ID NO: 987797 - protein, 91 aa, Homo sapiens
MLITETGAGPDEANVQLAQRSRKLGEVRHHKVVICQIVAQGFKANLLRYFDLTDDASTDVVGEVGGVTDAKGIRTQDFDLHGLISVEFNHA

SEQ ID NO: 987798 - protein, 64 aa, Homo sapiens
MRETLGLYLIKYRNYAWVIGWQPCPANPQVYSVIAAGLEHIALIACGMVEHSRAVRLDVFAATF

SEQ ID NO: 987799 - protein, 45 aa, Homo sapiens
  misc_feature (1)..(1): Xaa can be any naturally occurring amino acid
  misc_feature (39)..(39): Xaa can be any naturally occurring amino acid
XIFRSIRSRLTLTTGTSRTIASMRKFKALISIARRSVMXDHWQIW

SEQ ID NO: 987800 - protein, 54 aa, Homo sapiens
ELTKHDDVWKVDVYSPLRCMLPVQVPSTREHVVTPNMLSCEPVSNSSRILQYPS

SEQ ID NO: 987801 - protein, 138 aa, Homo sapiens
HRGAAVVAISHRGSSHNRQMDQHNEWPLTFSASGKVYSVSTDKARTRLYPSYNRMRFWCNSWVANLQTDTGNIADTLQEARMQSFLCDIKHFRVVDAAIVEHLLDDQPKGEGGDVEHVQQRGFAGSHFVSSLDQLHIT

SEQ ID NO: 987802 - protein, 136 aa, Homo sapiens
EGRLHTGMAAPQRAWKHPSPQARVAHHGVWACFRFCQEDLELVCWEGHGKRLGWGPWGSWHRPCRRCTMGSSHGLQQAGAQGVVHPADQTCQAIHCEMGWVALRIKAGKPSRSQSIPWCQLSTIQGYVASKKLPSC

SEQ ID NO: 987803 - protein, 65 aa, Homo sapiens
LVSMLDQMWLFIGKWWMQDQGSRESTGAQVQVAGDTLPNSTERAITIAGIPQSIIECVKQICVVM

SEQ ID NO: 987804 - protein, 71 aa, Homo sapiens
RQGDSCNREFFRAFEAVNLTSYHHFEGQIISIESKFKLNFELSPQFFPGNDLLLNYILMHLKVKTQLGKSE

SEQ ID NO: 987805 - protein, 75 aa, Homo sapiens
QYPSMLEWLSRSDVYSATCVCMPPWYKYRRHVSNRADLQISYKLEPGRRVFTTEVHASLYKFRRHVSTVLTSKYR

SEQ ID NO: 987806 - protein, 168 aa, Homo sapiens
TTGRLLPDSRQWSDLVTSPSQPDDWSRSLDFSDSTKIPVKSIPSEQKAIQIQNATSNPPSFKVKNANNTPPLPFQNSTSDSQKVQIQDSTSNQEVISKQNFAYHSQKIKIQNISGHPKEISISHISSNSRKVPLSNLTSDTPPLSGPGHLQLFGAALDLERHCYHANV

SEQ ID NO: 987807 - protein, 97 aa, Homo sapiens
LQTRRTAVRGLVRRLCAGGSQADAAALCLEVAQRDAVRVALVYPGYTGATVDEELPSRFSQRGRCENGLLVCNPGYTGEDCGVRSCPRGCSQRGRCK

SEQ ID NO: 987808 - protein, 42 aa, Homo sapiens
STATFYLPTYGKSQQSGKEVKTDQMLTSDEEENKTEKDRMTV

SEQ ID NO: 987809 - protein, 49 aa, Homo sapiens
RGSPFTDLRRCKQEPVRTDTCRAMACASSLRLPRVLCQTKEGVRRVFET

SEQ ID NO: 987810 - protein, 72 aa, Homo sapiens
LDRTQAYYSGVISVTATFAYQVPAILLPLHPSSWDYSVHVITPGSFFVFLCRDGVSPVWAMDMSRISVTLMI

SEQ ID NO: 987811 - protein, 66 aa, Homo sapiens
RSKQCPGLQELGHGCAALVTNGRSPCQCSPQVIAYTKKELIEVCPEESLSKVSHVLDCLPRSGYIV

SEQ ID NO: 987812 - protein, 56 aa, Homo sapiens
YKEPKSHLCGSTSWDLPTYKLHNILERLMCETIDLSQEFEISLDDITKSHLYKDEV

SEQ ID NO: 987813 - protein, 74 aa, Homo sapiens
IQSVPRARAVGMQTLQTGNMSFCTFWITKQSIASWRMGIGQVAYRTASVIGTEAITTRRVSAVTEKGLARLKED

SEQ ID NO: 987814 - protein, 85 aa, Homo sapiens
MNRACRAPTVKRPMNLGSSTEQSFHIALRGVWRIRSVLLQPVGHSDDYGIIDVKYARVSTFIPTVNILCAHTINPRKPIDIIAQI

SEQ ID NO: 987815 - protein, 36 aa, Homo sapiens
HSSKGHWNGRSADVVSEIVLLVSCMSCWTVMRLVDY

SEQ ID NO: 987816 - protein, 88 aa, Homo sapiens
ITVPGHHVISYTCLSHRMVVRFTYTVLCCDHSQAGSLTWCSAAAFTVIVFIIIITPEIGVVVFQAIELSCTMGLISSLEELAKPRVLC

SEQ ID NO: 987817 - protein, 96 aa, Homo sapiens
MCARLAGWNWCGYHYWMATTACYWLLVFLTVDSGMTYDTCPAWLCLTFIHSVPWVNNVPCDTCYDGTSVFFNRGLDFSYFALWTLGTVWPLGHCLR

SEQ ID NO: 987818 - protein, 71 aa, Homo sapiens
VGVSCDAGIECKMQKRAVTRGWVDRAGVDLDCMRVPIHRGGDAYSIHAPVMGWIVVPLRHRPLWLPSYFNF

SEQ ID NO: 987819 - protein, 101 aa, Homo sapiens
MAIMTFLHTQRYLKDLKRQYYGDDTGFLFQPYLREKIASMFLIETRVNWASSQLSFSWISKNKRPGKDKQVFHRNEANTFSHDIIIDLVVHSSSPAFTDIS

SEQ ID NO: 987820 - protein, 73 aa, Homo sapiens
SARKQAYEQSGLCYTYGIGATDRDYNVYRWMKHYPRTSNIRYYMIHYSIRYQYTKCVTLKEYNQNQDSKQEPI

SEQ ID NO: 987821 - protein, 54 aa, Homo sapiens
GHSGFEQEDEEYGSYNSYRDREMHTMYQIAREMKQDYNTVGNARASNHESNMTL

SEQ ID NO: 987822 - protein, 67 aa, Homo sapiens
YRELGVNGRESVITMDGTGYGNRSESLAVIFKSCHIAYKQSYLGCGPTDTSIKFLGYIQFTLALREI

SEQ ID NO: 987823 - protein, 73 aa, Homo sapiens
MAVDRALHVLTPIGPQSSNTPVTKSTSSRILVSEYHYLLHGTKAASPSDWYQGLGLDTYKVEADPLEYNLPVA

SEQ ID NO: 987824 - protein, 40 aa, Homo sapiens
LIHSFDYSDTCNNFTENCQILLNCWGPSSFIDPNSQQGRE

SEQ ID NO: 987825 - protein, 50 aa, Homo sapiens
MEEDMLLFVNSRSKARHGGPPGGKEINKPWFLVIGRKILRSKRGNMRIHT

SEQ ID NO: 987826 - protein, 71 aa, Homo sapiens
VEASSSYNMVIREDTQTTAPAGGGVHLFKSIGNNRWLRTISGIQYPNKQDLLAENVLAWEIEDRRTHFPSN

SEQ ID NO: 987827 - protein, 67 aa, Homo sapiens
AGTLKIMVDPQEVCPSQPSLGARSLFLLSSYTAADGFSSIVCLLSSSPVGNSNTLIARTFHHSHHQH

SEQ ID NO: 987828 - protein, 86 aa, Homo sapiens
VVPPNTPVHCRVGTPVGIVGCSRTSEPLMKLAGSYMSIHMPVKGTCVMALSHHVLPPGHVLWCVGDFWATDEDPGPITFPNQMCWP

SEQ ID NO: 987829 - protein, 74 aa, Homo sapiens
VAMPVMPSPTHETTYKQKVRLILFLWVTSSYYSTPTSRISIRRTGCTYEPPPGFSTGNWFCTLGIESPEQPGAP

SEQ ID NO: 987830 - protein, 31 aa, Homo sapiens
MVLQLGEATHPPWSTSVAVEYNLPVEYNLPV

SEQ ID NO: 987831 - protein, 102 aa, Homo sapiens
YNLIALRAWTLRSQMYGNFNGFEQLAVCQVSTATEKTLKKIADWRSRAAKSEEMCGLVMGLFTRLSNCANRTILSDMYSYVWDIKSIMSMVTSSVQRLGYSG

SEQ ID NO: 987832 - protein, 70 aa, Homo sapiens
FNLIAEDSLVTGASSGEYTCGMDSLSIFGNIIPGHDSPVRAMTWSHNDMWMLTADHGGYVKYWQSNMNNV

SEQ ID NO: 987833 - protein, 56 aa, Homo sapiens
SYHQQCLLHTNCLAPLARSSMTTVGIVEGLMTTVHAITVNPTQAAHKERFKKVKGT

SEQ ID NO: 987834 - protein, 107 aa, Homo sapiens
RDTLRLLSHWLAHADWQPRDVGREAESGLCVEPCILSRRSLCFTYGVLSGVVAVTQCTHVIAACPQQLQRAQVAQACALFLVRSSCMYLCHSKFKQQHGLSICPLSN

SEQ ID NO: 987835 - protein, 140 aa, Homo sapiens
DTSVTSVNQNCTFLCDSGSRDVRVDLLGCRGAYSGPQTYSGCRWLPHHICRPLMSSGKHMVRALCVIFSSNRSYLSRKRMMAVSVNHLLVADALDYFMLSCMRFISSYSASTKSQALQATHKMMAVTPSQQWIHFFRSDR

SEQ ID NO: 987836 - protein, 90 aa, Homo sapiens
MVAGTQQVLDNIRYSLSHKGVDKTPGVGSRSCCSQHRTPLTEEGYHWALLLRRLVQSQIHLLDQLHITGVYSNRERNVTMCTRKQEYNLP

SEQ ID NO: 987837 - protein, 54 aa, Homo sapiens
MVLGPQGAHVHVHRIFHRVAARTEVGEKADGDKRTLLQRTTAQDGRFDGHGVNG

SEQ ID NO: 987838 - protein, 91 aa, Homo sapiens
IHFTRVKSSPGDQGHGVNGMPFTPGGEDASGLHEVLKRQNRPKLIKEGSRSLEDGDGISIDDKLPVLSLAGALEFAMNGIIWDHVTHVVEV

SEQ ID NO: 987839 - protein, 51 aa, Homo sapiens
IYSMASASDYMQVGGWAYECQMLGLHACFHSPPIPAWAIILDILITSLFLA

SEQ ID NO: 987840 - protein, 52 aa, Homo sapiens
SHQAWGAAELQTAAYCLNLKYEHPSKDTWTYEESFQMETATHEQKDTTTSVE

SEQ ID NO: 987841 - protein, 130 aa, Homo sapiens
HPVSSLRRLQSIDRAETDTALLFNSMQLLSTWATNLLCNAGRVELCTQLIQLNRILEVTQELEEHHGVDEPSSSLPHNVCLQVTLQQHTGSTNFTLSTLLYLYPPFKQATYFSLYFKQVVSQAIWQREAQ

SEQ ID NO: 987842 - protein, 71 aa, Homo sapiens
LEDPCHLLHGRNAMNWNGTDSNGMECHGMASNGMASNGMEIECNGMLWNGMECIGMECPLMEWIRVEWNRI

SEQ ID NO: 987843 - protein, 32 aa, Homo sapiens
TGSWAPKNTGSAELKAQPDDLLQIFSCIGPEV

SEQ ID NO: 987844 - protein, 48 aa, Homo sapiens
INLSEELLVVGDPKNEPTDQCISTTDRGFPRARYLRPDHQLQQLLARS

SEQ ID NO: 987845 - protein, 73 aa, Homo sapiens
QYPSMLACLRVDVYSATAVHASLGEYRRDVSAALSVQISVSLEPGRRVFTTAVHASLYKFCRHVSTVLTSTYR

SEQ ID NO: 987846 - protein, 146 aa, Homo sapiens
  misc_feature (41)..(41): Xaa can be any naturally occurring amino acid
  misc_feature (48)..(48): Xaa can be any naturally occurring amino acid
  misc_feature (94)..(94): Xaa can be any naturally occurring amino acid
  misc_feature (105)..(105): Xaa can be any naturally occurring amino acid
  misc_feature (107)..(107): Xaa can be any naturally occurring amino acid
MVGMGQKDSYVGDEAQSKRGILTLEVTPIDARCIVTQLVTXHGDKSWXTTPSTSEPCVWLPELSTPVRADLRPLLNPKGQRATKMTQNMFETFXHPKPMYVGYPXLXAIPVTASVPYPLASVMDSVDGVTHTVPIYEGYGPPQRES

SEQ ID NO: 987847 - protein, 99 aa, Homo sapiens
GDGGFFVACFVGMPPIFITRMRNSWKLTAPSGVDYPTSLRPEVCYRFFLTILSDTRVSSTFLQGLVPVDRHGNSPFIEGSDLCVDSQIHRSSQALSQAH

SEQ ID NO: 987848 - protein, 101 aa, Homo sapiens
  misc_feature (35)..(35): Xaa can be any naturally occurring amino acid
  misc_feature (98)..(98): Xaa can be any naturally occurring amino acid
DALSVGPDGRLLRGYDQDAYDGKDYIALNEDLSSXDRGGHPRLTLHPSASGRRPCVCGAGQSLPGGPVRGSRSRRYLENGKETLQLRGYQGAVGSLPXFSY

SEQ ID NO: 987849 - protein, 36 aa, Homo sapiens
QDSTLPRPEVLRITCSLYSAAHSCGKGALEVVQVSQ

SEQ ID NO: 987850 - protein, 81 aa, Homo sapiens
  misc_feature (51)..(51): Xaa can be any naturally occurring amino acid
  misc_feature (76)..(76): Xaa can be any naturally occurring amino acid
EDYDALLKENDSPDVRRDKTCIQETNRGICQQVWVNNGKILAPYLGNERLXKLGRLDVCHVKNIEDEKAKQLLGCXVQDTR

SEQ ID NO: 987851 - protein, 167 aa, Homo sapiens
PATDVENRRFQQWCPWNLPHIDSSMEATAYIILYDYRHGGRQGQIIYNWEGVQSTQDEVAASVILSAQLDEELGGTPVQSRVVQGQEPAQLMSLFGGKPMIIYKGGYSREGGQTDLMAVTASSRSALIALEAPGRVEVLPKAGALNSNDAFVLKTPSAAYLWVGTGA

SEQ ID NO: 987852 - protein, 44 aa, Homo sapiens
MVPALKFYEAVPKGQCIRADRHGALGLLSAVELAFSVNWGAELC

SEQ ID NO: 987853 - protein, 165 aa, Homo sapiens
STDVESPLFLSILKLNSENLLLSSFTSLFDMLTCFHIFPSWLLLINIPEREVAGSRKSRQETSSGKDPECIESRGSQVLENRAFFFAVVKRRDRRQRSWAQSQNSFQTSSASQGFPWGRVWEPCGSLESRAARCSRHWALTPLQAANEEVVATVSAIACSLRYHG

SEQ ID NO: 987854 - protein, 60 aa, Homo sapiens
LIACVPDLSDSRLIAYPVMVLLVVFSHSDGPSFRHSWVLSGVLMSPALAFFLLSEPIIYK

SEQ ID NO: 987855 - protein, 123 aa, Homo sapiens
MYAIRVRHMAVGASEGQRMLLPPPSPSLGSFDPWLSSQERTQMSQHLPQPLHAPVTSQHRIQKPPSSGTSSEFEVVTPEEQNSPESSSHANAMVLGPLPREDGNLMLHLQRLETTLSVCAEEP

SEQ ID NO: 987856 - protein, 45 aa, Homo sapiens
ISSVRLRSRRRRTVLVVIGVTFAPPGVGGSPRTPAPLPGQHFWSP

SEQ ID NO: 987857 - protein, 68 aa, Homo sapiens
DRQASSYNDIEEVSTVLTCRRNCTGRRCTAAGEYTSTQAPGKRVWEVSTELTCRRNLYRKACTAVVNT

SEQ ID NO: 987858 - protein, 75 aa, Homo sapiens
SSSVPITLLDGDPQTDLVTENQTGFTILNTIKNIHGRLGAVTHACNPSTLEAEAGESQGHEFETSRANMVKPCLY

SEQ ID NO: 987859 - protein, 175 aa, Homo sapiens
MAFLFFLEIEFHSGRPGGSARAPSRLTATSTSQVQAMVRPQPPEYREITGMCHQAKLRFGIFSRDEVFPCGSGGSRNSGPQVIRPLRPPKGLEITGISHGTQPKVGCSNLQMEIRGGHKIQVTKTWRIKQVAVKKRVKSHQNQEGHESDLGVSSRLHSLQHHDSLQMPGQRLGVN

SEQ ID NO: 987860 - protein, 212 aa, Homo sapiens
GSVPITLLDGITDKQRQIMSELPFTIASKRIKYLGIQLTRDVKDLFKENYKPLLNEIKEDTNKWKNIPCSWVGRINIMKMAILPKVIYRFNAIPIKLPMTFFTELEKTTLKFIWNQKRARIAKSILSQKNKAGGITLPDFKLYYKATVTKKAWYWHQNRDIDQWNRTEASEITPHIYNYLIFDKPEKNSMGKVPRLELIGISRSTVAAAGCR

SEQ ID NO: 987861 - protein, 84 aa, Homo sapiens
IESVPITLLMDIWPNALAYCKCSVDANLSGMSSPPTHDSQNQVAPVKAPPSALQKQNMSFNFSERLRRQASGAGREGVSQRLRV

SEQ ID NO: 987862 - protein, 198 aa, Homo sapiens
  misc_feature (195)..(195): Xaa can be any naturally occurring amino acid
SSSSVPYAPRRRTLQRNRTWTEMEKIRVCVRKRPLGMREVRRGEINIITVEDKETLLVHEKKEAVDLTQYILQHVFYFDEVFGEACTNQDVYMKTTHPLIQHIFNGGNATCFAYGQTGAGKTYTMIGTHENPGLYALAAKDIFRQLEVSQPRKHLFVWISFYEIYCGQLYDLLNRRKRLFAREDSKHMVQIVGLXELQ

SEQ ID NO: 987863 - protein, 67 aa, Homo sapiens
CISNSSLEHRTHDTYYVVSHFHYVLSIGAVFAIIVGLHSLISHYSHGYTPKPKRKPRSIHNATGQPS

SEQ ID NO: 987864 - protein, 63 aa, Homo sapiens
VVAGHAASGRTYRHSSRCGLVQPTSQTEEGGFTGPRRPHDSGKGTRVDAKADVDDGVDPLLTL

SEQ ID NO: 987865 - protein, 87 aa, Homo sapiens
  misc_feature (69)..(69): Xaa can be any naturally occurring amino acid
IADSRGSQKGDVIPTAGSSRGSGDLAHLSLLSSGDYRRARALRVNFYIFYKRRGLSYYPGVVSKFRGLXAAHPCFGPPKSAGRYSAV

SEQ ID NO: 987866 - protein, 51 aa, Homo sapiens
DRLLCTLMRVADAALCSSSCSITAPLAAHISFVNKAVVDYFFVELLLEAHY

SEQ ID NO: 987867 - protein, 133 aa, Homo sapiens
DIKQCQFCLPKMARLGSVVFHALLCACELGYLTLFKFEDYVEIVSSPRVLMIALPDKTAFGWVRSFWENACYPEGNFGGNQLLDGSISLSPLYPGLDDRFARQDRYGPPPEFPLASPCPGIVHHLSGPNTCAR

SEQ ID NO: 987868 - protein, 38 aa, Homo sapiens
RECSLLRLRRGLGLSAAWFAVGQLESLEWQEWRKGGPV

SEQ ID NO: 987869 - protein, 159 aa, Homo sapiens
IGYRSLVGGQYKWCKVRKILEGHKRESLIWCLMMPGTICYPDPLIKVNDTIQMDLRDWQITDFIKFDTGNLCMVTGGANLGRIGVITNRERHPGSFDVVHVKDANGNSFATRLSNIFVIGKGNKPWISLPRGKGIRLTIAEERDKRLAAKQSSGDMGPW

SEQ ID NO: 987870 - protein, 110 aa, Homo sapiens
MNREATEVYDGQTNRKMGTERKGQEKEEKVLNYSKVNIRSTIPRGTERTEPKNVPEIGYHEGCISTCTTAARNIQPTHIPTLKLYVIKAPDGLHCILCPLHVYKGLIYHD

SEQ ID NO: 987871 - protein, 35 aa, Homo sapiens
  misc_feature (27)..(27): Xaa can be any naturally occurring amino acid
WQEGENIIFRCVDTIIRILELFIIFTXIGFHYPFH

SEQ ID NO: 987872 - protein, 103 aa, Homo sapiens
ETHPPYVMKKEFSMSGGDLIDGYAMASFATLQALLKDASIQPPERLEHRLKHSREAAKVWLQGATGQPGDSSDREPARPPGDLARKWPNKRIRKEVTVHLKTL

SEQ ID NO: 987873 - protein, 49 aa, Homo sapiens
YSMLAHMKIGGMRSSGAAVQCIRPSVNTAFSVKPPSSFQTRLEPCPLAL

SEQ ID NO: 987874 - protein, 87 aa, Homo sapiens
VDRGSAPRMCWFAGCGVTGSAREKYLTWGIRRGAQAELTSTFGVTSILRVVAEDWKKGDTFSCMVGHEALPAGLSHRRLIDRLAGKP

SEQ ID NO: 987875 - protein, 42 aa, Homo sapiens
LVEVDLRQIHFAIIFIGVNLTFFPQATVNPQATVNPQATVNP

SEQ ID NO: 987876 - protein, 39 aa, Homo sapiens
QSKWHRKACEPKCVEGLPEWNFDGSSTLQSEGSNSDMYL

SEQ ID NO: 987877 - protein, 78 aa, Homo sapiens
GLTVACALTVAWLETYSPDKDRTWLAASCLDRGALHGLGCCTWQAVSASRFLALEKLFREEEVVETNERLELIPPPLP

SEQ ID NO: 987878 - protein, 63 aa, Homo sapiens
VLMLETECLSYIRTTRVSTSGSKSWSINTDGAVHFQEIPHSGDSDGSWEPIKNAINQCHRSTH

SEQ ID NO: 987879 - protein, 46 aa, Homo sapiens
GFRAGWLNTCTRRYSPLEVGFKTMPFRLGAMAAYGPAAPAQATVNP

SEQ ID NO: 987880 - protein, 49 aa, Homo sapiens
AVDLTRSSEECRYRSSDDSILGELEPPDTVEGLVVDLCRHMQLSYNMSA

SEQ ID NO: 987881 - protein, 63 aa, Homo sapiens
PVISSEENGEEETRVCRERKAVMTEHVHSGEMSDTKLSGTSGKAPYGLMCTCLEAPDPSSVGL

SEQ ID NO: 987882 - protein, 39 aa, Homo sapiens
MSRDRFSHWIESSKLLYQHSSSSLICQGSSLDLVYLSSN

SEQ ID NO: 987883 - protein, 63 aa, Homo sapiens
  misc_feature (56)..(56): Xaa can be any naturally occurring amino acid
IPGTINKLHRLSFCSAKLDHPSYSSHIRFHRTSGTGSFSSVPETSHTRRTDLVTGXLLLPMSS

SEQ ID NO: 987884 - protein, 40 aa, Homo sapiens
MRARNDGKWMLVHRTEVIKYTLDPVWKPFTVPLVSLCDGD

SEQ ID NO: 987885 - protein, 35 aa, Homo sapiens
MVQPTSHGTTHKPRYNPQATVNGEYLLRVRTGRRS

SEQ ID NO: 987886 - protein, 109 aa, Homo sapiens
SYRWFDRGLCHQKELGLFAIEQLSEEATVYHIMRLLRSEVEGPYCITTPRGIEGAQRRRGVPPRGTPGIRKTSVPVYDGAVPVEAVAEAVASSAEAAVTYGMGLNRPLS

SEQ ID NO: 987887 - protein, 38 aa, Homo sapiens
GPYFERGAVVVGGLGAEGARGKPRSVVLMPGLLVRFWD

SEQ ID NO: 987888 - protein, 48 aa, Homo sapiens
MRPLSRFSLKLSPTGCRDAASLSTCAFSYLNEPCACLDWPTSYLALIL

SEQ ID NO: 987889 - protein, 58 aa, Homo sapiens
MSAVVQTRLLSLRLPGSEYSCLSFSGAHHARLIFVFSVETGFHHVSQAGLEFLTSGDP

SEQ ID NO: 987890 - protein, 38 aa, Homo sapiens
ERLFILLTLPSACLPFSCIWSSSSNPATVPCLGGPSYQ

SEQ ID NO: 987891 - protein, 57 aa, Homo sapiens
MTVACGVTVACGLTVASGLTVACGETVACWLTVACGLTEACGLTEDLYVDRDLYVDR

SEQ ID NO: 987892 - protein, 104 aa, Homo sapiens
KRLGTPPKASVPPCPSSITNVCRPPLKSERVSRGCSEKSVAAAGYDAEKNNSRITLGLKSLVSKGTLVQTKGTGASGAFKLPQKAAFREAKPKVKKAGGTQPKT

SEQ ID NO: 987893 - protein, 51 aa, Homo sapiens
MTFYCRGCSAVVYGLLGTECLLVALLFLLPGLLITCHVARIPLPAGYREEI

SEQ ID NO: 987894 - protein, 34 aa, Homo sapiens
WCLEDPFRVGASAGGLKINDNLSTVSMFWNTLTP

SEQ ID NO: 987895 - protein, 48 aa, Homo sapiens
KGYPCRTSLQSSIFPGTFRGRLGYTGPEEPAIARSRKAPIQYSDNPID

SEQ ID NO: 987896 - protein, 53 aa, Homo sapiens
GEFPGPMSDQTVVNCVFTRYFSHEHPQPGEHSIMIILGIDPGLRTTGYGGDPL

SEQ ID NO: 987897 - protein, 37 aa, Homo sapiens
MTLSTWRHLTHKQHKRNQPTGRRLKQGTDQDRESGGT

SEQ ID NO: 987898 - protein, 84 aa, Homo sapiens
ILEDPFGVVIPRHYRGMLKKTTQEAERILLRTQTPFTPKNWFLAMLSVVHGNLRKDVKPENKQYTAMPDKTVAAHICTRQSTNP

SEQ ID NO: 987899 - protein, 42 aa, Homo sapiens
ATLLRGGAGIRSERGVLGLGMQSPQTGLGPATGDLRGIDFRA

SEQ ID NO: 987900 - protein, 173 aa, Homo sapiens
GEVQLSGKSLGSAPKPVEGRSALFAGNEWLVTHTSSIAESWETTQNSTLLTACDSYGKAQRSAVTAWCSMLGWLANECHPVNLMPENGLSFANVHLSLDVPGQPTGCPYIGCPGDDPGGTCYPLGLTLGLLFTGHKSRLRGRLLCDSLHLATSQKAVKSCLVCQASFCELYLT

SEQ ID NO: 987901 - protein, 87 aa, Homo sapiens
ATLHSDTFMYHVWSKSLLMYGCSPRNFFLLVRTWSRWLRSEAADLHSECNSSEGSASGVVRSSLVGYVVSLASGVKLQTFVVECHSS

SEQ ID NO: 987902 - protein, 55 aa, Homo sapiens
KPGQVGAPCSRALSGGDPSYQYVESGNDKNSNYFSMDSMEGKRSPKAGVTSMRAC

SEQ ID NO: 987903 - protein, 175 aa, Homo sapiens
MQEYGYRVRTRYENTSTYYRAPRCRYTHHPSYPESRYSVATYQCSKAIVKTRTQTTGVSKRPYNIDKIRTEIGNIDKEDMHNNSMLHKGKKPTDEYLDTMMNEAPGPINYTMYLTMYGEKFNGTDTYKMSSEMPLLALLKKQLGTIQEDYLRELADNHEGIAKPDKEVDELVTQP

SEQ ID NO: 987904 - protein, 32 aa, Homo sapiens
MSDNYTDVNGGEGASQGMTLSAHMALEVGNDE

SEQ ID NO: 987905 - protein, 31 aa, Homo sapiens
MDMILQIFHPRQGNMPPGSTHGQATVYPQAT

SEQ ID NO: 987906 - protein, 145 aa, Homo sapiens
GVFWWLGFVLLADADTSDSACMRLQSAVHSIQHGLGDEYKQVIRIHVGLPEELTHSVHLFGAGATDHKVISHHGAADEVYRANEGLKGLRVQPGNDWLSVVRAKPFLIQEVGHHAHEGIRFDLPTFLQLIQVQPELEALGNCPDV

SEQ ID NO: 987907 - protein, 30 aa, Homo sapiens
MDRSLVGCTVASRVDRGLVGYDRGLVGEDR

SEQ ID NO: 987908 - protein, 75 aa, Homo sapiens
PGCASDLLIPYGHVEIPLDSPVAGPAASGSPNPPLPSPPGTHHRISGSPQNPLIHSTNLRLCPRTHHFSGMPKPG

SEQ ID NO: 987909 - protein, 65 aa, Homo sapiens
GDLEIPQADLFHQVMMVWNFKYVGRYEMYARDLGGKLVKSNYSRSPSERVAGFRCHVLGVRKRPL

SEQ ID NO: 987910 - protein, 71 aa, Homo sapiens
STEAVIIADTPMCASPGPVTLTAEAPVLLDLEYVFPCVIQCSTNLVSVVFPRVERFMVQESTWGTRARYSV

SEQ ID NO: 987911 - protein, 80 aa, Homo sapiens
ARGSQKAELFPRYSVLLQSESDYFANSRKLFSSLIISSLHQVFWLFSMAVAFWSGSVLLSIFYILVGFCFPRLDMGVWDT

SEQ ID NO: 987912 - protein, 49 aa, Homo sapiens
MSSWAPNAPFFPPGRAALIHPRHVLTTAIPQFWESVTLPQSRHFMMEAT

SEQ ID NO: 987913 - protein, 136 aa, Homo sapiens
VDQVWSTVARSLFTATSPSRLQATLSQTSRIAGLQVRATTPFCIFSRDGVHHFGQAGLKLLNSTDLPGSASQSAGIAGISHCAQPKKFFIIFYFTRDGLHCVVQVGVQCLFTGAIPLLDQHRTDVSSALYRNLVDS

SEQ ID NO: 987914 - protein, 57 aa, Homo sapiens
MSSCNCLMMSREDPNGFQWLLFLEPDKVLKAFVLPYLECIDVAEVDLSLRIFIQTLE

SEQ ID NO: 987915 - protein, 47 aa, Homo sapiens
HSRSSRCQPALSVLELQVDLPVRHLPVPSCLRLHDWCTGANEQCCTA

SEQ ID NO: 987916 - protein, 56 aa, Homo sapiens
IWILHEILSTVEQKAAESRCAAQPGQARSRGASRCSTTLDLTVTVNCTSMAQDMTD

SEQ ID NO: 987917 - protein, 53 aa, Homo sapiens
MSNMVDNPMSTRNITIQTDVVARYLYITSYLAGCGGKTPLNPGDGGCSDPRSQ

SEQ ID NO: 987918 - protein, 57 aa, Homo sapiens
VCNYYCMDEERVGYGIQHKTSTAVLVHSLRSQPSGAGAESKGYRFIFLHDSSHKQRS

SEQ ID NO: 987919 - protein, 41 aa, Homo sapiens
RQIYIIRGPYGGHSLGGPMSSLVVRGPLDTGSSQASTSWDR

SEQ ID NO: 987920 - protein, 40 aa, Homo sapiens
MRNRVSCSVSDWSTTCRMVKFSSTLYIMYFSEDVLELVDQ

SEQ ID NO: 987921 - protein, 132 aa, Homo sapiens
PKDDKKTELQELNELYKPELLRRKISKGADPKSVICAFFKQGQCTKGDKCKFSHDLPLERKLGTTRSVYIDWGETDRTLKKTTYWTTWDEQKAGTEVVNKKHGEAEKKKPKTQIVCKHFLDTIENNKYNLPV

SEQ ID NO: 987922 - protein, 57 aa, Homo sapiens
VCGGPHSPPVTRMVDSEIPRRQEHYISLERIPRDHPYIQYNLPVDELIAVRKYNLPV

SEQ ID NO: 987923 - protein, 66 aa, Homo sapiens
GRLLNHVLSWLKQGQAGQSSTVVQPDLVEYKLGDGIQPAVCEYNLAVCEYNLAGGVQPCQVEYNQC

SEQ ID NO: 987924 - protein, 45 aa, Homo sapiens
SSAVSCGGILSRRVTSRPAMPVHRCCPQLPSSISVSAAHSSTTFR

SEQ ID NO: 987925 - protein, 38 aa, Homo sapiens
EYMLLGEVQLRVIVQLRGEVQLRVTVQLRLRYSLRVEV

SEQ ID NO: 987926 - protein, 110 aa, Homo sapiens
GEVQLITGGASASCSVPPVWSCSSLLVGFLVSLALGVRLQTFVVIVTALRGGTDPKSQQQQHLAGRTKELSFHSMKSCCCWLRWPAFIPLSGPTHILLIGPFYRELIGPI

SEQ ID NO: 987927 - protein, 36 aa, Homo sapiens
RDDENDSVTLKCHRSLLPCRTIFTTVVFHNVEPRSQ

SEQ ID NO: 987928 - protein, 111 aa, Homo sapiens
TSQLALPGDLCIDGELHAQSGRHASGVEPGATGLHLAGIMSRQHLDLEGAPGYLFISIQYCDAVGPFSAGHIIDGLGAISVVYHVHWLHQAFGPLHFDLQWGHTSLACVHL

SEQ ID NO: 987929 - protein, 53 aa, Homo sapiens
MGLLQEDLISESCFRTSSVRQLAGPEGSHCAEAGDVCYAGVQKDGVGMVEYLR

SEQ ID NO: 987930 - protein, 77 aa, Homo sapiens
RSSLRSGFYKKDENKLSSANAMKNVHKEEKKQEQKSESITKEKHKKERKRSIDRERNMSKSRERKQKLKQREATEPL

SEQ ID NO: 987931 - protein, 63 aa, Homo sapiens
VLVLLLARGVSAHPLCFLLLSLLLGSAAKPNTHSFLDARTRKAAGLTPTGLQAGPNKPLAAPQ

SEQ ID NO: 987932 - protein, 46 aa, Homo sapiens
PSERQDRSPSTHFKARSRIGQVWKQPLAGCPAVPLERPKVADSLPV

SEQ ID NO: 987933 - protein, 66 aa, Homo sapiens
MGLTLYQHLEAECNQVRILTAACDGTVSQLSELEAKELLNPGRQRVGSGARDRAIALQAYKFRITS

SEQ ID NO: 987934 - protein, 53 aa, Homo sapiens
VCGEASVKRGKGLLCVCLMKTRVQPMTGQCAPDLTDLDVDVDNPKKKRKKLLE

SEQ ID NO: 987935 - protein, 63 aa, Homo sapiens
CSGFFSFSLVVIRSWCLRLRLTCGARRYPIRRLKRKREFRHSGDKLPESAAAEEARGGGGCGE

SEQ ID NO: 987936 - protein, 91 aa, Homo sapiens
LSSVSHSITAASGPPFWCLDCVLVKGGHVGQCHLHMQVARSMRHTPAALPGFQSSSSSFPVLCGLCLCVAWCLIVSCSLRITGAGVLGGPI

SEQ ID NO: 987937 - protein, 62 aa, Homo sapiens
VSGSSVYVSSSAEQLHIVLFPSQPQHYHVCELEHVVCSLPCSHTRQQQCPLTTTVKESPLRQ

SEQ ID NO: 987938 - protein, 75 aa, Homo sapiens
WVTVACGLTVACGLTVACGLTVAVWVGQIENKAAARVSVGNPLQSPSTLWKLCSFLFAINLAIAHSLGPHCFYEL

SEQ ID NO: 987939 - protein, 70 aa, Homo sapiens
GTEAGHVPEKKLQGSGRPHEGHPTQYCPNRTDLLVLASTENTYLPSECDRTLSVHQNRSFWTTAKFPLTR

SEQ ID NO: 987940 - protein, 70 aa, Homo sapiens
MDRVKGTLASLCQRTYRNGCVSARTMEFFGDFVKYYSLITMVLAAAQASNRKPSPQDIAQAVLRNFSGTD

SEQ ID NO: 987941 - protein, 82 aa, Homo sapiens
MSPGSSPNTSWTTAIWLWGGLPRGQCINTGASSTEGGYISPSRELVLEFPILKEPQLILTLQIVSINVAEVYPMAQGLGEAR

SEQ ID NO: 987942 - protein, 48 aa, Homo sapiens
QIGKKRRTRETPYTILFYSHKRPVGGVWTMATQVAEGSTHPPPFSRGE

SEQ ID NO: 987943 - protein, 72 aa, Homo sapiens
RTLALICQEAKRQTLTPESQGAMDSETGLVVRYSYIANTSPLPQGIFNSKSDPILKLPSGRWPGQKSISNQS

SEQ ID NO: 987944 - protein, 91 aa, Homo sapiens
TLENPLAEPLNSRSFCPIGEPKSGGFGDLSYAKLFLCLAEKIPDGILLAIHTSCHNGMRRDPHQMAVFELVHWLPSVVWAEELILVPFSLV

SEQ ID NO: 987945 - protein, 58 aa, Homo sapiens
RGVASWFKPVVPHEVVVQRLFQVKWRRVVRGTEVTVSWESFNNWLTWLIRGLRVTTSP

SEQ ID NO: 987946 - protein, 45 aa, Homo sapiens
TQSVTDNVIVLEDVGGRSPKQRSYVSLERWLSDLILLSIYTEWYI

SEQ ID NO: 987947 - protein, 36 aa, Homo sapiens
VILAGSQPSYLSHDNAVYETELEIQGYRCLRDSVSH

SEQ ID NO: 987948 - protein, 69 aa, Homo sapiens
VDLYQDPRCHVTFMTSDFSWALCHTVITRVSLAQETSKIVWCEGQDPSLIPAFSYNADLSSRVPSLEIS

SEQ ID NO: 987949 - protein, 46 aa, Homo sapiens
CKLYAYKRFIEDPDSVVIVLPRASVTTTCKHDDQSWGTAAYEIQLS

SEQ ID NO: 987950 - protein, 82 aa, Homo sapiens
CGLPPPIPRAWTPQLGLCSNTGKRASEAGKDPGEGHTARVCCRDRASSPHWRLHLQVRERFRRAGFRCLWSLAMQTPWRRRT

SEQ ID NO: 987951 - protein, 46 aa, Homo sapiens
MHTLLLGEHNRLATELKSVNPRWHGEKLYQEARKNVGARGQIITYR

SEQ ID NO: 987952 - protein, 93 aa, Homo sapiens
MSTECGQCDMCRSEGQRDKTGSKELLATVSSPPTFTSWPCPAQPQLPWLQRTGYASHRNRMGLTGIKILTNFIDNDNTRRQVQLHDSLFRETL

SEQ ID NO: 987953 - protein, 37 aa, Homo sapiens
IRRQSRNGEGSLSRGQETLKVGVVAHACNPNTLGGRG

SEQ ID NO: 987954 - protein, 105 aa, Homo sapiens
GKGLRWSRCREGEGVLWRRLRKGKGVRLRRRSEGKLLRWRRRREGEVSRWRRLREGKGLRCEEGAQRGEGSQMEEEALRRPGAQDGKVALVGLDSASEKAAEFSG

SEQ ID NO: 987955 - protein, 114 aa, Homo sapiens
LYIVRKTRDRTEVALQIKTVRHLYAEVERLIISMHPYQLPEIIAIPIEMAYPLTCNGSENKQEINSMQHSNRKIKVFLPYWHFVSAFCRSLLISACLVWMPDAAADDFLDPEVA

SEQ ID NO: 987956 - protein, 94 aa, Homo sapiens
LSGGEGKESGLCAKEARSASLGLSLSPVPACRDVDSLVMVTTLVGRVCARLDAGVLGVLADTSVIRGDGGRDSLDPCVNFLISLLAVGWLSRTD

SEQ ID NO: 987957 - protein, 104 aa, Homo sapiens
MTSRFGRCCLSSTAKNKKSVHWRDTKSVAGSSFVKEILGMMHGSNQPSQQKPGTEMRLSRKVYGGHPRLTACNPVDCMEGRVSEYYIPAETLPAGTERKRDGMK

SEQ ID NO: 987958 - protein, 35 aa, Homo sapiens
SDGLPWCSTTDNYDTDDRFGFCPSERLYTQDGNAD

SEQ ID NO: 987959 - protein, 101 aa, Homo sapiens
FNANKDAPGCGGNFAEPSGGKMLVKAKASSLLPPSNMQRKWKDGIRMRSVKVHGSLMRAHDYGPGTIPTSHELTLWILSSSSEPELLVPVYHRGRKGDTYS

SEQ ID NO: 987960 - protein, 91 aa, Homo sapiens
GRARKAFKLPVLEVLPDVAGTICGMWTGGRVMEFSYSNCCTTEDGHAIIPDESFTIPQKQSNLEMNSDILESWANYHSSTYYSINTELSLF

SEQ ID NO: 987961 - protein, 59 aa, Homo sapiens
SSRYRERCSERDEGFIAGCEQDLAVKILVGCASSIVWSPQRRISSSAGPMREMSCVSRR

SEQ ID NO: 987962 - protein, 38 aa, Homo sapiens
PPINTIMSLILTTTTNKHIYHSMTSTTIVPVTLSVALT

SEQ ID NO: 987963 - protein, 111 aa, Homo sapiens
PKANADSHELGLNGSTVEGGAMPVEAAGRQAEIWPGAACHDARAGPGKSPWEARAGPAECCSHVIAVPGHATGKQKVGLEEFDLRKFWAYIGRHELDRNWAKKAVVRQQLC

SEQ ID NO: 987964 - protein, 160 aa, Homo sapiens
ICNDPPVSYYRASITRHRTRSTPVAHSCELTGLRSHAIAHASHLWRPPVRLTGLRSHVIAHRPHTCDALLLRLTGLRSHAIAHAPQLMANSCEDLQAYRSHAIAHAPHLWRPPVSLPAFDHTSSNSPHTCEAHLCAYRPSITRHRTRATPVTPSCELTGL

SEQ ID NO: 987965 - protein, 39 aa, Homo sapiens
IPSSSSIMSLILITQYQQHIYHSMTSSTIVPVSLSVALT

SEQ ID NO: 987966 - protein, 39 aa, Homo sapiens
MSGELAVCRVTEGASCMSGELPVRRVTEWCMAACRGVWL

SEQ ID NO: 987967 - protein, 36 aa, Homo sapiens
SGNRFYRASGFHGQTFKTGERVNPGTRFPRRPVLPG

SEQ ID NO: 987968 - protein, 122 aa, Homo sapiens
GGRSTQELGTATSSPGICEQKGAIVSRSLEGNSSKTHSKEPDDNEYAKMEWSTGRLCYLQKNPYLTFLMDSKLSLQVAQGILVKITMNSFHLNGTKLGVVHSSHEYHIGPDTPELAGAMHRL

SEQ ID NO: 987969 - protein, 141 aa, Homo sapiens
SFEKCLTVLPRPKCRWHNHGSLQPQSPRLQKSSHLSLPSSWDYRQTPSCLAFFFFFLGKLRSHFVAQASLELRDSSTPASTSQSDGFTLYSLYTSLSIDSRIAIHYFSDPRSKSLITQLPPELYTIYYKLHICTFPILPTR

SEQ ID NO: 987970 - protein, 119 aa, Homo sapiens
VHRHTPYTRPHSNTTHHRSPLTVVTTIITINFTITVVTTITTTFTITVVTTIITNTFNTSMTTPTSSPSPSPLNVVTTITITFTISLSSPTIITTTFTTHCTSPPSSPPPSTLTVVNTH

SEQ ID NO: 987971 - protein, 34 aa, Homo sapiens
PRLQVMGGGYCGKDDGDGDGGGDGDSNDDGGGRD

SEQ ID NO: 987972 - protein, 47 aa, Homo sapiens
SDILLFFFLYLTFFFLKFFLKLSFLLFFLFKIFLFILFLYGRGGRRG

SEQ ID NO: 987973 - protein, 37 aa, Homo sapiens
RYTRTCSACQAVRPSAFQVLSSRALYACSQSAQWPWF

SEQ ID NO: 987974 - protein, 59 aa, Homo sapiens
HQRGTARTTLPGVSGSSSEVRTVVHQAVLAVEGAWARPQGVWGVEPAFVSVVTKLEAGA

SEQ ID NO: 987975 - protein, 34 aa, Homo sapiens
AGPPPGHEPADPLAELDYKNEIIIYTHIWRQLDV

SEQ ID NO: 987976 - protein, 34 aa, Homo sapiens
MKQVPRSPFKVKVLPTHDASRRANYPLPTRGGSD

SEQ ID NO: 987977 - protein, 74 aa, Homo sapiens
LRARVTWWTEGAIQSPWHFSAHIRMNSHHCLVSLVGEEVVVVARRELPALPPTKAPSASLYFSASSATLNDLYW

SEQ ID NO: 987978 - protein, 42 aa, Homo sapiens
RARTEMGDSQVSDLSNLWLVVPFTVVAIQGKGLGVVGEKSFG

SEQ ID NO: 987979 - protein, 37 aa, Homo sapiens
LYRIPALYQYESLDAAQADCATMRGFPLGGPDRKYPR

SEQ ID NO: 987980 - protein, 110 aa, Homo sapiens
MLELLYLAVPSLDLLDGLASCEEHVREICSNMTHDEVDLGFQIIWIQWMAPDGYLVSHLHQGPTHAYMPLDHDDSLGLAQHEIEGAGLEEIRECYIGEPRGPMIDQRGLP

SEQ ID NO: 987981 - protein, 143 aa, Homo sapiens
VNSDSRTGGSLNDQGPVLNDIWRSARMLTCRGNLYGEACTVVVNTRRPGSMFAIFGSDRRCSSVSSVNLSYEGMHPDGEYTSMPAWLSCVLGISERSARVDAGSSLAIFGGQHGVTVSTELGLGDLHRQGDYRSSMRSIYSEF

SEQ ID NO: 987982 - protein, 47 aa, Homo sapiens
MPIMQRLIFAGQAAGRWSLLFLTTTIQKGVDHCSLVPCVSERWYARS

SEQ ID NO: 987983 - protein, 38 aa, Homo sapiens
RSSSVLLPPRSQKPWFLDDEEKSKLLAKLLKSKNPEDL

SEQ ID NO: 987984 - protein, 33 aa, Homo sapiens
RLDWLVLLVDSSDYEPVLAASVDYEDLRGGRRG

SEQ ID NO: 987985 - protein, 35 aa, Homo sapiens
MTAPGPKIGFSREAMFREHPSEELLDVQDSGILVA

SEQ ID NO: 987986 - protein, 80 aa, Homo sapiens
MTNHIFAKSLSLLRDPRRFAPFNSRGIAGPTELDTLLYCASPRLDGPTMMQHKVSTGGSCTVINLKLVGTLLRSNPTAGV

SEQ ID NO: 987987 - protein, 34 aa, Homo sapiens
ESSSDREWREKAVSVWKQKLIASKWSSRWETVIP

SEQ ID NO: 987988 - protein, 105 aa, Homo sapiens
MLGPAPTLWSVLSFSVNPFIPSLFCSCVLSNSLFKMPRTWTPSTGDIFWRASGEEEVSPKFGIPFSPFSFSFLLHTGESINQSINLSLSLSLSLSLSLFPFSLHS

SEQ ID NO: 987989 - protein, 65 aa, Homo sapiens
IKPVPVWDEDWLASRNMRVVLSSLQITQTFSMSAMNLFHFLICVFTRALYISFKNFFFVEVGGEE

SEQ ID NO: 987990 - protein, 32 aa, Homo sapiens
MSVPRSQKITTKGQVQWLMPYYPRHFAEAERK

SEQ ID NO: 987991 - protein, 55 aa, Homo sapiens
KNRARYRFGLSCPGQRMVFRWSLARAALQRDSCASPLIMVTPDHERSLDVHATGA

SEQ ID NO: 987992 - protein, 43 aa, Homo sapiens
QKTLFEKGPYPPQSKGDTIYPFGGSSEKFRRQLLHSSSGKLPS

SEQ ID NO: 987993 - protein, 154 aa, Homo sapiens
RIWYNALVIWAGHVYGVVTLVHDITSLGVFVSEEEDLVHVLGSGSVHVCEIGSGLISGLYVSLECSRLKSIWPLSCVISCLSISEEVSSLVPCLRIWVCQCLRRRTWLWYMDLGLFMSEEVGNCYRPEDLGLSLSKEVGSGPSMRIGVCPCLRK

SEQ ID NO: 987994 - protein, 71 aa, Homo sapiens
QNRARYRFGLSAAAVTFRYACVYAKPSVNRALVFSSSVNLIMSTDHDHRELPMRPLVQARAKKAGWHERRP

SEQ ID NO: 987995 - protein, 38 aa, Homo sapiens
WVTRYAGCCLYTTPWPGSSYASGVEARQALLKAGASGR

SEQ ID NO: 987996 - protein, 38 aa, Homo sapiens
RFAHALVRQEVQIGLLSAPAHTVDRVWVHLWAQGKRPQ

SEQ ID NO: 987997 - protein, 34 aa, Homo sapiens
NRARYQIPYTIPLSETGSHFVTQVECIDANTASL

SEQ ID NO: 987998 - protein, 71 aa, Homo sapiens
SSVPDPLSSNRHTKVCRRRQWKYAQALVWGLHQGLILVILPILPSMPGTCTPKPKSHLFPQTQLSYVAHAC

SEQ ID NO: 987999 - protein, 36 aa, Homo sapiens
TAAIDFYKRAFNASEQFLPGDARRPARARVPRDWRF

SEQ ID NO: 988000 - protein, 97 aa, Homo sapiens
PVPEHACLPAGRRVFTNAVHASLKQVPSDTLRTSAELQISLSWSLVDVYTTLRCMHPCTKFRRHVSTVADLQISLRWSLVDSCGSSSTRSLLEWLPV

SEQ ID NO: 988001 - protein, 100 aa, Homo sapiens
MWGLMRPSLSGMGLSVVRHLLLPLVAPVAVGVTIPLRGYCIVPSPMLPVRKEIVCVPQYNICSLPNHSIRCTMCHQGTYLYHDCPGPVQDTDCDECESGS

SEQ ID NO: 988002 - protein, 64 aa, Homo sapiens
  misc_feature (39)..(39): Xaa can be any naturally occurring amino acid
DPHTRIPLSICASEVNERYTVKNPGIYGVCVYEKIHEIXTGRLDSCLSSLSLSREAEVMLDHLE

SEQ ID NO: 988003 - protein, 82 aa, Homo sapiens
AAVAEDCWWILSGTGFALSSKAAPSGHLYAANMNSLLTNRETKARLTWCPRNRMGARMFPVLDQENIDSLDSGSVFSNLTID

SEQ ID NO: 988004 - protein, 60 aa, Homo sapiens
AAVVCEPEICAIALQLVATRAKLCLQKQMDHVILSPFMEPKFNRFHFPKSIRHLKRVISI

SEQ ID NO: 988005 - protein, 51 aa, Homo sapiens
TSKVWPVGAEVSSTGSSSAACRCRLTILTGWPRDSTYTVYGEGLPSEIRQH

SEQ ID NO: 988006 - protein, 55 aa, Homo sapiens
MQTSPQNQWSGQNMGQASSSQTGTGRKKQQRTARERKEVLAETKAYRTDEEKTKN

SEQ ID NO: 988007 - protein, 70 aa, Homo sapiens
IAIVDWLLSRPFVLRASQTIHLRRRLAVRDMKPSRAVGVIKAVDKKAAGAGKVTKSAQKAQKAPGENQAA

SEQ ID NO: 988008 - protein, 34 aa, Homo sapiens
MINTLSRLHHEALSEALPEYNVGFTVKTVSVMDV

SEQ ID NO: 988009 - protein, 83 aa, Homo sapiens
DQEEGETSAQTERVPHGPHVLALAGDRWTIGAGGTWSPAEVEDFEARGSRFSKSADERQRMLVQRRDELLQQARKRILNKSSE

SEQ ID NO: 988010 - protein, 73 aa, Homo sapiens
NSLQIIEVLLRSPSTTMKQVENHRMQIDYVFITLDDVIRRSWLTLPVGQRELAGLATWNKSPDPVVTLLFPKQ

SEQ ID NO: 988011 - protein, 108 aa, Homo sapiens
FGQTIYTLLPYLDSLMQTAHTEGVTAVRALLHELVSHQVTWDIDSQLLLLPAFLGSPVLERIARNDTAYFPRARCYDYYTGVDINARGESKTLPATLDHINLHVSGGY

SEQ ID NO: 988012 - protein, 62 aa, Homo sapiens
MSGEERNLNLAECAYPIIVPSLELHYDIDSIAHIYVADLLPYYHPGLLTTFVFAKILQIHNQ

SEQ ID NO: 988013 - protein, 71 aa, Homo sapiens
RRESLVITEPQAEILHDGCHHIMPAVKGIIYQYMEEINHRIPASDPTSSKTRQIISTIRRLKLSNYQLISR

SEQ ID NO: 988014 - protein, 74 aa, Homo sapiens
ENRRYNLITPIISRESQINEEHPFTIASKIIKYLGIQLTTDVKELFKEQRTNHCSRRVKEDTNKSFMRVGINFF

SEQ ID NO: 988015 - protein, 68 aa, Homo sapiens
  misc_feature (44)..(44): Xaa can be any naturally occurring amino acid
  misc_feature (66)..(66): Xaa can be any naturally occurring amino acid
SWGGFNSGSFLPQNISILKTLCMQARPFQAESCGWAQGNFSRAXADVCSEECEKVPRHQSQMSPTXGQ

SEQ ID NO: 988016 - protein, 37 aa, Homo sapiens
MAVVLAATRLLRARVLGLSRLRFGPPAYRRFSSGGAS

SEQ ID NO: 988017 - protein, 34 aa, Homo sapiens
TLEDLQRHKEEWHGARRSWLAAAQDDPTGQSSAG

SEQ ID NO: 988018 - protein, 35 aa, Homo sapiens
FRGTRRNGTEGCVAGWQLTQDDPTARARQVLLGAL

SEQ ID NO: 988019 - protein, 113 aa, Homo sapiens
  misc_feature (54)..(54): Xaa can be any naturally occurring amino acid
PRGSFRGTRRQRHKEVQILGHGYLWGEPLFSLPQMHTHLSLFFEMESCFVTQAXVQWRILAHCNLHLLGSSNSPALASRVAGITGMHHCAKLIFVFLVETGFRHVGQAGLKLL

SEQ ID NO: 988020 - protein, 53 aa, Homo sapiens
  misc_feature (25)..(25): Xaa can be any naturally occurring amino acid
RAQEAAGYWLDVSPAVSALELCTVXGASDPSSSRERIELECTASGAASSLVPW

SEQ ID NO: 988021 - protein, 69 aa, Homo sapiens
TPWNAEITVFCVAYAGSYRPELFLFGHLGSSLKYSGFLTANQQQASSGTHIFTLGQPSPSGRFTKGDYR

SEQ ID NO: 988022 - protein, 55 aa, Homo sapiens
TRGSRSPFIIINVIIWCVEENIPPLTLVTVAANIILLCNIIIYFYGHLQVGLAGG

SEQ ID NO: 988023 - protein, 85 aa, Homo sapiens
  misc_feature (47)..(47): Xaa can be any naturally occurring amino acid
  misc_feature (78)..(78): Xaa can be any naturally occurring amino acid
FLFLDLQPVRLDYQHICSICEPSHLMTKKASDVKCCKAKVGPTVLLXEFKFSVKLTVTSPMHPWHELHEEDETDTGVXGGPPLQQ

SEQ ID NO: 988024 - protein, 106 aa, Homo sapiens
MYVINMILGSYRSRSGIYQCDIHAQLIYEDIFLIDCFAPCQSCWVHIWRHYTSGISEAAKNGSRFRLSLGFWLVDPPRCLGIANSFLDEYLELNIAKKLRRQIPRW

SEQ ID NO: 988025 - protein, 49 aa, Homo sapiens
SVPPWELGDFIGLSPEIAFHLITNSGAFSMLFLQFCFYKFKLLQLLSAV

SEQ ID NO: 988026 - protein, 33 aa, Homo sapiens
RPRGSGGMGLYGSKAPSPQRRHTAAQPADDAGC

SEQ ID NO: 988027 - protein, 91 aa, Homo sapiens
RLENGNETLSARPPKDTRYHHPVSDMRHPEALGPGLYPAEITLTWRGMRDQTQDTELVETRPAGDRTFQKWAAVVVPSGEEQRYTFNDQHE

SEQ ID NO: 988028 - protein, 30 aa, Homo sapiens
MAQAALVERVTGGQCRWGLEGLKKELLGDR

SEQ ID NO: 988029 - protein, 96 aa, Homo sapiens
VDRKAGSHGQNNAHVGTVDLGRLAPISGEWASWSPLMLYMACVSLLFSRRHHHSCPLLEGSTSVLVWSPQCSGVLTFGPRRSRVPWSVVIFRRGRE

SEQ ID NO: 988030 - protein, 49 aa, Homo sapiens
LYCLTSLGRTTRGYDLKQLYIGSEGTLGIITTVSIYVYTQAQGCEPWLS

SEQ ID NO: 988031 - protein, 48 aa, Homo sapiens
LTNAVRCRSFGRISRSQKDPDPKGLWPLAATTAMTGCPTTPVPSSVGV

SEQ ID NO: 988032 - protein, 43 aa, Homo sapiens
  misc_feature (23)..(23): Xaa can be any naturally occurring amino acid
TKVELRILWQRQTRARREEEPAXDCLTPTGTSRSVLAPRHPMS

SEQ ID NO: 988033 - protein, 36 aa, Homo sapiens
MWKSADISDVSVMTREYRATEASARSVESMVISRVI

SEQ ID NO: 988034 - protein, 66 aa, Homo sapiens
MRGSCVCAVGLSSELRKCNQWMLVLSEGRVSCSSVSTTEDCIALVLKGEADGMSLDRRNLYTACLF

SEQ ID NO: 988035 - protein, 151 aa, Homo sapiens
ELFRTPSESQARVAVQHSEEVTSDPEDYKFLAVLCRVHFGTGAPPRIPAQWLQLFAIKALKYRGHCGPTRVGEPDVCYADIGGCDQCGTPLSGESLRLFPNTGRTVCFVMEYSAGGDLMLHIHSDVFSEPRAIFYSDCVVLGLQFLHEHQI

SEQ ID NO: 988036 - protein, 61 aa, Homo sapiens
DPPFPSLLRQAQEKFGKDNVTENSSILWHPPEVAHEEILLVHRTSAYWCFLSGAPRGIDSW

SEQ ID NO: 988037 - protein, 48 aa, Homo sapiens
CDPHQWVDPNGSARSTSEETPVTAMPALLAAAPPMPGLEAAWTSFSTS

SEQ ID NO: 988038 - protein, 72 aa, Homo sapiens
DPLSTRDTRHDSGHGRWQLLGSVTGFRLPSRHSSAKSGSFKSLAHASLLFPSVFCKTVTSFTKCNGLPAFLS

SEQ ID NO: 988039 - protein, 42 aa, Homo sapiens
EGEKRGFLSWGPGSRQHYAEIQVWMRFQGVCCKKMGIDHKGQ

SEQ ID NO: 988040 - protein, 145 aa, Homo sapiens
DHLSSSIHSSIHPTIHPFNIHSSIYLSIHPSTHTSNYLLIHPFTYPSIYLSNHSSIHLSIHLPIQPFTHLSIHSFIHPSILLHIHPSIQPSTHPSIHPSIQPSIHLSTHLSKYMGTDSVPNPTQHRISLVIGISSLNSEISEFDS

SEQ ID NO: 988041 - protein, 81 aa, Homo sapiens
VTSPSRSTDGSLVDTPKFLGEKYIPQVRMRTGVASQYTQAQKDDLILEGNDIELVSNSAALIQQATVNPEATVNPKATGQP

SEQ ID NO: 988042 - protein, 116 aa, Homo sapiens
  misc_feature (72)..(72): Xaa can be any naturally occurring amino acid
  misc_feature (80)..(80): Xaa can be any naturally occurring amino acid
  misc_feature (86)..(86): Xaa can be any naturally occurring amino acid
  misc_feature (100)..(100): Xaa can be any naturally occurring amino acid
  misc_feature (105)..(105): Xaa can be any naturally occurring amino acid
RTRSVDADDVEGVEPHPDMEAIFATTFFHVLYGTNSGSLQGLQRDSCVIFICTPCGPQTRKLIHSLHFFTPXGQTMRSLXHSGTPXGRSDDFGVRLVSYXLPVTXEKRRTGTDART

SEQ ID NO: 988043 - protein, 71 aa, Homo sapiens
  misc_feature (13)..(13): Xaa can be any naturally occurring amino acid
MYSFSFLDRHYVXSAAAFAGHQSMDHSKAAPGGAYGTVSPHLTMGPHSQLIVLVSSSELLRDPCSAYYLSH

SEQ ID NO: 988044 - protein, 52 aa, Homo sapiens
CIITLLSDRKLRLKEDDVPKVTSLKSELDLNCDFEATVNPQATVNPQATVNP

SEQ ID NO: 988045 - protein, 40 aa, Homo sapiens
GQRDTASVGLEIVQVKDYKRVGDQEDHGSAKRICGTRSGE

SEQ ID NO: 988046 - protein, 49 aa, Homo sapiens
ARSIAWEHKNGYNVVHDILQQFKPGRGQDLVLQFQEQTIQLELSNKPVG

SEQ ID NO: 988047 - protein, 43 aa, Homo sapiens
AHTHHKAYHYTRSRRAEIEQGKKKHCSRGVVEATVNPQATVNP

SEQ ID NO: 988048 - protein, 63 aa, Homo sapiens
LSQCGEILVDYTVDPCTFSLYLSLGISLFSSLSSSSFSLMFRLHIVLGQIEAKVESTRPRFNP

SEQ ID NO: 988049 - protein, 45 aa, Homo sapiens
LSGSGRRHFSKSESHGMLPQPGCNLLNGTQEIGPVGMTENCNYGK

SEQ ID NO: 988050 - protein, 30 aa, Homo sapiens
MIGGAKWNSGIRRIVCAHLPWFSWQNLLSW

SEQ ID NO: 988051 - protein, 38 aa, Homo sapiens
IKDTIEKLKEKKLAPSPTAGRGLAKEIDSVNYLECSAL

SEQ ID NO: 988052 - protein, 40 aa, Homo sapiens
GKRLQDVRKQDVLEMNACMLYGGEGGGLPENHPSVETRSG

SEQ ID NO: 988053 - protein, 42 aa, Homo sapiens
RYDVHRITELVSEQRKTTCAKQQQQQQNDVVKLTKEHVNRKK

SEQ ID NO: 988054 - protein, 33 aa, Homo sapiens
HVGSDIGHGYLVGGNKYSDYHRCILISLSVSEE

SEQ ID NO: 988055 - protein, 92 aa, Homo sapiens
MNRRAVGVIHSVYHSNWFSVALRGTVLMGHMVIALQCFDVCTWLLLISYNLNMQDPHLLHNGAFDPDFSQAPQTDSQAVRGPVDLPAGRDLA

SEQ ID NO: 988056 - protein, 91 aa, Homo sapiens
  misc_feature (33)..(33): Xaa can be any naturally occurring amino acid
RQAGCREETAKDSQSALSYAQLIVQASPPPGPXSCPERIYAIITKHIPYYRTDDKGWQNSIRHNLSLTRYFIKVPRPPEEPGKGPFDETSC

SEQ ID NO: 988057 - protein, 49 aa, Homo sapiens
EGHGQVITTEPVGMRRNDRAVHAEAAGTMCKGMAEQSLLGTRTQAAQHY

SEQ ID NO: 988058 - protein, 66 aa, Homo sapiens
SRGSLFCLPHHKTTSALRPETRSAQVTGHGKKVADALTNAVAQVDDMPNALSALSDLQAQQASGGP

SEQ ID NO: 988059 - protein, 85 aa, Homo sapiens
VVAGPVINDERSSWRNPWGVKEVGEAAGRSPEGWRCGSRLVPPGCKDVGCVLSARRGWLDSGVPLHVISRGSDHGHAMTYIANLN

SEQ ID NO: 988060 - protein, 82 aa, Homo sapiens
GVAPCLHGKDPSFWMLLPWLFGDVAKNLCLSGDPGPRVPLLQGIELQPISTLPPDLPRAQEPLVVTLDCPCLSEGPSSPIRS

SEQ ID NO: 988061 - protein, 37 aa, Homo sapiens
ETVDSVEGIVRTVESEEDSVVDCENFEGSVGAVESVE

SEQ ID NO: 988062 - protein, 83 aa, Homo sapiens
AEVTLRSRAEAEREEIISAGRLLDVTELRILRRLSSSRCGFRLLATLVGEIALGGQAALGDVVHTGVHDHRDIRSPPKAGLFP

SEQ ID NO: 988063 - protein, 99 aa, Homo sapiens
  misc_feature (1)..(1): Xaa can be any naturally occurring amino acid
  misc_feature (49)..(49): Xaa can be any naturally occurring amino acid
XADGWGGIPLVDGPVWVTRHRSPSRCQWYGPEAYSDSTAWIATYMAGVXKVSNMIWVIFSLVGLGVQGGLGQQHGVLLGSHTQLIVEGVVPDFLHVVPV

SEQ ID NO: 988064 - protein, 38 aa, Homo sapiens
EAYVGYLIGLPAGRLCWTRRTKDVLLQVDDERRNASST

SEQ ID NO: 988065 - protein, 66 aa, Homo sapiens
  misc_feature (24)..(24): Xaa can be any naturally occurring amino acid
  misc_feature (29)..(29): Xaa can be any naturally occurring amino acid
MTMPDELGMSQAHIHEVIPPGQKXDIFIXFARAFNQDSYPFDGLGGTLSHAFFPGEHPISRDTHFD

SEQ ID NO: 988066 - protein, 33 aa, Homo sapiens
MKRAKNAELNRRDEDQTEQSRCMKITGFNVEMV

SEQ ID NO: 988067 - protein, 64 aa, Homo sapiens
  misc_feature (20)..(20): Xaa can be any naturally occurring amino acid
MRMARSSVRTHDRSGDPESXLVGAPDGRRKGVPESADRGVVADLGGPVSARSICVVEYQETCWD

SEQ ID NO: 988068 - protein, 46 aa, Homo sapiens
RSNGLVICWTGFWMTRTVTTICDLNLPLADLYLTATLPLLIDCMAM

SEQ ID NO: 988069 - protein, 70 aa, Homo sapiens
RSLLSCLPLYDLFLVKPMCVESFSDYPPLGRFAVRDLRHPVAVGVIKAVDKKAAGAGKVTKSAQKAQKAK

SEQ ID NO: 988070 - protein, 87 aa, Homo sapiens
MVVVYWSPQPDYINPRAVQHRDPFYVRGLTTLGYNQQSIVATPEKRVITCPGMYEDEEALTIRSTCNTEKGNAVEVLLEQNVSSTDT

SEQ ID NO: 988071 - protein, 54 aa, Homo sapiens
IPFSSQTEKSCSMPTPTALDLVDRPGRASIGGSFKAPQGQTDGVTSGALSSVPS

SEQ ID NO: 988072 - protein, 145 aa, Homo sapiens
MLLVSLRFPLILVDAGVGHLRDMLPGLAHDVLRPELLSHSSCDPDIPGNWDPCSLLATSVLSFLSQQRIMFSVNALFIYSSQKNMPSQGIFNALFLNVSSQSSRAWVLFGHSPARGRPLQHVVPAAMTKYLPTYRSYYDSVDPRI

SEQ ID NO: 988073 - protein, 73 aa, Homo sapiens
ALLVVSAGSPLSHWLMPVIGYYLMSHRSSYFTDCSECLSGVTVCIIAGGSLTGWHPDSAAAVMAHGLGRSSEI

SEQ ID NO: 988074 - protein, 68 aa, Homo sapiens
PGKPFGHLLATPTLPLVSAQAARGPGSTLAGVPAELAPYRRGDRTAFFELLQKPSSLEPLWQLSYAVV

SEQ ID NO: 988075 - protein, 72 aa, Homo sapiens
LEDPQRHKEVRERPSGGGRIVCLSSDSLGRACCGLWAMGVVVNRPMELRSKGDYGCLCCFIHITREIGESRQ

SEQ ID NO: 988076 - protein, 33 aa, Homo sapiens
DHSDVLSYALDHQGQLCVRRGNVGEGAFRQALG

SEQ ID NO: 988077 - protein, 37 aa, Homo sapiens
QSSSSGLQVSTACITGRMVKSDVTENRAQDQLMLPKV

SEQ ID NO: 988078 - protein, 34 aa, Homo sapiens
MVAVLAIGGNVLARLLRTLTRHWVLCHSDKKECG

SEQ ID NO: 988079 - protein, 59 aa, Homo sapiens
SWSAIVPESDLVRFTLSLGNLVVPAHGRSPYCMPNLVRTPCIWHSCTTVPVTPGAQADP

SEQ ID NO: 988080 - protein, 68 aa, Homo sapiens
MSIPVVITPTRPMLAPPITITRIACIKSDKVDHLAGPSINLHNIVHLDHRIWVAYSSSIMSHQVRDSL

SEQ ID NO: 988081 - protein, 73 aa, Homo sapiens
RYERFYRVAVSSSSIYLAHRYAFQNISHLPAFGNVTQFWSLIAVDHFLQCVNLLPSARFDTVNFRRNGQPESC

SEQ ID NO: 988082 - protein, 92 aa, Homo sapiens
SYTEGKCYTLEHWYQELVLYSSDAQPLPSTHCTWRQAVTRQTGARVSSTHCTCTPRRHACGDTHPRAPGRLRPQQMSVQGGSCSQVNMEPQR

SEQ ID NO: 988083 - protein, 54 aa, Homo sapiens
RSITLTKSSNQMWGEVTRRWTYTLVIRLRHNVIHTGVRIISLSYSRISLADIAQ

SEQ ID NO: 988084 - protein, 41 aa, Homo sapiens
FGIILSVTKIEILEGVYFCAGGFRPQGLATLHNSSGQGRRC

SEQ ID NO: 988085 - protein, 37 aa, Homo sapiens
FHVLRSKSPMNQDCDSNRKEVSIWTVHPACLSPAPLT

SEQ ID NO: 988086 - protein, 114 aa, Homo sapiens
GSPIMTVPGTCLGACTLGLRYVARSPAMLGVAAAAAGPARRRDVTALSFQHWNGMQRIKTGSAFPSASNSFFRDVWNWALMLGGFFFLCRCSMDLVVRSCRVMLVGVSVIACED

SEQ ID NO: 988087 - protein, 33 aa, Homo sapiens
RVIIHSYSPSMPLVYEISPALVVELRYSYQKNI

SEQ ID NO: 988088 - protein, 136 aa, Homo sapiens
MGFWNGATLESGKRSPDSQSPLSLPSIRLSTRLFREGSQGPHMKHLVAQPLGCSSSNPGSAQPHSGHSRLLYSPGYTCHVLRALGRMARRQLFAEPCGTSQRYPLTLKLGLRWIKGDLELTGSPEELGLHPLPFST

SEQ ID NO: 988089 - protein, 64 aa, Homo sapiens
MPSLGIFNALFLNVMLPATQALVLLGHSRARGRPLLHVVPAAIRKYLPTYRSYYDSVDPRITYG

SEQ ID NO: 988090 - protein, 119 aa, Homo sapiens
LGPSQCSFLLVSTLLMLLAACFFPSSVPSTTCLKLCTSLQERGVPTAAKSLACKVRTLLHPACPILVLRQLPIELLPMPWLLLLFDDCHKGTTYWSCRPLISFLQETQSVASYFALRLV

SEQ ID NO: 988091 - protein, 142 aa, Homo sapiens
LLWVLSNSAPRAPRPPSDTFVFYPGSRGPRDWHSILPFWAPESALDFHWPFGGALCHMVLTGTVLDVYASLFLIYSAKRCSPTGVVALAAGPGNRLSVFWGPKPPWSVCAAAAPVTVPTAVFRVAGEVCSVRPYLLRFPRKY

SEQ ID NO: 988092 - protein, 74 aa, Homo sapiens
AQGGGERCISGSASGSASPMELLSYFKQPVIATRTAVRAADCLHVALDLLQRKLRPLWLKAIQVSLSVLHARPA

SEQ ID NO: 988093 - protein, 61 aa, Homo sapiens
PPEAQGGLGAYLAGLSLQPVKRFLELLPVAWSFRSPPPAETRHPSWECHWPLVLPSSLVPW

SEQ ID NO: 988094 - protein, 41 aa, Homo sapiens
MGTARREIYTLSAAGLLVPLPSLVPLASLVPLGASGLLEAS

SEQ ID NO: 988095 - protein, 36 aa, Homo sapiens
SEDPPEAQGGRGTKEGEKVYILALKELRYVLYGRCD

SEQ ID NO: 988096 - protein, 63 aa, Homo sapiens
  misc_feature (13)..(13): Xaa can be any naturally occurring amino acid
QRHKEVHRFSLRXIPIGTVHHPVLPPMQCCSPAMVSWQLLHLPKVYLPLVATGTHEIISISPH

SEQ ID NO: 988097 - protein, 39 aa, Homo sapiens
FRGTRRLLRILVGPGEIYTLSAAGLLGALAPWCLWLPWC

SEQ ID NO: 988098 - protein, 45 aa, Homo sapiens
DSGRCRGQAWDVSVRRVGSGGTSACLNWQSVLRSKCRLRPLLGAL

SEQ ID NO: 988099 - protein, 63 aa, Homo sapiens
DRGIQLYSTAASDLAPLPASYPTVTPPETSTGFCEHVLTSKYQLSWSLGSRSYCPLGVPRGST

SEQ ID NO: 988100 - protein, 50 aa, Homo sapiens
MEITALAPSTMKIKIFAVLLERKFSVVVSAAPSCASAVHASSHDVVSMQR

SEQ ID NO: 988101 - protein, 66 aa, Homo sapiens
MFGRYADSLCFGVVTVTYPSGYRGRGCPQDSCSGIDHSPPVFSSLCHLPSLALPDGALLVLPGLAL

SEQ ID NO: 988102 - protein, 80 aa, Homo sapiens
SEDPLQAGISHGLLFHQTGSCTFDEYFKSKLCPLADPRSNLCALCIGDQQGENKCVPHSDERYYGYTGAFRCLAEKLLRA

SEQ ID NO: 988103 - protein, 39 aa, Homo sapiens
LQDPPRRPASQQDLLKELQKQLEDKHSTHSTNCFIETRK

SEQ ID NO: 988104 - protein, 37 aa, Homo sapiens
PAATGFSIWSAFITCDALRGGLYGHLNLRECQIYSLI

SEQ ID NO: 988105 - protein, 37 aa, Homo sapiens
MLLIVLLVWACSSVTQLGSLRARPSCRYVVPICHLIS

SEQ ID NO: 988106 - protein, 93 aa, Homo sapiens
VSYSIPRPPSFVSAKTGNVASLAVWGALILRIPAWMWKDVFGVYDRLTGFGWIAGKGAAGMHSLILPPWRPSFLAFFETESCSVAVAGRRCGG

SEQ ID NO: 988107 - protein, 115 aa, Homo sapiens
  misc_feature (50)..(50): Xaa can be any naturally occurring amino acid
GSPGRQASHVGSGYQQDVASQCVFRLSYLLDGIGLGVPEVDTRCSMAHLXKSTDIWYLQVQAIVVHALLSHALCGGLSAGKIYFSVRLFADQPWPRLVKPLSSTEEYHTLSFVHC

SEQ ID NO: 988108 - protein, 54 aa, Homo sapiens
SIKEPINRHILDTSVFDTVPYCVSLLFFYRSSTILFTGQIRIKHSSTLNACEYT

SEQ ID NO: 988109 - protein, 122 aa, Homo sapiens
MLLVTLRIPGRQLLTVLGLLVEPLRLAECLSVFLSGLPIYFRFNMLKVIHFYFIFIVIVDYDKILFLLALCHSLIPEYNMLINKGPVISHRKAVTVLAECHMEGTFYAIYKNSVFALDSNKL

SEQ ID NO: 988110 - protein, 62 aa, Homo sapiens
KTNPIYLSYAQDVVRLLKDMTWSLTKSITSEIHTSDIILYTPKQHTMAAVYLSYLYHPTFRY

SEQ ID NO: 988111 - protein, 119 aa, Homo sapiens
MSHGTIDFLHITDNDGEKTMNDTDSEAEIREALRVFDKDGNGYISAAELRHVMTHLGETVNRRTTVDEMIREADIDGDGQVNYEEFVQNDDSNVKTLYRMCKITCTTSYISLFFVRNLS

SEQ ID NO: 988112 - protein, 46 aa, Homo sapiens
MALVLHTILGPMLLNRPLAWVTSSLPSPSNVKGKILLKGKTLGGLL

SEQ ID NO: 988113 - protein, 104 aa, Homo sapiens
LSFPPAYYFPHFDLGHVSLPRLRATAPKVADALTNAVAHVDEMPKALSDLSELHAHKLRVARYNFKLLSQCLADRPWPTTYPDRVHPIQCPKPREILLDVDLAR

SEQ ID NO: 988114 - protein, 75 aa, Homo sapiens
LVFPITKTYFPHFDLSHGSAPRFRATAQPVADALNNAVAHRGRNAQLRCPPMKLTMNAHNAIGVDPGQPSMLHNA

SEQ ID NO: 988115 - protein, 53 aa, Homo sapiens
RCAADVRDVRRAPACGDTPKLGNRGYQRRLPSDRPMYPGDCPPETTETPKCSS

SEQ ID NO: 988116 - protein, 74 aa, Homo sapiens
GCTPLVAQDPAHVTPASRHQAECIPFFRSMPGFTGSHISIRNQINALTSFVDASMVYGSEKPLDRNLRKHVQAA

SEQ ID NO: 988117 - protein, 41 aa, Homo sapiens
SHSSEQEMTQANLPSAGNRHGLSHKCLRKCTWGQCERNTWA

SEQ ID NO: 988118 - protein, 34 aa, Homo sapiens
APPGGLLKPLDGWVHTSVPVSCVTGGCWNDPHVS

SEQ ID NO: 988119 - protein, 46 aa, Homo sapiens
MHGSHSDVVSELLVPARSQLSRCCARSLTPKRSEGERNTVAGRNTG

SEQ ID NO: 988120 - protein, 65 aa, Homo sapiens
MTQAVSLLCSTEHCNALGKERRVPGFHSWHYAGPNGQHSTCTAFFTGAGSRVVVVNHICDLGYVI

SEQ ID NO: 988121 - protein, 53 aa, Homo sapiens
MVRKRNAHMPRVLTNGMYAEVMQATSIQALEGNISFLSLPLGLMEGARCGAPN

SEQ ID NO: 988122 - protein, 48 aa, Homo sapiens
SKAHEGSLSLYCEWLHTQVVSAAARLNEAMTLATRMPADLVKSAIPQG

SEQ ID NO: 988123 - protein, 55 aa, Homo sapiens
REGVQDVSLQAYTVAHVKLDSYQMSTELLIRKLPFQMSWCDEHVLSDFNNMICCF

SEQ ID NO: 988124 - protein, 32 aa, Homo sapiens
MEDHSSSGIIGCSEPVIIAICTPVWVKEKGPV

SEQ ID NO: 988125 - protein, 81 aa, Homo sapiens
AELVRGLEMLLMVYPCTQRVDESFGDLTTPDAVMGNPKVKAHGMKVLGAFELMGWINWSNLKGTFATLKMSCTVNMLHVES

SEQ ID NO: 988126 - protein, 74 aa, Homo sapiens
MCEVGGKLPYCLLQVVDTTITVAPSPQERTSFVLDVMGYVSSFKCWASVSRPCACRVCTMGQSPQFPQGGPGTD

SEQ ID NO: 988127 - protein, 59 aa, Homo sapiens
MSPRLVLNSRSQSDLPASASQNAGITGVSHCVRPQLVIFESQCLRLRFCNTKAFFLVRH

SEQ ID NO: 988128 - protein, 43 aa, Homo sapiens
IRVYDCICAPGHAILRSASWVARTTGPPHPANFLVVLVEAQMQ

SEQ ID NO: 988129 - protein, 71 aa, Homo sapiens
DPSADNSTVDDNPDFDNSTLWHRDEEEKFFDEEETEGCASPELGWGLMAATLPTACPIPIPNKAADSRPAQ

SEQ ID NO: 988130 - protein, 52 aa, Homo sapiens
NSKMHTDGDRPQDRLRSEKEFTLLPMNYPSRHRRLSGQPPYLSATSIEHRPL

SEQ ID NO: 988131 - protein, 40 aa, Homo sapiens
RNSVSLALRVQNALHCLLASERCCGGGKAAQQLREGDVQR

SEQ ID NO: 988132 - protein, 68 aa, Homo sapiens
CRPSAPSTNSMYRHYSFHVERHSACSLGTWIQWNYMGASVCVAMERYQLCGSVEERGRITLIMTHCQY

SEQ ID NO: 988133 - protein, 128 aa, Homo sapiens
ALLREHLRRRAPDRRVSSTSLSVGRIDQDVLVHPLSRSACRRSAHPTSCSPCVSSALGFCIIWQEKVIGAHVATLLRQRFTGEQNRFAIDLAVVSRGIDSWDRSPAPQHHAIRVIEVIARASEPPDAT

SEQ ID NO: 988134 - protein, 58 aa, Homo sapiens
RHRDSSLTLFGGQHWCSQKPGTCPGGVHRRGNIGGEVGGQDHQQAVAEELEVDRVHPK

SEQ ID NO: 988135 - protein, 102 aa, Homo sapiens
VQNQVSTCVPVAPGGDELVLLSVAVYKGCVDVVCVLLTPYIMERITRLKSYGMIWMTLALFMYAGKLPYLMFSFMIRTFVNFPETTSSRPESWPEMGSGAVL

SEQ ID NO: 988136 - protein, 38 aa, Homo sapiens
VCRHSTRLEDVQNGRATGFLLKENIRPFQLYEIYLCTP

SEQ ID NO: 988137 - protein, 41 aa, Homo sapiens
IPLILIVPQHPLVVLIRIDSASLADPSWQSNSCFPVMKCAH

SEQ ID NO: 988138 - protein, 124 aa, Homo sapiens
RGSAKKRPLPLVVIGITMNTVAAARFRKVDVRLNDENKFVDEEDVADGESVPDEGEVHSCLRQGNMTAALQTALKNPPINTKSQSVKDRPGSIVLKVLISFKANDIQKACQSLDKNGEDLLMKY

SEQ ID NO: 988139 - protein, 74 aa, Homo sapiens
IPECSPAESLQSTHLLPSTALFHHAQLIFEGKTGTGLRHFDQAGLELLTLGDLPTAASQSAGIIAVSHHDQPQW

SEQ ID NO: 988140 - protein, 80 aa, Homo sapiens
TRNSRTSLKEYDGLLYLENYPKLKLKHIHWPGAVAQACNPSTSGGRGGQITRTGIETILATTVKPCLYYKYKKLAERNTG

SEQ ID NO: 988141 - protein, 108 aa, Homo sapiens
MVVVYPAIVAIELVISSYDFVPGGTLSSCSNRVSSGVGSSGTNIDWLIQWWFMNCVMVSLSVGSVFNRRRISCLASSETSDHSGLGKPYWPRRILLFIPGEMAWPVLE

SEQ ID NO: 988142 - protein, 133 aa, Homo sapiens
QLPSNAFVSTAKWQLLFGLKLLNMMAEEKLVDAWIAAPRKQKKAWRSCSRAPLEGCLELVCTLPCVPEDWEFLLSVASRVFVLYPVLTCYGELRILSSSPLSQAVTMWRPGQLEPRPSSQAEQGGPGTLGLPL

SEQ ID NO: 988143 - protein, 135 aa, Homo sapiens
GRSASDEKSAVTALSGQGELLSKLVVRPCCTLVVVYPVTHRFFESFGDLSTPDAVMGNPMVKAHGKKVLGAFSDEAWLTWYDLKGTFATLSELDCDKLYVDPENFRLLGKVLVCVLAHHFCPEFTPPVHAAYQEA

SEQ ID NO: 988144 - protein, 57 aa, Homo sapiens
GALQVDVYSPLRVHALPWYNVPVCTLWDTDAVPRKVLLQHGSHGSTSSMDPRSYPVV

SEQ ID NO: 988145 - protein, 43 aa, Homo sapiens
YPACRGVQGAGLHRVKKHLQDLSWRNLQSSDNEFLKALGSPDR

SEQ ID NO: 988146 - protein, 103 aa, Homo sapiens
MTRRKGRASFLPCLSWFHLARACCFLRALALPPVLLFVPFCFPHSLPQLISSSSRPLSTLSKHITGDLIATRSECFAVILLGLARPGTALCSTPERGEHELVC

SEQ ID NO: 988147 - protein, 33 aa, Homo sapiens
MKIIVNKDAKSTLRVLYGLFCKAHAGRHTWDRD

SEQ ID NO: 988148 - protein, 75 aa, Homo sapiens
MVSTFLALRRVGLSHLHTQVQQRFWYSALGVLLDIKYRDLRYFLLNSDLNFQHCPLHLREGTMNSGSGTFISAYP

SEQ ID NO: 988149 - protein, 32 aa, Homo sapiens
MSVHVHIALQHIPTHLIVEWIAKLMGDLQRYK

SEQ ID NO: 988150 - protein, 109 aa, Homo sapiens
TERPRSSYQGQILPSQTLTDPDPSICARSHLLRHGQTQILIPASNPTSSDMILHEQTQILVSVPDFYLLTHGETQILIPVPDPTSSEMDRPRSSHRYQILPPDMERPKS

SEQ ID NO: 988151 - protein, 49 aa, Homo sapiens
RDQTAYEDQKGPGPEKTTSPCDYPQLQQKTGSDLRPSASASTSSLAKGE

SEQ ID NO: 988152 - protein, 36 aa, Homo sapiens
QSSCRIINFEPHCLRRLPSDENTLSPLSEFSEVGLT

SEQ ID NO: 988153 - protein, 122 aa, Homo sapiens
SPERCLLRDNVHLTLGGETFNDLLIISQDRGMNKEPPWPISSLLSSHLLGPSPGAKHLLCLVRLIYLNGKYGCGKLKSQEVTLLDQSHVDQHQHKDQNPHLSPKPLVQNPVAASGQILTDLP

SEQ ID NO: 988154 - protein, 47 aa, Homo sapiens
MRARIIPDSVTFGSGRDLQAKSGAAVRRGSRSSSKLLGCANDPGLGK

SEQ ID NO: 988155 - protein, 51 aa, Homo sapiens
  misc_feature (35)..(35): Xaa can be any naturally occurring amino acid
MTGSNAEEDAPNLGASCPALAARFASDWILSFPQXMMVAHGNKCGVPELEI

SEQ ID NO: 988156 - protein, 69 aa, Homo sapiens
MAKQYELGLGQPPSRAFGLPAKDPQSPADWSSGLSSTIDRQPLRRLAAVSPHGTLALSPSDLEQVHQLG

SEQ ID NO: 988157 - protein, 37 aa, Homo sapiens
MRGPLMRGHLCVTYAWGRCWNRVMSSSPVGLAPGDAG

SEQ ID NO: 988158 - protein, 47 aa, Homo sapiens
EDPATYTHFTTIPDFNGPPSHYRFGFSAQLSVSSLVWVSQAPPRYKV

SEQ ID NO: 988159 - protein, 132 aa, Homo sapiens
YNLIFSTDTLSSTRSNRLLKLEHASRSSGTMVFSSIRSSKVFSTLLILVSHSSHLFSRFLASLPWIQTSSSSSEKLVITDFLKPTSVRNRQIEKLKMIKSSRDQALAEHCLAALTECAASGDGKFLALAVDA

SEQ ID NO: 988160 - protein, 150 aa, Homo sapiens
KKGRWVFHSYHEEIKAGQLRFTTLAYPVLCLVAKSILTDPHQPAFPPRPPTLSASVDVCCCVRNAPSCSTASTPGDSCGHQLPGLTESLVALFTLSRICFLGANPPFYNPLSQASYTAPSSFRACGRPRSLSLDAEHVRGNERNLPEPFP

SEQ ID NO: 988161 - protein, 58 aa, Homo sapiens
ANSLVIRDCEKEVRAWGYALLVLHLGHHASTKEPLHNNNLPPRLPRLLLAVSNRIPAD

SEQ ID NO: 988162 - protein, 131 aa, Homo sapiens
RTPRAPYQLQYLVLPETPPELVSPRVLEVDTQGDRGVSRDGLFPVSEAQVQLAVGDQRLNRIVIYGNDSFVGQGPSVRVTAEDRGAPAADVCTIVLGNQSQETLRRVTIYSLPVPIVILTKPEVSKGPRDS

SEQ ID NO: 988163 - protein, 38 aa, Homo sapiens
EIHTANSSGLTMRALVVSAVIDNEMETQNFKCSSFILV

SEQ ID NO: 988164 - protein, 33 aa, Homo sapiens
QAVRKNIFSAPVTTCMSSQLAVVQIQLLFLVDN

SEQ ID NO: 988165 - protein, 69 aa, Homo sapiens
GGLVEVRAGPEPARPFTIPLSSHRPLRCLNTGQGDSMCALRIGRQRTEEGREQPHALGGALWPQTRAQS

SEQ ID NO: 988166 - protein, 46 aa, Homo sapiens
  misc_feature (46)..(46): Xaa can be any naturally occurring amino acid
MTSDWKMAYKQSERFTYQRCMLDWGRGRSRGMTVATRQDTSPDETX

SEQ ID NO: 988167 - protein, 141 aa, Homo sapiens
QEVSSGAVRRAKALRYGVRALAEKFPVISVPHWPRNRATGRFEEDFISKRRKGLIWWINQHGQPPSAGAVRSLPNNFLDVAQAAPNEKSLESRGKEGKGPRRNEDGWGAKLSFPDPLNNAPPAGCPFDLALPGGTEGFRIR

SEQ ID NO: 988168 - protein, 117 aa, Homo sapiens
  misc_feature (55)..(55): Xaa can be any naturally occurring amino acid
PGSGWEVRERSEELRVVVASPEYHDTAAWTSAAGIPSTPQSRHGIPPFRLVGSPXNFLLSCGPLGFLGFSSFSSLPIPFILNTLWRSIDAIPDNQKFKQLQRELSQVLSPGADLHPA

SEQ ID NO: 988169 - protein, 50 aa, Homo sapiens
MISTDLTARFDLGGSPSLSNLVSPLSGGHHIDAELSADTLIGIAHYSPEL

SEQ ID NO: 988170 - protein, 58 aa, Homo sapiens
FRRRALKQLPKPPGADHYRGRGTPAYLDKPEDVAYTDCWTSCRALHAEAQHCMHGGGL

SEQ ID NO: 988171 - protein, 47 aa, Homo sapiens
MPFGASTSFGDRSLQAPSHCLLVTLWRPTPPPKFTPVGARTPCDKFL

SEQ ID NO: 988172 - protein, 44 aa, Homo sapiens
MVRYIVCSGQVPPRLVGAALDWKTNSAWARVSTSVPIEWPSPKG

SEQ ID NO: 988173 - protein, 98 aa, Homo sapiens
  misc_feature (2)..(2): Xaa can be any naturally occurring amino acid
YXELRTTFLEPQPVTAHTPAESTCRNSGYSERSEVTCMWGARGDAGRALRRACVLRAIVAAGSARSVTDVFTGPITVGSHTMSGSLLGCLLVSFGWPL

SEQ ID NO: 988174 - protein, 48 aa, Homo sapiens
SHRQLLWVGRRFTRGITTNPSTVSPAQRPPCVLWSSLLLPHPYPPDAS

SEQ ID NO: 988175 - protein, 35 aa, Homo sapiens
MVCTLFWGTAQGANTTVTTQAREEPGPTKHPGGTP

SEQ ID NO: 988176 - protein, 47 aa, Homo sapiens
  misc_feature (45)..(45): Xaa can be any naturally occurring amino acid
FPTGSCMGCRRYEWHHNKPSKSSRHSGSLCSVVFPAAATSFTLLXPL

SEQ ID NO: 988177 - protein, 39 aa, Homo sapiens
  misc_feature (1)..(1): Xaa can be any naturally occurring amino acid
XEVATRLHAWHVDDMPSAVRLSDRTRTSSGGPVNFKLLS

SEQ ID NO: 988178 - protein, 86 aa, Homo sapiens
LDDHVLIHSILTVNHFLFGTDQPPILLSHSRAFALRQGWEGVEGVERRDLHTLLRAHPHVHRGLSDRGSELDHICTLLLKELTNFL

SEQ ID NO: 988179 - protein, 80 aa, Homo sapiens
FILQPGHHLLAQTHGAVNGKGSLKGQPGEFKPELARYLVKFLGCYAEHKLQFWAVTAENEPSAGLMSGYPLQCLGFTPEH

SEQ ID NO: 988180 - protein, 130 aa, Homo sapiens
GRPRRLEHSEWTLPGLLSLAPVVTQEPALLIDLTSHRCRRTRSGVGWKRVLRSLCHSRTRVPLLAAIYFLMIHVLLILEFYGPSIDLVVTLWTTPLKNWNSLTSNIRKSIPVEQSSHLQVLFSNSSRKVP

SEQ ID NO: 988181 - protein, 133 aa, Homo sapiens
  misc_feature (64)..(64): Xaa can be any naturally occurring amino acid
GVYGRKKHDSLYAWCVRRRQFQLTNCESEVLHTGLRRRWMECPIGTFSILELDGSTEPIEAAVXRFFSASCVPRADEGQFPHLCRLCAGTGENKCAFSSQEPYFNYSGAFQCLRDGAGDVAFIRESTVFEDLS

SEQ ID NO: 988182 - protein, 38 aa, Homo sapiens
TQEKVGVSEQARGRGAEKRRTGCIGAKHRISKEEAMRW

SEQ ID NO: 988183 - protein, 91 aa, Homo sapiens
KPMMYPFGKCTTETGMMVEYAPNILEKKDGLALLKTAIVDKLATLISVVIGMDVAASDVYQVMEKYDLDFNVSLNVTPARYIIDLNRMTDL

SEQ ID NO: 988184 - protein, 109 aa, Homo sapiens
DVYRHAGREMASSPECSEMPLDLSSKYNLQKLPFLNQRKTPPMPVKTPVHTSSKALLSTVLSRSQRTTQAAGGNVTSCLGSTSSPFVIFPEIVRNGEPEHLAEELNCTD

SEQ ID NO: 988185 - protein, 70 aa, Homo sapiens
NGPINSRSQESDWVHGQTLSQDWIIHPEGPIIEPREQVEAPQVLGPQVLGLQESNRIPEVYYCLIQELIV

SEQ ID NO: 988186 - protein, 35 aa, Homo sapiens
MQTLIVMTPSWKSGSEENTFSLEEVDTLGLQGHQN

SEQ ID NO: 988187 - protein, 74 aa, Homo sapiens
IVQLEAQDSRQCGRQRSILKSQACHFVRTHIFIDLASRYGHAHPPCIMPCFRIGVLHADQVKQCTVPSPLQGRS

SEQ ID NO: 988188 - protein, 45 aa, Homo sapiens
LTLTQSCCCTAYSLSLSTPQPTAQITVSYTTPERVMAAVNGHSNS

SEQ ID NO: 988189 - protein, 77 aa, Homo sapiens
SDFLCNTLESACKICSDPTEDEIVFLVPDPMQKPCLENYCGSIHYFTNLKSFILFNLTSTIFGGSSYSTNSSSRLLS

SEQ ID NO: 988190 - protein, 52 aa, Homo sapiens
MNSWAKHSARPQTLHPDRFSHILPIFNFIATFCMLMPEENFTADHPFLFFIR

SEQ ID NO: 988191 - protein, 122 aa, Homo sapiens
MTSLAAHGITSRVEWLGEDLLKRQRPGVVAHAYYPSHFGRLKWVDHQRSGGSRPAQPTWQNPIFTKESTMTPRHGGTRRVSQLHLRLRQDNCLNRGDGGCSEPSLGHCTLAWQQSKTPSQKM

SEQ ID NO: 988192 - protein, 44 aa, Homo sapiens
FWAYGKRALGAWIPQGRNGSYQWGPVPCWFARTPFNSVTLPFRY

SEQ ID NO: 988193 - protein, 48 aa, Homo sapiens
PEIMDYYHKLVMLSTMHEDQQYRNFSFCLSFDHMVYGLTLHLQRHAEN

SEQ ID NO: 988194 - protein, 102 aa, Homo sapiens
SWGLETFSFHCVLSEMYFKKNGFKKFRHGIHYFDQAGLEFLASSSLPISDSQRAGITGVRHHARLRRTFEHTRQAVTYWDEREMGTCQSSVSTALAVPTLAV

SEQ ID NO: 988195 - protein, 57 aa, Homo sapiens
QGLDWSAVTFTSGINMHESCAACCGSCTPLFPLHSLPTNDLWTIFAIKISLAPDMPD

SEQ ID NO: 988196 - protein, 33 aa, Homo sapiens
TECCASVLLIFDSDIRTFHSHFSLRPEIVHSQP

SEQ ID NO: 988197 - protein, 37 aa, Homo sapiens
GLSAVCLPVLGSLLGMSSAGGSQKLTFRGLQFSFTYR

SEQ ID NO: 988198 - protein, 54 aa, Homo sapiens
FAWLFSFSALLLLVDLGSVAFWSFLAPPGCGRCPSPGNHTPESPGPAPQSGRWE

SEQ ID NO: 988199 - protein, 41 aa, Homo sapiens
RTPGGLGVVYGKSSNSQADEMDRMKKEYTDCVVTLSAFATE

SEQ ID NO: 988200 - protein, 85 aa, Homo sapiens
TSHVAIDRYACGLVTTYSSADLSRLHLGHLSELIWVGWAWRYLSGLQWLRQRLSTPKWPEMGRLDLGTPQWAEMAEPGLSTPQKD

SEQ ID NO: 988201 - protein, 77 aa, Homo sapiens
RVAHVRTARCVHVVHVRHGVGQRVGTFLLLALNLGSAVAQVEVREVGLGGGAGQEHPLQGLRTILASVRRRTYPSPA

SEQ ID NO: 988202 - protein, 132 aa, Homo sapiens
EFRGAPYQLQLGPPPNVYGITDSTPVQYYSGSILQPPLRLIVRAIRGPMTHLPLTAKTGLHGATLGCVIQSGVWGRIQGFCWYQYMSRILELALQVMVTLSPGDADHDCWRLGELNVKIRHRQSHLRLNRLH

SEQ ID NO: 988203 - protein, 114 aa, Homo sapiens
DRGGPTAAVLSPVIVSLRRQVYPSFSSHRCVCPRAVLFENYSLVLELFTCLCPHLTYEVCDVNFYILCSMSKLIRTRNYVARYVVCTSLYFYTVKQWIPEETLCHQYENRKHTS

SEQ ID NO: 988204 - protein, 39 aa, Homo sapiens
MLREEKGNVEWAKSGANMRGVRDPSNLTLGISLPLSKCR

SEQ ID NO: 988205 - protein, 62 aa, Homo sapiens
LLEVSRVACLVDSFFPSYSSVWCRLCMLIPSPFPGTLPIIQLFPGESAVRVLCCLMKSTQAA

SEQ ID NO: 988206 - protein, 68 aa, Homo sapiens
LWTGGTDGCLHGGFGGPLLCTTVAHGIVSYGKSSGVSSITLLLGSPVFALDKDNNEKFKLLDQIETPL

SEQ ID NO: 988207 - protein, 129 aa, Homo sapiens
PSAPSTASHCHIAGGAIDLLSRVLSQASADLCGHPEAQTNCHVQSDQRGVVEHWYDVRNRQQDVRMTAIQIGGAATTEYTEMKALLDASETTSTRKIKEEEKRVHSKFDTIYLILLKKKSEIQTLKEEI

SEQ ID NO: 988208 - protein, 103 aa, Homo sapiens
PSFTTRNSANRITDAILSTLGPPPAQPQRGGDGYAPPPFPSYPAPGCFPKVWQPSAAPCYGPFSGPLLPKRTENKPQERHRLNAGRQPSPIPTNIQCRPPLQE

SEQ ID NO: 988209 - protein, 45 aa, Homo sapiens
MSLLLETADTKPKVYEMEVLAAGPGEEEDRPFANEHAHFCDRSGA

SEQ ID NO: 988210 - protein, 82 aa, Homo sapiens
GSFLTIYGGQLGAHVSTELVQRGMHRSVEYTSTRLHISDIGRNHGSHVSTEHVYGGMHRSGEYTSSCEHAIAARVLKDTLES

SEQ ID NO: 988211 - protein, 60 aa, Homo sapiens
DLMESSTVLTMIDGTCTGGMHQTMSEYTSTRLHLKNFGGQHGSQVSTELVQGGMHRSGEY

SEQ ID NO: 988212 - protein, 39 aa, Homo sapiens
PVLKLLCHCLLVNSVEEVGGQAHQQAVAEELEVDRVTRS

SEQ ID NO: 988213 - protein, 44 aa, Homo sapiens
RQVRPQGIVLSQKPSTCPVHLHSGWIPDLVGPAKLLHVPGAPPA

SEQ ID NO: 988214 - protein, 75 aa, Homo sapiens
MLLTRNDFFNTAWITGKAYVTMFGAMRELRHAYNRYELAASGLFQSKECSKLNDSLKLSSTFNLIGFQCSAEMSR

SEQ ID NO: 988215 - protein, 86 aa, Homo sapiens
YAGLTMDEKCPRIYPLQNYILGRNVFHTKVDEEDECRKVVAWNTAWRQGAMIAPSWFGRAESFPNEYALCFWRSGRVQYLPGVGPP

SEQ ID NO: 988216 - protein, 93 aa, Homo sapiens
  misc_feature (55)..(55): Xaa can be any naturally occurring amino acid
GSRSSQLHGVGFGTCLHVTDLSWQQPQLELHSAKTPAGPAGKSLRHSRAAAIITXKFLPLQQQTGVLPPRTQESRPSDLRKNAGDTLPQEDLP

SEQ ID NO: 988217 - protein, 53 aa, Homo sapiens
IFAGLSNCPPPLYCPLLKVLNTCAFYQGQTGVRLLTPGGLSVSTTQTILVPHL

SEQ ID NO: 988218 - protein, 94 aa, Homo sapiens
GETSTADWRPDVLCYMTRTEGLTFQRGWMALWTSNRDWAAYKQGFGSQLREFWLFNDNIHALNCPGKQQSSVYNLVDFEGATPSLLSTNHSTVA

SEQ ID NO: 988219 - protein, 37 aa, Homo sapiens
YGTTYAGYRRKQLLDHLETGSSPESNLFQSTSVCRPL

SEQ ID NO: 988220 - protein, 116 aa, Homo sapiens
MVMPHVSTGACECRSVRSSSASLKIRIHLLGDSDDGRSPARRFDLSCSLFGTGRADPSYDVSDGMFHISFYEELPLSFPLRLFKEERLLLSSPSGFLQPRNFFTDPSIEPRFTMLL

SEQ ID NO: 988221 - protein, 107 aa, Homo sapiens
QSSLPVTLSALTECNLRGSSTTKNFRTQGLHDFTCPCAYSTCGFLYSILGQVKRSAAPDTCAPSWAPPGILQGGWLLAGGHRDRAHQLQLNLDEACVRTVLVQAHEE

SEQ ID NO: 988222 - protein, 74 aa, Homo sapiens
MSHTVRKAAQVAALAGGAAVLAAQHLAALGGPVPSPVAVTLPEGTEQLLPWPRHHVLGRRVSSRLPIGGLKVGE

SEQ ID NO: 988223 - protein, 51 aa, Homo sapiens
PWCGEEGRQLQLNELQGLKSCHTVPSQDRVNGMSRIGTLTSILESGRVHRE

SEQ ID NO: 988224 - protein, 125 aa, Homo sapiens
VRQQGHGRAEVLLHIQTGRRDRGLPTSQNDGRPGRDARHFLDGMAARQRRSSLSRLCSQAEGLLTSQTMGGQAETLLTSQRGGGWAEAAISALWEAKAGGWKVEGCSQPRSRHCTPAWGTIEQLS

SEQ ID NO: 988225 - protein, 49 aa, Homo sapiens
QTQHRGGQGSVAFTCDPEVQNTTYLWWVNVIAFPVCPSLKPINLLFNDN

SEQ ID NO: 988226 - protein, 138 aa, Homo sapiens
LSQTTAVSWRNTKQQFQHAATAVYTQVVLPAQRSLGPGRLCAVRFSLRLQLWPLSDLKGGLGVLKDGTEEAHALSHSTELGWGRGRRDSAGSLGSGTVHLQGVGRHGPVPSPISPCDFRWTSVLSHQPMLVPLDHVLA

SEQ ID NO: 988227 - protein, 97 aa, Homo sapiens
  misc_feature (36)..(36): Xaa can be any naturally occurring amino acid
  misc_feature (57)..(57): Xaa can be any naturally occurring amino acid
  misc_feature (95)..(95): Xaa can be any naturally occurring amino acid
DKRYSAEMCPGCSSQCEVSAQTSQAGTSCTEVSDGXIILSRLATVADDHKGVLESLXLETPDPCPAKMGLKEVLCARKTLHNIMKAPGTQPLVTXRL

SEQ ID NO: 988228 - protein, 49 aa, Homo sapiens
IRYLRSALLFTGRHELISAGRCLRSHPVLKDDATLLRCCLLVVYNSQWG

SEQ ID NO: 988229 - protein, 85 aa, Homo sapiens
MKLVSPGPPRAHLPGPLQPVPCALVPSCICWDVAVQRQREGHRDPAPMIPTLQLRAELLPSQPGQTGAQGKLPEPQQVRLRVCLR

SEQ ID NO: 988230 - protein, 58 aa, Homo sapiens
  misc_feature (12)..(12): Xaa can be any naturally occurring amino acid
GQDQSSFLRHNXVFSSHWFMTDIAIGSAIGDYNYAMFLNKLISLPQAFFKFFHLMLQQ

SEQ ID NO: 988231 - protein, 36 aa, Homo sapiens
MGDCSDWALVTLVLGMEQHLLFQLCPTEFTWDNDAL

SEQ ID NO: 988232 - protein, 72 aa, Homo sapiens
ARAIDLKLEVLWQCGMGWVTSSERRPSRGVPILNIQQLAEVCPQAKKLLPPTVTMRAAHTHPTRAQGARRSQ

SEQ ID NO: 988233 - protein, 124 aa, Homo sapiens
IRSREEDSKGRYERYPEATFRRSGVSREVSPLLTIHHLNKDIDLLQRVSAIPCVATFAQLSAGPESWLKSQGKEHSPEAPGPNPILRRLSQRLCLSTELSPEVAKPQIKASKTTVTGDKDSVNL

SEQ ID NO: 988234 - protein, 79 aa, Homo sapiens
MTDPHHPRLSGKVLVFSATISNNNDFNSHSAYCPGLTRLPANVLSEWLSPRDGRRGGVSSQEELSAKPRVPSKGALTPG

SEQ ID NO: 988235 - protein, 46 aa, Homo sapiens
FFESFADLSTPDAAMDNPKGKAHGKKVLGAFREGLAHLDNLKGTFG

SEQ ID NO: 988236 - protein, 103 aa, Homo sapiens
MWGTEKQGLLLLLCPEGAKCAYRKRGALWAFLLSTGKFEECLEYVMSAGLLANACIPALREAEADGSRGQQIETILANTVKPHLYYKIQKIEPGVVVGACNPN

SEQ ID NO: 988237 - protein, 37 aa, Homo sapiens
MPGKFLVFKKHGVYPGKPQGSEFPDLMTRPPKPPKVM

SEQ ID NO: 988238 - protein, 34 aa, Homo sapiens
TWAYGDVAPGASRAGADERDAVGLVLDAGVIGRD

SEQ ID NO: 988239 - protein, 91 aa, Homo sapiens
LKGTDPPEPIEAACGQGSYTASCAPGADKGQVPNLRRRRAGTGENKGAGTSQEPYFSYAGATKCPRDGAGDEAHSRESTVREDRPDEAERD

SEQ ID NO: 988240 - protein, 81 aa, Homo sapiens
RPLSLRSSFVQSLWTEREFHSHTQTTLIHTFYDLKIQKNKHKHKGVSDVTHSEPDQLWDLDLVGAFCHKFEFELQDVHRAY

SEQ ID NO: 988241 - protein, 79 aa, Homo sapiens
WPDGSELFIAHLAAPKMWGYTGVSTHTVAPLVIKRDKAAEIKIMYAGENFVMQIPALWDLEPLTQPPVGLSVAIQYNGN

SEQ ID NO: 988242 - protein, 106 aa, Homo sapiens
AVTVFFFVAPVSLSYEIFDCNCIQQALHRRVIRCFPLDDHGGFARMNHMQLTGRKPAVRDHLHYNAPRGWPLLGYHYTDQKQILLILTDNDRLVEELKLAKLFGLR

SEQ ID NO: 988243 - protein, 43 aa, Homo sapiens
MHGNKQHLQKDFFLYNASKARSKTYINMREVSQRFRLPPSEYV

SEQ ID NO: 988244 - protein, 111 aa, Homo sapiens
KGPAYVSLFYKGVAEPGPVRAAVQEWPETMLLSAVRDGLRRNGPRGPELKRVVRGVDIACEGSSRPGGEFEGHCALVSVGMNARTLYFQSKRGFDLSLSKVPRLYSQHVSH

SEQ ID NO: 988245 - protein, 48 aa, Homo sapiens
VHEPKKKVDLTKYLENQAFCYDFALDETASNEVVYRISPIASTIFPSL

SEQ ID NO: 988246 - protein, 35 aa, Homo sapiens
MMIGLSSQPGIDYLCYYHMQQNILGLLTFLAQILL

SEQ ID NO: 988247 - protein, 98 aa, Homo sapiens
RSYKPDIAEVLEPRRGRDHLTSRFEIILAPMVNPCLHYQSNAYLGVVCRAFYCSYFGGLCARMTSTPKADVPRSAVIAPSVLLPVVSRMRGRSCVGRC

SEQ ID NO: 988248 - protein, 75 aa, Homo sapiens
GLTSIGARHENKQSNSRSCWYRVMTDSYRFTEYRTCEIRRCLSEDVAICCWDLNDEVATYVGIYSARFVGPGRSS

SEQ ID NO: 988249 - protein, 50 aa, Homo sapiens
LEIPLLCPAAQLLLKWFQTYKKVAMAPTTDISSVALFTSQLPCIRTRTVD

SEQ ID NO: 988250 - protein, 141 aa, Homo sapiens
SSKDPPPQLLRRHSCPAPRFSLLSRYDFTRSADACVNAVRLLSGESSVSYVLCQRPAIPVQSQYALVKGLPLVIWYSMGKPVHRSLSRFQWYGQRAYRDTHILNSNEHGCGVEGLKHHQIHLLMVDLLCQAGLSRQHEKYR

SEQ ID NO: 988251 - protein, 70 aa, Homo sapiens
WGCLFPKNNDTEIRPVINFSFYKARRVRNLLETSWKLAQVGSCGLRKDTIYRMSKCITKQQVLTEKLWRS

SEQ ID NO: 988252 - protein, 37 aa, Homo sapiens
ECWYLHPGVLARIFRKSGGLKMQPKRGWYTSIYEAKY

SEQ ID NO: 988253 - protein, 41 aa, Homo sapiens
LLPWCCLSSSVSSLRNAVWYGAVGDSAYSMGCVSMAEPAEC

SEQ ID NO: 988254 - protein, 111 aa, Homo sapiens
MEGRESIMQRFAGSVSPMNSIYFKQPVQPPGRGEGRDYLHCGLDLLQRKLRSLLAKAIQIVTDVLTPAQLIVLSTSSGCAKPGRGDDMPLEQDNYRTITGNVAKQDAAPGW

SEQ ID NO: 988255 - protein, 42 aa, Homo sapiens
LSQHHGPPIPTIKQAVAATRHGGEWPLDYLHAGSSTCWTRKL

SEQ ID NO: 988256 - protein, 72 aa, Homo sapiens
  misc_feature (29)..(29): Xaa can be any naturally occurring amino acid
LRICRVDQAQLNIWRSARCSLCRRNLYSXCMHRGGEYTSDQAPCLTIFGGQHGAHVSTELVQGGDAAIVVNT

SEQ ID NO: 988257 - protein, 85 aa, Homo sapiens
TEVYCGRSKANSFLQRGPHLLQEPQKAFVWDLFPLPYIHAGHQGLMELLENHLVRGSRLYLAHGIPGARCEAPPDYTTRPLLVAS

SEQ ID NO: 988258 - protein, 41 aa, Homo sapiens
KGVAVIDTRHNRAAIYESTACGDDSQCPWVAGIEAYQHMSR

SEQ ID NO: 988259 - protein, 48 aa, Homo sapiens
  misc_feature (12)..(12): Xaa can be any naturally occurring amino acid
MITNARTGHGTXGSPPAPLVRLDGVQSHPEVREFDDQRLANLGEQPIS

SEQ ID NO: 988260 - protein, 68 aa, Homo sapiens
TIPGGCGGPLSRWAVAGGRLPGQAGRPPQMGLHVGRPARAEGLACARLHQFATGCGQARWALWSPVVP

SEQ ID NO: 988261 - protein, 133 aa, Homo sapiens
VLHCNLCSPWALWICARANPWRQSRAPLPIGTHGCCPIRDPGVSESLLDCRAVSCNEDWETVMIHEDRSWEQPSPFSLFLDLYFGIIWPLPSNQWNGGCRDGWELAANPALQGKEAVQTDPSIEWPCYLHPYY

SEQ ID NO: 988262 - protein, 72 aa, Homo sapiens
IAGTPTDSTVGEDSQSEPRSALVLGSGAFSLVLSLLFCPAGIVAASCRVLMSLMWVNIKATGAQPPGSAQYH

SEQ ID NO: 988263 - protein, 58 aa, Homo sapiens
MSSYRLHLCSGFIKTMAHRMGTVAHTCNPSTLGGWDERVTGGQEFETSLAKMVNTFSL

SEQ ID NO: 988264 - protein, 115 aa, Homo sapiens
MPTLKSVGHQSTNWMVRLVLMVASGSIGIFGKQVNTVQQAASHVFTMARVTFHHLVGWLKASIGDLCYRKLFMVGFLSRDDRGLCGQREVAAGIGHQVGLEFCQVNIQGSIQSPG

SEQ ID NO: 988265 - protein, 36 aa, Homo sapiens
GQLRHHLGTPSPPRAGSGPGPPKPGLHLPPCTVGAQ

SEQ ID NO: 988266 - protein, 49 aa, Homo sapiens
  misc_feature (42)..(42): Xaa can be any naturally occurring amino acid
RLCQAALDLVPAQQRRLFLGTVTSPLQGSVMDEALGALGLPXVPSWACS

SEQ ID NO: 988267 - protein, 114 aa, Homo sapiens
NRGGPCICALYSHSPPSLEKTHQYYYNSTEYVHSNCGLNKMQSLFTKCSYFPKYECKHLDGREYSLNPPRFPTTFRKEYSERLCGNNKNLPLRPGTVAHTCNPSTLGGRARWIT

SEQ ID NO: 988268 - protein, 64 aa, Homo sapiens
MHEEKYCIRCTDHVVSHLESRRRCRQCRLLDRDHSTAEDLTGVSWVVNVSRGGAKYRRMSLYVS

SEQ ID NO: 988269 - protein, 43 aa, Homo sapiens
MRQTQDLCLSACAVLCLIERRRGNVGGRSPEPGHKSTTLWHLS

SEQ ID NO: 988270 - protein, 85 aa, Homo sapiens
RFPTKGDSPSMAMKHSEQPTSEILAILSELSGPGSTPAPGTRELITVRLRVLHERTGALHGLAASGYTATPSLELARLLLLHDAL

SEQ ID NO: 988271 - protein, 40 aa, Homo sapiens
KTIPFFSLVLILAIDYEGAFTEFNSQSQNPTVLGRVIVQQ

SEQ ID NO: 988272 - protein, 110 aa, Homo sapiens
AQPHVDAEAPGARCSRGRAMPSYAVTVATGCQWFAAQLTDYDLPSASVGSCGLYARITCVVQALSTTDFDAWLRWIHTDVSCGRRYLGDDPAWVRIGEAQVRGLNDDVVP

SEQ ID NO: 988273 - protein, 67 aa, Homo sapiens
TECGDALERDLWKRSPHTPCTLRLWELLRYAMRLNELGKSLGFGWETCSYQYYATGCLSAPSSLRMF

SEQ ID NO: 988274 - protein, 114 aa, Homo sapiens
SPCWESSVRYIVSQYQIIDPLIPRESDRCSIYYKGPLVEEQAVGMLIHELECVPTEACSIPRMRVQDDGGSDQNYDIVTIGAPAAHCQGFKSGGLRKKLHKFEETKKHTSSGCQ

SEQ ID NO: 988275 - protein, 31 aa, Homo sapiens
MSVRRIIPYPPSFKSSAASTIDPAMGASALS

SEQ ID NO: 988276 - protein, 102 aa, Homo sapiens
LLLLLLLDLLLLLHLSVLELLLHGTLLSLEHACCCCCHAAAAVAPPAAACCELLLLLLLLACCLLLELELRSVALPLTLQPCCEEPSPRSQEADGLRETLAV

SEQ ID NO: 988277 - protein, 69 aa, Homo sapiens
GALDGSPVGPLVDAVDSLSPRIFHERLLPLDSMSFASAHSRMIPRRIVGANKKLMSSSSCPLASIEDFF

SEQ ID NO: 988278 - protein, 33 aa, Homo sapiens
MGYELHVHVSPLSGCVIEGSTLDIYLYMVGFLR

SEQ ID NO: 988279 - protein, 69 aa, Homo sapiens
LCAAGHSMYDWPALEKRVVYAVLSVVAHKNDALSPYFSEGGPDLHHSELSVYVNTEKGFSTLALLTFGA

SEQ ID NO: 988280 - protein, 37 aa, Homo sapiens
AVTLEDSRQGPACCERTDRTIAQGSCRLLPSPHAGPV

SEQ ID NO: 988281 - protein, 68 aa, Homo sapiens
LEALLGDDAIHVRVRSHTSLRNSILHGIPWQLYNYVATMPDNSISAYGMQGKIRLQRSMDQNAGKALS

SEQ ID NO: 988282 - protein, 68 aa, Homo sapiens
KLEDPRTSFFDSKGIGTRNTFSIYSEGGLLPTVNAWVINAKAAMLHVGNRVKKNWNNWNFNYTLKKET

SEQ ID NO: 988283 - protein, 41 aa, Homo sapiens
SSGPPRGRAHAVIIQGENSSSRKPKSCNSEHLALGCHLGGV

SEQ ID NO: 988284 - protein, 30 aa, Homo sapiens
FRDPHLEVEGEGSLQPGNSTSRGNIIETPP

SEQ ID NO: 988285 - protein, 34 aa, Homo sapiens
PRVLLVPVSIGILPVPSLVAPPTHLPECLGCLAL

SEQ ID NO: 988286 - protein, 70 aa, Homo sapiens
YGRRPGEDVLSFPTTKTYFPHFDLSTVCQGYGPEEGGDALTNAVGQVYDMPKALSDLSDLHAHKVTGGTG

SEQ ID NO: 988287 - protein, 76 aa, Homo sapiens
KISLIRGSLDQDRRLLVDGQEIAVSLLPGMATCLDQYSLQNLGSTSTSWRGHIAANVPMTFATRAGMRHKKGASRS

SEQ ID NO: 988288 - protein, 82 aa, Homo sapiens
GSVEDARSYKYGDMLQRSEKEIMTTIPSTIASRTIKYLELTKDVRDLYNKNYKDIAERKEIKENINGNTSHVHGLEDLILLY

SEQ ID NO: 988289 - protein, 41 aa, Homo sapiens
MVMRLSSAFVVLSWLSQNSNEDVSPCATNTIMTAPCKAYSG

SEQ ID NO: 988290 - protein, 36 aa, Homo sapiens
QHLSRMHGSKHAKCSSMHALILHGACKSNLHAAAHS

SEQ ID NO: 988291 - protein, 105 aa, Homo sapiens
CQDRINKGIIDGPGMVGSSRVYSPVMLCARPDHVCGTHDGQELEISAVPTGESPSVLQIRINYSGLAVGVCTPMLLGRLSQEICLEVWEMDTCREAKISSIAVQA

SEQ ID NO: 988292 - protein, 63 aa, Homo sapiens
RSMVMSGMENVLKSYNYTCNCDVGYYAAQLSARDSVGAFARPHQLVYHRTVHHYFAETFSLQT

SEQ ID NO: 988293 - protein, 103 aa, Homo sapiens
QTMVMQWPWRMCRNSYNYTCNCDVGYYGPQCQFVTSAVTPLEAPELGTTGLYSLIWETSAFRLTAAAFRLPLQGTNLTLRIERNHHVDHFGNLVTLQEPILSS

SEQ ID NO: 988294 - protein, 137 aa, Homo sapiens
MYENIISNYTCTVMWGTMGPVSVRWFTCEPLVGPSTWATTGLYSLFGKLQLQPHSVPSTSTEGTNLTGIEETTCAPSGNWSSPEPTCQVIQCEPLSAPDSGIMNCSHPLASFRFTSACTFICSEGTEFIGKKKTICE

SEQ ID NO: 988295 - protein, 75 aa, Homo sapiens
TRCMMMPIVGNIVLADSRLLQLGGYGIIRLTLILKPPDKTHISLTPIPCTYTLMTAIHYTQRFHTALPITQHPKN

SEQ ID NO: 988296 - protein, 42 aa, Homo sapiens
LVIAHSLGIIYRDLTAENITTWIEEGHIKITDIRPRVSAGHM

SEQ ID NO: 988297 - protein, 38 aa, Homo sapiens
MACYISHAGSTGLKFYFDHPSGSECVINIPNVVARVGG

SEQ ID NO: 988298 - protein, 83 aa, Homo sapiens
SPATASRISAHVLHPVWVEVLGRVTDVSMKGLKADVLLLFAQHVNGILARLLWTVAHITGAVALVVTFDLSLRWAFQREAVAG

SEQ ID NO: 988299 - protein, 75 aa, Homo sapiens
SVGVCIQIRPFDRQNRLFDKSTCWHPVVLSDILGDVMFTGDMHIAGVVQLRKWSKPVSPLFPGQTRSYVSPCIES

SEQ ID NO: 988300 - protein, 62 aa, Homo sapiens
SYLFSSLSGVDLPFTPRPSLLTSRYQVPAFSLVLEQVRFLEDEIHEFGSNQESSLSIYSDCY

SEQ ID NO: 988301 - protein, 41 aa, Homo sapiens
PKQALNQPAGGLKQLKSLSSGISCFSSLHSVSSFRYTCILK

SEQ ID NO: 988302 - protein, 109 aa, Homo sapiens
RIALTCTRLPGSQVRFWGPLARDTLVWDTPYHTVWYCDFRTGKIGWFLGGQFSVSVNCLDQHVRKSSDERCFDEYSIPGWVQWLKPVIPSLREAETGGLPEVQELETSL

SEQ ID NO: 988303 - protein, 36 aa, Homo sapiens
  misc_feature (22)..(22): Xaa can be any naturally occurring amino acid
ISWRLSSCSYFVAWIPNNVKTXVCDIPPRGLKMAVT

SEQ ID NO: 988304 - protein, 79 aa, Homo sapiens
RPECLIAEAVERVAGIPEEQLAILSLLKAAVWNRIIEPVAAMRFFVAMLRLFPEYLKGEELFGLTEHAVLRIAESLPGV

SEQ ID NO: 988305 - protein, 34 aa, Homo sapiens
MSPGECGGCSSLAGNAAGVAGRFLCLQVRGKRLD

SEQ ID NO: 988306 - protein, 48 aa, Homo sapiens
PGVNLSSQELFRLVLKGASRLGFLCKHLVPLVGRGSQQDSSVARSGKK

SEQ ID NO: 988307 - protein, 67 aa, Homo sapiens
DLLVGTGRVWRCMADQKSSEKSTGKLRHAGKPRLTKYYSLIGPGITCEHTGSTSKQHEHHNEITLRS

SEQ ID NO: 988308 - protein, 71 aa, Homo sapiens
CIPPGVCCADRAMLSAGFRCAAGYQVFAQDGRAGRPFEGPMLETAAVRDRPDDSAALREPTRRVPSAQPGT

SEQ ID NO: 988309 - protein, 120 aa, Homo sapiens
IVTNWDLTCEKIWHHTFYKRRCVVAPAGAPIAAVPEAPLHPQGPNTDKMTQIMSDTFNTPRVMYVAILAPLLLPLRLWALQLALFLSSVDGVSHTVPLYQGYALPHALLRLDLAGRYLTD

SEQ ID NO: 988310 - protein, 110 aa, Homo sapiens
MTHVELLLATTNDMACHIVEALHPLAAFIALATHVNTCGKLTLSTWQLGLKDSRIHGHGSESGPDRLGTESACLITSILSRTYCALSISWYSFERSYHARTPSSSHIALA

SEQ ID NO: 988311 - protein, 49 aa, Homo sapiens
MVMSQLRAKTMVPTLSILHEVMELCAFTCVIDFALRIVLIYVLRVVVHL

SEQ ID NO: 988312 - protein, 66 aa, Homo sapiens
MRYEHFRYMLSVRAVDCGVILILVPRPDRGRISSVGAIKAICFKGFTRDYAQSLMYAERMYYDLLT

SEQ ID NO: 988313 - protein, 40 aa, Homo sapiens
EIPYQAVLSCIASCRTTGIVMDSGNGVTHIVPIYEGYSPP

SEQ ID NO: 988314 - protein, 45 aa, Homo sapiens
SAVMSILKRCPTSLVIREIQIKTTDESQVVVAHACYSRYFGRSRP

SEQ ID NO: 988315 - protein, 72 aa, Homo sapiens
EARLKPHGYQLIQLWNLHIAGQRGLTVEEPEGHRDGTQGLEKAATQSLLLNILLVSGNSEAACLDKFNLNGH

SEQ ID NO: 988316 - protein, 86 aa, Homo sapiens
HEYRLPREPGQPCAECCEEIHSALGAAGLRAIPSMYTLPSHGEPHTMPTTVPSAACTQTVRRLTGSPNRDRKLQDSRCALIVGDPR

SEQ ID NO: 988317 - protein, 50 aa, Homo sapiens
  misc_feature (48)..(48): Xaa can be any naturally occurring amino acid
MPSRAILRRFNVLQLSYYFFDATVDVILLLSIPLIFFMLHHCRSEGSXLR

SEQ ID NO: 988318 - protein, 34 aa, Homo sapiens
EDIMEVLQTTKLELPYDPAIPLLGIFSKEIKSRG

SEQ ID NO: 988319 - protein, 66 aa, Homo sapiens
WIREQTTVDHFWGESLRDTDCPAYSWGVSQIMLGRGEAVARLSVCMDYAREREAVATLWVCCVTGW

SEQ ID NO: 988320 - protein, 39 aa, Homo sapiens
QQQQQQQQHSLLSAPGPAQAVSFSGGLPSREPTAGIILF

SEQ ID NO: 988321 - protein, 36 aa, Homo sapiens
PAEAKTGGSLERKRPRPQRALIVPLDSSLRNKARSY

SEQ ID NO: 988322 - protein, 122 aa, Homo sapiens
RLRWSWNTPGAWKSFSSASPAEEAAGRAAGSTKASGRSRHLLSPLHCWAVLLQHTRQQSRESAALSEVLAEPLAQRLSHIAEDVGRHGKKSRDLQQQLQYELLQVVSELQTAKKTYQAYHME

SEQ ID NO: 988323 - protein, 69 aa, Homo sapiens
ILGRMASFLSRIVMMPQPARSVSYRNSPRRMRSASSVFSSSRTRTCDLHLLLLQHDEGQAVEIHGVSVL

SEQ ID NO: 988324 - protein, 67 aa, Homo sapiens
TTNLQDGEGLHGNGDPGSPRPLAATCRWRSQWSRASMTLSRSCVLLQVVGHLVLEALPLFLQPRHRL

SEQ ID NO: 988325 - protein, 76 aa, Homo sapiens
NRVQEDPQSEQAQSKRYSAVSTAAHVSTELVQGRHAPQWVNRRLTRLQLTDIRRSRTVLMCRRNYYREACTRSGEH

SEQ ID NO: 988326 - protein, 66 aa, Homo sapiens
GRRGSLGIRAIPRTRCNTGSRITAYLLYRATPIPRASENPCAESPHLNVLFYPRAIIARVHTSMNA

SEQ ID NO: 988327 - protein, 61 aa, Homo sapiens
MISKVGKHIDVLTGKVGGPVTAGIGAGVDSNFEYLVKWSHPCFMDKEAQWHMFLRCITQAI

SEQ ID NO: 988328 - protein, 68 aa, Homo sapiens
MIKLTRSCPCGACRGWVLSSEQRPRLGTDVRIVNRRHLNGKVAAITQGHTKHKGTRDDSNSPGGPGTE

SEQ ID NO: 988329 - protein, 53 aa, Homo sapiens
FEFVCSWAYWRGLCEDISRRWTSRRPMTESLQKKSTLAKILIPILSHSSHCSY

SEQ ID NO: 988330 - protein, 107 aa, Homo sapiens
ALSTLDAHGPQRLVSCCTVPARRRSTVLSFQHWRRMQRTIEGLRLPQCLQELVKGCLGTGSLMLGGFCGLCRCSKDLVVRSCRVMLMMSFRDLESSRFAGMIWLSLI

SEQ ID NO: 988331 - protein, 32 aa, Homo sapiens
MERMRELRRPVDPLTNDKARVDVERENHGRRT

SEQ ID NO: 988332 - protein, 35 aa, Homo sapiens
MRSLPRLVTVAVCSSRMCTSACLRLFPLLQLALDD

SEQ ID NO: 988333 - protein, 51 aa, Homo sapiens
EHLWAPTFNVTVTKTDKTLVHADRHTKVSKDDMIQQRNVLQMASQPSDVRR

SEQ ID NO: 988334 - protein, 63 aa, Homo sapiens
NRGDVSSGSHPIYTYSSAALLRAITARISTPYLPTRRGIQNYHDSLFYYLLYTHSSLPILPTD

SEQ ID NO: 988335 - protein, 32 aa, Homo sapiens
  misc_feature (2)..(2): Xaa can be any naturally occurring amino acid
MXFNKWQRRSGSMTLQDCLGPSSPDFSKLSEG

SEQ ID NO: 988336 - protein, 67 aa, Homo sapiens
  misc_feature (62)..(62): Xaa can be any naturally occurring amino acid
YKRTPAGRFVGRQVKGWNTPVTHCRLLNSGAKASRIEGVNRGLLEEVVYVDDISWVDRGVSXKITED

SEQ ID NO: 988337 - protein, 84 aa, Homo sapiens
  misc_feature (58)..(58): Xaa can be any naturally occurring amino acid
  misc_feature (69)..(69): Xaa can be any naturally occurring amino acid
TLEDPRQAGSSCCPGWSAVAIHRRDPLLISTGVFDPCSVSELGAGSPLLKATLVGPPXPGGVHPYFDAXNLSCGTPRNSGIKRN

SEQ ID NO: 988338 - protein, 45 aa, Homo sapiens
RSPAVSSEAAVSADACKSPPQAWRGTGLFLQTLSYDSSRSQVNSW

SEQ ID NO: 988339 - protein, 35 aa, Homo sapiens
MAEVSKDPRQAVKGPLSGDMLKGKTSQASVWSGPA

SEQ ID NO: 988340 - protein, 60 aa, Homo sapiens
RAVSFSGVSARAEFRRSVAVALFGSHCVDCQGVILVGCLVLLGSPLVIHCSSNPSASSRS

SEQ ID NO: 988341 - protein, 35 aa, Homo sapiens
MVLSSGAALAAGVVWVLAVVRVQVVCRQIRSVMVP

SEQ ID NO: 988342 - protein, 69 aa, Homo sapiens
AEEQGLEPGKVGQAETCRYGCNVYEVMPSARRNERERNSQELALREQRWRALLEASLHPGSVTMACPAS

SEQ ID NO: 988343 - protein, 65 aa, Homo sapiens
QPVAAHAGPQHELRVQLAGFFSWLGILQRTQKGYVYLSYAFSLCQLLLVNADTTVRNMPFRVLKA

SEQ ID NO: 988344 - protein, 89 aa, Homo sapiens
MTKIDNTLKIMEARYVTMSEKTDAGLFEEQLPASSPKTPRRVFTVLMILQQTGPSGDMRKPVSAHANCYMLPFQGEIFLQKWVLELTNL

SEQ ID NO: 988345 - protein, 58 aa, Homo sapiens
GAFRSDSVTLRGTPVCATLGKLSFPFACARSRTSGRIARFEADAFLDRAFSADVDSVE

SEQ ID NO: 988346 - protein, 101 aa, Homo sapiens
MNGWETPWLVHMAKKEGQPPLLNAPEGIRRPYSPEHLVLQVSVTPSRYLSVGFFPKEASIIMQIFLADETISVLTNHVEGLFELQRRSHGTQTKTSVLKGK

SEQ ID NO: 988347 - protein, 35 aa, Homo sapiens
GVASSSQDRDWLRPLATRKQECSADTDRSAHGSCA

SEQ ID NO: 988348 - protein, 32 aa, Homo sapiens
MSAVENIRPNCAVSVAEAFLDRAFAADVDAVE

SEQ ID NO: 988349 - protein, 102 aa, Homo sapiens
TLTLNISLMNRPAPEEIFYENMRLDDTDNFTNATLNTFTEELKKYGVTTLDQFCEATWEEAPLEKEGIHVLDRPLDDGAPPNNQILHDWLNLLKPNFLREGR

SEQ ID NO: 988350 - protein, 63 aa, Homo sapiens
MAREKRRPSPVPSERRSTISQDRMTHVQLLFTWNPSPLRTSKFSFEYYATTTKIEKLWRTETL

SEQ ID NO: 988351 - protein, 86 aa, Homo sapiens
DRTLELLHKSLGETVVCTREAGWHVSSSLDTTIAIYPIILPSESTNFPAVYGDKTVGGRPSVITGNGIGYMKQGAPRSWQSSRDSG

SEQ ID NO: 988352 - protein, 55 aa, Homo sapiens
PHSCQDAQLLGASVLKKAGIAGTCHHARVGFCIYRYQTGAFAVAWPALCSRNIRE

SEQ ID NO: 988353 - protein, 31 aa, Homo sapiens
MHFGAITCSHEYSLPVLTGPTLFGLLMVDPS

SEQ ID NO: 988354 - protein, 46 aa, Homo sapiens
STTCDKVKQIAKQTVKHHTSCLITRSCPTGNVGSESGTRMWGTHCL

SEQ ID NO: 988355 - protein, 44 aa, Homo sapiens
CEHVGLDYRRTAHFSGISPVSTFSTVVQACIQMSQGTGSIVLHH

SEQ ID NO: 988356 - protein, 38 aa, Homo sapiens
QLMLWVMLEDPGVILAVTSDVAATNICTDTFLTLKPTL

SEQ ID NO: 988357 - protein, 144 aa, Homo sapiens
  misc_feature (45)..(45): Xaa can be any naturally occurring amino acid
  misc_feature (116)..(116): Xaa can be any naturally occurring amino acid
  misc_feature (132)..(132): Xaa can be any naturally occurring amino acid
RITSDSPPSLYVSERNELLIQFYQTLSLTADRFIGHYIFRPKKLXTTTEQPVIITFPVTTRLKTTVGSCHHTVKTDGDSWRANIVQSDFVLAGTVITNITRDGSLHATISIIKIYXEGNLAIQQAGKNISAXLTVVCEQCPLLR

SEQ ID NO: 988358 - protein, 36 aa, Homo sapiens
MIQPSIRIFTLLIEPHLNPRSICKYLKMRLMGCTIT

SEQ ID NO: 988359 - protein, 76 aa, Homo sapiens
RPASGVSRRSRGIVKECCFRSCDLDPHGDVLCYPRQVREGRVRTLLNVLPDNFPRYPVSQFFQYDTWKQSNQRLQQ

SEQ ID NO: 988360 - protein, 92 aa, Homo sapiens
MSRAASLISALESQSDSDGKTRALVLVPHTLVTQGCPTQLQGALFFSTAHEAGFCPPLAPCVALRGLGPSEKRFTIRSSWGKGGGSARDKGK

SEQ ID NO: 988361 - protein, 45 aa, Homo sapiens
MDSRYPPITSTGNNSLWPVAPPIISATTPTGSSSEIYHHHIESST

SEQ ID NO: 988362 - protein, 181 aa, Homo sapiens
MPLCCPALMPLEQRGRKDVYVYRIRQLKIPVSSTTKASSEGDSITDAFMCLQFMDSFISVQSTGTSLALKTPGRQGCSEKARSEREPRSISSKLLTGGPLDVSSGVTWDRLQATQPGSARGDHPSGLAHSEVEQVGEELELGTQPCPWVGRAWWAQGPHRLLNDPQHRPLDVGDGFSVHGR

SEQ ID NO: 988363 - protein, 53 aa, Homo sapiens
ISIPDVERNMLYISVNKVHLYQDHNTYNEIPSHTSLDMVDRLKRSVKEQSAWT

SEQ ID NO: 988364 - protein, 116 aa, Homo sapiens
EELKICIKETPWTQNLSPLIPLTPLILKHPSDPMGTFTPCSRNPKHHPWGVPPTSHLGPPWWHSVFQLCPQVPSSDSEGLTYLELQAVTASTQPPSPPAAPQPSVIYTEVAVRGRH

SEQ ID NO: 988365 - protein, 143 aa, Homo sapiens
VRGRVLVVTIINLFIYFFESRSHPRLECNGAISAHCNFRLPGSSNSPASASQVTGITGACHHTQLIILYFSRDGFHCVTKAGLQLLNSGNPPASASQSAGITGERHRAWPVFLFRDYYGCLGFLAFPYEYVISFPYLKKDKGK

SEQ ID NO: 988366 - protein, 75 aa, Homo sapiens
PEKGFRAQLAAYGEKTTLLVDTYDIDNAVRTAIRLTEGASVRVRIDSGDLSIVARQVRDLLDDLGAPNTRVIVTS

SEQ ID NO: 988367 - protein, 70 aa, Homo sapiens
PGDDSVAEAHKCIESEELSPHRAQQQPHQGLHVISKPHIHSVARRGLDELQVPAEISQSQVYGGILLDVD

SEQ ID NO: 988368 - protein, 49 aa, Homo sapiens
LSCNIDRWEGHGLTAAISLTESWATVSYVAASTDIEDSHHEAMSRVGAT

SEQ ID NO: 988369 - protein, 105 aa, Homo sapiens
MTAGHVQCPGTRHIHHRHLALGILHDLPRVHLRDVIAVRTLTLLLLLHGQGGRLCCLRLLFLLLLFLFFWATFFTIRPRSYFIPRVHLEPGLQLPGFGGICACED

SEQ ID NO: 988370 - protein, 99 aa, Homo sapiens
QQLFNPFVLLRILLLRCGPCRGATRTVVIDSPLSKNPCDFPDHVSVVAMMGDGTSQQRQHASFHQVLQILYMLQASVTHTADPRAGQVSLISILGQRGH

SEQ ID NO: 988371 - protein, 39 aa, Homo sapiens
FAPSRCPPPLLRGSLPLVFRRAGPRPPFGGSDVSTLRTS

SEQ ID NO: 988372 - protein, 70 aa, Homo sapiens
RAPYRYRCAEGNPECPAVWNEVTEVENSMTLTGGHLSLRREWEGFYSREFVVSDTRRFSVLVYVNCPTDT

SEQ ID NO: 988373 - protein, 42 aa, Homo sapiens
STATEKGSIDSASSILVWIDEVEWCRSGYADQDQLVHLFSKY

SEQ ID NO: 988374 - protein, 134 aa, Homo sapiens
MACVSERVPVTIVDGHTSLPSCLGAHTGEQYKLTLINECESRESDTRAVLVLNVFILFSPQLSLITEYRLLLWAQLCPPHIDLGHPKPLGTVRKHISVSKPPSLWYFVMAAGADQDNYVAGTIYRMALKCFNFT

SEQ ID NO: 988375 - protein, 47 aa, Homo sapiens
RVISKLLIYKQSSQFGLQSAGITGMSHHPSLGHDIFERTICAKTKGN

SEQ ID NO: 988376 - protein, 41 aa, Homo sapiens
GILLLSSASSATVLVYNSHNSAALGLVEIVFEEAVIIFIGV

SEQ ID NO: 988377 - protein, 63 aa, Homo sapiens
  misc_feature (39)..(39): Xaa can be any naturally occurring amino acid
VYEKSSGGKGGSYSQAASSDSAQDSRCVSHSLNKAWRQXVLVSGLEHAVISFTASHFVYFNEP

SEQ ID NO: 988378 - protein, 31 aa, Homo sapiens
MTTEVRTYYVTQSLDNYYHWGTALTRYTRGT

SEQ ID NO: 988379 - protein, 73 aa, Homo sapiens
TDLEDPGMLAENGTTNYFNFIWNQKRAHIAKTILSKKHKGRGIMLPDFKLYYKATVTKTAWYWYQNRYIDKGK

SEQ ID NO: 988380 - protein, 105 aa, Homo sapiens
  misc_feature (1)..(1): Xaa can be any naturally occurring amino acid
XDGLENKIRSTLNEIYFGKTKDIVNGLRSVQTFADKSKQWSSEAMTVVCALNEKAASAKPSVSLLTMTLPWTPLDSVSLENCFLAPIPFVPFLSPDEVTLTCCIN

SEQ ID NO: 988381 - protein, 35 aa, Homo sapiens
MMCSMHSTHVAGGWGITPHSYVHALPDKCALVMRM

SEQ ID NO: 988382 - protein, 73 aa, Homo sapiens
MGARCRRSLQCLMGDGLLKAATILITDSGRRLQIGGEVSRCGVECYLDNPIGNRDEACNLAIAINDQFQRWAS

SEQ ID NO: 988383 - protein, 34 aa, Homo sapiens
PASEVIRNHGYFYIIDWSNQEVTLEGGSDGYGRG

SEQ ID NO: 988384 - protein, 60 aa, Homo sapiens
MGLGHRLQAWWKRPGQCSRDVVICPDASLKMQKKEGPYAVVASTMEVIWGAQNLSRVWLL

SEQ ID NO: 988385 - protein, 42 aa, Homo sapiens
VLGESRELRHAHSEAKSSQAIEESFKLNTHYLKNPKHMTELT

SEQ ID NO: 988386 - protein, 64 aa, Homo sapiens
QVWCIIEQCEDEPEMKQCDCLTVSPGARGWNNPDISTGSSPSFSHAMAGTSLPRSSLGPVFGSG

SEQ ID NO: 988387 - protein, 84 aa, Homo sapiens
YLGLARIARQHDGPTRDDTEKRRECEIDRAVASEYKSPRQQFHMRRRRKLEKLHALRANKSLKNEDEDQAGYDQTDTNMALYLM

SEQ ID NO: 988388 - protein, 40 aa, Homo sapiens
VEALRSGAQERFVQALMPLRHLLFQAHQLFNLHQEPAVDV

SEQ ID NO: 988389 - protein, 46 aa, Homo sapiens
MALVHTVLYPHISSIKAAPKCISERTSYLRSSIGFCTPKTYLISPT

SEQ ID NO: 988390 - protein, 53 aa, Homo sapiens
RATLEDPYEALGEIDKFLERKKLPTPTREEIENLTRPKERISNQKPFRKEKPS

SEQ ID NO: 988391 - protein, 70 aa, Homo sapiens
SVRYEGLGLRLGLTLTDPQEKQLVLASLYEKSRTLSPDTLIARAQIRGCGHTYHQATDVFHKHVLTLATK

SEQ ID NO: 988392 - protein, 106 aa, Homo sapiens
SRSSATPQTGCSAGHTKYPFHSIPFHSTPFHSTPLHSIPFHSTPLHYTTLHSTPCVSIALHSIPLLSSKLHSTPFHSISLHSIPFHSTALHFTTLHSIPPHSTGYT

SEQ ID NO: 988393 - protein, 102 aa, Homo sapiens
IELGTSATPQTAHIIATYRSHHTYSPLTNAIAYLQTGNTNSQQYTPDIHGRHNTHVLHEHTTYSTMYATDTPPDTHIHTRYTPHTHTYTHIHTHHTHSTGYT

SEQ ID NO: 988394 - protein, 115 aa, Homo sapiens
ELGPVYSTNRTHKQDTHICNRQAVLSTAHTTNIRTTHNRPHISVHPHNTYNAHNRPRTTDDTPSSHDRHTAGQHIQPITQHTQHTTNTYHIPHTNTYHTNHTPHSTGYTLFVEVA

SEQ ID NO: 988395 - protein, 155 aa, Homo sapiens
MTLKNLVDAKPVGSAWAGNECTATNPALCTFEEQARQTVYGTCCSLHLAQQSFVINRIDSSLNETCMLEGSLYAYIIPNDSYLCFIRFVREHLYQVRYPLARADRQRLEKLRPVLQKHAREQGMDWLNLAALAFKESALDPGARSSGGPTVCGGS

SEQ ID NO: 988396 - protein, 52 aa, Homo sapiens
AAHSVCAWRRVACVGSLRSLPSVFRVPSRVGCASLVLAWSVGCWWWRCRTQL

SEQ ID NO: 988397 - protein, 92 aa, Homo sapiens
PDKPCLSYQYLIDEMSTGVGQCRYRPHRLEKHTLCGIWPKPWSDTGPGRIVSVYGPTESTTFATYYPLCELRDEEYLPSPSASRSRTPIRNL

SEQ ID NO: 988398 - protein, 200 aa, Homo sapiens
GREGAKPCPGPKHYRLNTCSYSQVLWGLAGPAKTKPLAPQEHYPNLARRNNNKLNIIICVPKRKGMFPRKNKIEGPFSIIKGRASLAGVFSFPSHLWGAVQSKSTPCSSSYGLAWPDRLKVPSLGLGKPELGAEWCQMLEICLREGVAPGVHSGEEHSCGRTKEGKGPLLLVVNLRADRKLSTGLVTEDPGHPMWQVQGS

SEQ ID NO: 988399 - protein, 67 aa, Homo sapiens
VVWLCWVMMMELTVEVVVTVVVLVMMMMEMTVVEVVVVVKVVVLVMVMIVKAVGVGVAVRVVVSAIF

SEQ ID NO: 988400 - protein, 78 aa, Homo sapiens
LYRTRTSSSTGISIIIITNTTTFTTSSTVISIIITSTTTTTLTNTTTTTTCYFSYFYRDGVLPCSTYWSQTPALKRSA

SEQ ID NO: 988401 - protein, 34 aa, Homo sapiens
  misc_feature (6)..(6): Xaa can be any naturally occurring amino acid
VYEKAXRDDRYYPTTTVIIIITIIIIIFIFITFI

SEQ ID NO: 988402 - protein, 54 aa, Homo sapiens
MVHPYFALYSFEISVQCQVKKLCLNACWASSHVISILCMDGMTLNLDSPLLATE

SEQ ID NO: 988403 - protein, 40 aa, Homo sapiens
FVPVYRGVFKALPFAKRLSEWLMNHTHEAWVTNNKGWMNL

SEQ ID NO: 988404 - protein, 62 aa, Homo sapiens
RPYLGNKKERKKLLQPPYRSAVTTLISQQPSTQGKTLYQQRDYNWLKAQMIVAFFSNKEGKL

SEQ ID NO: 988405 - protein, 37 aa, Homo sapiens
DAQWKTCKCRYAFEILISFPLDRCPIVELLFTHIFVQ

SEQ ID NO: 988406 - protein, 41 aa, Homo sapiens
KLSSSSSVISLANSKILRVLASRPFALHDSNVLVCTDVGRE

SEQ ID NO: 988407 - protein, 58 aa, Homo sapiens
THRASTQQTNPNRLYVFLMYKLGEKVSKHHKEQKSYRGSISIHGTGASQIEYQKPELK

SEQ ID NO: 988408 - protein, 48 aa, Homo sapiens
LRPAEWNYWYNIDERDHYGLRYGEKTILGSMSKCGPGTLEIPRDPFRG

SEQ ID NO: 988409 - protein, 44 aa, Homo sapiens
HRGSPSYSINIKPENFSVNCSLPNENQTNIPFNELNKSHAHTDA

SEQ ID NO: 988410 - protein, 34 aa, Homo sapiens
FIEDPDILRERGKLSVGDWLNALQSEAIDLLKRI

SEQ ID NO: 988411 - protein, 33 aa, Homo sapiens
HWQTKACVWAQDPTQCLQHLSEKVADTHQEFSA

SEQ ID NO: 988412 - protein, 79 aa, Homo sapiens
SRGSGLPTGMYAMKHVIIPRIEGTLANIITELDEREREESIGKEHTREEKDSKEKNLRRTGSKGEQLGEVREPGGPVVK

SEQ ID NO: 988413 - protein, 40 aa, Homo sapiens
APADLEDPVSFCQAYPGSSAGLSQSVDADIEDELGDSALS

SEQ ID NO: 988414 - protein, 54 aa, Homo sapiens
SCLEDPVCRDSSSGMSLGWLSSVGGGSPPSSTPPPPPPAGRAISTKVRLLSSRV

SEQ ID NO: 988415 - protein, 40 aa, Homo sapiens
MEQSIKMESYYERGNHVNLKHLSTRETHESKNDTQMYADE

SEQ ID NO: 988416 - protein, 86 aa, Homo sapiens
MTGAHHHAGLVRVFTVETEFGYVGQSGLELLTSGDRQTLTSRGAGIPGVSHGTGPNIWYNPSLGFGNSNNVNVTQFGYGPKYLGAY

SEQ ID NO: 988417 - protein, 49 aa, Homo sapiens
VDLLSLTTRSRGRIIVDADALGWLAATLRFPDFKEEQGEGDGDDGGENL

SEQ ID NO: 988418 - protein, 51 aa, Homo sapiens
KFLVDNHISLHGPSGSLTSELKGSSGLGLPKCGDYGSEPPHRALNYFYSGK

SEQ ID NO: 988419 - protein, 46 aa, Homo sapiens
VCRDKGGYCNLQRCYDLVIILVKFDSGKNHQWMLHPVVWDSMIMQA

SEQ ID NO: 988420 - protein, 45 aa, Homo sapiens
  misc_feature (40)..(40): Xaa can be any naturally occurring amino acid
SKQGYVLISCGSSLLLHAYFHTVTSFKLLITSSPLTRKFXHAVRL

SEQ ID NO: 988421 - protein, 44 aa, Homo sapiens
MQGMRYILGFITERSVPSLRKRAPAWNLIIHSWRYAVHSLQVNG

SEQ ID NO: 988422 - protein, 98 aa, Homo sapiens
QLAFEAARARDHASADDVLFIAEDQFCHTGHSMGPGTMATFGDEQMDLSPTRSQELKLDRETKHISCHSTQCMGLMRKGFDKERQPFIQQIFEGGCTW

SEQ ID NO: 988423 - protein, 36 aa, Homo sapiens
PRFPVPIAPAIRRSKGRVSVPLWPFTLSGQLPIIAL

SEQ ID NO: 988424 - protein, 92 aa, Homo sapiens
MSEPRSRYRNDALMRFMTETKPTVELLPVKGEVRPKELQPRHSIGADSVPANTENEVEPEMPALHDDRGPTTQPGSGMTDITTEEMAEVNMY

SEQ ID NO: 988425 - protein, 73 aa, Homo sapiens
DLETVSSSHTDYYYFQDSPELGLVNAGEEPAVGIGKGLAVRRLLCLLIEPQQGADNCDVTNDTRLIIRKAFVY

SEQ ID NO: 988426 - protein, 55 aa, Homo sapiens
MGALLNRSRLKSVLDHPLPNKAKTHLSLPKSRRRHTIDYESGLMLLNHTVSKDPE

SEQ ID NO: 988427 - protein, 124 aa, Homo sapiens
FGVFAGFPPLIRGLSGTHGYARHAPWHEAGYEDNLGHQAVSCHLRYHCTVLMGTARALPFPTRTATHAHGKGMEQRQSVNSALCQHPPSHSNWGQSPHHAAKWMTCPAHIATRGAITWQTASYP

SEQ ID NO: 988428 - protein, 51 aa, Homo sapiens
RRSSHMASLLWFPAGDVAVEEPPAHSIRCLVVERADHEYSLEFSVAGQHWD

SEQ ID NO: 988429 - protein, 40 aa, Homo sapiens
MAMCLIEEYATERYKVLFVVRKMELVIIMPHTDEYKEVLK

SEQ ID NO: 988430 - protein, 59 aa, Homo sapiens
MSICQNIFGPCFITRRSVDIYVVCLEAASISHSTTEDLKRRYDLSDSDSNLSGEDQSAW

SEQ ID NO: 988431 - protein, 54 aa, Homo sapiens
SSFLQMRRRALCWCCNEHRGFLHLSSSGMPPAGIIEPCRSYWGEVYKVKVVSAV

SEQ ID NO: 988432 - protein, 57 aa, Homo sapiens
MACSEDKRAVKTPPYCFVNCAKRTLSSSTQAMFEIVSLYEGIEFYTSITRARFEELN

SEQ ID NO: 988433 - protein, 66 aa, Homo sapiens
MGHSLFYLRHQLSKALSHDEARGMEDHPARTLYPEVQVMPVRHTPSAPQFLIYKTMAIPVPLACSA

SEQ ID NO: 988434 - protein, 94 aa, Homo sapiens
MAARPDFHPDKIVRVIHYPHWVGFSVADFDCFSATFNVVPPFFVVSFILSYQWEFVPRRKRPHRWGRFRLSIAVFPCSRFVFNFFAHRSNCWFR

SEQ ID NO: 988435 - protein, 59 aa, Homo sapiens
NTQRLLEDPRVYEIAVKYQHSVSGHYLNGRRCPFQICPFDRRAEAWNRFKARKSSAHSL

SEQ ID NO: 988436 - protein, 68 aa, Homo sapiens
MAILSSDAVHGLRAAELCLGCLHPGAHLSARVGLPSKPLLYLEQQGARGRIAMPPYFNESGFPLSKDW

SEQ ID NO: 988437 - protein, 47 aa, Homo sapiens
GYGMYTVSNGRRDTIDSIDGCLFQRCSLPLHEGSTASTPALLTLRST

SEQ ID NO: 988438 - protein, 61 aa, Homo sapiens
VITGLSSGSDSCARGVSALYMQLQQCHITPRESSDSSHTSLHLGLTAKDAGTPDINPHPTD

SEQ ID NO: 988439 - protein, 68 aa, Homo sapiens
SAEVEDDIYVLSLIHGHAAQTSEDLTSATNIVKWITKQQKCQRGFSSTQDTVVALLLCPNNGAGNIYQ

SEQ ID NO: 988440 - protein, 125 aa, Homo sapiens
RSTLQIPIPLVIQTACRVRRIYQWTIYAHIHKLVTVVTMNKCTMLLSCCTIMFPILDVWHLPWFTWAEYQAAVDGARKANSTRTWKEVCFACVDRTEFRLAQMCGLHIVVHADQLEELINYYQPV

SEQ ID NO: 988441 - protein, 75 aa, Homo sapiens
QDPRFPLLIRHTFRLGNLLKERFNWTHSSTLLRDVSQSVRHGQDGASHILRSIVAVQGSSGQVTLYFYNHHDSLQ

SEQ ID NO: 988442 - protein, 74 aa, Homo sapiens
  misc_feature (62)..(62): Xaa can be any naturally occurring amino acid
GGTPTKRDKQQARSNAAQNAQPSHTPTGNSEEKPRAKNDKGNEAKQTPGAGKNEPATAAHEXPKEQKPARRGGE

SEQ ID NO: 988443 - protein, 58 aa, Homo sapiens
FGVFAVVYGMDVPTQADGQDHPQELDDGHTHAHAEDDAHVLLQPRMHLVHAALLVHRP

SEQ ID NO: 988444 - protein, 68 aa, Homo sapiens
MMYWRYAVSESSVEYQPFNAEIVICGFEATDTVLGVQYDWDGRFRTIKEEYKGSLMLDGNHPYSAMAS

SEQ ID NO: 988445 - protein, 55 aa, Homo sapiens
LKKKRRVESLEDYGIPLSQINISSKVKGKVRKTYLIEIITERRERHPSRRKLKLY

SEQ ID NO: 988446 - protein, 70 aa, Homo sapiens
FGVFALYREARICRLLKTSKHGRLHDSISEEGFHYLALDLVTGGELVEDIAAREYYSEADTSHCIHQILE

SEQ ID NO: 988447 - protein, 73 aa, Homo sapiens
FGALALIKGVIFWQPLSCAITAPSVAVPECIRLGVQSLNMLPNQDTGSSSVSALGHRLAVDMQATWVEDSYNE

SEQ ID NO: 988448 - protein, 48 aa, Homo sapiens
  misc_feature (40)..(40): Xaa can be any naturally occurring amino acid
EVIRGSVYPASAVLLRRVRAKTTTSTRSNEEPHSQVSAKXKWNLNFYL

SEQ ID NO: 988449 - protein, 89 aa, Homo sapiens
  misc_feature (40)..(40): Xaa can be any naturally occurring amino acid
TVIFYQWKHSEVKTAPNNGCAEMRSADLGEALARAVIPQXQKDELRETLKSLKKVMDDLDRASKADVQKRVLEKTKQFIDCNPNQPLVI

SEQ ID NO: 988450 - protein, 41 aa, Homo sapiens
MSQAYLVHFLTQTWNSAISPQQSWFLYMWRQYMANHNRGTG

SEQ ID NO: 988451 - protein, 70 aa, Homo sapiens
WKLRKAQKYKNNALIKKSLYEKDTCTRMVYSGTIRNGKNVEPTQIPINQRVNKETVAYVYDGILLSHKKE

SEQ ID NO: 988452 - protein, 79 aa, Homo sapiens
  misc_feature (77)..(77): Xaa can be any naturally occurring amino acid
TGQHSNSGNTEITTNMLPEKSNPKTCNRQIYQGWNEGKYIKGSQRGRVTHEREAHPVLVLPWRIYSQNTLQVPEESXGA

SEQ ID NO: 988453 - protein, 120 aa, Homo sapiens
KRKSSQTNNLTFYLKLLEKEQPKPKDRRRNEVIKFRAEINEIEDGKNRPVTTKEIESETKNLAGKKSRRSDAFLVNHQTFEESIPILLIFFQNIEERIPPNSLCEASITDTKGRQSTRGK

SEQ ID NO: 988454 - protein, 33 aa, Homo sapiens
YYTTVADYKVAKNNLIFLPAEQWTHIPHPVDLG

SEQ ID NO: 988455 - protein, 31 aa, Homo sapiens
MKTHDQHFTSYEPYHNWPPQMAMSLLCTPRV

SEQ ID NO: 988456 - protein, 39 aa, Homo sapiens
MTDCRMSCDNIASGYSLLTVLQYSEEAESLENRQDIDRN

SEQ ID NO: 988457 - protein, 92 aa, Homo sapiens
ALHPDTSEKAKDVLFDQLHGADYSSEHYGSGKLARKMSNAWMSYLPLKFLRTACAMSCGEGFLFEAFAAAKNHIARGCRSPRRPKEFLVLTR

SEQ ID NO: 988458 - protein, 76 aa, Homo sapiens
YHHIIPIPIIITITPSLLSSPFTITVIITIIVIIIIIPIYHYIIITISITIITITFIITVIPIYHYIIITITITII

SEQ ID NO: 988459 - protein, 77 aa, Homo sapiens
PIIIFLRVTNPVPTVMNRPKGSCEQRKEDWMRGRAKGAERGGESSEASSDDTRNLDCYSYSLYSDYLQYPDMVPIDL

SEQ ID NO: 988460 - protein, 53 aa, Homo sapiens
MADGDIVIMMIVMMMVMTTLMVNGDDSNDGGDGDDDGDEDDMMMMMMVMEKGD

SEQ ID NO: 988461 - protein, 79 aa, Homo sapiens
LAVFPRREHTITRSLSDTRDDKVGRTTHTTHTEDKTHTRYTSSTTHNHTTFSDHHNTVDTNIAHTTHNPTHNHTVTISR

SEQ ID NO: 988462 - protein, 55 aa, Homo sapiens
PVRTDRSAAHRFSICCIGDYNGTSVWCSAAKEVHRIVGIVWQALIVPCAEALRGR

SEQ ID NO: 988463 - protein, 58 aa, Homo sapiens
ASSGFVITAASSKWSMLQQSATNRKPTPKAHCNRLYYRKLQGDKDAIKAIGHLYWTIL

SEQ ID NO: 988464 - protein, 40 aa, Homo sapiens
MYLLSMMNITYKNTEYAYKNYALINVRYYNLGRAKRNDDI

SEQ ID NO: 988465 - protein, 90 aa, Homo sapiens
RIADVICNDKTPKLYHGDSPTVIHARCGQISGSSDSMEAVPVDVSVVKVTLSLEFLCILCVTIVRADPSHPLKPLSRGLSHPTDTIRGKG

SEQ ID NO: 988466 - protein, 56 aa, Homo sapiens
NATLTGHMCFLVLRHRSLHVQALVAVGDHASKPMVTFAANINKESIVDVEGVVTKS

SEQ ID NO: 988467 - protein, 38 aa, Homo sapiens
RPSSQVSRCVYTSLIRVSSVRSPSLIIVPQCTLTRTHH

SEQ ID NO: 988468 - protein, 48 aa, Homo sapiens
APLFHKRADIVILLVQILAEKSVTVHMCRLQSVAPDGSEKMDVEDENL

SEQ ID NO: 988469 - protein, 47 aa, Homo sapiens
MRIFRTVVVRALHIRCHQDLIAQVIDLPIGQRSNGIGRNLDRLAIER

SEQ ID NO: 988470 - protein, 113 aa, Homo sapiens
QKIGRSRHCELFIVSHRLSSPLFFYHNIAVRLHRPSTDALGLASAERMLVLEKVPGKKKWILQFWRRGAPSSLSNSTVLAFQPGERFVSEWPQKENYGQASVDNGSPAFFGSC

SEQ ID NO: 988471 - protein, 76 aa, Homo sapiens
QCTQSHLSNRQVSHDPPALSLQWFLSGFKIKFKLQDMAPASCSDLNTSYLKTLGSNHNEPLVISSTYCAIGTIHIL

SEQ ID NO: 988472 - protein, 117 aa, Homo sapiens
WKLSLLPNTGPATRRSGGFHKCDAVSMEVLLPCAVHFEVDVHFPVFEEARLLYPDRALFAALVRKQTHVLSREHSAALVVPEWHRAGTDPLVGLNERMLPLEMFTVAVSYIRSKDPK

SEQ ID NO: 988473 - protein, 40 aa, Homo sapiens
EPGVDAAVSIVPLHSGLDNRVRPCPPTPQEMGSYSRDYSV

SEQ ID NO: 988474 - protein, 36 aa, Homo sapiens
GETDPEGRGTPQRQPKDIENQSLSNEPAFTARKTRA

SEQ ID NO: 988475 - protein, 38 aa, Homo sapiens
MCLNVPESTVKLFTAVISTPDFDPRVNNLHLLTVIQQH

SEQ ID NO: 988476 - protein, 77 aa, Homo sapiens
MRLSATEGSREYSRMTLALCTGTGLMLEISAASAKAASSMTSLSENTRLTSPLPRAVAAIILRTVKASSLTRLWFPM

SEQ ID NO: 988477 - protein, 38 aa, Homo sapiens
MDNFRMTISMIIYSCLKEERKILENAQRFNQAQSGNIQ

SEQ ID NO: 988478 - protein, 87 aa, Homo sapiens
WRISKSRAVLQSLRNLEVSTVLNVSTELMYSVGMHRSGEYTSTRLHVCVLVEVSTVLTCLKELVYGGMHRSGEYTSSWRHACMLGYW

SEQ ID NO: 988479 - protein, 91 aa, Homo sapiens
PGYVAEAGLELQLLSQAEAPQTAGVQEFWAVARYADRLSALKFGINMMTYCERGTTRLPKEEENRSSLSTEQGKTHVLISRCIAPVNSHCT

SEQ ID NO: 988480 - protein, 54 aa, Homo sapiens
MALTRRSSKSKRRAKRFGSYDIAILQIGVPPCNIVAIQVLSMLSRKPRLQLHNR

SEQ ID NO: 988481 - protein, 70 aa, Homo sapiens
PERHVRGGITSVVGVALLIELPLAAIDGVVHCRRSPARDGRCAGDQPGRAPFLEGPSPARAVHPRIACSA

SEQ ID NO: 988482 - protein, 97 aa, Homo sapiens
RIPVAGPAPSTCTTAHSQVQVAHGWHAGPPSHVFPASRTGRCAWRSRRGQGPMFLSRALSPSPGPVPSSAIAMFLLGGHPRQQSAPCQAMPQLVTHG

SEQ ID NO: 988483 - protein, 48 aa, Homo sapiens
DVHEYMGSTNGMNRKKKCHMYNNFFKKVKVNYWGDNSSPLPPPAHSSK

SEQ ID NO: 988484 - protein, 38 aa, Homo sapiens
MRFFFLETGVSPVSPRRECKGVISAHGKLRLRGHEILR

SEQ ID NO: 988485 - protein, 44 aa, Homo sapiens
MGDVTFFQWGNHAVARKKAVCHLFGPLVSVFLALSIRIRPEVLK

SEQ ID NO: 988486 - protein, 30 aa, Homo sapiens
MIFHKYDNSSFNEEKTVFSTNGIGKTGYAH

SEQ ID NO: 988487 - protein, 89 aa, Homo sapiens
MCMSLSLNQELEIIMFSEKGMKAEGGQKLGLLHQTVSQVVKNAKEKLQKEIESATPVNTQMIRKQNSLTADVEKVGGVRIEDQTSTFFQ

SEQ ID NO: 988488 - protein, 46 aa, Homo sapiens
RVHIGLTRFKQLPASLDVLLGFTGIVKVDCLIVFQFLNIACQVHND

SEQ ID NO: 988489 - protein, 90 aa, Homo sapiens
VTRGKKSEHSVVNESARKIPMLLGKAYERHQRRTIGLTVLAALMVPLTAGTMLMLMPPARAVDNWEVEGANGTLHVYGALTESACSLEMT

SEQ ID NO: 988490 - protein, 100 aa, Homo sapiens
RRQSFRTDLRVGVPGYITLGDYARTPRNAFTAQPGRRYLMCGRATDQMRGLHRLSRLDNLRMRIQFYLRSEGMGAKVHVLKGEESRPSATVPKSPLSCTH

SEQ ID NO: 988491 - protein, 73 aa, Homo sapiens
AIEHGTHRDLPLRQDKTTRLGHGVECTEASYMLLQKLQQNADRFPDRHKTIYASQIVIPKYLGFKYNIRYNRT

SEQ ID NO: 988492 - protein, 42 aa, Homo sapiens
CSGEISAQYELRSRVHSICPASAYQVAGTCRRLSVTPWSKFA

SEQ ID NO: 988493 - protein, 159 aa, Homo sapiens
MWEWRSEYGDHILDELQRIYSSQAKKATWMQMMCDGNQCRADQSLTSPPPRDLLLDIARQRNQTPLPLIKPYSGPRLPPDRYCLTAPNYRLKSLQKKASTSAGRITVPRLSVGSVTSRPSTPTLGTPTPQTMSVSTKVGTPMSLTGQRFTVQMPTSHVI

SEQ ID NO: 988494 - protein, 153 aa, Homo sapiens
MRSHMRDHVVLAYGSCIGGSRIMTCSAIQVDASTVILYLYMAVEYAMVYMCQIVFIQSTIAWALQVECKLCYSEEYCSEHICACLYGSNNLYSFGHIPSHEIAGLNGRMFQVLLEITQLLSTMAELIYFPTSSVYAFPFLCNLASICNLWAFK

SEQ ID NO: 988495 - protein, 55 aa, Homo sapiens
LLGSLLYLSRRPLISYTPTKSLMPASPGALESSPRDPGLCAWTPLWPEPGGASAH

SEQ ID NO: 988496 - protein, 86 aa, Homo sapiens
YTCMGSSRVNATLRGIQPPTELGLQVRATEPSYLSYIAYRRGFTILDRMISSLDLVIRLLRTPKCAWDYRCEPLVPGLEHYSHVKH

SEQ ID NO: 988497 - protein, 160 aa, Homo sapiens
MHINCLFIIKCNDLMQNVIFNLSYDEGAFCLLVVAWGFRAQVKHITPTFKIASSCCYSTLMVMCKKLKFLGFPVCTAEVKKELGIGHPLWDNRYTSYLSLSCHRFGLTPKNKNNNNLWSTQGEGRTRFKHWTSEYDSLPKTLKYLNVAMINAEVLPLTVM

SEQ ID NO: 988498 - protein, 32 aa, Homo sapiens
IEDLEATFLSVTSVPSVLKALVRPLHVNAKDG

SEQ ID NO: 988499 - protein, 70 aa, Homo sapiens
  misc_feature (35)..(35): Xaa can be any naturally occurring amino acid
RFGVFALVRSEGITEESCVWWLTHVNRQHVWEAKXGRSRGQEIETILANTVKRLLYLKSKKLAGHGGTHL

SEQ ID NO: 988500 - protein, 107 aa, Homo sapiens
VSHCTQLYGYHQYLHERGPIYGGQSAVQCDDRRLTATLHLPGSSESSDPASPVAGIIGTRHHAPLIFAFFVETGYHHVGQAGLELLPDLRLSAHLGLPKFWDYRREP

SEQ ID NO: 988501 - protein, 122 aa, Homo sapiens
FGVFAKFYQQKRREELRRHFRDFGDSLTRGGKGFLRGVVGGVTGIITKPVEGAKKEGAAGFFKGIGKGLVVAVTRTTGGIVDMASSTFQGIQRAAESTEEVSSLRPPRLIHEDGIIRPYDRQ

SEQ ID NO: 988502 - protein, 66 aa, Homo sapiens
TALKDDSRLKGEFVTECAADVALHVISCSKSIQLPCRAAICHTVTTSRDILVWNPRRDSLVSMVVG

SEQ ID NO: 988503 - protein, 57 aa, Homo sapiens
PEMCSVRADDLVENHQIIWSLFVSIFKAGIRTNEQITATLYWVFSSQDCNGDLNPSS

SEQ ID NO: 988504 - protein, 100 aa, Homo sapiens
SKLYAGACSKIIRGTAYLSSGSQSRSEYSVELHCLSTEAGAKALANRAVERTHRGQSVRLIRMQRALDPGVLIQILVFTWDFTWILALLSGEVDHFQPTV

SEQ ID NO: 988505 - protein, 68 aa, Homo sapiens
MHEMRIVSGPGTSGSHCNPSTLGGEAGGSRGQEIEIILANIVKPRLYEKYKNYLGTVARTCSPSYLGG

SEQ ID NO: 988506 - protein, 110 aa, Homo sapiens
EQQHTGFQETSVLMKLGLRSKRTKQQYSGEDRKRVQEPVRSGEGISEAETETANNMVTDIYVKKDPREGTRVQFGEQQQHTGFQEPVFDDARTEEQASKQQFVVNLGKES

SEQ ID NO: 988507 - protein, 63 aa, Homo sapiens
SVYCAFALIAVCAMALVSTMSHMHNLVLSAISFPVNIQGISSILSKTKQNIDYVCHFSCARSL

SEQ ID NO: 988508 - protein, 83 aa, Homo sapiens
VQIQKYEAPERVKRSCNDAAIIIRLEVMMGDEDEKAVESVCVSSAWLENSPVDAFGGSVQAHKDVSRQFHHADDVGLGPEEAR

SEQ ID NO: 988509 - protein, 38 aa, Homo sapiens
YCYLVGDCYLWDNWPPESDRKVPILEDLLMRILVIWAV

SEQ ID NO: 988510 - protein, 98 aa, Homo sapiens
VALITVERHASGGDYWGILNPGEYGVTGHAWGYTPSAKTCNVDYDESVPRQCNFILARSNWNRIREIVAMNGNRPIPHIDPSRPMTPQERLTGQERLT

SEQ ID NO: 988511 - protein, 99 aa, Homo sapiens
  misc_feature (54)..(55): Xaa can be any naturally occurring amino acid
  misc_feature (72)..(72): Xaa can be any naturally occurring amino acid
  misc_feature (80)..(80): Xaa can be any naturally occurring amino acid
  misc_feature (90)..(90): Xaa can be any naturally occurring amino acid
AGSTVVALVGRLGEYSLLPEVGGQVAVGLRNGIKGGLGESCPVVACAAPWLMVXXSHRYHAIMMQLLSAHGXRRRCHVPXWCAWDEAYHXTEPQLAPVT

SEQ ID NO: 988512 - protein, 47 aa, Homo sapiens
SRESPEWKQHIYNEIVNINPIARKDSRRRNGMKLEGLILHGTGGQTL

SEQ ID NO: 988513 - protein, 82 aa, Homo sapiens
ISAKREINANIFLSVTTAVHASVFNALRLVSTLLTSNYRYSFKNKEEFTILQYPKTPKLAIDIKAENLRRYAFLDKFRPHVS

SEQ ID NO: 988514 - protein, 85 aa, Homo sapiens
KGSPNNSPFLTITSMTRVIEVSYWGNNAGEENGDLKHTRAGLKGPFLPFDYQRPPESRNLGTQLEFLIMGITGSWGKMVFRYHFP

SEQ ID NO: 988515 - protein, 103 aa, Homo sapiens
SPLYRIPSGSLGEEWKGYVVPINGGNHKQGFPMKQGVLTHGRVRLVLSKGPFCFQPRGTGERKKKSIPGCIVDANLNGLNLGIVKKGEKDISGLADTTVASRL

SEQ ID NO: 988516 - protein, 37 aa, Homo sapiens
QYDWCLNKKGKLGHRDVHKDNVKSHRDKMPSTSQGER

SEQ ID NO: 988517 - protein, 189 aa, Homo sapiens
MLSSVILAAGVFLLERISCASSGARPERCRRGVSERFRVTGRDRGDWNIHWSLKRGWNERTVWKHWNTALFLHDETRYPVGLADRPDSEIPELRRLSFVNIQQLLDERPPVGLKVPMPARGYSEWTDRPVPVLEEPMIRAKTGIERRLKRSLKYNCGEPHKRDARGSAGNDEPDLVCDPGRARVDQARR

SEQ ID NO: 988518 - protein, 157 aa, Homo sapiens
LEDRGSVISHLSLLSSWDYRHESPVLRNNTEGSHVTFTQFPLVVISCNVVHYHIVYTCNDGTLSQQDIDIGTVKIQNIFHLHKDSLNLHLDSWDYRHESPVLRNNTEGSHVTFTQFPLVVISCNVVHYHIVYTCNDGTLSQQDIDIGTVKIQNIFHL

SEQ ID NO: 988519 - protein, 119 aa, Homo sapiens
NSGSPGEAHGQEGSAAAQLDVLRLRSSFMERRKKGSASLKDELLRALKELMLKDQECERLSKVREQLEQELEELTASPFEEAHKMVENLNMKQAASEKQLKEARGKIDMLLAEVTALKT

SEQ ID NO: 988520 - protein, 54 aa, Homo sapiens
ATQRDLISTKKNKKNQLCVVACTCTSSNWEGCNGKITSAQANWAVRIPDEDCSE

SEQ ID NO: 988521 - protein, 136 aa, Homo sapiens
LVIHPLGSQSSGAYRHEPPHRAWDYFLSFLGLVLVWETESHSHPGWSALERSSLTATSASWVQMLLMPQPPKEVGLRGVVHDGGIIVVLLCGVVVVVVVCGVRVSLCHRGCGGVVPCRIILTSAWWVQAMLPQPPK

SEQ ID NO: 988522 - protein, 124 aa, Homo sapiens
MRCSTCRRKKKKMHLTIQALEDAAGGGGERPGEAVRWKKVTTEAKLKNLEAEPIILEDPNCKLAKEKKLLEDRIADFTTNLAEEEAKSKSLAKLKNKHEALITDLEERLRREEKQRQGQEEHRS

SEQ ID NO: 988523 - protein, 78 aa, Homo sapiens
SAGLPSPSPGSILTFGGRRVNHALYVHLQPGMSREGPAQPQSSPVQATFEVLGFITHLYAGADVHRHWDVRILLTNIR

SEQ ID NO: 988524 - protein, 36 aa, Homo sapiens
SLPDAKEREARPDFHLYRVIQNKEGARVKTDGPFGG

SEQ ID NO: 988525 - protein, 38 aa, Homo sapiens
RKHPFTQSSFSQGGTSSSPSGHPTLPQISQGGGHGSSQ

SEQ ID NO: 988526 - protein, 66 aa, Homo sapiens
LFRTSGSNRLGLPKGGDYRREPPCRCRFKFSTDWIIYGGTCTYFLIQNMTRAIRALESGRSEEETR

SEQ ID NO: 988527 - protein, 77 aa, Homo sapiens
  misc_feature (67)..(67): Xaa can be any naturally occurring amino acid
SPYHARPGVPRQAPGGCHAAIFSHFPILVLMPSLVGSSIQGLLPGPILAPTTLTHSLGLITGTGFQXGHRQLAHSVT

SEQ ID NO: 988528 - protein, 91 aa, Homo sapiens
  misc_feature (1)..(1): Xaa can be any naturally occurring amino acid
XQVSPTSASQSAGITCVNHHALPAGSFLMARVVSSPGMGWNLGGMIICSLMVSRREGNAIGFKQHFNGQLQRWITHAVRKQTRMRVSSWGT

SEQ ID NO: 988529 - protein, 45 aa, Homo sapiens
PAGLFHYRQGEVLGQELFFDIIQGPRGIRSAPKLPTRSGKGREHP

SEQ ID NO: 988530 - protein, 68 aa, Homo sapiens
MLQCSRGSLRVFTWGADVYMSGPASLASIFYAVARRAYCEGCYVSTLEKCAPVVPAHPGAGSCGLWGK

SEQ ID NO: 988531 - protein, 32 aa, Homo sapiens
MSWPVGYAGAFMILSRWPDHPYGRATKAHGDS

SEQ ID NO: 988532 - protein, 78 aa, Homo sapiens
TVKGGVNPEPFRATQKVFTRQLGLEHDEKLVSYLSRLRNMERRTKQIQPWELNRAELQDRRGQAKVLERELRDLTTWV

SEQ ID NO: 988533 - protein, 57 aa, Homo sapiens
VLGTVGNNVNPHNYKQESFDQGVTYTERDTESQTQSTIHSPRKIQAQAPLAGRGFLQ

SEQ ID NO: 988534 - protein, 51 aa, Homo sapiens
PNLLIWALHAVVCLQADCSQLDLGLITSQSFLLFSQLMRLPCGSWTPNGRQ

SEQ ID NO: 988535 - protein, 39 aa, Homo sapiens
MAVEKYLMEWEPAQVSVRARAPQSSRRRVGGAVTRRVRS

SEQ ID NO: 988536 - protein, 34 aa, Homo sapiens
PLLKNPLSRIVGFVLAIDRSSDAFGQFADRGSQY

SEQ ID NO: 988537 - protein, 92 aa, Homo sapiens
IVLYITGEPSKVSHRWLSYSVAPVRVLSAPPDFHFGQINRTPKFLRTFPAGQVPAFRGRVMDSVLFESNAFDYYVSTEELWGSTPYAAVQVV

SEQ ID NO: 988538 - protein, 38 aa, Homo sapiens
CQKYNGDKMICRKVLCSPSPSCCQRPQGRSVVTPATCV

SEQ ID NO: 988539 - protein, 108 aa, Homo sapiens
CGSFLTLEIELQSQLSMKASLEGNLAETANRYWLQLSQIQGADWAALEEQLGTMLRCESGAAEPVNTKSVLDCEARGWMQEICHLTAACLEGEDAQPVTQYKKEPVTT

SEQ ID NO: 988540 - protein, 72 aa, Homo sapiens
VALDGPRRVSSTFRACLEEIQSKLQILAASVWWMGINFSELGGKCGFLFLHLGGRRWEPGSLAHVAAPSILQ

SEQ ID NO: 988541 - protein, 108 aa, Homo sapiens
  misc_feature (93)..(93): Xaa can be any naturally occurring amino acid
VGLQVLAIAPGRWWIFKNTVLKQTVGQQRSTQIENEKTSDPTVANTTRGKVCAGPGAPRRMWEGQAYVWRTVVSGAPMERGRKRGTTGMLETXAGVGAGERCIVLWST

SEQ ID NO: 988542 - protein, 49 aa, Homo sapiens
PDAWPCFSLRRCRAKGSCLPIRGVPALELHGAQAWRVQAQQHRRLPSSQ

SEQ ID NO: 988543 - protein, 38 aa, Homo sapiens
VGLFLTEVEHRSIVGGDETEEKCERECLRICPEVKVHD

SEQ ID NO: 988544 - protein, 54 aa, Homo sapiens
  misc_feature (15)..(15): Xaa can be any naturally occurring amino acid
RAAAVALDGSRRGLXPDHFRRVVPGAPPSTGDWSYPRPGSSRHDSALPPSDDGT

SEQ ID NO: 988545 - protein, 138 aa, Homo sapiens
MESEELSLPWPLSHLGIEERLFPAAIPSRSVRSVSVRASSVWDVRSASAWLPHLGREECLCLAVTPSRKQGTDSCLISHRLGCEERLCPCRPVWNVRSASARLPRLGLEARLCLSAHRLGCEARLGPGRPVWAVRRCS

SEQ ID NO: 988546 - protein, 34 aa, Homo sapiens
GSLPDLSGSPASASQSAEIKGVSHRTGPNTGILE

SEQ ID NO: 988547 - protein, 30 aa, Homo sapiens
KGRGLNLRLPQLKQFSWPQPPKVAGDNRGC

SEQ ID NO: 988548 - protein, 61 aa, Homo sapiens
TTRFLYGDVSQAYKHSMLNMVIISSQVKLYYCQNLPSRKCQNANPESTENLGNIFNLVPFP

SEQ ID NO: 988549 - protein, 37 aa, Homo sapiens
TKICIPPLSSAGDSFWMLSSARVRPSSSGFPAKINLV

SEQ ID NO: 988550 - protein, 67 aa, Homo sapiens
LWIITKARKMKEMTRRKKMEGRKKGGEKKDGRKKHEEQRHSSHFLDFETTVWSDSYCEKGLRNGLRG

SEQ ID NO: 988551 - protein, 101 aa, Homo sapiens
STGCRLTGDGTLMSKQGATESRQVVRSYYKFSKVARYKINRTISGIAIQENFTIQKCNIKKTMSFTIASKRLKFLGINSTTGGLRLNTTNHCCQEITAWPR

SEQ ID NO: 988552 - protein, 57 aa, Homo sapiens
ETGVKSRRQKWQCVERSRDGRSSLGNKSETLSPQKTTDKQKNKTPAQVWWLTPVIPA

SEQ ID NO: 988553 - protein, 69 aa, Homo sapiens
YPQSVIHDWATSSYMMSPERFRKWNVTSLETLKALLAVTKGHEMSPQEAPMIDRLCEGEGATLDIRYPK

SEQ ID NO: 988554 - protein, 71 aa, Homo sapiens
GPRGGAGGAEYWDRETQKYKRQCQTDRVSLRNLRGYYNQSEAGSHTLQWMYGCDLLSRKGASFAGITKSAY

SEQ ID NO: 988555 - protein, 49 aa, Homo sapiens
FSVWIVAFSGPSDEPIPYRVHVDGLHRSDRQTSTGRRARGVRSTGRATD

SEQ ID NO: 988556 - protein, 42 aa, Homo sapiens
NCGDVMSLSLAPDTRLYVSGACDTSAKLCDVREVHMPQTFTE

SEQ ID NO: 988557 - protein, 83 aa, Homo sapiens
LGDNWKLHRVKFLVAPANFKREKELARKLEYDGLYITEQPEATDVQGQWDRLVLNTPLLSLSNYWDKFVTRKVLDKHGDIYGR

SEQ ID NO: 988558 - protein, 145 aa, Homo sapiens
  misc_feature (33)..(33): Xaa can be any naturally occurring amino acid
  misc_feature (40)..(40): Xaa can be any naturally occurring amino acid
ILPSELLVYRGEAPSGPGRSHTSSASVRPARSXCSSAQVXQALSEVCVLVLEICVSRSQYSGPSCSIHGARGSFLGLVASLSNLTNSVSSTEPTVMKRGSPRPGRDMAVWKYLMEWEPAQVSVRARAAESSRRTVRGAVTRISAS

SEQ ID NO: 988559 - protein, 59 aa, Homo sapiens
SEANSLRFTFGSPEGRDVTDNRWVVLRARRSVFPGVISSVSASTTSSGIVASRKGEKGI

SEQ ID NO: 988560 - protein, 57 aa, Homo sapiens
EHLTGTSEADLAHQDVLHVKVQEGALVLDGTTSISCVTRAERHQQPQHASIVLVGLK

SEQ ID NO: 988561 - protein, 61 aa, Homo sapiens
SGSRGSRQSILTSYFFDFLDRFWFKISSSSGVSWAPFWRPRGSAIVGDSIPRVRYRCAGRL

SEQ ID NO: 988562 - protein, 42 aa, Homo sapiens
MIPDEHLTNSKILPPAATSRVTSIMVQHFRYHINQSNIHEEA

SEQ ID NO: 988563 - protein, 54 aa, Homo sapiens
CGDLTGIPASSHLQPQARGGGLKVSTSHSQQHTNTLVVHLFHTAHRSRVTGSSH

SEQ ID NO: 988564 - protein, 51 aa, Homo sapiens
MRIHIFIRLMGLARHLPPQFSWRGFFCIDIHFQPIEGRLLATVARYSLIVR

SEQ ID NO: 988565 - protein, 79 aa, Homo sapiens
MRSSEEWNRGRARWLKPVIPALWEAEAGGSQGQEIETILANIVKPRLYQKYEDIERGVVVGAYSPSYSGELRQENSVNP

SEQ ID NO: 988566 - protein, 207 aa, Homo sapiens
MASNMGVQVISRELRIQANTTAYITWSALLKQTPPCEVKAAPDITGHKRGENKNEGQDATMYGKSVGYPHPDGIWRKKENGMPRDMVNTSGRFFIITKENYTEWNMVNLQITEDPGEYECNATNAMGSASVVTVLRGRSHRAPLGPFLGILAEIIILVVIMVVYEKRKRPDEVPDDDEPVGPMKTSSTTITKDKTCAENTIKYGYIS

SEQ ID NO: 988567 - protein, 67 aa, Homo sapiens
LAKDPANRVIFSISGRRALTAITGAVGHALASSINRRQVGPFPSRQRGAEGARSQAGGLGSDAVWVS

SEQ ID NO: 988568 - protein, 47 aa, Homo sapiens
MSGLLGGAPHASVPTIRGMILILIFAEELDSTVIIETLILCTKETLS

SEQ ID NO: 988569 - protein, 84 aa, Homo sapiens
MGHAFQVLVVIEVTLVWRAAGGLERRPKPVPQKARVVGKVDQGVVIRLIGGESIAHSQPLKVMLGILHDQHGQGGDVDASIALP

SEQ ID NO: 988570 - protein, 66 aa, Homo sapiens
SGCTDAQAVPSASFAPSIKYWYLRSVPGTSRTLASLAHMWKYRSFMSYTERFLELMVVIPVMDNNK

SEQ ID NO: 988571 - protein, 34 aa, Homo sapiens
GFSDGYSQDRGSERDRGDTEVFRAPLLLSGSFIL

SEQ ID NO: 988572 - protein, 32 aa, Homo sapiens
LTILQLFKAIFQLLLGPRPSWKCIFLSSQEPE

SEQ ID NO: 988573 - protein, 35 aa, Homo sapiens
VEVGSKDGWAFAWPARACAERAYALHSRGGTVPYL

SEQ ID NO: 988574 - protein, 33 aa, Homo sapiens
YTEPSLVAKLEELEIGRPSTYASIIRTITSRDY

SEQ ID NO: 988575 - protein, 51 aa, Homo sapiens
MVNVHPVISPIASARVAGLRIIPRTAEVTVRSPGLRTPLISMHMCSASTTT

SEQ ID NO: 988576 - protein, 49 aa, Homo sapiens
CILATNFLPGLSFPSPLFQVSSHHHLINQCISRATLQASTQPSPIIHFN

SEQ ID NO: 988577 - protein, 38 aa, Homo sapiens
KALRTQLDLRRFRIYSNHSALEWVALKPLQAPLETMLQ

SEQ ID NO: 988578 - protein, 77 aa, Homo sapiens
RVSSGVGLGYSGQLHGKECVHRRRGECVVPPDLMQLCVPSISLGLCSCTEFQCVQQRVSVRSEEGFGSAADAVAGVG

SEQ ID NO: 988579 - protein, 93 aa, Homo sapiens
EVDLEGSLWVSSGQCHENSIDVFDVRRAEWEQTCAAQEGAGPSIQRCSLVPHTAPEKVRLDLPHGTTLCRDRTEFCTSLDLHLTTSRAASLFL

SEQ ID NO: 988580 - protein, 146 aa, Homo sapiens
WEGTAGQGGADRATVVAYVRGPETVGSWGTHHRQGASTLRLIPTRGPCRNSAISGAGSRRQPKADIASLPMMLTGFPDSSRLAPKADPIFPGPQARRFSATFPRCRRASSWPAMTCPPRSSTADASPSGEHTRFTQRCMPEDKYTY

SEQ ID NO: 988581 - protein, 51 aa, Homo sapiens
EQNGQWLVLVGMMWLRLQMWPSEHRNEAELSLVYVPLHGSHRWGHRCKDAR

SEQ ID NO: 988582 - protein, 69 aa, Homo sapiens
QDLTVIIRPRPPKVLGITGLSHGAGPGWFLVFGDGVSFCGPGGSTVMQSQLTATSASGVQLILLPQPPE

SEQ ID NO: 988583 - protein, 195 aa, Homo sapiens
LSSQVAGTTGRDVSGVGCRGSADLMAAVPDSQPQGERYPSPKGSSFTVTRRISTLLTPVTDAKLTAMSSSLQSRGTLELHKRQCPLEELYSIPEDQEPEDQEPEEPTPAPGARLWALQDGLANLECVNDKYGLGRDKSCEYGCDEPLLKRTDKYRTYSKKNFRISRQVGPKTSYMAYIDDSRGNGTFVNTELVRM

SEQ ID NO: 988584 - protein, 84 aa, Homo sapiens
MGAPGMHRLVEDGQGWSWGCVLTGKPGGQNGIDITGSPRSPLHCNWHLHQAIRPQVPAQSMSQRKTQRSSWNVCARLLGIACSA

SEQ ID NO: 988585 - protein, 36 aa, Homo sapiens
RPRQKYQLTIHTADLIHQANTVWPKTPTINHIISMN

SEQ ID NO: 988586 - protein, 42 aa, Homo sapiens
VDSIDPPSKTEEAENTDNLLGTINHITTEDPQDYSHLIYDEE

SEQ ID NO: 988587 - protein, 38 aa, Homo sapiens
MIAQAGYSSSLFYVISFTSNGMAGRHARSFCRRVNDRS

SEQ ID NO: 988588 - protein, 42 aa, Homo sapiens
  misc_feature (6)..(6): Xaa can be any naturally occurring amino acid
HSIGSXGVLHAQVFKFSHQLLTRFQRIVFIFGHSGFGLLRHY

SEQ ID NO: 988589 - protein, 95 aa, Homo sapiens
NTGSEAYGSLTEANLPESQVASGAGAGAPIASSPEKAEEDRTLAGNQGPPALVSYTHSLMEWCHEVTTGYRGVRISNFTTSWRNGLAFCAILHRF

SEQ ID NO: 988590 - protein, 37 aa, Homo sapiens
YRHARQGEITAVQASQPDNRVVQPVQAKCQYAPGQNP

SEQ ID NO: 988591 - protein, 33 aa, Homo sapiens
VLGIRNHLLWERLRCGIHSWNLALFDPQLRMRH

SEQ ID NO: 988592 - protein, 54 aa, Homo sapiens
MARCRELLYAHHFMKNKIGLSGLKVTFVLPLKSGSGPLKSVRRQSFGKIREESP

SEQ ID NO: 988593 - protein, 110 aa, Homo sapiens
AIAGAEPIPLYRPEVPIYSVDIPAAQVMTLQALGTFHERQGEQSLLTGTGAMPAGWGRAYGSDFNKSWSGTGAPSFDGTSRGFQVGHDLYASETSGGQTQRFGLFIGQSR

SEQ ID NO: 988594 - protein, 35 aa, Homo sapiens
LCHQSSMRASTATLAGSAKEWPLELTEPDVSTCWQ

SEQ ID NO: 988595 - protein, 53 aa, Homo sapiens
VGITVALLMVAGLTTQGVDMCGDGFSAELSDTAHEKLNASRGFLATLVDVVVQ

SEQ ID NO: 988596 - protein, 71 aa, Homo sapiens
GTLWRVLVPARRGAAPPDLPCPPGDVTPRPQTDDLPLVLLCWTAAPAGVVGADSGGRLLATRLIMLAAVAA

SEQ ID NO: 988597 - protein, 79 aa, Homo sapiens
CSSLYDIWRSARMLTCRRNYVQEGMHRSGEYTSTSSMYACLGGEHGAHVSQGAGTREVCTGSGEYTSSWRHACMLGSLN

SEQ ID NO: 988598 - protein, 154 aa, Homo sapiens
EHHASSSGRAGVTLPIPHGIWNVGLGDGVSLLWPRLECSGAISAHCNRCLPGSSDSSASASRVAGVTGAGHHAWLILVFLVDAVFHHVGQAGVEPLTSGDPPVSAFQSAGITGMSLGAWPFIWNLKKTNSIVAQLKLLRGWWPVLTRGNRHPGV

SEQ ID NO: 988599 - protein, 86 aa, Homo sapiens
HLSFPYGHLSLGLMQDLQQKVVYHEIHGGGVQCVLPPRSKEDILGSECIPSRSPSTHGAEHSVAENRASFINQLVHLDLLSLRLQA

SEQ ID NO: 988600 - protein, 44 aa, Homo sapiens
  misc_feature (40)..(40): Xaa can be any naturally occurring amino acid
SSSSRQPLTVQVCSCHTHCGPPKPSSQAFSSFYTPSSCTXSGLF

SEQ ID NO: 988601 - protein, 50 aa, Homo sapiens
SKKSEVAHFCSGSSSCGPSGFKILAIITGFPPYDLPFVPSARIPEPTRSD

SEQ ID NO: 988602 - protein, 47 aa, Homo sapiens
  misc_feature (1)..(1): Xaa can be any naturally occurring amino acid
XTLEDPPYAAVQRAPVTPGRVAIVFSTGSPTCAGRMPHSPGFAVGQE

SEQ ID NO: 988603 - protein, 42 aa, Homo sapiens
QSVAAGGSTCNVSSADGRSAQLDTSNADLDRWTLPLTVSVAE

SEQ ID NO: 988604 - protein, 56 aa, Homo sapiens
DQVPVNGIAMAPYMISVALFVAAISTNMIFAKLPSGRHPESRWAWLKSRSEINGII

SEQ ID NO: 988605 - protein, 91 aa, Homo sapiens
  misc_feature (4)..(4): Xaa can be any naturally occurring amino acid
SRGXPCGASRALRGSNIKVNSELNPSTGNRSREQSSEAAETGVSENEENPVRIISVTPVKNMDPVKNKEINSDQATQGNISRDAQQGGTEL

SEQ ID NO: 988606 - protein, 61 aa, Homo sapiens
KVTERGPVYEAFAQPDAASRSSQFLNLHEGIVACSLDDDAGVFVFAQQVHHNAMRAVMDVG

SEQ ID NO: 988607 - protein, 36 aa, Homo sapiens
QVGQRSALRGLSYSSGQGRALLWPGLCSWPGQGPAL

SEQ ID NO: 988608 - protein, 42 aa, Homo sapiens
MTAATPTDRRSQEKSERRNDGIDETAAEIITALGGAENIEDV

SEQ ID NO: 988609 - protein, 84 aa, Homo sapiens
PLEDPPRSAADRPRQVLGRLVFSARGGRMSSISLTWQPGRIALAQARHIYACFLTQTGGRCSKSALSNAPVNPHLITARGSKRS

SEQ ID NO: 988610 - protein, 46 aa, Homo sapiens
THLQEMVNFSPMAREGPRRRSGMKLVGTHLAWHRRPDTDQGPVLVT

SEQ ID NO: 988611 - protein, 34 aa, Homo sapiens
LSYEYRREHLFESRVLGASTATYFLPSAMLREHI

SEQ ID NO: 988612 - protein, 60 aa, Homo sapiens
RQGDRWSFDFDRLDRWSRIARRHGITHLEFSHLFCQGEVDRPADVYDADGNHLFGSHLPT

SEQ ID NO: 988613 - protein, 54 aa, Homo sapiens
LAVKRKRDSRTPRSDCVINSGVWAERSTAFLLATNYTVRILELTLEVMVTLSPG

SEQ ID NO: 988614 - protein, 69 aa, Homo sapiens
PKQTHRSRSRDRSRLTTAGIETSYNAQEQQSGQSNKIENPEEKEKRGSDDPPRSVTSGSREKQSEDHKH

SEQ ID NO: 988615 - protein, 36 aa, Homo sapiens
YPTRCLGPYRGKRPYIEHQQHNKYEKYTQSDRLSPF

SEQ ID NO: 988616 - protein, 137 aa, Homo sapiens
PATMYPILQPLDYYAVTKRATTLLDSGHILILVKKVSHRFSGRGQLKPKLVLEKMYNRSFKKINYIKFAGHRTPIQTTVNGEDQKPQNTILRENQPIRCVHSCNGEAFPGGLNSQNSGLLDVTGNSLQFHQNILLDG

SEQ ID NO: 988617 - protein, 66 aa, Homo sapiens
LLLDRGEGVHLRESRPGHSLHLGSGIECHRARTERDHAAVQAIIAVRQTLEIAHHGGFGVVARKDR

SEQ ID NO: 988618 - protein, 123 aa, Homo sapiens
GRASLTAKDGKGILDSHTIGNRAYGFHGPKVSGHKPVWSFLQISIATGTTVAAPDFRFFPLSTSFGIQRSIRSSENADHMARPGFHDYLEYSSSPVWSAGSQFIPLSVVYFAPASLEEKVGLL

SEQ ID NO: 988619 - protein, 51 aa, Homo sapiens
MTAVIYLPMEKTRERRPWWGGCDVTAFDAGAMLLFTTVTYTGLWVARPPAL

SEQ ID NO: 988620 - protein, 37 aa, Homo sapiens
MSIFSKWVVSGGPTVLRSAEMGHVRTFHFLRARIVLA

SEQ ID NO: 988621 - protein, 49 aa, Homo sapiens
KSAATNDSQLGNRMLKGETVVLASDSKRKRLQPPQTLPRQSFIVEGLRQ

SEQ ID NO: 988622 - protein, 49 aa, Homo sapiens
MAAPIALGDLSRHARRDPKSAGPRPGGFEGQERVTCQDAIDRAKSDGQG

SEQ ID NO: 988623 - protein, 36 aa, Homo sapiens
SACMPESTCIHHCGLPSVKFRLHVSTGLTSNIVSWS

SEQ ID NO: 988624 - protein, 112 aa, Homo sapiens
PGRRILTQHSTPRKNMNMEISFTLNLIAQLYLSVVADTVIAGTVLGSYDALGTDLKETYESFPFWSWNHSLDVVSGFMSCVPNVKVLKGFWVVWGRLGIRFNRVYFLNGFYK

SEQ ID NO: 988625 - protein, 33 aa, Homo sapiens
VSLLLLYAPVWVLPPRLAPLSRASTSILVQLRC

SEQ ID NO: 988626 - protein, 78 aa, Homo sapiens
  misc_feature (47)..(47): Xaa can be any naturally occurring amino acid
AEYEQPEGPPGSGGVAAVDTYGRHNYGVGESFTVQGEVHTSGDCVSXQRPSPCSTTTSLVCSVNGFYPGSIDVRWFRN

SEQ ID NO: 988627 - protein, 89 aa, Homo sapiens
  misc_feature (88)..(88): Xaa can be any naturally occurring amino acid
AGLFVTSNCSASGLCPRGPGVHALSRPYAPRHTLFGEATAPGSNNQPHPASAIGVKCATSIDRWAWPDPQNESGLVYPKSRKLREHTXE

SEQ ID NO: 988628 - protein, 120 aa, Homo sapiens
LLLSSSPSSSSSSSSSTPMPSAQGPQYPSLRESLGGVLFKAGQGKEGFKLVPVLILPVSHLSSFDLREVQVFQPLFATDLQLDLPGTQLAPVAVVQRQGGPLFPGQLLPSFHWLLPKKPE

SEQ ID NO: 988629 - protein, 86 aa, Homo sapiens
HDRWDDASDWSSLLFGLHSRDITTGTTNPLPDCDGRCGTRATTGYTSRSYTCAPRRVHYRDDDDPYYMVHGLTRAGTGLLGAGYPT

SEQ ID NO: 988630 - protein, 71 aa, Homo sapiens
MLRCLEDPPGQSLWRGSKIQENQSNWFRRNFYFLVSNDRLVLLEFLSDISAVQGLTPVIPALGEAKAGRSR

SEQ ID NO: 988631 - protein, 111 aa, Homo sapiens
STTQEGDCHRFPSGKLKTELNNQMLSRSAKGLGLGPVSTGIYDDNSFIGQTFPHTPWDGHLWSRRELMPAYMCSATRMHTHSSMPYLKIQTPSPEVWLDMIQLCLFCICAT

SEQ ID NO: 988632 - protein, 99 aa, Homo sapiens
QEGGKPTKLKPYTLSRKTQHHGGCLTTRDTYNRIKTDSSHTLKGQTEKGKRSHMIRNNRNKSEDADLLLALHPEIPEGELVLLHRDVLNIKRTPPVAHF

SEQ ID NO: 988633 - protein, 77 aa, Homo sapiens
VGQRGVTCLGQDTQHPSGDCMKCQDVLLSQCHGKEAGFQCQLEPGVTHFPGLPEDQCAGSNQHHTQHSRHLGSCEAT

SEQ ID NO: 988634 - protein, 82 aa, Homo sapiens
STRGMPSPMPFCVWTWLGGTDWLPYEESYRTRFRFTNTGQPENVRDIKEKLGYLALEFQPKKGTGGFNFFLEKNYQLAGGPG

SEQ ID NO: 988635 - protein, 44 aa, Homo sapiens
TEAHLDVGVHVFAVWTQLRCFDEQISHLVVQKLPAVKPKSEAGE

SEQ ID NO: 988636 - protein, 53 aa, Homo sapiens
RWVNSTCRSTLKTWGLCDETRLGIFGDCPMAQEVRNIIIHPTSLNGYLKLVSY

SEQ ID NO: 988637 - protein, 64 aa, Homo sapiens
MVERDYHLIDISQTPNANKVERGSETAGDKLPGSRGKQPKSPAKGPKCVLSGKGCGIAKTTKRL

SEQ ID NO: 988638 - protein, 73 aa, Homo sapiens
MERIRMDIRKVDAVFVGTGDLVASHSPGVDTQSTPSNLKVACREDLCLPLHQRSAELTDPCVQNAHGRGKDVR

SEQ ID NO: 988639 - protein, 33 aa, Homo sapiens
QGSKDPAEGDGAQPEETTRDGDKPEETQGKAEK

SEQ ID NO: 988640 - protein, 45 aa, Homo sapiens
NPEFPLFGRLKQENGLSLGRGARNEPGYRHCTPPCVRYRASICNH

SEQ ID NO: 988641 - protein, 33 aa, Homo sapiens
TLAARMTASRLPASHFQPDRTNALVLASVALKS

SEQ ID NO: 988642 - protein, 61 aa, Homo sapiens
  misc_feature (45)..(45): Xaa can be any naturally occurring amino acid
PLRVPDDHACIGNSTRRRTTYTVSDGHVTCTVDLVDDNVHVTVGXLLTRPVDLGFTDTTLY

SEQ ID NO: 988643 - protein, 70 aa, Homo sapiens
TLKDPLMPPDLFISLEEQHWDDDEQNGHEDAQNQGPYVQALGGGGISLGPGHVANHLSVPRLHGVGECYE

SEQ ID NO: 988644 - protein, 135 aa, Homo sapiens
  misc_feature (104)..(104): Xaa can be any naturally occurring amino acid
VSSPPPPLIRGGHGLPGWLSGNFPSTQAPPANPLRHRPGFPDLISSRSPTPLRLSGFLAASGTFQARKLHRQTPSGTFRGSRTSSPPPPRLLSRRHHHSGPLRXGSIPGRPGLHELRVLGRVLPIRLPGQEETGR

SEQ ID NO: 988645 - protein, 80 aa, Homo sapiens
  misc_feature (71)..(71): Xaa can be any naturally occurring amino acid
MGKCRNDSGLSVPQKGVVSHFTSGEGHIRALGTVTACRPECNSLLFYLSSSSSTSGSDHSSSDHSSKENQXSIDAHDGDG

SEQ ID NO: 988646 - protein, 48 aa, Homo sapiens
IFTASWYCSGDADCVIPVHQNQSFQISTFDLSTAGLVNKQSFGNGGKI

SEQ ID NO: 988647 - protein, 107 aa, Homo sapiens
PGRAGVLTGKVCPLPSQMAASKISTHPSEPGANLNFPGKVAFHHHHHNHHHHHQHQNQSPSSPFPSRLVSLSLSPGLFLSLSLSLSRSGSFFLSLSLSLSVCVCLGS

SEQ ID NO: 988648 - protein, 90 aa, Homo sapiens
RVSSDGESYAGHLHPHPGRCWVMQDPSMNLQGLAVGKGLSSYEQNDNSRVYLAYYHGLLGNRLGSSLQTHGGSQNKCNFYDNKDRECVTN

SEQ ID NO: 988649 - protein, 70 aa, Homo sapiens
RVSSTSISRGKEGPGQPSIGMTDCQVACQDFGMRRGDGWMEVKVEDYRGDARDYSIDVSTLFRPRSDNLC

SEQ ID NO: 988650 - protein, 130 aa, Homo sapiens
LLFFLSFLLLLLVLVITEGRQHLGQVEALQHLRKRFTAFFSQVVAIQVQLLQLSLVGQGLSNSQGSIPLDFKKDKFSSFSWGRPPRMASARATAPWERTRQSPKLITSTGRKVFKVSARATAPFSGKVWS

SEQ ID NO: 988651 - protein, 102 aa, Homo sapiens
STTSLVKAELPDTGGKHSQNEITFFPGEDAKNRQNVNEQWTPLMYAFFTNQRKTTVLLEAQEAPRVQCTHLGGERFHTLEVEDVIQVHVVEVFAVNEKVEHV

SEQ ID NO: 988652 - protein, 151 aa, Homo sapiens
GFFDRELLPTFQNSVEGRAQWLTPIIPAPWEPRQADHLRSGVGDQPGQHGETPSLLKIQKLTGHGGTCLKSQLLGRPRWENHLNPGGRGCSEPRWYHCTPAGVTEQLALETNKIVLSVLFGSLTFYIKSDLWKEFPYRHQEKGFKRGESGR

SEQ ID NO: 988653 - protein, 124 aa, Homo sapiens
PESKQSQTVFEGKLTRCIQHLTRHKHIRKGERATKHGQGKTKSHEVGVCVDLSFLMAKVKREMLLTAQNQPDWFEVLFFSSPNKFTGAFFASLMMAFAVSLALSLKALTTLFIWDLCFKKKGPM

SEQ ID NO: 988654 - protein, 117 aa, Homo sapiens
QSPNSAQSANSAHLLENSTATVSEAQRKAHVYYRARVSETTISELKATPLMELIERLGGWNITSPWAQGNFHDTLPVGTGHYRTLPFFFVYVSGDSQNSNRNLIQVDQSGLGLASRD

SEQ ID NO: 988655 - protein, 86 aa, Homo sapiens
DIYVWEEEGVIFSGEKKMTIMVREKLVIHAPGILLVRECARAQHRTLNTKALTLESQGTIYIKESGPCHGNPMVRSQIKLKSGGLV

SEQ ID NO: 988656 - protein, 67 aa, Homo sapiens
GAKTMKPESPGLLTQTRPWTQVGCEGGRSAVGLRISLFPVLPSRVSEPEGGTGLDSSSQLPRGHFPV

SEQ ID NO: 988657 - protein, 46 aa, Homo sapiens
LSPQRVAVDLFAGGDDLAIRDLFHKGTHRTGGHRFFLVLSQVGILS

SEQ ID NO: 988658 - protein, 94 aa, Homo sapiens
KTAFLREYATWRGELITDTGSRGGPRAKYADEWIIFSETLRVKKRLRIQAEKLAALYEVKHDETMTRMVARYDVTDLTKIEMRSALSTQCEQGS

SEQ ID NO: 988659 - protein, 47 aa, Homo sapiens
HYRTYDIINFFFSVNELKLNLTDCFTLLSSPNIASSTCDGNVEPAVH

SEQ ID NO: 988660 - protein, 63 aa, Homo sapiens
MIWQIQSLSIMVIPHLNYKSEKKIFELKDIQIWEHGETRKFLLLLLATSFNDFFWTYHTHYNN

SEQ ID NO: 988661 - protein, 64 aa, Homo sapiens
RIPEFPLCGILLLVTLCELAFCKDHRGLKRHMTVHEVLGWPSDWTGSLLTATGGGSAYQDDRFH

SEQ ID NO: 988662 - protein, 43 aa, Homo sapiens
HTTSSVREWEVPQKNAHLKDSDITKPVAAIQALAALLAASDYT

SEQ ID NO: 988663 - protein, 59 aa, Homo sapiens
TPLSETDFKLAAPTLGRIPECTACTRSYKRVRVEAWRQGNRHRGLSERYGRHVGLLTTY

SEQ ID NO: 988664 - protein, 170 aa, Homo sapiens
WLRHGVSSEAVAKMSVGLLGIKGMTAPRGCTLRKLVHVAGKFRTSCWQETTNPCHVDLSTGLLEYPRSMATGFSRANNSREGKVEASLSFLFLRWSLTVSPRLECSGVISAHCNLRLPGSSDFPASTTQVAGITEVCHHAQLIFVFLVETGFHHVGQAGLKLLTSGDPPA

SEQ ID NO: 988665 - protein, 49 aa, Homo sapiens
TIRELRAALTDLTLSSWRIALSDPAAKENCMMHLLRSLPDPNLITWVPS

SEQ ID NO: 988666 - protein, 62 aa, Homo sapiens
MPLNDAYAICHLFFKFFYFTFPSFMIICTIRIELFSTIWISVNSLRYNTQGRCLKWKISELY

SEQ ID NO: 988667 - protein, 54 aa, Homo sapiens
MPRVCDPRRTKLAGLAKDALANDIHIVPADINHSSHRYENGFDAARGQKILYAP

SEQ ID NO: 988668 - protein, 41 aa, Homo sapiens
SGAWAAHLILPVLSLSIVQAAVMTRYVRSAFIDVLTDDHMQ

SEQ ID NO: 988669 - protein, 74 aa, Homo sapiens
IRLKSNGLKNPSCVFGGAIIINVPVNANQCLIGFLCMSNFLCDTVWCQSFCIFLNRSWHKCKGFPRLSPWSVSP

SEQ ID NO: 988670 - protein, 49 aa, Homo sapiens
VPYFLLYEEEEEDMVVEDLVMTTMEEEIMEEEDEEESESEAKSVKVKIK

SEQ ID NO: 988671 - protein, 41 aa, Homo sapiens
EEEEGLEDIDEERDEDEGEEDEDDYERDEGEEDERKDDLIE

SEQ ID NO: 988672 - protein, 42 aa, Homo sapiens
SEKVLNLPPPGSCEFLQEVNREDASSQKLSITARSSPVLGLL

SEQ ID NO: 988673 - protein, 46 aa, Homo sapiens
GTFMAEETSAKVLRYGWSRVSKGKSDSMMNACTPVQGLYMTSGDGL

SEQ ID NO: 988674 - protein, 42 aa, Homo sapiens
DTCDSSDSSLASTLAGAAAAAGAAVVQQPQGQQPQRQNDQPR

SEQ ID NO: 988675 - protein, 44 aa, Homo sapiens
YYTEFTSSEKDEYACRVKHVTLSQPKMLSGGEFSVVQEIERPVL

SEQ ID NO: 988676 - protein, 184 aa, Homo sapiens
  misc_feature (172)..(172): Xaa can be any naturally occurring amino acid
RHPRGTNGYCLRFAERSLRPWRLDQHPGFLFQHSILGPSAALVHGPLSGKELGGLPWAEHCSESPGAQVRPSCPAGKGPGPATQFSSGSFPASSSSFRPYLRILCLFGYQEAPPGPKDSGFVLTVTGPSFPGLPGSAGPVWLSFSLESSCTLRPLWVSSCYTDEETEAGEAXASGRFFSQGLKR

SEQ ID NO: 988677 - protein, 41 aa, Homo sapiens
VQTVLRVKTVPRVQTVLIVQTVLRVQTVRRVSNSAQSPNSA

SEQ ID NO: 988678 - protein, 57 aa, Homo sapiens
MKALRRCLHDVITNQSSACQKKKVTETLLNGGSDYDSIKGPTMPGCIIFDAHECMIE

SEQ ID NO: 988679 - protein, 87 aa, Homo sapiens
GKGTLNKGGQRQRWGATVHGDGEALLSGEGGMILVGQRQPPGSNGTQPTLMKTSLTHIQGLCFLTLKLETLLATKDSGWGSAFGEPD

SEQ ID NO: 988680 - protein, 88 aa, Homo sapiens
TVPLDHNQPNPEPNTATVPLDHSQTPTEPNTATVLLDHSQPNPNRAQHRHSSARSQSTKPQQSPTPPQFRYITTKPQQSPTPPQFRYI

SEQ ID NO: 988681 - protein, 36 aa, Homo sapiens
NLAIALALRQPLRGLLLFYPVVTLLPDDYGTSWQEF

SEQ ID NO: 988682 - protein, 67 aa, Homo sapiens
LGDSQDGDTVFTASSSCLVRPWAGDKEEAQIINRLLLPSSHGCLLCTRGRPQQSAQPTTSLTHILPE

SEQ ID NO: 988683 - protein, 129 aa, Homo sapiens
MAAGTLFSYPENWRSFKAAIAAQHSGAHLRVLSAPPHFHFGQTNRTPEFLRKFPAGKVPAFEGDDGFCVFESNAIAYYVSNEELRGSTPEAAAQVVQWVSFADSDIVPPASTWVFPTLGIMHHNKQATE

SEQ ID NO: 988684 - protein, 48 aa, Homo sapiens
GRKLSLLASRAAPLALVIWAAVSAAVMSSGPSLRRCNPCRLGYTGYTR

SEQ ID NO: 988685 - protein, 82 aa, Homo sapiens
TPQAPSSKRYFVCLATVLTFRRNLYRRLHRSGEYTSTRLPSLRYLEVITVLTCRRNLYQGGMHRSGEYTSTWRHSMHSSGNW

SEQ ID NO: 988686 - protein, 136 aa, Homo sapiens
RVQTVLRVQTVPRVQTVLIVQTVPIFLTVPRVQTVPRVQTVPRVQTVPRAQTVPRVHIVPRVQTVPRVHTVPIVQTVPRVQTVPRVQTVPIVQTVRRVQTVPRVQTVPRVQTVPIVLTVLGVQTVPRVQTCAHRIT

SEQ ID NO: 988687 - protein, 47 aa, Homo sapiens
WKADFKGSPRVQTGPSPSCSPSCCLTVIKLLVYDLHAARIDFQIWRL

SEQ ID NO: 988688 - protein, 36 aa, Homo sapiens
DPLLPDPPINNPPSRKLQTFSSVLDTKWKVSLTIGC

SEQ ID NO: 988689 - protein, 49 aa, Homo sapiens
ESKQCPESKQCPESKQCPESKQCPESKQCHLIPTLGSGSSPLSGLEWSI

SEQ ID NO: 988690 - protein, 42 aa, Homo sapiens
LGPHRPGLAAADTQVPGRPQFELDIEPKVSSRLSSTEALNDS

SEQ ID NO: 988691 - protein, 57 aa, Homo sapiens
LDVSDRGQEGEIVNLRNRWSSLGRKTVSDSPVVEQVFHIRKTTIDIDQLVGDRPMSS

SEQ ID NO: 988692 - protein, 30 aa, Homo sapiens
MRWCGTKYRPATEEQVSAHQEAGSSQAELY

SEQ ID NO: 988693 - protein, 35 aa, Homo sapiens
MPFCGSEEADKFTGSLQANAQSLKEYRSILILFPR

SEQ ID NO: 988694 - protein, 39 aa, Homo sapiens
SEARVDTSVVGGLQCVQGLPNSRGSLYVLYVLLCQGLGG

SEQ ID NO: 988695 - protein, 38 aa, Homo sapiens
SSLTDALLLIFLFFCLFLLLFLFFFFLLFLLLLFTSVV

SEQ ID NO: 988696 - protein, 37 aa, Homo sapiens
RVLLQKLHHAKAVVFHGVDMRGAAALNVHCVDIGTTH

SEQ ID NO: 988697 - protein, 72 aa, Homo sapiens
VDPLKSTRLILTNILEVTHGAHVLDENLYSVGMHRSGEYTSTKAPSLRYLEVITVLTCRRNLSREACTAVVN

SEQ ID NO: 988698 - protein, 46 aa, Homo sapiens
GATPHKALNTLLSAQDAHQRPGPASVLPGGPVTCLSERGHAHYGWS

SEQ ID NO: 988699 - protein, 30 aa, Homo sapiens
MAHHNYPHTPYTMPDHPTKRETQTTTYLPD

SEQ ID NO: 988700 - protein, 105 aa, Homo sapiens
GHLMEQQNKIITASVDNANILLQIDHARLAADDYRTRFETEQALHLSVEAEINGLRVVLDDLTLAEPDLEMQIENLKDVSLANLKKKPRWRRGPALQGQVGVEIK

SEQ ID NO: 988701 - protein, 98 aa, Homo sapiens
MLLLLPILQVFAEPLNAQAIQVGSQLAPPSRAASHLRYGDLEPAMSCRWSNERSVLDSGLMYSLPVVGVLPVPAEEAPVRPHVAAIHYLDGVRTGLAL

SEQ ID NO: 988702 - protein, 33 aa, Homo sapiens
MRTVHTTRRERPSAPARSHASTAGCETRPRSDG

SEQ ID NO: 988703 - protein, 50 aa, Homo sapiens
MEGSNGGSSRASSCLLSTRISAELTTECVHTHELWAWMFHVTGSVTVVRS

SEQ ID NO: 988704 - protein, 53 aa, Homo sapiens
MYGCDLGPDVRLLRGYNQLAYDGKDYFALNEDLSSWTAADTAVQITQRSSRRA

SEQ ID NO: 988705 - protein, 109 aa, Homo sapiens
NLMLNSLTGPATMLSTSFHRPKTSTTFLESPQIENNSWVRDIPAVPAAFLVINGLGGRVPPRPWWRRNLVNPSPVQFGSFWGGIPYWGFPILPRLMALRILTGPMALPL

SEQ ID NO: 988706 - protein, 45 aa, Homo sapiens
VSKYDPEQTSYVDAKEATVYVANSEEIIGRGDNYLSLVIAGCPDR

SEQ ID NO: 988707 - protein, 104 aa, Homo sapiens
  misc_feature (43)..(43): Xaa can be any naturally occurring amino acid
MYRNLCTYSTQFCSELLPDRLIQTLQQTHYAVTSGTNVGLPPXVHSGRYEPEVVNSDSSPSNTVTYLHYRLTTSQPSPAHYSYPIQASSTNASLISTSSTIANI

SEQ ID NO: 988708 - protein, 56 aa, Homo sapiens
RERTTGRGFTLAWVKRIYIKTCYGQKLKGILPLSPFISFDHRLQNIAYKINPMPLS

SEQ ID NO: 988709 - protein, 36 aa, Homo sapiens
RNEIAHNSMKKVRGTAKANVGAGKKPKEKGAAMMLA

SEQ ID NO: 988710 - protein, 49 aa, Homo sapiens
VRQIQTVPRVLTVPIVQTESRVQTVPRVLTVPRVQTVLIVQTVPRVQTV

SEQ ID NO: 988711 - protein, 85 aa, Homo sapiens
QCLLSFIADQAGARKIYAVEACTMAQHAEVLVKSNNPTDRILDIPGKVEEVSLHEQEDIILKEPMVYMLYNELMLESYYTHKKYL

SEQ ID NO: 988712 - protein, 116 aa, Homo sapiens
VLVTLVLHTQAARGVVADLPAHRAVIFNFLYESLLAGAGRPGYGRGCPWPAEPRVIISRKGWNMAWKFKGSYGEKGIKLRTMRDLGKKNGGLLVGQLQGRNGRYSGAPSVKNQFRK

SEQ ID NO: 988713 - protein, 119 aa, Homo sapiens
SQDPPEPNSALVFHSFSTHNPQSQWHLSPSLTYPDLAAVCSGPPPSHHHHSHRPAPHRHLRAVAGQGCHFPCWGLQVWGCMSLNCRRMRSHDFPSAKLERDNRHSHRTDWLVPCHYSDS

SEQ ID NO: 988714 - protein, 55 aa, Homo sapiens
SSVPQSPNRALYIKSTMGKPQLPILRHCLDSGHCLDSEHCLDFGHCLDSEHCLDF

SEQ ID NO: 988715 - protein, 41 aa, Homo sapiens
MGWWTYNVLVLFTLGSLAALGGGLGFLGPLKPCCCRYYSYK

SEQ ID NO: 988716 - protein, 35 aa, Homo sapiens
ESKQCPESKQCPESAMEREKEQFRRLFIGGLSFEP

SEQ ID NO: 988717 - protein, 70 aa, Homo sapiens
NNAFWEGGKELDAPGTQSTQCLAAAAVLGLEGTPTGDTSTKECVAQRGRLLLEPPHSELHTFRKSLCRMG

SEQ ID NO: 988718 - protein, 44 aa, Homo sapiens
LSSTASSIEDTFVGYLTGIVWGAGYRMTLLRRCAAMRGYNTGDD

SEQ ID NO: 988719 - protein, 71 aa, Homo sapiens
QSPNSAHSPNSAQSPNSAQSPNSAQSPNSAQSPISAQSPNFAIPQPVFLIPPVFYFGLLEAGLYLDQVFVF

SEQ ID NO: 988720 - protein, 55 aa, Homo sapiens
TLARYPSGHCLDSEHCLDSGHCLGSGHCLDSGHCLDSGHCLDSEHCLDSGHCLGS

SEQ ID NO: 988721 - protein, 72 aa, Homo sapiens
TMIRPQHVVFHSGMLFNTYEVMLSPSILYSRENNIYPPNSDSPPIFYRMNIDIPREAFRSQGSAMKPQPKLT

SEQ ID NO: 988722 - protein, 38 aa, Homo sapiens
IKWVEDENQVFPTYNQLTSCSLNFSIRSQSSSFPVRCA

SEQ ID NO: 988723 - protein, 51 aa, Homo sapiens
IRHYDCSISAIIHHHRGLVLSSHVESGTSHIMFQTKPGRVWTQTWSGVILL

SEQ ID NO: 988724 - protein, 42 aa, Homo sapiens
SCSSLFSTSKLRSVLVIAHAALSSDFDTVDELMLPFSLIFIL

SEQ ID NO: 988725 - protein, 45 aa, Homo sapiens
VLNSLSSLQRCGSPGALLLQRIATLVSGIAGGAIPGAGTRVCARP

SEQ ID NO: 988726 - protein, 45 aa, Homo sapiens
MAVPWGFRSPQHRTVPLLFHWSLFVMLVKSILGEEPHWRCVQNRH

SEQ ID NO: 988727 - protein, 76 aa, Homo sapiens
SEILASISHVFTTSPYEPSCLAQLLTNHAHISAPASSRNPGITTKLPTFSCVTPQSLARVYLQTSGTLLSVPATFQ

SEQ ID NO: 988728 - protein, 64 aa, Homo sapiens
FCRKHAARLPRGSLFHGCGILVCGGLLARRLLWNMAAFQNQTQRGNDMDAAVTEAAPAQSWAPL

SEQ ID NO: 988729 - protein, 36 aa, Homo sapiens
ILDLLSACMVQPAQYLTSSRKPLESTPEASWRRSRY

SEQ ID NO: 988730 - protein, 33 aa, Homo sapiens
ESDIIEDPGIDYLCRRTCSGKVVIVMQRHDRRD

SEQ ID NO: 988731 - protein, 37 aa, Homo sapiens
MQFRKPLQHLRHPQPGSDVSTSMARHSRVYVIDDVQA

SEQ ID NO: 988732 - protein, 37 aa, Homo sapiens
AGLRRSRYARRSRSRRSRYAGIPGPSLHYYPLTRALP

SEQ ID NO: 988733 - protein, 46 aa, Homo sapiens
SWHEDISYEVIALYRRRSTHQRRLKKGVDHHPVSARSTPSSNCLAV

SEQ ID NO: 988734 - protein, 74 aa, Homo sapiens
YLDLLAYLDLLAYLDLLAYLDLLAYLDLLAYLDLLGSFQPLEPKASESLGMFPIQKFRQWVSGWPLRGLPALMF

SEQ ID NO: 988735 - protein, 34 aa, Homo sapiens
MLFPPELSGSVSLNLKEHHCALRRSIPCVTSMAM

SEQ ID NO: 988736 - protein, 31 aa, Homo sapiens
MPGQRQALGWSGLTCQRLCHRRDRGRVRRAL

SEQ ID NO: 988737 - protein, 159 aa, Homo sapiens
SFPLLLVRWPTAAQVLRLSSSVSAGPCFERLLPGVSWTERRTSPCPTCACVLLAFARLNFHPDQEDQFFSLVHEKLGSELSRLETALQVDLVWALCVLQQAREAELQAVLHPEFHIQFLGGKSQKDQNTFQKLLHINANALLEYPEYSGPPSGCLGWWP

SEQ ID NO: 988738 - protein, 70 aa, Homo sapiens
RIASGSAELARHGGRLPHLPIALRNQHRQPTLAVRQGLCLASAPITMMEAPKPLTCATEDAIRLTPCTPV

SEQ ID NO: 988739 - protein, 54 aa, Homo sapiens
FSCHTIPLKCCLFQSASSSVWQSSAGKCIVEQGTYSTQPGVAVAAVGGCGIGRR

SEQ ID NO: 988740 - protein, 138 aa, Homo sapiens
MGDSPTSGDRRWSHLGRQDVSGIGGFLVSVTSRMKLWTLAVSVTVLKDGVSGVCSFCCSDMSRLSSSGGFMVSLTSRVKPQTFAVSATALKGGTSGGVSSSQWVHGLTDFRRMLQTFTVSVTAHKGSTDPKSEQQQDL

SEQ ID NO: 988741 - protein, 34 aa, Homo sapiens
RKCMKSESLVRITDRLTGIAQGGLTLFADCRDEI

SEQ ID NO: 988742 - protein, 33 aa, Homo sapiens
TQAHFFTRSNWITPYYTYAYKTLPNYQLQKCAW

SEQ ID NO: 988743 - protein, 61 aa, Homo sapiens
MGGQTGRVPIILQIPVEPLCPTGSVPDIFSVSLFSSLMKDTGAMGKQLGLPTIYFRWGGPE

SEQ ID NO: 988744 - protein, 68 aa, Homo sapiens
PRRTSPRKQTDLLLFSNRGKPKALSITSLISRLQSLHHHMMGSNSEGRCAPTGSSPEHWTQKCAWVRL

SEQ ID NO: 988745 - protein, 34 aa, Homo sapiens
SCKIIIREQVGLISFVMKGKISFHDYTLSPSDPS

SEQ ID NO: 988746 - protein, 51 aa, Homo sapiens
MDGGNQRGKGMPPQAFDTAFKITLFLCLIRSSPILGVTDARISANTWISRL

SEQ ID NO: 988747 - protein, 131 aa, Homo sapiens
IGRSVHSSIHLIHASVYPSIHLSTYPSSAIYSSIHPSIHPLIYLPIIYHLFTHPSLSSMHPSIHPYIYLRNQQLTSIHPTIQLIHASNYSSSYLSISYHLFTHPSISSMHPYIHPFIYLPVHHVPSIHPTI

SEQ ID NO: 988748 - protein, 43 aa, Homo sapiens
MGQSDFGCCCCRFRELEEGCGWACADCRRGADLEPLVLSAWLD

SEQ ID NO: 988749 - protein, 66 aa, Homo sapiens
QHIHNYEKEVKQLRKANDILKKVHVYYTMTDHAKKVHCNSRFGCECYHCIFCLVNMPSVLDYFGST

SEQ ID NO: 988750 - protein, 35 aa, Homo sapiens
PASAGQMAGGAVLTETVFAWPGIGRLMFDALLQRD

SEQ ID NO: 988751 - protein, 113 aa, Homo sapiens
MLVSTRVLMPTRLQLEFLRRRGRDSLAKKTQGNEGVLRGESRPCQLRISPQLKVSFPQAGLRRSLGQREEQQQGGTGAFYISFRSSRVWSSILCVQRCSSLVHFSLSSRSSIV

SEQ ID NO: 988752 - protein, 38 aa, Homo sapiens
LFTCERDYTGNSITNGDASPRISGMLQHQSGRNRHHDP

SEQ ID NO: 988753 - protein, 88 aa, Homo sapiens
PRPDTARCSAFTWRLQVLRPPIVDHHVIGQCQPLCAAGLGGDHPVGQRGVDAVALHQPGVLHCFRCIHQQHPVQPRIGVTPTDLGQQR

SEQ ID NO: 988754 - protein, 108 aa, Homo sapiens
MVTEATVRSGATAVHAVERLMKELYQRCERMRPTLFRLASDTEDNDEALAEILQANDNLTQVINLYKQLVRGEEVNGDATAGSIPGLSDPTPPSGPSLDGTGWNSFQS

SEQ ID NO: 988755 - protein, 120 aa, Homo sapiens
MAIRMSITSGVNQLIVPPPADVYLSTHQDRRDPWQAERQTNLALGQGFTQTHRQTQGLARTAELHQAARVDAERRRVGRVDHHVGFRHALLDHVRALRHFVTAEQVVVRRDTPAVVRIER

SEQ ID NO: 988756 - protein, 61 aa, Homo sapiens
MAMPHLFSPIGISDLPGVVLGLVVPYAREVGAGEWLGPCEAEPCIDDCTYCIPVLEQRSET

SEQ ID NO: 988757 - protein, 47 aa, Homo sapiens
AGYAGQADCGKIAIMAQNRQGCSELKSHHCTPACGDKCETLVSTKKK

SEQ ID NO: 988758 - protein, 44 aa, Homo sapiens
LYSKMTGSQRIGMFGAQKDDLPAILRNAARRRVLKPGHVLRHWR

SEQ ID NO: 988759 - protein, 52 aa, Homo sapiens
SGSNSTGYGKPSLTAQRYYLFEEVSSDAYTFSRRTSTSLGLERPFALWDGRE

SEQ ID NO: 988760 - protein, 48 aa, Homo sapiens
EDPRRCPLTGQYTHYSLDKKTHKPDYVTDLRALPPPLWATGVKTYDGA

SEQ ID NO: 988761 - protein, 51 aa, Homo sapiens
PDLGARRAGALGVNGVILDYNLLANRYMSGSGGNTASYTLYGTAGVNLGYR

SEQ ID NO: 988762 - protein, 47 aa, Homo sapiens
YCDLLNPAVFELQSGESLARVASEAPLRWCYRPRQHYRTYESLDYVL

SEQ ID NO: 988763 - protein, 84 aa, Homo sapiens
LLEDPRLTAPRREGTVCQQLGRFWMLILVECSRRSRSRLRVAKYSTVGAITPEGNIRLKLVCVPLTLKGKAGIKGQLVGVYFLI

SEQ ID NO: 988764 - protein, 51 aa, Homo sapiens
MYPRAYLDLLAYLDLLAYLTFWHTWTFWHTCDLYALVISALQVTQYKKVQV

SEQ ID NO: 988765 - protein, 147 aa, Homo sapiens
SQCDRLCVAKLPVQVCTCHRNILKVYLTAGAMKKKKKKKPWELGKTGGVLPTGRAQEKVRGCQGGWLQEVPKVGARGIGGLGEAGGAFYHWFFLGPSDVSSLNGAHILFMKMTKPIHNRGMNTPLVVISAFRNKWVLWPSSLMNGRV

SEQ ID NO: 988766 - protein, 36 aa, Homo sapiens
NDGSRWTRMNGGTGSYIMFKLLRSSNLQAEKMVDRE

SEQ ID NO: 988767 - protein, 31 aa, Homo sapiens
MALQHTVWRTLFGSLPTRCDNQGLCRKMHPV

SEQ ID NO: 988768 - protein, 95 aa, Homo sapiens
PYHGHSLTRDEKSRSTKKNERYLSLGKISGEEEWRIGIEIHVDKLKWSLSKSCHSSTTLKKYQNARGCKLKRPHRIYCSHKDLIALAQALWPHIM

SEQ ID NO: 988769 - protein, 33 aa, Homo sapiens
PNVLRHFASFPDSVATAPAPTHLAKHVCSRHIE

SEQ ID NO: 988770 - protein, 34 aa, Homo sapiens
RARYLTALKSYFQYSSELAKDYEIIYTPCHRSHI

SEQ ID NO: 988771 - protein, 47 aa, Homo sapiens
MLFNDDVGTLRDVSRFFQQLGGTHRQIVGLGHARQALALPAHLAVFT

SEQ ID NO: 988772 - protein, 64 aa, Homo sapiens
MKIKRGKKYHKQLESKEVSESMELCAAVEVMEQGVPEKEETPPPVEPEEEEDTEDAGLDDWEAM

SEQ ID NO: 988773 - protein, 35 aa, Homo sapiens
MSVPPSLFIVAGFGLRDRVGDQETLHLGAVDFAQK

SEQ ID NO: 988774 - protein, 52 aa, Homo sapiens
VHMAVETGGRSEVRKEDENGDYTFGQVDNTFLENTPEAVAQAVKTRFELWTG

SEQ ID NO: 988775 - protein, 109 aa, Homo sapiens
GFFPPRRECRGTVLAHGNLDLPGSSDSPASASRVAGITGYAPPTTPGQIFLVFLCKRHGFHTSWARALSSNLLDSHGISPGSLALHKVAGVLQGLEPPAPGPGVYKYFN

SEQ ID NO: 988776 - protein, 57 aa, Homo sapiens
RNDGKPLTRLGAAWAPPHWIRSAADTLLHPEGCKSVVVSATTAIINGQMDAAKASVR

SEQ ID NO: 988777 - protein, 38 aa, Homo sapiens
MAISSACSFGDRFSIVTQADVPAAWCLLYSLTIAVISA

SEQ ID NO: 988778 - protein, 80 aa, Homo sapiens
IRIKPLRTLAWSGSIGEPLPRLGAAMGPASLDLKCSRYPDWIRRGEVSGGVCNNSNQSVVDGERKLSSNQNNHGPHSMQL

SEQ ID NO: 988779 - protein, 39 aa, Homo sapiens
VPRGSNLGNSALQRQPQRREQDEGAAQDQRVHACTVLRR

SEQ ID NO: 988780 - protein, 140 aa, Homo sapiens
HYLDFSGRIHISKATLDCLNGDYYVEEGHGKERNEFLRKHNIETYLIKQPEDSLLSLPEDIVKESVSSSDRRNSGATFTEGSWSPELPFDNIVGKQNVSPLFLLLLGHECMLVCISNPDTSEKTDSSLTFSPMNTIIAND

SEQ ID NO: 988781 - protein, 73 aa, Homo sapiens
TQAHFWNKTPALGQAPWLTPVIPALWEAETGGSRGQEIETILANMVKPRLYYKYKKIEPGVVAGICSPSYSGG

SEQ ID NO: 988782 - protein, 40 aa, Homo sapiens
TQAHFCTHGALLDPGALINAVAICLRCAIVPGVRISASMS

SEQ ID NO: 988783 - protein, 79 aa, Homo sapiens
PVHCASYQPAYLLGSRPRTPGLSHEKGGDPTQSWVTPQLLWRLGSGRLVAQVLQVGSFCGPRVGDAVLGEQTFQPFDLL

SEQ ID NO: 988784 - protein, 46 aa, Homo sapiens
TQAHFWYPIYRRPLLMTSSPKNSPETQTISTLADSLFLLFSPLLNR

SEQ ID NO: 988785 - protein, 38 aa, Homo sapiens
PAVSYLARQHFKKRKIQDLAIRCVQEEHQEEQRGEVTG

SEQ ID NO: 988786 - protein, 130 aa, Homo sapiens
CSYVMPPESPDSEGAALLTPGSPIILTIGSGRSVPPARPGALLCHWPDLVHLGVLTSSDSLKPSSWGQCGISTGHLLSSCLPAGPRNFCSARILCGDSASGRCSFFQFPNLGKYFDPQQASLAYPGGSVF

SEQ ID NO: 988787 - protein, 46 aa, Homo sapiens
MALARELLSTGGILRLRCPVVLTEQHYSGRDGRAHEQDELTEASHF

SEQ ID NO: 988788 - protein, 70 aa, Homo sapiens
EDPAPGALLEERIRSQYHGPEVQDVARGSLKREEFVNTAENQKHEYGGKLPTEMTAAEHSAGTLAEVRLV

SEQ ID NO: 988789 - protein, 37 aa, Homo sapiens
DLYTGYLDLLLPSSTPASIFQYFLHSRTNTTTNREKV

SEQ ID NO: 988790 - protein, 50 aa, Homo sapiens
VDSHLGQLPISKQELSLGCQESPRTGGVAGRRRIRARKQIIGEGGQAKPE

SEQ ID NO: 988791 - protein, 44 aa, Homo sapiens
TRLSRSAPSITAPDVLAIRFSLHCSSVSSSGFGGLSFGSPRSLL

SEQ ID NO: 988792 - protein, 120 aa, Homo sapiens
MPMRVTFIKSSVILDHLLRVSHESITSDTSHMESSPIAAYPSHCTSVLVGSCLCWETNRIGRCSLGCSPIWQPVEVLVLLIVLERYSPPLQLHLEATQVLRYRDLLRLRVRARFRDSSSN

SEQ ID NO: 988793 - protein, 35 aa, Homo sapiens
DRARPGYWTSGIPGLLASWTFWHTWTFSNSLNPSA

SEQ ID NO: 988794 - protein, 87 aa, Homo sapiens
MPDLLRLLDTSVVRELIEDEDSGKSRWSPEEPIGELLMVGRKELICPQYTLASTFLYPREAGPSADSGNILAAVRVRNGIGVARGVL

SEQ ID NO: 988795 - protein, 62 aa, Homo sapiens
SRLSLEHRESNNPTWEQHWALPHWITIAADTLLDPEGCKSVVVSATTAISSGRWRAKAQFEL

SEQ ID NO: 988796 - protein, 68 aa, Homo sapiens
LSLVRNVSEPLPRLGAAMGPASLHLKCSRYPAGSGGVKVSGGVCKNSHQSVVDGELKAQYEIEQTPTT

SEQ ID NO: 988797 - protein, 52 aa, Homo sapiens
  misc_feature (5)..(5): Xaa can be any naturally occurring amino acid
MVVPXNRHELDTQNISLTLDGQQGGTLFSLPTTTTGYSNIAGYSNTGPGAAT

SEQ ID NO: 988798 - protein, 33 aa, Homo sapiens
YLPEVPKSHMKLVEHFYDQLLLTPHTTKPLRTF

SEQ ID NO: 988799 - protein, 102 aa, Homo sapiens
WSLVSAGSIYEISVEMSADSPRGDLIMVSQVLAQKVVCENPNTSQTMELVPNFQVKVGTSAFPMCPGTLLGTPARLLVGLPRSQASHSPPLGVWSQGPHIHH

SEQ ID NO: 988800 - protein, 51 aa, Homo sapiens
MTLLDGSQLQLYTILTRADHDVPCLCMRTHRTARVTDDLQDCMADKMMHIL

SEQ ID NO: 988801 - protein, 111 aa, Homo sapiens
  misc_feature (107)..(107): Xaa can be any naturally occurring amino acid
MCGLPLMCTGTCLLACSPVMLARPPARPGAADWLSLPQVLPLGSPGPGHQLWRLGLELAVSVVSGRGGGGPRLLNLGTGGGTRGSTLLSHPIFRGTGSRERWGPTMXTVHL

SEQ ID NO: 988802 - protein, 33 aa, Homo sapiens
TTIIRPALLDVRLRLPDQYHQTKDRNTITFLYF

SEQ ID NO: 988803 - protein, 59 aa, Homo sapiens
MIKTADLKVVGGKFYRDDDRDEKTIQSLQISAIILHPNYMTPSCLIADIAILKLLDKPR

SEQ ID NO: 988804 - protein, 77 aa, Homo sapiens
RSIRGASYIRGIIRGDLPGLQRADHRLAVEIGGVIGQIDEAARQLHAAHAQRAVVEIGLQDGDHVVLEVAERLHQVG

SEQ ID NO: 988805 - protein, 77 aa, Homo sapiens
PVPGHYSLNGHAWSTKEADLSTAIKQVAQERRDFMFIIAADAKAAHQDVIRVMDVAGQLGFVNVNISTKVPTRGFTE

SEQ ID NO: 988806 - protein, 127 aa, Homo sapiens
VVDLCLQGSAQTVPPGVPIPPEQSKRPLGVHVQRGIGTCLQMAMSRYGGFISCPQPSGACEVQLTNSHAQPLLKAAPCLRLVALVPSPRGLTLLGTEAIRSAQPVFLNGLGLPEGSKAEAHSESIVG

SEQ ID NO: 988807 - protein, 73 aa, Homo sapiens
PRIAVPAVCPGRSNTTMCVFSVVSNFLVQTAGDIQNHVAVIPGDKYLNVSFIISLRISRVGNGVEQLATVMGG

SEQ ID NO: 988808 - protein, 49 aa, Homo sapiens
LLRIPVDVLCGSRAPHVLVLLCVGPVGHKQAPMVSGRSHRVLGIKATSE

SEQ ID NO: 988809 - protein, 36 aa, Homo sapiens
VDRGLARTYAALKEIARSRGNGVSNMHEAEEWYRSK

SEQ ID NO: 988810 - protein, 35 aa, Homo sapiens
GYRAVTSLLSVQNKLRYLEQRISIKFCVKLNNATV

SEQ ID NO: 988811 - protein, 54 aa, Homo sapiens
MSRRGSRTSIIHVSAYICPEESGCTRGDPKPSPLVRQGPDPPARIHNPQATVNP

SEQ ID NO: 988812 - protein, 31 aa, Homo sapiens
MVDYRSVGSLLLTILEKQPSFKYQQRCDMSP

SEQ ID NO: 988813 - protein, 95 aa, Homo sapiens
MPEMNIMMPPGISMPDFDLHLKGPRVKWRCGCFSAKRWKVDLKAPEVDIKGPKVDFDAPDVDVHGPDWHLKMPKVTMPKFSMPGFKGEGPEVDVN

SEQ ID NO: 988814 - protein, 66 aa, Homo sapiens
VTRSGSALRLYGIVFASDIEGADFALTPADVWSALAAQTVQDGALAANAAKTWADVNAELPAQRLG

SEQ ID NO: 988815 - protein, 31 aa, Homo sapiens
MGLTDVAKLPGTTKSTPESADARRGCPHKRD

SEQ ID NO: 988816 - protein, 53 aa, Homo sapiens
  misc_feature (51)..(51): Xaa can be any naturally occurring amino acid
KAGTVRNVLDQEGTGLDTEVEEGHLPVQTVLIYPPTPNHPPIIHPPIPPTXES

SEQ ID NO: 988817 - protein, 62 aa, Homo sapiens
  misc_feature (6)..(6): Xaa can be any naturally occurring amino acid
HGKQVXLSHIHGGYVYPQGVMEPTTSCLYETASSMPVLEAEVLSAGMNLASVGSCICALSVS

SEQ ID NO: 988818 - protein, 70 aa, Homo sapiens
  misc_feature (28)..(28): Xaa can be any naturally occurring amino acid
  misc_feature (53)..(53): Xaa can be any naturally occurring amino acid
ARYDALSVGRCIADCIVRSFTWVSALIXSGCWRESKGHESRFPVHHYFLLCIXNCLHLSMILLQFLFHRH

SEQ ID NO: 988819 - protein, 42 aa, Homo sapiens
  misc_feature (9)..(9): Xaa can be any naturally occurring amino acid
PLHTRIQLXWVVGSTCWGGGPSLCCPTLDSNSCPARTSHTKS

SEQ ID NO: 988820 - protein, 84 aa, Homo sapiens
INRALPVNDSGTGVILYESQAPALTEFGGQHGAHVSTELVQGGMHRELVNTLSTMAPVLTSIWEVSTCAHCVDANLSRGGMHRQ

SEQ ID NO: 988821 - protein, 50 aa, Homo sapiens
VPHLSCLLYIVTQFPLDEHVFHIMQLPRYIHRTRHVGRVILSLVKAYEDK

SEQ ID NO: 988822 - protein, 51 aa, Homo sapiens
MPVVRPEATVDSTAWIATYIAGVLKVSNMIWVIFSRLALWVQGGLGQQHGV

SEQ ID NO: 988823 - protein, 41 aa, Homo sapiens
  misc_feature (30)..(30): Xaa can be any naturally occurring amino acid
SVGTDALSVGAVVSGGDSPRRWGLCEVSLXVDGGSEAEFTL

SEQ ID NO: 988824 - protein, 55 aa, Homo sapiens
RYPLLESFSSYAVDDTALKRSKRLSGFTSILITPSSSMPSSANVLSKAELVQLYV

SEQ ID NO: 988825 - protein, 137 aa, Homo sapiens
MKQQSECASDGGGGADDDTVKVEEAYEKWEKVMALSPMNTSACSPVCSIFERMSHFVSSHNPEAKCNWSPTTPTCMPSAIPIASSSISTSVPSSLHGAVLLGLTSLYPQLGARQPPSIPPSTSSLSTYTTDPPQRER

SEQ ID NO: 988826 - protein, 94 aa, Homo sapiens
MITAHCPIDRKIDFGKTIPEFSKTHLENLTCTSPGRPGHTIRPVRMNNCSRTCPMGALQQTVSGPGSWLSDVCLLGPRCSGDLQMPHRESVGDP

SEQ ID NO: 988827 - protein, 108 aa, Homo sapiens
LSLWGPLRAGSEDVFLYLTRPALPLRTWTSPRLPKEAQAAQHRLVCMPIPRGSRVARGRGRGRAAAAGGQTVQPGGEAGGAVWLGAHALGEGQFPFPTALSATPTERA

SEQ ID NO: 988828 - protein, 95 aa, Homo sapiens
  misc_feature (72)..(72): Xaa can be any naturally occurring amino acid
MTIRINALQLSCELRLVISSQITLFFIPSSLAVKLCAIILDERLVLSPSVPLGLCPHISLPQHGGTTTGSEXTTGSSSTAHNSLHHPVSVEPVTP

SEQ ID NO: 988829 - protein, 70 aa, Homo sapiens
MTPAEHAATVCRPLRKRWVDCFQVSYRKNLRTWYLAKLSGSTVGGVDTSLSDLTEVAQYVSRRTGFLLRK

SEQ ID NO: 988830 - protein, 54 aa, Homo sapiens
TASKRRRGYGEAEDHFACIRTAVPWFSRQIQEHEQESALREQVSGVGWSRRWMQ

SEQ ID NO: 988831 - protein, 69 aa, Homo sapiens
LHPRPLTAHAAERCASAGPKGRVMCAISQDRLTHVQLLFTWNLSPVRATKFSLEYLLLPPRSAPAALDA

SEQ ID NO: 988832 - protein, 49 aa, Homo sapiens
TASNAAITPGEFCRIVSRDGVSLCKPGLVSISWTSVIRRASALPKMLGI

SEQ ID NO: 988833 - protein, 62 aa, Homo sapiens
LNLISLDMISLFNFLSLRHYWMCVLNLVVRPPPVGPHYPWSLYQGRPPSICDSQSGQPLYLL

SEQ ID NO: 988834 - protein, 51 aa, Homo sapiens
  misc_feature (4)..(4): Xaa can be any naturally occurring amino acid
EDPXIIDTVGDDRPTNTDSCLDDLERVGCAAADRSQITSEAMIAICTIMRT

SEQ ID NO: 988835 - protein, 82 aa, Homo sapiens
  misc_feature (1)..(1): Xaa can be any naturally occurring amino acid
XARCAGEEEEERLNGGDMHIKRAPPGRMKRKTNARHNRLKNAPSCCAIATPGYDAYERNTHGAVRMIRSFKHKGLKKFFETG

SEQ ID NO: 988836 - protein, 41 aa, Homo sapiens
HVPASDIQRLLREAPQAIGLAAPDMPVGSPGMDCPAYGGRK

SEQ ID NO: 988837 - protein, 42 aa, Homo sapiens
MNDRLSRLAGALKVSTPRNSLPTNEFQALAITADINDLRHLR

SEQ ID NO: 988838 - protein, 36 aa, Homo sapiens
MWGVLAGWGAKKPGGCKHSYLLQDSVRELGWQSDFW

SEQ ID NO: 988839 - protein, 55 aa, Homo sapiens
MREGPWSSLGAGGPSSRYFSEILPSPRACGLALRIFGGMPQAWKVCGLPESQGAD

SEQ ID NO: 988840 - protein, 79 aa, Homo sapiens
  misc_feature (1)..(1): Xaa can be any naturally occurring amino acid
XSRPVAVISGCVALAWMWAAVAPNWLSLPATCAFMRISEWRRAQVCRALILRIFRPSTSLVSISVSLARVSTNWPVGEL

SEQ ID NO: 988841 - protein, 144 aa, Homo sapiens
VPRVSPVTGLEPSWGVGGRLRFRTLVIFLGMDRDQSPDLIAHVVSASPDGEGNARENVTEFGAIFPFSSVLGGMALPVFGCELESSSVESQVLVPRWSLELNKEERHWGSRGPDSCGGSCCHAGLPLEESHLSMSCYHTAVHPP

SEQ ID NO: 988842 - protein, 44 aa, Homo sapiens
MSGVWVSSFHSNCSRRMLLPRGSEGRPRHAGNAVSDQLPEVEGT

SEQ ID NO: 988843 - protein, 94 aa, Homo sapiens
ALEDPVLLGMRFGSGWLHVLIDRESQEMKPQRWAWPGVIKRPNARPRSVGPEELCRVLSKEGPMWFGLRGVRRTQIELGKQEGVENANWTGILL

SEQ ID NO: 988844 - protein, 47 aa, Homo sapiens
MDYVMDGMIHVCQPSVGMRRRDWNHTNGVRDFCKRVGVSKSDGIVDV

SEQ ID NO: 988845 - protein, 116 aa, Homo sapiens
PQPLADRHPRQQLSAVSLDLRFTEIGIRQRIEEQRGLLPAGGAFGGNLQLAVAVTGLDALRHPGGDRHLPHRLREVVVKLRIVRRRQIQTERVVGQNADVAAGGQRQGARQRAGYR

SEQ ID NO: 988846 - protein, 47 aa, Homo sapiens
MLLLSHGTFSLRLKVSLILYYTDLTGWSTGPRLGLRLTQRPPTRRGV

SEQ ID NO: 988847 - protein, 60 aa, Homo sapiens
  misc_feature (21)..(21): Xaa can be any naturally occurring amino acid
  misc_feature (41)..(41): Xaa can be any naturally occurring amino acid
  misc_feature (49)..(49): Xaa can be any naturally occurring amino acid
  misc_feature (54)..(54): Xaa can be any naturally occurring amino acid
TPLEGNILGTGAKHGTQQRNXICPSNVFHSIQATQQSAQVXQARIQHHXLVQFXHPSTRI

SEQ ID NO: 988848 - protein, 63 aa, Homo sapiens
MGSDPRIQCGDWRGGVMCGTRRPESEDRESSLTGEAGSLDVCLPRERGPCLGKRRGPGGVGWQ

SEQ ID NO: 988849 - protein, 105 aa, Homo sapiens
LNPTPRSGETSGNFHPCQKGKGSRHHMAREKPREKRRKCQGLLTTSSLENSRVRTHSSLQEWHQAIHEGCTPIFPTPPTKPHLQHWLSNYNMRLGGAWWAALDAV

SEQ ID NO: 988850 - protein, 144 aa, Homo sapiens
CINAAGYMVVYLKDKSCAITVTDQSCSRDMGEIARKHEYYNQVTQYRGPTDSIDVCLRRVRMIYTSDVDKNRAFDMGGSARCQVEDGSIPVSEEVLSLTGVGRIFPKKIPCLLLNYHWLNHSTLQIPVLITQSRFWDDRTKNLN

SEQ ID NO: 988851 - protein, 33 aa, Homo sapiens
PYCINASRTLRRDDRRALRRSTRAAALDAVGYR

SEQ ID NO: 988852 - protein, 50 aa, Homo sapiens
LDQRRPSLSRKGVLVEIWIFSPAIGGKKAFSLNSLSVTSGVGCSQRRWMQ

SEQ ID NO: 988853 - protein, 33 aa, Homo sapiens
RLTGVDLRYSSRKLWYAIFPTVACRGVGCSRVP

SEQ ID NO: 988854 - protein, 38 aa, Homo sapiens
CDLEDPDCINAAPDRVRSRIGVAALDAVSGVGCSRVPS

SEQ ID NO: 988855 - protein, 74 aa, Homo sapiens
VDLEDPDASNAAYRILHNFIYITQNVDSVWFVQYIHKIFDILLLGGGAEFPSHECGLDLVTPFMSRVWTGNKVT

SEQ ID NO: 988856 - protein, 69 aa, Homo sapiens
TASNVRSGKRGVPFHAVEACSLLFALNLAGAHSLGPRRLYELVTLTEKVCSFTPEASETMNPLGGKNNS

SEQ ID NO: 988857 - protein, 172 aa, Homo sapiens
SDAELTAMAGAVTVVAYGVSVTYTAHCHFGGLFPYFIQNGLWRTYRLVETCLSSLIGRYPDTRRHDVNYILSFGMVRAVISLECALLRIRPWFLADMLSAAGGGNPVQTCPRSARAIIRQIWWERLQWMAAYRNGRTENPYGACPYVVSPHDRLENLGQVCKPVASHEWEAG

SEQ ID NO: 988858 - protein, 79 aa, Homo sapiens
RLGSSEEEEDEEMQWKKGMTLEDPKARVRKTGRGDRKVSDDGVVMTSLVSNVSEEVEKGRAVKNQIAVWDQLLEVKDQT

SEQ ID NO: 988859 - protein, 67 aa, Homo sapiens
LQFLMSDLVCGHGCNMGLGERGGLVRRAQQLLRGEIRDDADASQSSQSACIVAEFSSVQDLLVLEKV

SEQ ID NO: 988860 - protein, 41 aa, Homo sapiens
ERARDACLLTVGSPVDSSKSAARRRRGEAPRGRGWMQSGTE

SEQ ID NO: 988861 - protein, 34 aa, Homo sapiens
MWARRVLNSGTRVIHPPGPPKVGGLRSGANGGLG

SEQ ID NO: 988862 - protein, 39 aa, Homo sapiens
LSAVTLRGSDSSNAAVTVTPLTAFNAADCINAADCIQRC

SEQ ID NO: 988863 - protein, 56 aa, Homo sapiens
TSHGWLLQHRQHPRLETTDTIFRYLSYASYKHLQQTFLVKNSLFKTQRTTSQPWTS

SEQ ID NO: 988864 - protein, 114 aa, Homo sapiens
SHGWLMPVIPALWVAEAGRSLEIRSSRPAWLNMVKPPSLLKIQKISQAWWRTPVVPGTQEAGAGESLEPRGAEAAVSQDRATALQPDDRARLQLKKKTSVVLEKDRHFKTNGIE

SEQ ID NO: 988865 - protein, 59 aa, Homo sapiens
  misc_feature (56)..(56): Xaa can be any naturally occurring amino acid
SPHAGCASLLPCDGHQYDGCCFRIIHGDHHLRDVDYRYADCQSLRDCDGCCPVFSXIFL

SEQ ID NO: 988866 - protein, 37 aa, Homo sapiens
LTLEDPESEQQKEALETNQELRKALQQLQEELQNKSQ

SEQ ID NO: 988867 - protein, 145 aa, Homo sapiens
  misc_feature (107)..(107): Xaa can be any naturally occurring amino acid
SSTETLSLLGSLYSLRQNSIEIRPMNNLPVTSAGSSRAKIHTSLTGNQKLEMIKLSEEGMSKAEISQKLGLLHHLGLVANAKQRFLKVIRSATPVNTGIRRKQNSLXADMQKVLVVRKEDQTSHNIPLSQSLIQSKALTLFNYNS

SEQ ID NO: 988868 - protein, 143 aa, Homo sapiens
WHAQASTESDSRGAIYSIPIMEDGGGGISTSQKTQHEAPQDAPENLKHSPWYRARGSQKRQRRHCRQKSNLNINQQKSRQYALKRRRCADAALWSWPSELISSGPVSPFSPRSQQPRRSHSSQALARAVLQPGCSHHFTDGES

SEQ ID NO: 988869 - protein, 59 aa, Homo sapiens
  misc_feature (37)..(37): Xaa can be any naturally occurring amino acid
  misc_feature (52)..(52): Xaa can be any naturally occurring amino acid
VASRRIPTYVHRLGYQTRCRRRLPSDTGERDDLDTYXSDGLYGRVTTTTPQXNTCNYTH

SEQ ID NO: 988870 - protein, 82 aa, Homo sapiens
PRLATSPRVGIVHGWLLVHSQSYKEAFCAGENYPGNRVDLANVQELVSWVCHCDDDMVQRLERDFKMSLQLKSSLEQLGCVS

SEQ ID NO: 988871 - protein, 39 aa, Homo sapiens
  misc_feature (5)..(5): Xaa can be any naturally occurring amino acid
LVTVXLRSHRNNKGEMKGSAITGPVAKECADLWPRNASN

SEQ ID NO: 988872 - protein, 45 aa, Homo sapiens
FDGDSPLISDDAPPVDSMYQSVCLISEERNECVIATAGIMAVSHT

SEQ ID NO: 988873 - protein, 95 aa, Homo sapiens
AGITGVSHCAWPGFTILNAIKNICGSWEEVKISTLTRVKLILALTDDFERFKTSVEEVNYTCSGNSKRVSVELVRRGLSFINHQLAHAIDFSFGI

SEQ ID NO: 988874 - protein, 36 aa, Homo sapiens
SSTETLDIVLCVLDVESGNISVLEGVPENVSPGQAF

SEQ ID NO: 988875 - protein, 54 aa, Homo sapiens
PWLAQLEEFLNQSLPFYFWMNGDRIDSLAENDRAADACVELHAGLFQAGLTLFP

SEQ ID NO: 988876 - protein, 80 aa, Homo sapiens
VSCRYYSPEQPHWVGSQSFQDALRFAFVLTGHTCGLLITRSSSSCTCTPLPMGAWGRLNCYKVPVRCLVNSMQSFLNKAT

SEQ ID NO: 988877 - protein, 145 aa, Homo sapiens
SQIRPWSAPKVGRGDLDIQNAWEAMSWEPGGGHVWEGLAEIWARKLSSGPSALFLVPLGSKGPDALEVYLAGRLSWLWGTPSEGPFPVLEFYGHWCLRWLALDCSSNLWEKTGCLDPVGPYSNLSLFFDMIEAMLCQPPEEATVT

SEQ ID NO: 988878 - protein, 104 aa, Homo sapiens
SISPYRVQYQEGTRFGVVFLDENVLETFESHYSRSLALLKGESKMTEVLAGGDMKLLRGKDDKATVNPRATVNPQATVNPQATVNPYAPVNPQATVNPQAPVNP

SEQ ID NO: 988879 - protein, 116 aa, Homo sapiens
  misc_feature (15)..(15): Xaa can be any naturally occurring amino acid
NKEPVKRAHTQFCSXHQTKIRVSRNPSQVKTKTKVSSNPSQVKNKNQSARRGTPWVIRPHFHSNGVGKFPRPILSSNSNQNQSANKGTPWVIRPCFHSNGVLQFKDYLTSLDVRLQ

SEQ ID NO: 988880 - protein, 85 aa, Homo sapiens
AGVGIARQRPDFVMLSSWYDYEIWLQRVGGGAPGPLGLLGVRALEHQPEQEQKRKSRDPSLLGSPCQTQSPMSLNFSSSQFACLA

SEQ ID NO: 988881 - protein, 37 aa, Homo sapiens
MPPVASWASSSRRASSVGISSFFMAWKSEMVWESPLR

SEQ ID NO: 988882 - protein, 58 aa, Homo sapiens
WYEIEFGTETGWCTSIVPHWLLGVRPVDQQPQQEHKRKRETLTAGESLPYSVPHHTES

SEQ ID NO: 988883 - protein, 86 aa, Homo sapiens
LKALMDEHNAALRTAGFPNGTLGKRPSGSLAEKTQRSALEATCITPTEHGRSCSTRGTIPTSSANVTQRRHPLAANAPSTRFQQQL

SEQ ID NO: 988884 - protein, 49 aa, Homo sapiens
SGGVHRLDSHRKKQQKSARHCSATYEEAQKKKEDALNETRGISSTKLKE

SEQ ID NO: 988885 - protein, 66 aa, Homo sapiens
SDLVHQSLAFWDGFVNSLITEQKLTNHPRSSTDVQDNSISVKWLAYQDSPDYLVTAVTTHTQTMDH

SEQ ID NO: 988886 - protein, 38 aa, Homo sapiens
DDIHYAIVCGFRSDSPQLLARTTSQFLRLSVIPGKRGI

SEQ ID NO: 988887 - protein, 44 aa, Homo sapiens
MAFHLLFYARLVFRIALSPAAVACTCSPTYLGGSSGAGALYDYG

SEQ ID NO: 988888 - protein, 80 aa, Homo sapiens
MEKRTPHEKEKYQPSYETTILTEVFSMSPVDHSMSSNSHITVASTSSHYAVFLYGEAKVVHRNAPSQTPPPSSSHDNLLT

SEQ ID NO: 988889 - protein, 57 aa, Homo sapiens
KRKSVICAQRSPHTCDGNSCTDTLCTLNSQGAKPEWLKIASIDMNRHKEQHFITIKT

SEQ ID NO: 988890 - protein, 49 aa, Homo sapiens
PEWMERAGLGHVEQAGSGVQEDPDGAQQHRSLGTCETEEVRTKVGTPVP

SEQ ID NO: 988891 - protein, 40 aa, Homo sapiens
MRLWVCQYLRRRIRVQVQGSGSVSVLGGKMWPWYEDLSLS

SEQ ID NO: 988892 - protein, 46 aa, Homo sapiens
MPDTLTSDTYKKWKLTRMDGNWRRGSSAEVAGTYPNTFWMNPQYLI

SEQ ID NO: 988893 - protein, 114 aa, Homo sapiens
MPRLQMVKKMVNVQAGVMASLDMGCLVGNDPEQVQETASYAKPIFSGYIKDTSILTGNSRAVSVTGLLPVYVVASEPCTEQGERSHSRIAYGLPLVLPGVGRLDAFPVTGFFLG

SEQ ID NO: 988894 - protein, 76 aa, Homo sapiens
AGSPGKDAEDREIMFLGTAICEETRLRGPLRTSPPVLQVLPMMRDEQMAISGWGHRCTETYVVSKIRHSDRAYLSD

SEQ ID NO: 988895 - protein, 44 aa, Homo sapiens
VDIHRASPAAKSPSAPLMEQWLSLSLSDTVEKLKDEVLHGDSIS

SEQ ID NO: 988896 - protein, 45 aa, Homo sapiens
LLHRHTRSHLHTAAKHTAHSTNTAHSYTIHAAHTLHTLSTHLHTH

SEQ ID NO: 988897 - protein, 68 aa, Homo sapiens
LSKQVAHSDLMHSNTTCTSIARHPGTLVSTHTVVTSAHTCLHAHAHRYINMHACLHAHKRLLEMLSTH

SEQ ID NO: 988898 - protein, 34 aa, Homo sapiens
MWAPLDVFYSTISISSVILLLSSPTVIEHVKFVF

SEQ ID NO: 988899 - protein, 118 aa, Homo sapiens
MAKPMDHDSSRAHRSLRQERVIECRLYIYSYLLITREDKLVGQGRGGRCSPSMGTAHVTQAGAVVSRGSRWAHPARQPANYSLEPPGDRTPPPTSHTCAEGFLPVGRGVPAPGWILSP

SEQ ID NO: 988900 - protein, 36 aa, Homo sapiens
TERVMAFGVHPRSEPAEPAGPSSPASVTVTVGDEGA

SEQ ID NO: 988901 - protein, 53 aa, Homo sapiens
KGLRPRKRDDGSSILRATVESTPPGTPTPIETRIKSTEHGGPIAGLNYFGRLF

SEQ ID NO: 988902 - protein, 115 aa, Homo sapiens
DCVVKAVKVEERNQDELQRVLKARWVLERMRRKLKLNCVVVANIGVSSTKPQKYNFTDIFESHVCPSLNALLCHPEVTAIQHSVLIIPMSFFIGFLNLEYPWRQLWQLKLNCDGC

SEQ ID NO: 988903 - protein, 141 aa, Homo sapiens
LVKFHLMAFPRMPCALGLESSLHFHSGGRRPRFTQILLNISHFDRCSPRRNSLISSLLPGSCFPNWLHRDGQDPQTTLTVSGVQVDELTCTLHFGLASLGGHVGDDAHDAPATCPGLPCARRLSSADNSCLERAQRQSSRN

SEQ ID NO: 988904 - protein, 89 aa, Homo sapiens
VSSSVPRGPLVRGIMTPVLSLESPYPLSPYRCLVALGGGCDVPLWAAFSAQEIQDDLRVVMWLEGQAWQYRGLMMSPPPTERASVPKLR

SEQ ID NO: 988905 - protein, 39 aa, Homo sapiens
SRGSRVSLVAKKQRERKTLQRKVKRLRSKRKRRRREMGK

SEQ ID NO: 988906 - protein, 153 aa, Homo sapiens
VSCRRRKIFEELTLRQAHACDALPGARRWACLIIIAGGYFRQSLTYLEAYNPVTGPGSWLADLQVPRSGLAGCVVGGLLYAVGGRNNSPDGNTDSSALDCYNPMTNQWSPCAPMSVPRNRIGVGVIDGHIYAVGGSHGCIHHNSVERYEPERD

SEQ ID NO: 988907 - protein, 37 aa, Homo sapiens
AFPLGCQKAQGNGKPRSAASVKPSKKQEEKEKKGKGK

SEQ ID NO: 988908 - protein, 39 aa, Homo sapiens
RIPASHWLPIKQEGKENLVQRKCETTKKQEENGEEGKGK

SEQ ID NO: 988909 - protein, 74 aa, Homo sapiens
MVSPKEALSASTAADFGNMVLMFTSPLRSTKHITTLKPENPKMQPGISQCFPTYFHHSIVTAWNNCAAELVAEE

SEQ ID NO: 988910 - protein, 53 aa, Homo sapiens
SQFRDVMIPTTYPPAAAVCRGCKAKPIACRFFQEVRERSLVPVYALSYLYSSS

SEQ ID NO: 988911 - protein, 37 aa, Homo sapiens
KTLMPKATSDGCLGLMLTLELELDPTEEKKWLHDRRG

SEQ ID NO: 988912 - protein, 113 aa, Homo sapiens
PPPYAVCCRGLVIALFSPTLSHVPVAAGERWSQATVLGSGFTMLPKLECSGAISAYCNLHLPGSSSSPVSAFPSSWDYRRTPSHPANFCIFSRDGDSPYWSDWLQTPDLQVIR

SEQ ID NO: 988913 - protein, 123 aa, Homo sapiens
MNDARRKRKQAGIVSLTPSTKADGGVGTTAQPLSVRKTVKGLDDLDADAMMAGQAVHEEVDYSEKLKFIDDEEEEEVVKDGRPQCWDPRRQWQLSMSSADSADAKRTREEGKDWAEAVGASRN

SEQ ID NO: 988914 - protein, 48 aa, Homo sapiens
EAATGEVQLRVRYSYGEVSMLVEGVRERRCQRVLRRILSEELFVSIHG

SEQ ID NO: 988915 - protein, 62 aa, Homo sapiens
  misc_feature (57)..(57): Xaa can be any naturally occurring amino acid
MAVCVPLRQDLQSLHIKEMCPGAMRGWLQLAWGQLLDEGLCVESTRVFLLCIPGKRXPSRAP

SEQ ID NO: 988916 - protein, 47 aa, Homo sapiens
MLHGDCQDLQKQHSDPCALNPAHDHGSPEECVRCVLTSLKLETWVPE

SEQ ID NO: 988917 - protein, 53 aa, Homo sapiens
RVRTARKAPTGPGTRLVDVTGKDTVTVSSTSCLKVGHRMDKPANCTHDLYMIM

SEQ ID NO: 988918 - protein, 43 aa, Homo sapiens
ARKDPRTDSMLAVVPGALVVCQHVGLVINQQEILGACISHLTG

SEQ ID NO: 988919 - protein, 33 aa, Homo sapiens
WLQRRVLFAEQDHVQIAFDPAVDLQRRDAEHLA

SEQ ID NO: 988920 - protein, 43 aa, Homo sapiens
MHAQLLQHAVWSPGHSGHWLFWDSPTPSSCSMAVVLRLGLQQF

SEQ ID NO: 988921 - protein, 88 aa, Homo sapiens
SYSSHEQCSYVGEVVRAMDKKKVLVKATSLKVNLSSTAWTKNIDINCCDTTIAGIAAKSMIANTLHNDPVPINGISHLYKRAMLELNA

SEQ ID NO: 988922 - protein, 56 aa, Homo sapiens
MGVGWSSPSSSHYAYNNDRHMHVPLQKQSQVSSSHTGTGRNKSSLSVPHKAAVPHP

SEQ ID NO: 988923 - protein, 84 aa, Homo sapiens
METGGAEGTGDAVLGEKVLEEALLSREHVLELENSKGPSLASLEGEEDKGKSSSSQVVGPVQEEEYVAEKLPSRFIESAHTELA

SEQ ID NO: 988924 - protein, 68 aa, Homo sapiens
VSAERMATICHIQLLWEHRLLFGVSSPTARRSPTPARRGQHNCSESQELEDPSSGLGVSKQDLGPVAM

SEQ ID NO: 988925 - protein, 83 aa, Homo sapiens
VERERDIDFPEFLYHDGQKMKDTDCEEEIREAFRVFDNGWEWLHQRRIAAVHVMTNLGEKLTDDEVDEMIREGDIDGDGQVNY

SEQ ID NO: 988926 - protein, 38 aa, Homo sapiens
GSGERKDGERENMKGGLVEGPVEQVSGRDRPGTCKGAE

SEQ ID NO: 988927 - protein, 59 aa, Homo sapiens
MGRYSFFSFSFLDSCLYHHLSIKFSFPLRMMAVFGTAGARTLTDTTLAPDTFQTDCSDL

SEQ ID NO: 988928 - protein, 38 aa, Homo sapiens
GEVQFIKSNGQMPHRVTGPITDVIVNELGTWLAGRGWL

SEQ ID NO: 988929 - protein, 117 aa, Homo sapiens
WVRYRLEAQSGHPRCSVPAQVQEVIPRWAGVRRGAVAVRGASAPGARALASPGDYRSMTGSGSATTDMRIVCIRFDCFVIFAEEGAVLLAAGQGGGQASLTWTPELRAPPISRPHNG

SEQ ID NO: 988930 - protein, 80 aa, Homo sapiens
HVLDHGICWAVDQIMCVPKHWWCSPCVCGCLEIFCKNSSSRLQESLAITQGPYSIRVSPSTEEQGAEFQVRGGADNQSYT

SEQ ID NO: 988931 - protein, 90 aa, Homo sapiens
IPFPSERMMKFRLYAGTLITGQQIGEVVQVYRKKYVIYIDRVQREKANGTTVHVVHSPLAMVGYQKLKLDKDREKILEGKPNLAKYDGKG

SEQ ID NO: 988932 - protein, 40 aa, Homo sapiens
IKYYSYHHLRKYLVEEDTSSPGSPVSFREKSSATSRPPLS

SEQ ID NO: 988933 - protein, 44 aa, Homo sapiens
WAVVPEQGQEAEGVMRMMGLSSVAALEACFLFFFLFLLIAASFM

SEQ ID NO: 988934 - protein, 111 aa, Homo sapiens
FGLSCPECQTPPDVHRCGCWCFASYWLSSIFLSRLLLAFLSGFDVCSPGNSFAKSSDLVDYVSLHMATFTLAKSHDMSDLGSLYCSLMMGTNVMCWAKTFCYVTPSRWTLK

SEQ ID NO: 988935 - protein, 48 aa, Homo sapiens
LGCRARLRDLMSAGDQCQADSAFWVPSPVSLIRPGYSEPWDDKVSRSH

SEQ ID NO: 988936 - protein, 41 aa, Homo sapiens
LGLCRKCLVGLVQPASATLYDYYIPDAADVLVFYRGTNVRA

SEQ ID NO: 988937 - protein, 99 aa, Homo sapiens
MAILLLHVVLHNWFGLGKLYLSFSILKHCWEKLWFMYVASIAWLRGELKEFTFILRGLISISHSTSQEVKVIVCLPSKRRVWTPTLQDNNIPPEIQLSG

SEQ ID NO: 988938 - protein, 63 aa, Homo sapiens
VCSVCAVSRLCAVCACVCCVLVCRAVCYCAVCACVCVCDAVDAAVCSCVCSMCVSLDTDRPKN

SEQ ID NO: 988939 - protein, 57 aa, Homo sapiens
LLSCNCGGPPSSREVTTNDVRTELRDTSIVDMLHYKPRNSWVSKRSVPRSDLPRLLG

SEQ ID NO: 988940 - protein, 79 aa, Homo sapiens
HHLAIMVNRRVGLSLGHEGIVKIPWVELMPGFIAPPFQDNRERMKRSSRVGTHPQEHVSGTLDAASGCCAHVFGTVTPD

SEQ ID NO: 988941 - protein, 38 aa, Homo sapiens
DRTTNGHDSLNSIHSPQRLFMTHCMLILCAGKVHDRRG

SEQ ID NO: 988942 - protein, 143 aa, Homo sapiens
LKLVIYLKLSGFASKWLYLQINAITVHCECHDLKNYQAPLQAQDQVQGRIFLDLVLDRVRSSSICLVALISAPLLWGYAVLMRFCPSISYVSVLSPPDVMVLPVRVFTKIWIPALTRRTRLQGRLLLDVVVRRSAAIFQLFAC

SEQ ID NO: 988943 - protein, 62 aa, Homo sapiens
MHEVFATHDWPVLALLTRIPMPDFCAPPRGGEGVAQAVASWEGQEASLFPLWSGLWENAMIP

SEQ ID NO: 988944 - protein, 42 aa, Homo sapiens
STGSPHVTWWSPVSREVTIIVCAHLVLDDPSRLYAHYSPQNS

SEQ ID NO: 988945 - protein, 39 aa, Homo sapiens
EDPHKAEDVVRSSLQTCQTLLPATRELLRQAKHEANRGL

SEQ ID NO: 988946 - protein, 42 aa, Homo sapiens
FGAVVTVNACAEEYMRVSGAHASGCTGVPGSSCSLLITSYIR

SEQ ID NO: 988947 - protein, 46 aa, Homo sapiens
LGVVLQSEPVGSGLLRTSQLKDGTQIRPVVYQFVISSQDDETHSWR

SEQ ID NO: 988948 - protein, 64 aa, Homo sapiens
APWQAALGNGCEREAYRQQDRERYWCCHDWGIARTPIVDNPAESQHDGDPSDDVLPRTVRFNEG

SEQ ID NO: 988949 - protein, 101 aa, Homo sapiens
FGLCACGSVVFVFVEPWSSLCARDEMIVVTVLDPWIHFLRSDLLASDVKQPEVEVLECDVGFYDASGFEPGSEDVLARWAGKSAAPIRSRLVQVVFGRVVE

SEQ ID NO: 988950 - protein, 41 aa, Homo sapiens
VSDLTRSPSMPGLQIHEDGPRNILVTSGFIVLNMDSLQLYL

SEQ ID NO: 988951 - protein, 55 aa, Homo sapiens
PWRVETAEITCALNQDAPCPSRMQPKIQKDPSVLAVRENREKVVEALTRSCSSPV

SEQ ID NO: 988952 - protein, 50 aa, Homo sapiens
RSPFILASRTDSARWSGNTSLSSLAGLSSSTFRSRESYHTSLTTGTRWAW

SEQ ID NO: 988953 - protein, 55 aa, Homo sapiens
IRAAQFRMQETIITTMKWYIEWRRGVVHRGYSEALDYFYVQGLVVLGEKNPDMSS

SEQ ID NO: 988954 - protein, 67 aa, Homo sapiens
DPPFHPELGLYPGMSKDSFEVRTKTESAMSNFFYRHNFAMAVSQTYANGHTSLIISYNGLMLSNKKE

SEQ ID NO: 988955 - protein, 84 aa, Homo sapiens
QYVRSSPRRGTWGTGPPYKLTKALQEELLLKTAEDLRSHAWYHGTDPPTGCLKTFCSETGDYPWVRDSRDPALGSHGLPRLEVR

SEQ ID NO: 988956 - protein, 35 aa, Homo sapiens
MGGGWDSSSKWCLSGNRGPGELGPGPHGPPPPPHI

SEQ ID NO: 988957 - protein, 41 aa, Homo sapiens
MCGMIQTCELVQFVQRVMSLDEKQLSHQFPMPDCAFSLQRF

SEQ ID NO: 988958 - protein, 92 aa, Homo sapiens
MILRHLGVSRGEEPENLEVRESADRYTGNDRQMLEVKQLSTIDPKTDDCDAGMWDAETERQKKEGWNRQGMMSEGVANEGFGKIVGSMPDSH

SEQ ID NO: 988959 - protein, 58 aa, Homo sapiens
MANTLAGVQHLGSYQWDFDSYDILRGLRTPVIADLGLPGSGDLFALVCENPLPVQSWT

SEQ ID NO: 988960 - protein, 67 aa, Homo sapiens
SWLKNSKRMTCAGREENMIVPLYQNISNVPLTEDTLVRIWFTGYWLTSIDVGCSEFSSQFVLLPQSL

SEQ ID NO: 988961 - protein, 42 aa, Homo sapiens
MAPFGGHSVEASLQLAFWRRTQPDFPDELDTSFFAREGILHE

SEQ ID NO: 988962 - protein, 77 aa, Homo sapiens
MIVDIPGDSSVSGVFRMRPTNSSRTSFQQIWLPVSCSSSHRNPSLDALVEEEVPMHGMPPIGFYHVQKIAVAVTKSF

SEQ ID NO: 988963 - protein, 89 aa, Homo sapiens
MTIGVPAPIPRLAFPSRYTVELFEQVGRAMAIAALDMAECNPWPRIVLSEHSSLTNLRAWMLKHVRNSRALSSTLNVGVNKKRGLRTPP

SEQ ID NO: 988964 - protein, 53 aa, Homo sapiens
DIFETLQHPRHVSCYPELCYPCTPLAVPHGIVMRLRMTGSTTLCPSKRGMTSP

SEQ ID NO: 988965 - protein, 42 aa, Homo sapiens
FRSLEECIRISLQAPSNRTIREPIANMSFYVHTGSPHIFKTD

SEQ ID NO: 988966 - protein, 42 aa, Homo sapiens
DKSLKIFNPAEIEKYVAEIETSKRRKRKEETKESIMMNQMSQ

SEQ ID NO: 988967 - protein, 45 aa, Homo sapiens
GSLSPRLEYNGVVSAHCNYPPTQVRSRYYPPTAYLTRLSNSRNSS

SEQ ID NO: 988968 - protein, 75 aa, Homo sapiens
MGLSAGQSQLLVSLLLLLTRVQPGTDVAAPEHISYVPQLSNDTLAGRLTLSTFTLEHPLGQFSSHNISDLDTIWL

SEQ ID NO: 988969 - protein, 43 aa, Homo sapiens
AANSWTGTTPAPASGTRSAPGLGWSYQRSAKASLVYCSSWILA

SEQ ID NO: 988970 - protein, 80 aa, Homo sapiens
QALQKLGSSKKAEERAKIISAIDQDVEEKTVFLDGLEEEDYKTKLFQFLKLRKYSIKFTEEKRMDKDVIQKWTFKDQVSM

SEQ ID NO: 988971 - protein, 98 aa, Homo sapiens
RATRIQLQLSGLAVPGARGPQHIDENMAPSGLDSADLPPPSALKKGSKEKQADFLDKQMSRDEQRARAMKIPFTNDKIINLPVEEFNELLSRYQLSEA

SEQ ID NO: 988972 - protein, 34 aa, Homo sapiens
MKAAGSTRSVDQEHDIGAALDTTQYSKHPPQLVV

SEQ ID NO: 988973 - protein, 48 aa, Homo sapiens
YDESVLTFLICVSSAVQFTVVAKRLVPCQVTRGRIKGSLESRGTSPPL

SEQ ID NO: 988974 - protein, 42 aa, Homo sapiens
SSEHVSTFSTRLVESPRGGPGGAVRTLLRCLGPLDAFSRPST

SEQ ID NO: 988975 - protein, 43 aa, Homo sapiens
MAVRREGTQGKKGKADAGKEGNNPAENGDAKTDQAQKAVGLVG

SEQ ID NO: 988976 - protein, 34 aa, Homo sapiens
DIVRRLRDSRPNAHAPGGNKKRPAKTAGPFGYEA

SEQ ID NO: 988977 - protein, 161 aa, Homo sapiens
WAVSAVPHCSMSSTPRVKGPFVTWSGGYGTFCYATALNESLDNNTLIPLDEELATESKTHRAYLNYKVCLDRGVPVIKHLLYHFMNRRGDYDDPKVCANEFKEFVEKLEEKFSSALRNSNLEIPDTLQELFARYRVLAIGDEKDQTRKEYELNSVDDIHFL

SEQ ID NO: 988978 - protein, 34 aa, Homo sapiens
MLRFIIKTPHDHHRRPKSSIGMAKGVNDAGTPGS

SEQ ID NO: 988979 - protein, 64 aa, Homo sapiens
DVFPPAQPAGLGGYWQLTLTWVSLFLLEYDRGCRGVLMASDNSVHYFRDVSKRRLVWVVSETIA

SEQ ID NO: 988980 - protein, 40 aa, Homo sapiens
LVRFGLSCYVAQAVRTPGLMGTSVSASALATQACVGTTAK

SEQ ID NO: 988981 - protein, 39 aa, Homo sapiens
SSVRQRLASVMAWQSIHPGHFWLQDVAAVGLVGDCRASR

SEQ ID NO: 988982 - protein, 119 aa, Homo sapiens
RLGCRDAHSIIGAVLCCNQCEWYFCAREVLETAQDPESAPCWHLRRTWGWSCSWSPGLRSDLVTVSTTKPWMFREGACVPSGHASDQVTLCLELVCPRCAWGPPYLIGYEVFCQWAMEV

SEQ ID NO: 988983 - protein, 41 aa, Homo sapiens
RWADSTYQDLTTGGKANKESSKGLFYSSLPPDGTAPESTTS

SEQ ID NO: 988984 - protein, 195 aa, Homo sapiens
  misc_feature (185)..(185): Xaa can be any naturally occurring amino acid
ARVCEESTGAERAGLLFRLRGNLQRHVAEELVNMIQTQRAYEINSKAVIDLRSDAAKADATVICHLRARLAAPVILFRETKAIPVVTTYSMAILPRQGQRWLAGMVMLTLSGCAYIPHKPLVDGATTAQPAPASAPMPNGSIFQTVQPMNYGYQPLFEDRRPRNVGDTLTIVLQENVSASKSSSXKGRRKGPASS

SEQ ID NO: 988985 - protein, 74 aa, Homo sapiens
HSPEKAEASSDFIISSNIIPRIIILTGCQFMHNPIVALLCVIIYYLKLAPWEAENDGCSRDCTITLHVRTFYCE

SEQ ID NO: 988986 - protein, 125 aa, Homo sapiens
MAILRVSVVNLAGGLIYQLDSYAPRAEAEKTFSYPLDLLLKLHDERVLVAFGQRDGIRVGHAVLAINGMDVNGRYTADGKEVLEYLGNPANYPVSIRFGRPRLTSNEKLMLASMFHSLFAIGSQL

SEQ ID NO: 988987 - protein, 45 aa, Homo sapiens
NEPVPLNLSSALLSAFKHVQQKFSTLLGPPTLCPAPLLGLRTTAQ

SEQ ID NO: 988988 - protein, 36 aa, Homo sapiens
FRRFSGRGAGRCMLVPSGPLLVTSVTVLLRDEAEIA

SEQ ID NO: 988989 - protein, 61 aa, Homo sapiens
SHRLHLDYVQTLHGTAQKAARTKHTEAENFTMTNRCVPDEGARTWTRPKCSALPAQTYSVT

SEQ ID NO: 988990 - protein, 76 aa, Homo sapiens
VDDGLTVLGGIAGGCWPQLWVQRGQAQADCPVQLEGTLVKLEEEAIGMDTRHTKSKWGHTRNTRAFPHTNAHEHAN

SEQ ID NO: 988991 - protein, 84 aa, Homo sapiens
VGTLHSALSAYLPRRLRQASHRNFQPEVLQTQVHGCPVPTVPRWSPAGGLSHRSRPWPSTIRPNPGWAHLCQVFLTRQTLATCF

SEQ ID NO: 988992 - protein, 33 aa, Homo sapiens
AKHVGTVGKRGVAEQHGTGMAFHHGKEPMSSSL

SEQ ID NO: 988993 - protein, 50 aa, Homo sapiens
VASRRLPPPSYTAGETASYDRVTHRRLGLNGDPRLSTDYVLYDLTTLVTR

SEQ ID NO: 988994 - protein, 93 aa, Homo sapiens
MADTLHRYMLASRFSECKLHDIVGFPLVLMPAGAPRNHSHRLVAAFVSDSQQSLSAPTCGFSRSQAFPKQAGASLGVPFLGACAETGYMSRIG

SEQ ID NO: 988995 - protein, 114 aa, Homo sapiens
PPSYMHFSTGPDSRFHLSKSFSEMFYPCTHPLSRLNIYPLAKHSLNTYHMPGPMPGTRDKRDTLSLSPRNRWYGGGKKTRWCCHSVRMAPHNALVTVLSQQSQEQEEIPSTQGV

SEQ ID NO: 988996 - protein, 44 aa, Homo sapiens
PPPIMHKKKAKSSIEKMGPTDLNIVYKTDIPVVTETHKSRENAQ

SEQ ID NO: 988997 - protein, 44 aa, Homo sapiens
MSQHSLMLGGRLVFTKVHVLVPLAVQVPSTREHRADLQISLSWN

SEQ ID NO: 988998 - protein, 65 aa, Homo sapiens
PPPYVEAQSLQGSSWKMADSFLMTTFRRSRTCTCVLRMRGGLQIFVNSLTGKTVISVGLRPCDIS

SEQ ID NO: 988999 - protein, 49 aa, Homo sapiens
MSHAFIDALEVDVVSPSVRVLCLSLYKFRRHVSTCADLQISVKRGAVVD

SEQ ID NO: 989000 - protein, 154 aa, Homo sapiens
FGSTLPLGSTLNHAHSPYVSELYLDSRHYLVSRLYLCLSRSTLSLSQQGKSETYWTQRAKLQRDNKVESLFNVLITADIQDNTEPAFSILSDQFNKDVHIASTPQAEILKLKNGIDKLEECVTCFTSRINQAEEGISELEDWIFRNAVRPGRAE

SEQ ID NO: 989001 - protein, 90 aa, Homo sapiens
  misc_feature (12)..(12): Xaa can be any naturally occurring amino acid
SSTETLSVILSXWLESVKEAITRDRENKAPGEEASVQIQEEEETLQDEEVRDALTDNYIPSVSEDWRDPKIEALNGNCSDTEIHESLRRT

SEQ ID NO: 989002 - protein, 189 aa, Homo sapiens
  misc_feature (126)..(126): Xaa can be any naturally occurring amino acid
  misc_feature (154)..(154): Xaa can be any naturally occurring amino acid
WHCTERDASNCSTDKLQNTVLGMRSVQNEEGKCEVTEVSKLDGEASINNRKGKLIFFYEWSVKLNWTGTSKSGVQYKGHVEIPNLSDENSVDEVEISVSLAKDEPDTNLVALMKEEGVKLLREAMXIYISTLKTEFTQGMILPTMNGESVDPVXQPALKTEERKAKACSSKNPARPVGVKIPTCKITLK

SEQ ID NO: 989003 - protein, 76 aa, Homo sapiens
DAVQELPLLQGDTDPFVDHLQPVKQHREQAGVGLRVLQLLVDQLIHLESTLGVDVDHDKPPAQLQVMLITHHLEEV

SEQ ID NO: 989004 - protein, 34 aa, Homo sapiens
MSCLAEAQSLRMKRSPASTLEVTAIAFRATHLLI

SEQ ID NO: 989005 - protein, 126 aa, Homo sapiens
SRGSLQQTQHLVQNQCGLNISHLNGRTYYYDTETKQLYLGRNQMIFKDLLSNSYLNAPGRNTTQILESLTIIILKLGESRLGQTLRIEDLEGCQNTIVAGSLITNINLHAMITAVESSPPEECTIT

SEQ ID NO: 989006 - protein, 127 aa, Homo sapiens
CSRHSIIIQELVERMPHFSPLEAEYLVMLTGPHSMSVELLHSLFDLVPVGFNIYYEHKCLVVLALLHGTLCGRRQLDDNMVFKLASPGGALLRIFGLPLECSVLGRWKVGDVWIFFLHRLWTPFNAV

SEQ ID NO: 989007 - protein, 56 aa, Homo sapiens
MCISSVSRGIIAGLHRAVGGIQVISEDKNPDYRKRVSVPLTNSLFKHDPAAWDAGQ

SEQ ID NO: 989008 - protein, 99 aa, Homo sapiens
SRIPWQQTQHYWIFGTVCILFIVDTFSIIRGLHSVMYHYASLPDCPLSCESHKCFRIGSHVLYDTLVLHTLINSAFNDYSSCNDDVIYWFLSLQLSFAP

SEQ ID NO: 989009 - protein, 38 aa, Homo sapiens
AFSHWGKQVKQCELFIHSQPVLWPVPLCALVCLALLHI

SEQ ID NO: 989010 - protein, 31 aa, Homo sapiens
MVIFTCHNLLESLDGLLQEYQLPHITCEGPQ

SEQ ID NO: 989011 - protein, 37 aa, Homo sapiens
QCSDVVQSHPASASPTARSPPTDAYKAHGVHGCPEIV

SEQ ID NO: 989012 - protein, 106 aa, Homo sapiens
MERPYLYWKCKISQASWHMPVVPAAREAEAGESLEPGRWRLWRAGIVPLHSSLGNKSETLFQKKKGKKGIWEHLLSASVKATQFCRIKHVREIKVLLPKERFRSCF

SEQ ID NO: 989013 - protein, 130 aa, Homo sapiens
QTLAVLLKLKTQFERYYPLPELLITPQKDRSRRVKGTASGANLAVLVPRTVAEAILLGSTGCLSDLPRFRSPPRILPTGLPPGTAPPVWRVLFLVLWARRCFDGRSSLEPVRPQCGFETLSVFSLLSGIG

SEQ ID NO: 989014 - protein, 68 aa, Homo sapiens
DALALVRACTQQEVNLNVSLQLPSRSSKITTVSIGILPASCDSDETTEHEGFTCRQDDQKRPRHLVRW

SEQ ID NO: 989015 - protein, 69 aa, Homo sapiens
VIPGYHYKWIHYTSDVANPVRIKYMQRWQDTLRRDPTMRDIINSTRSILYPTIYTISWILLSSPRRQAL

SEQ ID NO: 989016 - protein, 68 aa, Homo sapiens
HTLSNPDLTRMRISSCNHNPENTSLILILRLLINQHYKLYPDIFPLYVILLSVIEYLSIPQVLGENFL

SEQ ID NO: 989017 - protein, 31 aa, Homo sapiens
MPGDTKNQTTDSGFGKVTLQDACLVPLTSPE

SEQ ID NO: 989018 - protein, 79 aa, Homo sapiens
CYDCGKITSGDTVMTIDLLALSNTVMTYVIARDDVSPFIQYKTSVGIGGILAQSNLIYNLEQHLGHNLYTTLHFQPPNF

SEQ ID NO: 989019 - protein, 121 aa, Homo sapiens
NIYTIDELSFTQWKIWHCKTMIQEQVISIEDSYVNSQEWTLSRSDTESLKCVHSGEPVIARSQAMVQRYLTGTYVQEESLKGGRFKKEIVVNGQSYLLLIRDDGGPPEAPVCCLGGCTNPE

SEQ ID NO: 989020 - protein, 35 aa, Homo sapiens
MRKSSVVVVARGSQVETGGTNYQLLAGIPRAHLNV

SEQ ID NO: 989021 - protein, 85 aa, Homo sapiens
MGAVDAGSLGLRDTPVRVGRGLHAGKSLHWNYKVEIRTQMNHRTVCLVLNSTAHYILGNETPSYLYVQHLDCRNEGKVPSLALVG

SEQ ID NO: 989022 - protein, 46 aa, Homo sapiens
  misc_feature (14)..(14): Xaa can be any naturally occurring amino acid
VIDLEYTLERYRAXRRFRTSSDKEKEEVDRGKKEPGSPEEAKKPDS

SEQ ID NO: 989023 - protein, 105 aa, Homo sapiens
YGNRENISCRVLHRTGKNGQNAIQAGADRLQRPEEERMNCSPTSQIDNIGAAEHGMPLTTPSSTAKHNECILDYYETHWVEGNFWAKFIYGSEHTGKWHKSLCSC

SEQ ID NO: 989024 - protein, 172 aa, Homo sapiens
GISGDSQFPPSPANNSNPVKDTDAVTFTCEPEDAEHNLPVVEVNGQSLPVSPRLQLSNGNRTLTLLSVTRTDVGPYECEIQNPASANFSDPVTLNVLYGPDAPTISPSDTYYHAGVNLNLSCHAASNPPSQYSWSDNGTYQQYTQKLFIPNITTKNSGSYACHNNNSATGRN

SEQ ID NO: 989025 - protein, 88 aa, Homo sapiens
RYHKHVMVWQTVTGVPFLYLLTGKSCRPGPLPNPPARAVEPVATQPLPGQSLQEQLKASLPLLLQWNCPCYPQTDEGANTLIYTFNKL

SEQ ID NO: 989026 - protein, 39 aa, Homo sapiens
NGGELRDREKGTEARKDSRSRPIENQGRGLEGEYEDKIP

SEQ ID NO: 989027 - protein, 50 aa, Homo sapiens
CDRTAEAAKKKTEDALNETRKSDTQLKELSEESNETMMALSEERKPCLKQ

SEQ ID NO: 989028 - protein, 53 aa, Homo sapiens
GSPTEDMDPGRRKIYTLLQGSFEAQRELTGRRRNRDAFRGTAPSVATNTIPGR

SEQ ID NO: 989029 - protein, 85 aa, Homo sapiens
MAWKLRGSYGEMGIKLRTMRYLLKEEMRPPLGQAEGQVVVAILLLPPEEPVLEELDYDAGRAHEVSLHDIQHVRLLPNDLHSSWA

SEQ ID NO: 989030 - protein, 76 aa, Homo sapiens
ICVCCALVVQVASRGHGWALPHRGGPDVMRCVLWTGTTAHVLVRPVSLQVSVTLPCGLSFVFISLAKESMAIAKAE

SEQ ID NO: 989031 - protein, 118 aa, Homo sapiens
MGSSSHCHGSGDAGSRHSTPPGRLAPSVEHVVTVDLHSLKGPQPVKLKLHLHIATAEAVVAPSHYCPMPVSYVKHLTLPKVIQPHHTICQLAQTPILQSAHGMSVMVESLRYTASDKN

SEQ ID NO: 989032 - protein, 84 aa, Homo sapiens
SSHRELVVILTASLHANSYCISMLRDTPTSTTTVYNCPAIRTVTLYGLKRGGNPLWRRIAPSSFLSTLMNNPPLVSPYTPSNSK

SEQ ID NO: 989033 - protein, 35 aa, Homo sapiens
YVRISGHMRSAGESLLTSSQQNLSGPILEFIATCF

SEQ ID NO: 989034 - protein, 39 aa, Homo sapiens
MGTGPRRLTLYTGDDRTYFDRCYYGRYVTVTVRTDDVTT

SEQ ID NO: 989035 - protein, 37 aa, Homo sapiens
RNASGHARNPALLEDEAADGLSSGVQDKSVQHSKSLS

SEQ ID NO: 989036 - protein, 49 aa, Homo sapiens
GGSSSGDSRPRVEGEDALPHAGRMSRMARRLPPRTAKAERWLNTHGMTD

SEQ ID NO: 989037 - protein, 93 aa, Homo sapiens
RRERERENRATDDRNKTDSQKYLNSTRWSVRPVEWKCRHLSKLNCCPCAHRCYFRRGCKDCFVNDYRALHVVSAGPHRKQECLGNRHANYRSH

SEQ ID NO: 989038 - protein, 56 aa, Homo sapiens
LFLRLFVGLLLTWESGQFLREQVFMGGGAVIPSDAQPQIVQTGSFIWRRADRLQDA

SEQ ID NO: 989039 - protein, 84 aa, Homo sapiens
WRAYSLPPPAGSFPTAMEQCATLMHVPGNARADELLVSSEAFVLLDGHELTRVGPKAAHVLRKPIFGRYKPDTLAVAVENGTGT

SEQ ID NO: 989040 - protein, 70 aa, Homo sapiens
VTAPDIIYMIRRPYQRERSYRRLQQDAFLAIDAILTTEEVIKELGQIAGRPTVLMKMLKTKKLDEDDVAR

SEQ ID NO: 989041 - protein, 85 aa, Homo sapiens
NASGRKSCRANTDGRGALQAERAQGTWTNLTYETNTTLDPARNPHSAWTDYDCLAADHPGTCEGQNSIAKLSCGPLGQICVCEGP

SEQ ID NO: 989042 - protein, 64 aa, Homo sapiens
GTKEAMTTKEAMDIHFHSPAFQHPPTEFIEKATIDRTVCREIRHISTGCLRMKDQCDKRREIWV

SEQ ID NO: 989043 - protein, 30 aa, Homo sapiens
MQRCAQFIQPRWRRADASSSSAVEYEAQGR

SEQ ID NO: 989044 - protein, 79 aa, Homo sapiens
ESSSLLPAAIVIACRISTFGIILHNATRMLFLIEGLVISLCGWKLLSRAITSPRQHISLTYMMLYELDSNYLASLSCHC

SEQ ID NO: 989045 - protein, 71 aa, Homo sapiens
EEHGYCCSMHSSRTNAVQRFRLGAMLMQSFHDIIMDSLDATCKGLMKSVFRFIRHELVREVTDLTLAYSRD

SEQ ID NO: 989046 - protein, 89 aa, Homo sapiens
MTQHSGSQRSQEAPWFPAFLCSYWHHNLCIIWAKRVYLSGSTDEILCPASKAARAKLLPSLKHAGCLAPGAKQRPLLSFTAQPPGLQTP

SEQ ID NO: 989047 - protein, 64 aa, Homo sapiens
DPRRHGVCRIVARGEERCGAGKVARPGERRGTALAGKHRPAQQRAEAQAYGGCKEPTEPMRAAA

SEQ ID NO: 989048 - protein, 42 aa, Homo sapiens
PCYQLPESHWSGQEDTPRGQEHNQAVLQEVVNSKSYLLVSQG

SEQ ID NO: 989049 - protein, 143 aa, Homo sapiens
HTEKQVLPSEWENPRRHILHSRTVCHALRSSIHLVGYPRSSRRVAGQHDERAGCQPGSAGHQSLWVPQKLLASGVQSQLHRRWSPRLSGVLCLTTVFTSIIISTPWEPGELERPSWFDKDLPFGQDGDANNDPESLAASYMQG

SEQ ID NO: 989050 - protein, 59 aa, Homo sapiens
MTNSTRMHPLLCLSSIRVACTNVDSFLTNMSPLSAPTVSPESSSVGVTNVIITNKTLDC

SEQ ID NO: 989051 - protein, 105 aa, Homo sapiens
TSLCKLLMDRHQTCTSSSLSPTKIGPLQSKLFLQLKVATQAASTGENAHKCPFSMPVPFLATVSPMYPCWCAQLWGGNSCIALKRGFPTGPASSETSSGPCLGYS

SEQ ID NO: 989052 - protein, 70 aa, Homo sapiens
EKSAEEAEGEALQTDRLVPRPESLARRDRGSCVIRASFSGYTSDTLFILVKIWLISMNVLDLVSGTIKKM

SEQ ID NO: 989053 - protein, 81 aa, Homo sapiens
GSVKPARSYRSAEQSNELNQVVRFQPITQHTMPAASSRRETPRFAPAATAYRLLTVERQRRTNNVTAPDEPAEPAFGWSAY

SEQ ID NO: 989054 - protein, 106 aa, Homo sapiens
ARRGWAYTAEPYGFSSPAGSEKRVPLRLEVAEIQLGPQTSISVGKGLWLQTHAQVAVLIATLIPAPEGTFASAWLLVVLGHVRQVHLQNEFACFSCHHTHLTFDAP

SEQ ID NO: 989055 - protein, 104 aa, Homo sapiens
RERDIRERHKWAHRHTQTHTHTPQTQTHIQQVTPSPRQPVKLLGSALRDYDPPVREQPTGTRADLSWTSQGHHFWGDSRAHRARTPEAGILRCLPGDPSEVSSY

SEQ ID NO: 989056 - protein, 64 aa, Homo sapiens
GSDLEDPIQDGSSISIRAKNTIVATGLRAHLLELHVLPTPVTSDGTAMITRAGLPCQDLEFVQF

SEQ ID NO: 989057 - protein, 36 aa, Homo sapiens
LRIPYPVVLAGLPSWRAAVRAVFQRIRGTRMPSCPN

SEQ ID NO: 989058 - protein, 62 aa, Homo sapiens
NRILKSPLVHSILNILSHLHALHQRQAHGGFPFSDTTQAGVYGVASSKVMTASTPMRMANIL

SEQ ID NO: 989059 - protein, 39 aa, Homo sapiens
SNRDSFVEKGQRLRSEPTCPGHWGEVGALSSGIRLSGFQ

SEQ ID NO: 989060 - protein, 65 aa, Homo sapiens
SPGRFAQGNHLRNNKGTPDPRYTLRPKRFEFLEENLRQQALKPLGLRTLPTPNSGRKTPYGDEGM

SEQ ID NO: 989061 - protein, 74 aa, Homo sapiens
VLRCDWTVTDSDWNGDWTRRTDSDWTRRSGSDETVTGSDRQQQRVEDSDEQQQTVEGSDGQWRTVGDIFLPGCS

SEQ ID NO: 989062 - protein, 57 aa, Homo sapiens
YQNFHVRDLCSSSFGAAPLSSWGGRSFPIPNSTWRSAQQWHPLLRLPLLPLSHAAVK

SEQ ID NO: 989063 - protein, 71 aa, Homo sapiens
GFIDASKAQLYGEGNDAQDLVASQTLNFVLSLQTLLAWKSPPDESCVVPQTFMRALYYPKAGIPIHYNYNV

SEQ ID NO: 989064 - protein, 76 aa, Homo sapiens
VIGCHGQDSHLSGQGHIPSLQQGKARGARSSFTEPRCQPVRDMVRGLPIKKAKSWLRATPEHAVWILGASINTGYR

SEQ ID NO: 989065 - protein, 58 aa, Homo sapiens
MACKFRGSYGEKDIKLRTMRDLRKKKEASGGQAEGQVEVGILGLPPEEPVLEELVYDA

SEQ ID NO: 989066 - protein, 109 aa, Homo sapiens
QLGFLCGWKEVIHPSLICGWKEVIHPSLICGRKEGIRPFVICDRKESSTRPSSASKEVIRPSLICVRKEDIRPFLICVLKEVIRPFLICVWREVIRPFLICARRKSFTR

SEQ ID NO: 989067 - protein, 77 aa, Homo sapiens
ILRLSHSKSQDDIGGRHKIQVIKTLLIKHVAVKKLAKTHQNQDGDESDLWSSSLLTPTSAMTVYKCHGNVRKLPYMV

SEQ ID NO: 989068 - protein, 61 aa, Homo sapiens
ATYDGKQKSREVLLQQVEVHPIQTELACSLMEFHSCQDTAEEQRSHSRKAGVKSLAPHGET

SEQ ID NO: 989069 - protein, 38 aa, Homo sapiens
GALGQAALDPRDLPVSDSQSAGIIGMSHMPVRPGYGGI

SEQ ID NO: 989070 - protein, 104 aa, Homo sapiens
MRKDCSFPSGLSSSPPFVDLGIAAKAMHPAGLRKPQCLQPCLRAADSLIFHHLTCLLRYLLTGLECKFQRLLLKIPQVKQARCLDLLLSLTCNILFRGSEHLLG

SEQ ID NO: 989071 - protein, 55 aa, Homo sapiens
MLREFWVRSLTDGGHTISRRRPSESSSRVDIDANWKAICDAFIETYHIPVIHAET

SEQ ID NO: 989072 - protein, 107 aa, Homo sapiens
RVKAVMSRDYVTACQPGRQRQTLSQKTNQKQKQKKNYGVIACFKISSLGRVRWLTSVIPALWEAEAGSQSCSELRSHYCTPIFVTKRDPVSKRMCLFPGVSLFLTCQ

SEQ ID NO: 989073 - protein, 96 aa, Homo sapiens
RLLWLLLLLPGVLGSLQAPFKPGLGSIHGMYLTWKRCHWLQESLQLPGAHLVLRDLPTELLLLTLLGFTHLIVANTHSGHAPPASPSNAVDELLPA

SEQ ID NO: 989074 - protein, 67 aa, Homo sapiens
MRDHLSRAYSMIDELCQDRIFTRELYDTYHYLPLSLPNRRPQFFFPKYRIARSLMPFSPNERMKLHA

SEQ ID NO: 989075 - protein, 75 aa, Homo sapiens
MARKFRGSYGEKGIKLLGDAALGKDEVRPPVGQAEGHVVLGILGLPAEEPALKELVYDAGRAAVVVLHDIQRWDD

SEQ ID NO: 989076 - protein, 43 aa, Homo sapiens
RENRTEADPPQGGGWRRMETMPTSGMRQILESFHVNLQKSAGR

SEQ ID NO: 989077 - protein, 68 aa, Homo sapiens
YALQELVPMISAKQLCVLVPIIIQLSSSECLLPIIISRAALSVLVPIIVSRGSSDVSQLPIIISRGST

SEQ ID NO: 989078 - protein, 40 aa, Homo sapiens
CENRTEAVTPLMVPDTRWLSSPVGVTVSLRVLTQHLAYAF

SEQ ID NO: 989079 - protein, 133 aa, Homo sapiens
HKRVLVLVSEVHRVKLSASWCPDMRACEALLRSVCLTCARVLSSTACWLCDMHRVKALVGGGCLILPVDVLRVQVSDMHRVNLYWVLGDWICNRDEALCILDGRKCYRVKGRVWIPGVLKCSVLRLSAFWGLK

SEQ ID NO: 989080 - protein, 63 aa, Homo sapiens
GITMSVKQLSGQVHQTTQREEKGQRGKRFQKQRLIWVCFSSPTSPTEYFESPFTISDGHRDPR

SEQ ID NO: 989081 - protein, 49 aa, Homo sapiens
SSNQLLCISYSFLGLIFQQSEMARDFTPEPVVAAIWRRGGWKAGHHGHR

SEQ ID NO: 989082 - protein, 36 aa, Homo sapiens
  misc_feature (34)..(34): Xaa can be any naturally occurring amino acid
QQKNSLVVLHMSALIVTLVQEGPNEINNPVHNPXSV

SEQ ID NO: 989083 - protein, 89 aa, Homo sapiens
DLEDPVLMNGELFYDRGSSVCRPTCAACAIPDIVILEDHDVRLRPAVYDAPSPGPGTRIRPAGVTWNVRELKAVIFGDHAPTAAVYKER

SEQ ID NO: 989084 - protein, 46 aa, Homo sapiens
DSPDHDKITTSNCCGHIYYQLYLLFTYTSFSYLASHLTYVGDKVEP

SEQ ID NO: 989085 - protein, 71 aa, Homo sapiens
LRTPHMCHIHSHWESYGDGPGAVAHTCNPSTLRAKTSGSRGQEIETILVNTVKPHLYQKYKKLAGRGSTRL

SEQ ID NO: 989086 - protein, 50 aa, Homo sapiens
VVRLDADNDMATIEKLTKVYKSRKDGRILAVDRLWLGVRPGEMLRGSWSV

SEQ ID NO: 989087 - protein, 165 aa, Homo sapiens
SVCRMSECLRRGGGLDVVQFVCKDDRHPLLDEGGLVLNGKLALPLLALENHGNDASNEQDGCDHHGRNDCVQVDIILLLFSGSLSGTSVGGASEGTLLGGTTGINCRCRQVPEPVTVMLVALKSGSRALEKAGRGYTIILSDPAAQPSDLLLGAEPKGQCVVAHP

SEQ ID NO: 989088 - protein, 68 aa, Homo sapiens
MVAGPVSCWKLGSSSSSSDCFPDNQCLPASLSSCQSSFPRHLSDTHEKVLGGDRVTPSQSHVDVPPHH

SEQ ID NO: 989089 - protein, 144 aa, Homo sapiens
VDEVIISKEYVCRMKLRFQHSDNVFDLAAERERFPVTILDPEDAERADSGRVTAVAVNEDEEDSQDAEEEEEADEEDDQEDDEGEGGDEDDEKDGSEMELDEDYPDMKLLPMNRFERIERKNALIIEYGQTMSSRETDIPPSTK

SEQ ID NO: 989090 - protein, 59 aa, Homo sapiens
MARKIRPSYGEKVIKLLYDAGLGKEEVRPTVSQAEGQVVIGILQLPSEEPVLEELVYDA

SEQ ID NO: 989091 - protein, 89 aa, Homo sapiens
  misc_feature (85)..(85): Xaa can be any naturally occurring amino acid
HGEHHFRALSPCRPSVISTTQVQQRFLRVALSVLLDITDRDSPHLLLKSDLIINMCTSLRQTMTLIRTLSRVPLPFMESYRRSAXYRCL

SEQ ID NO: 989092 - protein, 59 aa, Homo sapiens
TERKGVTDLAEEEAVAPGTPTMGATKTADEMAFFDGKTTRGVYNFCAQDVPSDQKRVDR

SEQ ID NO: 989093 - protein, 58 aa, Homo sapiens
CDAPLCTIASYCVRISFRAAGEVCLGHVKLHMDLLTRQLLLEYPNLLLVDLPEEPDIL

SEQ ID NO: 989094 - protein, 54 aa, Homo sapiens
EVVAGGVCEALMPGDGRKRSRGELVVVAGCARLRERQVELSEYVWAPPGHGAPP

SEQ ID NO: 989095 - protein, 73 aa, Homo sapiens
VGYRHVLIPASWAGHAPQTGYLSGWVHSSDLRLTWLVKESLITQLGWPMAQTQVEQPTLGQQDAAAHTSSTDT

SEQ ID NO: 989096 - protein, 84 aa, Homo sapiens
KGSDAGDTVMGTYRAQCIESMTRLVVKERNRNKLTRESGNDFPIPAVPPGTDPETEKLIREKDEELRRMQEMLHNIQKQMKENY

SEQ ID NO: 989097 - protein, 69 aa, Homo sapiens
VTQKQLLQCWLWRLTHIIACAMRVPHGRRSASVQEVAAPVSYDCATVFQPGPQSKTPSLHNTMLGVPSS

SEQ ID NO: 989098 - protein, 75 aa, Homo sapiens
  misc_feature (44)..(44): Xaa can be any naturally occurring amino acid
  misc_feature (60)..(60): Xaa can be any naturally occurring amino acid
TGPRPKKHRKECGNRCCPLATARKPGGLEKSSAGAGELKRKWAXKKGLTFLRHNKDTEKXLKQREEGLRKIYTDQ

SEQ ID NO: 989099 - protein, 67 aa, Homo sapiens
LHLFCDLLYGLPGVQVAGGFDSCSSIYGLLHILARVPQQHEAIKYFQGYQPKIEEYDTGIMTGVLAL

SEQ ID NO: 989100 - protein, 78 aa, Homo sapiens
EGQEEPPLNHQGAARTEVNLRKGTWDKCNFLARQIREHREPATCDEEEDEEQFEVNHDMQPAQEMPMYMRIRRLERRP

SEQ ID NO: 989101 - protein, 101 aa, Homo sapiens
QRHHREGNGIIQLPGHHSEGNGIIQLPGHHSEGNGIIQLPGHHSEGHGIIQLPGHHSEGNGIIQLPGHHSEGNGIIRLPVHTVRAMGDGVFTASAKVSRSS

SEQ ID NO: 989102 - protein, 142 aa, Homo sapiens
MASDTLVPVLLRAPHQPQCLFPEMPGGNRLSEGGWCGNPGSPSPRRLKYMEEKVQDRITMCRPRVGSGPCLLHLRLMTSLLKRSDIKCTPWIVALTATGKSQTGVKSSVTCDRWLPVPNPMTLPSTPRPLCSPVSSEPQSIP

SEQ ID NO: 989103 - protein, 49 aa, Homo sapiens
CDRPCGIFLNVKDVLASRVTTTLNLNARIQVNEKEQWKEGEGVQLGLEG

SEQ ID NO: 989104 - protein, 82 aa, Homo sapiens
LTALLTLAGFQDHYLNDANASALKCYYPITGAHRNKSYNSKKRSMEKFLNPEIPYGKGSGESVWLIFKNSTALKNKHLSLTC

SEQ ID NO: 989105 - protein, 105 aa, Homo sapiens
LKLLARVDLATSASQECWDNRREPAYPGHSVYSFALSFTRCLQCGWRGATDESSGSFLRSILRMCSALSRDAPYTWLCKSQAELGVANEHREMQGQLWRVMPGIP

SEQ ID NO: 989106 - protein, 32 aa, Homo sapiens
MIFLLYAGYVKTQQMKHFSWHIHIPIMVYLFS

SEQ ID NO: 989107 - protein, 90 aa, Homo sapiens
  misc_feature (58)..(58): Xaa can be any naturally occurring amino acid
MWLKRISVKNCVIYSAIHAAHCSAGPVRDDLSNWQATIMRASVYSAYQGWSASLFSAXLDFAAADYPFKPPKTCVSQQKLDHPKINSDGS

SEQ ID NO: 989108 - protein, 82 aa, Homo sapiens
IRYPIKSSLRDEGWGLIYGPLRQWFIHCGIALVDGPHNSRYLSAPIPVSQRTWAMSMRKIVREWSSHVCDIDLFYGQSLVIR

SEQ ID NO: 989109 - protein, 31 aa, Homo sapiens
MPTSGLIPLQAFLDADILKDGSWAEADANIG

SEQ ID NO: 989110 - protein, 44 aa, Homo sapiens
MKSCHTYAHTHMHRYAAWAHSISMPKYARTRTETCQNIQGHAVL

SEQ ID NO: 989111 - protein, 33 aa, Homo sapiens
DHDVLSISHPSSSGFLASVLSVYAQGLSQFLKA

SEQ ID NO: 989112 - protein, 45 aa, Homo sapiens
TPPPTYARRRTFDVPLPISDRTTRDSSRTTRDSSPDTRDSSGYRR

SEQ ID NO: 989113 - protein, 139 aa, Homo sapiens
LVSDGSLYDVAPVVTGGVCKVTESMASAALPLGLQRLHVSAVTLTNAASTPWRNGAKCVEQPDGYECLLCRGLMRARLCDRNVDDCSPVPCHHVSLRVMALPVSHVSCAPGYMCTCCESQVDECRIQCLPSWRQMPIIG

SEQ ID NO: 989114 - protein, 56 aa, Homo sapiens
MMVWTDSGGPSGSLRRQCGRGLAAVDWSRTCPCRSCIGHDRVTHVAPAHQFASRSF

SEQ ID NO: 989115 - protein, 71 aa, Homo sapiens
MSLAPWRSRAFLSVASLLVHVCHAVLAVVGDVLVSASVDIRRMKVSWIATSAGSEPWPPYSNWNPSVMLSP

SEQ ID NO: 989116 - protein, 71 aa, Homo sapiens
TWMPIKVFCNDGDLVRPACSRTQPIVGQKNCYISENPLDKRRFWFGESMSDGFQFLSMADSDSILPMCASI

SEQ ID NO: 989117 - protein, 90 aa, Homo sapiens
MTESMASADTCPSGFSGSTCQLYCCDECASTPWRNGAKCVDQLDGYECRCAAGFCGHSLCDRYVDYCSPIPCHLCVSACLALPVSHVSCA

SEQ ID NO: 989118 - protein, 33 aa, Homo sapiens
MGQLDIEHGPVYSVQVGRAISFLECSARSSSSP

SEQ ID NO: 989119 - protein, 69 aa, Homo sapiens
SSRIPQSVSTRLRLSTMVEIILDEGGSWSIVTDVLARMGNWTHDTAINATVTAFTVELYATYYSTEGST

SEQ ID NO: 989120 - protein, 42 aa, Homo sapiens
LSWTNCDIINNECESNPLCRTAEPAIDMNSGYVVHLAGEGFM

SEQ ID NO: 989121 - protein, 142 aa, Homo sapiens
DCSTRVVRDIALSLISLIAGIGTMMEDGFGETGGLAISHLSDLVAGRKDGFSRRWNGCPPLAHADLWAAFPRAEIPPYLLLAHSFPDLCLFLYDLSFHSQFSLGGQLSCLGCVFIVCLFRRHVRSKLLIFCYSDTSFLCAFQ

SEQ ID NO: 989122 - protein, 101 aa, Homo sapiens
DCRQVEHEEKISNRSLRECQQLCKSGDVMETWFRGFVVVALSVITMHEALTRVAWLSLLRPLGVDFHAPPLFRPLCWSLRRVDAGLMYSVGWRPRTKDASP

SEQ ID NO: 989123 - protein, 89 aa, Homo sapiens
SPVPPQSLSSSLSLLLESTWGARVHTVLNSPACPAHSGLFQEILRGAQKCTHEPLNSWSHSGICRQAGSVPRCVYVAVNRYDSNEVQIP

SEQ ID NO: 989124 - protein, 44 aa, Homo sapiens
MPFRCGPSTIRDKSPNSPPPDISSRLLAFTPSQIGGFFFILRGG

SEQ ID NO: 989125 - protein, 75 aa, Homo sapiens
GGEESKRCRLPISIGEMSLVLAWSDDPGLLVYLSPVSKEQRGQAIDLPMKGPQSQCHSTPCHAHQFEESPTTGFV

SEQ ID NO: 989126 - protein, 66 aa, Homo sapiens
  misc_feature (11)..(11): Xaa can be any naturally occurring amino acid
SDSGVQWRDIXHHNLCLRFKRFSCLRLTRSSWDYRRPPPHLADFFVFSSDEVSPCWPGWSPTPDLR

SEQ ID NO: 989127 - protein, 60 aa, Homo sapiens
MGTVPDEVWSILRTALVVGRLTVGTLNTTLERGDTVKEKLCMMLGYTKTLQSMGFTGVLI

SEQ ID NO: 989128 - protein, 51 aa, Homo sapiens
MALEAVMARASENSGNQGRIRSSIVTVANELTSTRILVLRAACCKQATAID

SEQ ID NO: 989129 - protein, 109 aa, Homo sapiens
NELSNPVRKNEVYFYEVREGQEKKGKEAWMSTVLSDAHVLLLVYSQLCSLHGSDQQKRKGAEATAKRKSKGGGINVEGRLCTSPLKTHVRLGGTLREKERDLTHRKGQF

SEQ ID NO: 989130 - protein, 100 aa, Homo sapiens
SYSSDPFLNGRAYIRGGRDNDSGLGKEVLQCHQNSRRISYSNENEMDTGQKRRTNNHEHQSPTDTVSQNFLRMYYPENKQYDYKEHIGNHERNMIPPLQL

SEQ ID NO: 989131 - protein, 100 aa, Homo sapiens
LPGGYGITVTKPTHEYRPVARLSLNYLLLGTDVVIAIFIIVAISFVPGQLSLSILVGQEVQQGQAPSSLVQGLQSHHLLAGELRLGHAQIAGPRYLVCHH

SEQ ID NO: 989132 - protein, 68 aa, Homo sapiens
AFVLCSGQPGQYVGELQEDSAVPVERIPVLSPGRLKIGLPEGPRGVADVETQVRVSPCGREGCNRPRE

SEQ ID NO: 989133 - protein, 77 aa, Homo sapiens
VLYNITIYAAEENQESTPVVIQQETTGTLRLDTVPSPSDLQFVAVTDVKVTIMRTPPESAETGYRVEVIPVNLPSEH

SEQ ID NO: 989134 - protein, 45 aa, Homo sapiens
AAAYLLSPEPPGAMAGGRCGSRCCFCTISEDDAARRAPPLTPAAP

SEQ ID NO: 989135 - protein, 119 aa, Homo sapiens
  misc_feature (118)..(118): Xaa can be any naturally occurring amino acid
LDRKREQQAEPTRFPENRGGGLKALTRGLELTDLSAACCPYTALVGLVGETPASPGTECGGGPWLFLTKAWAAFLGGGEPTHWSGAGAGPITLTSYVAVAELSTEYTWATRLRCSKKXR

SEQ ID NO: 989136 - protein, 34 aa, Homo sapiens
LVMPPMLPPGYFGQATGLAAGLIMPIGTTWLEGH

SEQ ID NO: 989137 - protein, 39 aa, Homo sapiens
MSRLMSKGNPEPNCIHIMGCYIQGNPNGEKLFQNLRTLM

SEQ ID NO: 989138 - protein, 100 aa, Homo sapiens
MWTTPIGPILKIPGLNSPIPESCSLGHHAAGWSTPPVDETGKPLYEDVFETNAAEFQTKTEEEEIDRTPWGELEPSDEESSEEEEEGESDEDKPDETGFT

SEQ ID NO: 989139 - protein, 71 aa, Homo sapiens
QLERRPLSRLPLGQAQTSTHPARATALDEQAVPCAPLAQRQPDGSLLSICNLHHSECKCLPDALPVRGPLL

SEQ ID NO: 989140 - protein, 80 aa, Homo sapiens
MKQRLSIAAISIKAFTRQILQSLVVRSGCKSLHRPQRIDDILCFSKVDFVQRTSDGIFHDLYQASDVGYLWAAVTHRFIL

SEQ ID NO: 989141 - protein, 68 aa, Homo sapiens
DLLTQCAKAEKWHLFSHSVHANLASWPYTATKEPASYNLVGPASAGLPLLWKMATADTATTSIYEAIS

SEQ ID NO: 989142 - protein, 89 aa, Homo sapiens
HADNSTSTDIRVIREVYGELCYLEHHLRRFDMDIPGNGPESTDNKESGSSTSSRYVLPPYQTEMLSGDLLVPSTRAVTLTTPSPMQRKL

SEQ ID NO: 989143 - protein, 86 aa, Homo sapiens
TGPCARPQHFDSMLIRHPGDRGGARSLDRLSWRHSGTDGEPMSASQEMESYPWRCSGLCTVPEVMSPRSGDRPSYTDVRRHDRCWK

SEQ ID NO: 989144 - protein, 87 aa, Homo sapiens
VGVSTGIPCSTQQQARGCSRRHWCTLVRAFTDSFINAMSLCNHCCPHRKNGQISMFHRHLCSDPTNGRGQWSLSVACRDPLTIFFGI

SEQ ID NO: 989145 - protein, 98 aa, Homo sapiens
RNPGFSPPPECDCFPQHGMDLLAETHKCDRSSSATSFHINQIMELGQQPYPAFGPVSSPPNAMMSSRMGPSQNPMYAGPAGCIHLSFLRNEWLAITYF

SEQ ID NO: 989146 - protein, 52 aa, Homo sapiens
GEEGLCTRRHWRTLTRLWALGGALGTWAAAFTEEKRRLARGRTEASGGQAPC

SEQ ID NO: 989147 - protein, 78 aa, Homo sapiens
QRHQGGPQHEEEAYRNKVHVMEKGSSLFHDKRRLTHITAEVLQTQTESSAPPQEVARIGEAHLVALSQSDSPHLSFLI

SEQ ID NO: 989148 - protein, 40 aa, Homo sapiens
MASPCSPADVYMGLASDSCAVSVQTANFDLGDHSSISHRP

SEQ ID NO: 989149 - protein, 92 aa, Homo sapiens
PSRFSRLQSHAVSLNDDTILVYLWNSGLDSSDMSYLRAYVSNGCCRPTSGSEWLHDTQWVHHTIHQSLYDPNNASCGPRMGPRETPDRLSAQ

SEQ ID NO: 989150 - protein, 104 aa, Homo sapiens
LRGYPGRPSPAATVFSQYLTSSWELVLVGTFRIQRAGNERTLFLFDKLLLITNNRDDTFTYDAHILFGNLMLLEVIPIEPLWLQRLLLQVVPSLQCTVQALSRL

SEQ ID NO: 989151 - protein, 94 aa, Homo sapiens
FNDYSMNDIHSGERLSCARVTARKAGLTKRSLTLVKAFELPPGDKGELLKALEHMNDLDRLPVCKRSSVTMSEPVEVNQAGSRLKSRPVEVILP

SEQ ID NO: 989152 - protein, 129 aa, Homo sapiens
MHADHPLKLTLTLLTPRCCQQRNPQLTPASLTYGLSTGNGPPHSRMSPGSPTPPSGTEVTLAEVPLLDYGGSGATVCQQAKAVPPFSTLMSCLMPPATFCDPEEVEGEPLVAPQTPTLPSAPEELEQEL

SEQ ID NO: 989153 - protein, 87 aa, Homo sapiens
SYPPTDSLGRPPTLAASATSFPAATAYYLPVHSFSCFALSLASAFSNFFAFTGLNGPNTSTSLSRVGSERNPKREHFEKLWREYRAR

SEQ ID NO: 989154 - protein, 78 aa, Homo sapiens
VSTGSPCATSFSSLQPCDVCNEPYFPHQTLKRSTSPLASGFLRGGQGLFRSFYPQFFTRPSRATAHVSFVSVLPTELD

SEQ ID NO: 989155 - protein, 58 aa, Homo sapiens
AKRAVSPSYQSNTGFRESRSAAVFLDSLNPLLCSSLGQLSITASPQDFKNNLNAQSKA

SEQ ID NO: 989156 - protein, 75 aa, Homo sapiens
IEDYQRLIAKVTEAKGPNPSESPEKDEKQDYKASVFNRPLSKYPQLGKRREINPSLLPPEFPSFQEAPIQAKTER

SEQ ID NO: 989157 - protein, 151 aa, Homo sapiens
PPTIFSGRHIFSRPPQSSQIIRLTALAGSAVSPAATSVISYVTFMDLTACPCTGPQEMSARAFPASHEEISVQEPYPLQMRKLGQKAVGPIAAACRWSRLDSISLCLICHLAVLLPTRPSPRTLGAPRVPLAARLKTGRVRPSDVWMPHAE

SEQ ID NO: 989158 - protein, 42 aa, Homo sapiens
MCGQSVRGVFWCLKSARPGWWCEFLWLRGRAHISSGPVTLID

SEQ ID NO: 989159 - protein, 72 aa, Homo sapiens
FCAPEGSISPSAPRPGSVRERSMHSPGAVVAPGLVRLLLRGGAGVCDARPRGGRAVLQPRVLPGQPPLSLTG

SEQ ID NO: 989160 - protein, 30 aa, Homo sapiens
MQLKPVPGKLSLQSICGQVFWNMLWETWLY

SEQ ID NO: 989161 - protein, 68 aa, Homo sapiens
SALMMHGETGKHGEAGFAIVSLQSTSLHAVEPLSYSTEDFCPAIDDDQTAIPCMLQDVEVHIVLLPPL

SEQ ID NO: 989162 - protein, 32 aa, Homo sapiens
MRGNPASKYDSVFPSSVSSLDAVDKHTLVADV

SEQ ID NO: 989163 - protein, 90 aa, Homo sapiens
ALVQVTSDTLAVRDTGRHASELPCQLSDELAHSLGSASRGRDDVLESPAGHHCHMFPVMGPLHTSIWCGQCIGLGTCVSMQSPSHLSVAQ

SEQ ID NO: 989164 - protein, 63 aa, Homo sapiens
MTTAYKIIMQCLLAPPNVLQHPLANGHSLTHFWYLWTGLTDHMSTATHLPPSKTVDCAPPGET

SEQ ID NO: 989165 - protein, 75 aa, Homo sapiens
GYHTLKHSLYNRQVKGVMGTGYCIDEYSFVDNVFLYLSGSYTLNPEESVCIMLLTSSPLLHGCRYQHHYLTLALG

SEQ ID NO: 989166 - protein, 66 aa, Homo sapiens
LRNSSDSADVDVGSSQQKEMMRTGMKIARGVLPPSSDVSAAASATSKACSRTVLINFTHGQEPVPV

SEQ ID NO: 989167 - protein, 103 aa, Homo sapiens
MFPSPTMTSGLRDKRSIYLMFLPCFPQTCARSRSAWSSWSGRSMRGRSVSARSNSATLQLEAGEATGIAVCDVYNGRQRRRGGNVPLRGDRLFYGNLVNGTTT

SEQ ID NO: 989168 - protein, 34 aa, Homo sapiens
GCDSCFGPVCGAGQWDKCIETATKQNYKILHKYV

SEQ ID NO: 989169 - protein, 45 aa, Homo sapiens
TDLKCSLPSASNRTVIPSPVEDSGDHPLRRFLGVPKPDKIPTQYS

SEQ ID NO: 989170 - protein, 122 aa, Homo sapiens
QCLGLHGMSQPHLVQVHFFILTCPTFPLDIQRLEPWHLDTLGKRFSCQCAEGRYFFILVPDKDFAELPIQHLWDMEYAYSNFIRKRGFQAEGQQDVEQLVQCQAGDHVDLLKRSHAIGKHGE

SEQ ID NO: 989171 - protein, 54 aa, Homo sapiens
ISEACPPGETLERGVGRTVWRKGSEHFESITAVPKRRAVSAIFLGVHGLHSVKQ

SEQ ID NO: 989172 - protein, 94 aa, Homo sapiens
TASSGEKQQKNENATRTLGTIRVKICPGKTEYSFLGLCYGRLSESIFPVGGMDFTGSNGDPSSPDSLHYLSPTGVNEYLMALWSVGSVVQDYDS

SEQ ID NO: 989173 - protein, 86 aa, Homo sapiens
RLYRIPVAPCFPHSLQWSGTVRSHYGLPRSMSSQLCAESFEPGWPGCSSSCPYAAVTIPSVYSALALMPSALVAAPPCVRMFYFIF

SEQ ID NO: 989174 - protein, 34 aa, Homo sapiens
MPRSCAPAWRRAPGLFPRRLVALEIRPNDGVRLL

SEQ ID NO: 989175 - protein, 60 aa, Homo sapiens
RIPALSPMFPTHGLPEKKMGIMASDTAESVTLTRVRSSLIRDTLRGVMVRGDGLSMGCPV

SEQ ID NO: 989176 - protein, 44 aa, Homo sapiens
SIEAGNTGNMYKIEPVLRIITICTNQTYDEGQFVLSIKVTDQRI

SEQ ID NO: 989177 - protein, 65 aa, Homo sapiens
TFTLSSSYYLDILHIGYDLLIFPRTSFQSADPGQLPAASASFQCSIKLLPAAAGISSFPELCCHR

SEQ ID NO: 989178 - protein, 89 aa, Homo sapiens
MLSWFIPITNANSGMLTIYATPERSSCFNFLEGHVAFSHPSIEPLQVCDALRCSWLNARLLLAQRVPTLRRQARVTRVNPIRDGDRGLQ

SEQ ID NO: 989179 - protein, 104 aa, Homo sapiens
RCIMFPPRQSLASAQAGVQRPNLNCSLKPPSPRFKQVLLHSSTIHMKIRWDYRCAPQSPANFCIFPLRHGLSAYVRARLVSNFWPQAIQIHLPRPPKVLGLQRV

SEQ ID NO: 989180 - protein, 56 aa, Homo sapiens
GSASCRSMLMGHRFCASLNAAVCAATPVYPAPHARSIVRSAPKTIPSADSSHRPEG

SEQ ID NO: 989181 - protein, 60 aa, Homo sapiens
MWRPVAASGAYGAQEWSPVPLLCIFLGKVWVVTLYSEQVQRKRQRLTEGGMDGYYVSIVS

SEQ ID NO: 989182 - protein, 76 aa, Homo sapiens
MEGVYRKQTGPTSNAEFLVWGTNVQGGPLSHDVAERGGLVWVFVIQITCLCPRTPDVYSVQAIAQLTLVGDSGVLP

SEQ ID NO: 989183 - protein, 54 aa, Homo sapiens
TRDTVVYPADVVLFEAQLLVFYIAVIRDMFHLRLFVGTDSGVRLSRRRSPGRAL

SEQ ID NO: 989184 - protein, 51 aa, Homo sapiens
QSCAVGIIADADDIDLASGLVQHPVGPHCEMSRPFWENVVTGAGTFLSLSD

SEQ ID NO: 989185 - protein, 147 aa, Homo sapiens
  misc_feature (55)..(55): Xaa can be any naturally occurring amino acid
TTVSTGLKKTMFQYWRSDMIIPRYPGQSFNSGVLRLYPYVILQFRVIGIQRGWEXDNTSLPFRGSTVTSVEHPPSPTPGDVKGEGTRKNNMEITWTPMNATSAFGPNLRYIVKWRRRETREAWNNVTVWGSRYVVGQTPVYVPYEIR

SEQ ID NO: 989186 - protein, 59 aa, Homo sapiens
MSGAGSCICPCFCALLSYVACWTFLRGWEKVMVVPEESSPSFHTISSAFSSEVTPHQYG

SEQ ID NO: 989187 - protein, 37 aa, Homo sapiens
MTSPCVNGGVCNDRVNGFRLTPGPPRGFSELHVSAVT

SEQ ID NO: 989188 - protein, 41 aa, Homo sapiens
PELFDRVGLPDSLKLPSGHCATPSGVVNSLRLTVAGRITLS

SEQ ID NO: 989189 - protein, 54 aa, Homo sapiens
LIQDTQTVRPELGCRTRKLPMGTELFLPAAGELLAISLSQARITYSPLTHYPIS

SEQ ID NO: 989190 - protein, 105 aa, Homo sapiens
MRVLIERAHAITVQYCCGLREVTAKSISVCGQIPGKGLHVPQHLRLASAQGSSLLPHSKVESLEKSLSTVLNVTDRNLVVISLASVCRMMGIIKLAFVPLHDSVY

SEQ ID NO: 989191 - protein, 128 aa, Homo sapiens
YRAAQGSGLLLVPASHGVPPLPAMGAEEREVNEGLALSPCLTGGTSPTAMAVLRHGGEEELALSTCLAWECQAPAMGVLSSHGGKRGRLSVPASRGVPLPAVMGVLNSQGAQKGLALSPRLVWSAPPP

SEQ ID NO: 989192 - protein, 35 aa, Homo sapiens
TDPQICRQVDRRATHSSRPVIPASESTGGQLSTTL

SEQ ID NO: 989193 - protein, 55 aa, Homo sapiens
  misc_feature (21)..(21): Xaa can be any naturally occurring amino acid
TILPSSAHTHPVKATSVPSSXICALYVLAIFTPKARGQVASRSQESTQVCQAHSL

SEQ ID NO: 989194 - protein, 107 aa, Homo sapiens
DCRQVGCMCNDFLYFCINSEFSEMLFLAEKIFKIISGMEEVRPVRLVGCPIHPTLGIGINVYEDSDLQQCPGWLRAYLARMFAPAPTHDTPIIVEKFRVLQDARGHV

SEQ ID NO: 989195 - protein, 118 aa, Homo sapiens
PRLSTGCKNVCYDHLFPVSHIRLWALQLDLLSPPSALLVAMHVGLLQCTKPLASSGDERRVNDFYDFEDIPYMPSYGSDRGVACVCAFTSGIFFRIIFAAVFMYIFYFLYSGFHLPWV

SEQ ID NO: 989196 - protein, 46 aa, Homo sapiens
MRSTCHMSQGWYNLYETYWEVYLMSKLRKPDGAGIVHAARTQLRFL

SEQ ID NO: 989197 - protein, 47 aa, Homo sapiens
DGVIECGELRGQRGHLCSQPGPMSLRGLLQLFLGLAEGGDGALQVSD

SEQ ID NO: 989198 - protein, 125 aa, Homo sapiens
QQHTAPRPYDSWMSILVPKRVHVILPKFTAVAQTDLKEPLNVLGITDMCDSSQANFAQIHKVRKPPCFSYLAKSKTLKSVKMEPKLLQQTTAHGTNQSLPGFWLPWFTLNHSHRWQHLSRSGISK

SEQ ID NO: 989199 - protein, 123 aa, Homo sapiens
IPSQQTQQQQRRFRLRMMYLCVKELSVTIILKNVLWICATFRASDSIFFPTALRLYRMNELDGRSRLPAGTLVHLGLLSLNLFPWKFCLALLFGYRFFSWTQLSGITELLPTRVSFGYRCSAV

SEQ ID NO: 989200 - protein, 70 aa, Homo sapiens
AGQTQQATLRPGMRATHVLETTWCPCRMGRSSPEPGHFHEFEGLLSSRLSSISTPVCGALEKDVLSPPWA

SEQ ID NO: 989201 - protein, 69 aa, Homo sapiens
FGRHSTAHMRGPLLSPYAEWQCTVCVMRMSLDVTVGVLEPSDLSSGSWERDQYAVTCVRFQIYKPGPIT

SEQ ID NO: 989202 - protein, 125 aa, Homo sapiens
LQDPHSAPSSTEEGTGQQTCGTPAPLPISALGGLVRPPVRYDEFLPSCIIRPPACDASWIYSFRLLPSLRAAPGSCSTSAAASDHLPTLSAITLSTLSSLRLIMASSLNLLRGTHQAVRYHELGF

SEQ ID NO: 989203 - protein, 52 aa, Homo sapiens
GYRQAENGKLSSMEIPSPSSRSEIPPKSSGAMLALEYVAESYWRLHRHGVNG

SEQ ID NO: 989204 - protein, 69 aa, Homo sapiens
ITPGRFVLQIWPRSAEHPILPLGCKSCHPNIVLEKLSAFLHKSAASLQLLIVVHQSHIHSWFGLLSGIL

SEQ ID NO: 989205 - protein, 55 aa, Homo sapiens
GPAYWAYAFSVTLTKLTDTNISDAQEDRNRLNYPARHHPRSSIVLSAIAYGIRLA

SEQ ID NO: 989206 - protein, 144 aa, Homo sapiens
RHTHLQQQRMGGWGSGAPGWALTRAVLQTLGVIPSPPPLPSLSLPVCIKGLDVWSLNDPARQSDSGLPDTQSPFTPTVHTQRHLLTHTQIYLHTRSPFTATVHTHRHLLTHIYPHTCSPFTPTLHTHTDTYSVMLTHTHTIYTY

SEQ ID NO: 989207 - protein, 76 aa, Homo sapiens
MTVARTPRSVRMPQFAPYASIFSVRSTSFLHMPQSFLHMPQFPPYARQFPPYAPVSSITPRYPPYTPQFPPYAQVE

SEQ ID NO: 989208 - protein, 34 aa, Homo sapiens
KYFFGGRTFSSKKPSLTSIPRWEVSGHHKGGPGV

SEQ ID NO: 989209 - protein, 34 aa, Homo sapiens
HTDLAKVLAQKQPKFNVKPFHELFPTRSVPALEY

SEQ ID NO: 989210 - protein, 69 aa, Homo sapiens
NRTAFAADPFMIRERPHYGVNKFNSNVLLNKHLAEMLEASEGQAPGWFTEASAKVEKNLGLCKAGVYGL

SEQ ID NO: 989211 - protein, 50 aa, Homo sapiens
RTVDYSFRMQDRDVRMTSFRMQMKDVRMTSFQMQMRDVRMTSFQMQMRDG

SEQ ID NO: 989212 - protein, 81 aa, Homo sapiens
DEAPSRDRNPGPVHAPALDAGGRTDRWTDTSTGYEGAASERREDLGIVEKESKDSRGSGGRGRNRDRIVLQEGALLAPYAY

SEQ ID NO: 989213 - protein, 63 aa, Homo sapiens
SERGAKNQMYDDYYYYGPPHMPPPTRGRGRAGRGGYGYPTDYYGYEDYYDYYGYDYHNYRGGY

SEQ ID NO: 989214 - protein, 59 aa, Homo sapiens
EREREDRNICVVHGTDPFYATQTEGDRGMNASLAALLMGRLCEAADRNECLVKREAGMC

SEQ ID NO: 989215 - protein, 58 aa, Homo sapiens
RESEEQIAEVKEAFSMCDKDGHGTITTKELTTEMRSLGQNPSEAELQDMINEVHAYGN

SEQ ID NO: 989216 - protein, 38 aa, Homo sapiens
GTKEGDGAEQGLPEHSEPLEDRDSCTSSSSATSPASAS

SEQ ID NO: 989217 - protein, 58 aa, Homo sapiens
MRQMFANKVKETELLLTHKERELHDAFEHLTRAHQEEKRTVEEKRRQLEEETNAFNRL

SEQ ID NO: 989218 - protein, 66 aa, Homo sapiens
HNRPTLLLFCQVVRASTSWVSIKGLYASRKLMPWRSKMRMSIWRQDVACLGQPGAWAGSHRRLMDK

SEQ ID NO: 989219 - protein, 49 aa, Homo sapiens
MVLKMENPPSLARSHLDWMQSMAPCTRRADTAMTADDTEAPAMTLAPGH

SEQ ID NO: 989220 - protein, 76 aa, Homo sapiens
RNGGGSMNALTAFESLLLFEGKKITINKDTKLPNACLFTINKEDHTLLNIIQSQLLKDPDVLYVVYKDTHPLEHMI

SEQ ID NO: 989221 - protein, 62 aa, Homo sapiens
RTHLCQLIEAGATAFRVFCAPLDCLIESLENRCNELSCRGLERPDSAPVASGSSAEKPDAPQ

SEQ ID NO: 989222 - protein, 60 aa, Homo sapiens
KDVHTQLTLHVGTYCAHAHTHLHNMQKASTVGSTLTREDIENTLENLTMSSYTICLYTKT

SEQ ID NO: 989223 - protein, 53 aa, Homo sapiens
SDLLTWRCPFPNTHKATVILTSQTLSEDMKASELSCPVIILVFIALSSIRPGQ

SEQ ID NO: 989224 - protein, 44 aa, Homo sapiens
DYSQPSSARLSIFSLSSRCLRLLLGAIIFITTIIIIKPPGHNPI

SEQ ID NO: 989225 - protein, 59 aa, Homo sapiens
GRYLLTGRMPISVTLTKLTNIYHLRRSGNRKRLKLSVPAIILVLIGLPSATPPVCWVIR

SEQ ID NO: 989226 - protein, 81 aa, Homo sapiens
  misc_feature (7)..(7): Xaa can be any naturally occurring amino acid
MLINPPXHCENSPLTRDSSLKTKTDKSLVTVEVAQNKEHCVYFGGDPFLLVNHWANIYLFIETEFSHRQAGAQWATRSQKL

SEQ ID NO: 989227 - protein, 104 aa, Homo sapiens
TCILGVWGQDGRQCVAQKFLSIHHQCCSLMWCFRCEWSRTLAQCFVPGQSLGNATAGRFLTEKVLAYPCVLALDSGPVRGERPIPPVEWVPYHQTGHSQNWRPL

SEQ ID NO: 989228 - protein, 38 aa, Homo sapiens
MNWHTANLIYFIQKDNSLLCFFHIIIGIWEAREVYRDS

SEQ ID NO: 989229 - protein, 33 aa, Homo sapiens
MLLVALFTRKARDEMENVAHVSSLRKRGYRTLD

SEQ ID NO: 989230 - protein, 61 aa, Homo sapiens
PGPYSGIFLQSRPATARRSRCVYPDRSSVCPLPSCARFYRLQCLRVRSGLLSGFRLFHVMI

SEQ ID NO: 989231 - protein, 71 aa, Homo sapiens
MRPPVRGSGHYLWYSSSVDLGPTYPGINSEADTRQSHPQKGPSTEAASADRLHSWTRVGLLPRELQIAPHP

SEQ ID NO: 989232 - protein, 85 aa, Homo sapiens
SRTQALTEEDAQIAIMQQHIDRLPLLNEKQCGQPTGAQGSLRSCVTRMRALPCGCFKPLSSARTCKTEKSQIDRKINQLSDEVSV

SEQ ID NO: 989233 - protein, 36 aa, Homo sapiens
FLLMRCLYTSSLLKPQLLDPVSPSFVISDVPLITPA

SEQ ID NO: 989234 - protein, 53 aa, Homo sapiens
FLALEFMERYNWNRRLRSKGMRERFFLALGFVERYNWNRRLRSKGMRERFFLA

SEQ ID NO: 989235 - protein, 74 aa, Homo sapiens
SIAVVSIPRQLPVSHSEAGVQGLSAEDDSELGSHCVAQTGLELLASGDPLASASQNAEMIETESDCVTQAGLQL

SEQ ID NO: 989236 - protein, 72 aa, Homo sapiens
RARTRIRRWDYRHPPSYLANFCLDGISPFGQASLKLLTSGDPPASASKSAGITGVSHCTQPVTVLLITSISL

SEQ ID NO: 989237 - protein, 130 aa, Homo sapiens
SVSGSHSGIKATFSALMFSTFSEEDNYESVHESFWEQQKRQCQGLGGRFPSLLSPVHLGLRQYLHTSDLGTQLEGPPDRRRKATGRNPGTGCRCCSWGLALSSFHRGPWFKASSRTKVLVLLSPQLATSS

SEQ ID NO: 989238 - protein, 131 aa, Homo sapiens
ARTLWGCLSLTREQVHTACHTHTHTHTHTHTHTHSEVLTSPQPRARIYLCAHDTHTLYGTHTHTPSHMEHTTLRHVHPHISHIGSLLYRDTVISCVHTDIGFRCRTHIETCTLETQRKRKISHTLSLTSHS

SEQ ID NO: 989239 - protein, 122 aa, Homo sapiens
FRQKTKTTPANTANPVSTKYTKKQPDMVGGCPQSQPPGRPRQENGTNPGGRTCSEPKPHHCTLHSSLGDESETPSQKKKKAYPPKASSRGFSHINRQTQEKELFPLGLLMGLNKTCQKPGRH

SEQ ID NO: 989240 - protein, 88 aa, Homo sapiens
PKRLQEAYNKHYQPSWAPFSRCNQIFTEGELMDLHASTILTCRLLAIYDDRANAADAKHSTLSIRLNIFQKADSLHRTVSDSAAYYSS

SEQ ID NO: 989241 - protein, 35 aa, Homo sapiens
SRSAATELALNSSELRSSECIAESTTDGAAFIPAG

SEQ ID NO: 989242 - protein, 105 aa, Homo sapiens
MEWNGVEWSAVEWNGMEWNGMKWNGMEWNSEMKCKLRFCHYTPDCVTERHPVECEEWNGMEWNGMEWNGVEWSGMEWRGNERNGMEWNGVERSGVKWNGMRWNRM

SEQ ID NO: 989243 - protein, 35 aa, Homo sapiens
  misc_feature (1)..(1): Xaa can be any naturally occurring amino acid
XRGGSKAGGGYDFYDVILRKGADCCEQSVDSAYSI

SEQ ID NO: 989244 - protein, 86 aa, Homo sapiens
MAITEKAMGPCMVDYACNLSTSEGQGRRIARGQEFKTSLGNTVDLIATKNKNISQVWRRVPVVPATQEVKAGGLLEAQEFKTAVSY

SEQ ID NO: 989245 - protein, 120 aa, Homo sapiens
  misc_feature (5)..(5): Xaa can be any naturally occurring amino acid
ENPAXGITRESACHVDSDFYKPPLQAGSWLPRALLSIPPACSDTATPAPAGPPRLTGIEDGLERLDVRGHARYPVDANLLDTPLLHLLHTLPDDVGHLGALPPGVEREDGRRAAPTTALP

SEQ ID NO: 989246 - protein, 143 aa, Homo sapiens
LTPRGSLSAQIPGSLWLQTEFHHVVSHVMSKPQVIIMALPVIECSLKRLEERPMTFVLETPESRFITTMLRLPLWLQGHFFHSFIYNRCSICCVPDAILGSRETRQSPCFPRHPHSRKDCYQPGVVAHACNPSTLGGRGGRIT

SEQ ID NO: 989247 - protein, 97 aa, Homo sapiens
ANRNFLDQGYTYRCAYILSIYTMYIFIKPQNLPDREISDRCPLTELKEDVASKITEPILRHQSSNQIASNPVLQSSLESPGGALDTIDPCRTLPGIR

SEQ ID NO: 989248 - protein, 63 aa, Homo sapiens
RCLSTTPGVTRCHTVGPWDRSSDVFPGPTVCGVCVSVPGPGTVPHLGLHTPPDDGPLGGYRRS

SEQ ID NO: 989249 - protein, 94 aa, Homo sapiens
RNSGHGITGMCYHIWLIFVFLVETGFRQVGQAGLKLLTSGDPPTLASQSAGITGVSHCTRPYSLLFLIYLFCNDVSDLFFFWELNFSLKPIRGF

SEQ ID NO: 989250 - protein, 51 aa, Homo sapiens
VAREAQQVVTPLMVADTRWLRSPYGGGGQLQGAEADVILGLVINGVGFICV

SEQ ID NO: 989251 - protein, 82 aa, Homo sapiens
DPFGVGGGALANWTAVVGCTAQFRCGLWEAEAEEAARDGAEDEEAGRLVMLTRPLTKLKRGSGHKGVATCWVQAPGKSGQYR

SEQ ID NO: 989252 - protein, 90 aa, Homo sapiens
FKASRVLERRIVPHQLRGGAGQLSFNNWTRSTEHQSWPVRRRSTDHPELGQGLNNGDRSPPVPASGLECGYRTKGLLVLQPLYSCMPCGH

SEQ ID NO: 989253 - protein, 166 aa, Homo sapiens
  misc_feature (13)..(13): Xaa can be any naturally occurring amino acid
  misc_feature (61)..(61): Xaa can be any naturally occurring amino acid
  misc_feature (77)..(77): Xaa can be any naturally occurring amino acid
  misc_feature (136)..(136): Xaa can be any naturally occurring amino acid
ILRQSGRTLDAGXGGCSELYLHHCTPAVHRVRLSLKNNKQQKKKMKIKMGPQDVAGWVCGXGSAAKGECYGKATHRXKTKEALVDASDTSPKVVTESEQWIFKPGRLAESQSSSYKNLRTTGLAWSLRLSRPHTCXPYTVAPIVARECGHCVCVMLAYPILGPIQM

SEQ ID NO: 989254 - protein, 33 aa, Homo sapiens
MLHVLGRCRKNLDPCSLWVVHKAQHGPEPQEYP

SEQ ID NO: 989255 - protein, 49 aa, Homo sapiens
MVSKHDLVSFFSRVALGGSGGASVSSTGVAPRGANTPAHWKKGVVPRIF

SEQ ID NO: 989256 - protein, 81 aa, Homo sapiens
SSGGGRCANATYIKSTMTYHATFVAKPFGSARLEVAGLLAGELLQERTFRGVQHYKADCILSNTDHLPLMRPAPTLDGTLT

SEQ ID NO: 989257 - protein, 78 aa, Homo sapiens
MHDGVGKPLGSFATPVQGSSHGRLAVSAPVLPPMLPMDEPNVPRARGLVDPADTAPLTREYREWSSPGTHEFILSSTF

SEQ ID NO: 989258 - protein, 84 aa, Homo sapiens
QLRLDTVTMRAVRRHLVPQHSAPGRGAACQWLSDDGYWTDYDACVCDYLEQQVASDNQLARLSLLGYIYTVNYTTHTADQQDYQ

SEQ ID NO: 989259 - protein, 106 aa, Homo sapiens
  misc_feature (98)..(98): Xaa can be any naturally occurring amino acid
MEDSQRDDRTLLLVPPSDDDHAVGDIGGDMVISAVDADIKHRRTVALQHLLTAALVARSTSEKRTRQRSHCQTPRRPPGGRHEAAKMLRTGCELCLGXKLSPALRA

SEQ ID NO: 989260 - protein, 74 aa, Homo sapiens
ELVRTVGIRLINLYTALRRSVALADAMDALPCALSVTVIKFNEARVSGGSYYDFLRLPNASDLISDAHDSLNEI

SEQ ID NO: 989261 - protein, 79 aa, Homo sapiens
DQLLQHRLFTREPQDTYHYLPLSLPHRRPHFFFAKFRIARSLTPFSPYEPLNFHAMFQPLLEMIHEAQQAIDIHLHSPA

SEQ ID NO: 989262 - protein, 67 aa, Homo sapiens
DLGAVHTRAEGPGPQYWRGPGLKTWAERPCPPIECEHDRKQSSRPGLRGSGGRQAAQDPVHPLMGRG

SEQ ID NO: 989263 - protein, 33 aa, Homo sapiens
HAGCQEVLERPEPPPGLRKIRDQEGRRRSLCCL

SEQ ID NO: 989264 - protein, 46 aa, Homo sapiens
YDCLVLYTLKRVRHHCARAARVMHDVFQHILFAQQSHAMYRYLRVR

SEQ ID NO: 989265 - protein, 65 aa, Homo sapiens
GTEGRQQDGLPDREQALRCPDPVAGALRGLPQGAGELENTLGAQAEAASVGAKEEEATEGGLVRS

SEQ ID NO: 989266 - protein, 91 aa, Homo sapiens
NNESLKLLKTAIGKAGYTDKVDIDKDAASSEFFMAEKDDLDCKTPEDPSRYTSPDQLDDLYKAFMKDYPAISIEDTFDQNDCGASQKFTAS

SEQ ID NO: 989267 - protein, 71 aa, Homo sapiens
ANAALKEKIRLQRNTHYEEVRRLHERLPREEVHVKLDKARPHLTARIHERPTRPEQRTDNSRAAPADFYSV

SEQ ID NO: 989268 - protein, 47 aa, Homo sapiens
NRDAFASPAPEVCGSLQVWGLSSLHQLPYAVVLIQVISSRSLSIMSS

SEQ ID NO: 989269 - protein, 82 aa, Homo sapiens
  misc_feature (50)..(50): Xaa can be any naturally occurring amino acid
DSVIVVLIGGELTQITLRAVTENIKVLFPTEIHSGVLEVIFSVPPILTCXLPPPRVLWGPQGESQVEDQTETRLLVSHDVSA

SEQ ID NO: 989270 - protein, 34 aa, Homo sapiens
NPTPFAEWRTLYPSPPGLVAGCLLLWGLWSDPFG

SEQ ID NO: 989271 - protein, 98 aa, Homo sapiens
MDPRLTAYVCTCRILCVHVRNDKSVGVSECADLECSILLCNESKRVCRRVAGHLSVHVTVLDITGRALTGTLRAYVCACECVMGVSGRVCVLCIRPGK

SEQ ID NO: 989272 - protein, 36 aa, Homo sapiens
SPERQTCWEPEDSPILVLRCDSHSLQFAAAPKVVPV

SEQ ID NO: 989273 - protein, 70 aa, Homo sapiens
LVFPLYANLIFKAKNSSDSVALGIAIDESGDIRTDMQSASNKTTACTPLLTTGATLTTDNNQVQYRIGTL

SEQ ID NO: 989274 - protein, 39 aa, Homo sapiens
RSTLQKSKAENSMSHQQTVNIMPHTSSPILNCSQRRSRR

SEQ ID NO: 989275 - protein, 52 aa, Homo sapiens
  misc_feature (1)..(1): Xaa can be any naturally occurring amino acid
XTLEIPLFSNIFVIKREFEFMTHNMNLTDSDIKLCEKKTRFEVVGAEEVGGE

SEQ ID NO: 989276 - protein, 96 aa, Homo sapiens
  misc_feature (8)..(8): Xaa can be any naturally occurring amino acid
MMKSLPVXEKVIKSVGWYNSYLFHPIAACQNFPVESDWDEDPDLFLERLVSLTFGSPSRYQLDYINKLTNVDDSTCHWGPRLTEEHFGRGLKDTDK

SEQ ID NO: 989277 - protein, 61 aa, Homo sapiens
MWPQTVVTILSATSAAGSLPLQLRSKCVTRIDAPKSHLEFCFLWGSSHDLLSFGGPPPKES

SEQ ID NO: 989278 - protein, 132 aa, Homo sapiens
MFKPNVRNLRTLKKKLEELLTRIVSLEKNINDLIKSKKQHKNFVKHTQVSVAKSMKQKKVYQQIEDQLNKIKHEDKISRKNNEEEQQRIQEIWDYVKRPNLRLIGVPESDGENGTKLENTLQDIIQENFLNL

SEQ ID NO: 989279 - protein, 178 aa, Homo sapiens
NIKNNFALIYELPEESLDFGYPENCQTGALKTFITQQWIMSQHQTKEEQSQMTSQVTGQIGWRREGIKYRRNELFLDVLESVNLLMSPQGQVLSAHVSGRVVMKSYLSGMPECKFGMNDKIVIEKQGKGTADETSKSGKQSIAIDDCTFHQCVRLSKFDSERSISFIPPDGEFELMRY

SEQ ID NO: 989280 - protein, 45 aa, Homo sapiens
  misc_feature (33)..(33): Xaa can be any naturally occurring amino acid
  misc_feature (38)..(38): Xaa can be any naturally occurring amino acid
MGKHFGTPVETPARVSHGTPVPLSQSTGHAVLXASGLXSKPRIKR

SEQ ID NO: 989281 - protein, 38 aa, Homo sapiens
  misc_feature (17)..(17): Xaa can be any naturally occurring amino acid
MSAWHVVSTSITISISXASHIAISTTICIISNCTASAA

SEQ ID NO: 989282 - protein, 80 aa, Homo sapiens
  misc_feature (67)..(67): Xaa can be any naturally occurring amino acid
MVFSSIRSFKDFFAWVILVIHSSNLFSRFLTSLPWVQTSSFSSEKFDCLKPSSLSSSKSLSVQLSSXVGEELDGHRDPRV

SEQ ID NO: 989283 - protein, 35 aa, Homo sapiens
  misc_feature (26)..(26): Xaa can be any naturally occurring amino acid
KCNDQYQNGSKLCNHPDTCCVSEGFXGGIDKHRVP

SEQ ID NO: 989284 - protein, 43 aa, Homo sapiens
MQERDFRCLCVSTQMALVIIMPHRVIDKEGRLYVLCQGVENDV

SEQ ID NO: 989285 - protein, 114 aa, Homo sapiens
NEIHTHKQSLWYVSLLQARRNTSLLGVSGFTYSGHTMINRVRQYVALCIRLLSLSLFSSFIHVVYVLMVHSFLLPNNIPLYGFTIFCLSIHQLMNIFVVSIVSTIMNNVAMNIL

SEQ ID NO: 989286 - protein, 41 aa, Homo sapiens
AYCGVGVNSVEMMDKERNKDKMPEDVTFSPQDETQTANHTP

SEQ ID NO: 989287 - protein, 42 aa, Homo sapiens
  misc_feature (36)..(36): Xaa can be any naturally occurring amino acid
  misc_feature (41)..(41): Xaa can be any naturally occurring amino acid
MAVIHLFLFALPFLRILYITDEVNDPSLTIKSIGHXMVLNXT

SEQ ID NO: 989288 - protein, 92 aa, Homo sapiens
FGVLRPTGGRLFCDCPWRFGLCSHESPGYAGASWERVVIGSSLRGLALPFPLPKVFIFADPDDWPNRISYPSPKGLPTLQGLSGSEEAGQSL

SEQ ID NO: 989289 - protein, 84 aa, Homo sapiens
MLSPATLPRMNILVQTHSCTFKPTIVPSEELHSIASWMQFRLDFTFLSVTFDCERQVTIYTRVLENILVSYFVPTGSEYQLPTK

SEQ ID NO: 989290 - protein, 45 aa, Homo sapiens
KIPVPGLVGRRKRHCSLRPADGLLTGVGAVWTEALVSEARYGLDA

SEQ ID NO: 989291 - protein, 103 aa, Homo sapiens
VIDATYTWEKIFATYSSDKGLISRIYNELKQIYKKKTNNPIKKWAKDMNRHFSKEDMYAAKKHMKECSPSLAIREMQIKTTMRYHLIVASINTGVYTKVASIN

SEQ ID NO: 989292 - protein, 40 aa, Homo sapiens
IYRIPIMRVPGGITRKILCRLGGVKAKVPYLLDISIYRHI

SEQ ID NO: 989293 - protein, 76 aa, Homo sapiens
GFWKVVAYWNERLTKQFVVFLRQVSQLPTLGIFHGYQLGTEPSTELNNLQVWFLIRLFGNPTGHSTLSILAISDFF

SEQ ID NO: 989294 - protein, 114 aa, Homo sapiens
LRRHGGPFRHRAAQVPDDHLLKEQHLASLHQALWVLTTHLTTLSQVGRQSTNYTNQPRKTTVLDYTNVPCETSPSQHYSQWDTSPLTILTSPGERPIKYTNQPIINQAIIDTNY

SEQ ID NO: 989295 - protein, 48 aa, Homo sapiens
DPPGVLEETDGGQVLADDEGGVTGAPALPPPSSLMSFSSVGGIRAYFT

SEQ ID NO: 989296 - protein, 39 aa, Homo sapiens
MQLGINLSKGVLGGVLIFRDYLILLKVFSIYTVGIDKHG

SEQ ID NO: 989297 - protein, 50 aa, Homo sapiens
DKGKGGCWENLRRRYPQQQETILQVLPFLSPPMSQFRKLLSLSTLPLLAH

SEQ ID NO: 989298 - protein, 36 aa, Homo sapiens
VSLQAHLPLIRSSSCQLGLLNCPGVGQAPSSFSRLR

SEQ ID NO: 989299 - protein, 85 aa, Homo sapiens
  misc_feature (47)..(47): Xaa can be any naturally occurring amino acid
MIHNISLRNFLLFPVFGSQASHLGRVGSAPPSHPPSSVVDDSSHIQXPRHSSRVAFISSLLQGSTRPLVESPPGCTGTVPLASCH

SEQ ID NO: 989300 - protein, 51 aa, Homo sapiens
PTDWVLRSGAFTDDFQALRGQRLRPVSKELDPFETVELCQLLLEWPGWGCC

SEQ ID NO: 989301 - protein, 75 aa, Homo sapiens
SDESALEWINSRLELIMKSGKYVLGYKQTLKMIREGKVMLFILAINCPALRKSELEYYAMLCKTGVHHYSGIDKY

SEQ ID NO: 989302 - protein, 101 aa, Homo sapiens
YEMERVGFSKIRLELSGEGCSPGSRMSEKILRALGEAVPSGLVGTNPGKCGGSRGGVGPLPPGSQAAPGQDWAEGATAASTLILETHRRCLGFGMHATIFS

SEQ ID NO: 989303 - protein, 117 aa, Homo sapiens
HRLTGPTSPTLGERGSERYTAEDFELTQSTRVKLSKSLAVCQVAFIVRRDNGSIEVGFRGASGERKEYFFAPALDLIPTYSTLLSAGAKLGGLRYYIDTQFASVLSFQPPLAIYIQL

SEQ ID NO: 989304 - protein, 82 aa, Homo sapiens
MHTTALEASRALTEELPRHLAARHLIEKSVRKIVSLLGRAPRLRWSSTCPREPRSRGTAANQERPCLHFRNHLLGDSVALLY

SEQ ID NO: 989305 - protein, 58 aa, Homo sapiens
SVLGSKVLGLQIEPLHPAKIHLDEGFMEDERYELGLGWSSLHTLYDVSDGPGMEFLYL

SEQ ID NO: 989306 - protein, 62 aa, Homo sapiens
LTREMKASDADHGTRRGRTQNPTQRNGSGANNTTHNLSLTWTHRAEAPETRVLPHPSAWWLC

SEQ ID NO: 989307 - protein, 55 aa, Homo sapiens
HRAGDSYLTVLISLTDTQTYLSRPLCQAAIFSKALTLCFTTIGHFFGHNSTTGSS

SEQ ID NO: 989308 - protein, 76 aa, Homo sapiens
MEDVYGTEAVVVHITTLKKCRNETEKHSESYKFLGSCFNVYSTKGRGKYTKYVECISIIFIWYELSSAGEEVLGYY

SEQ ID NO: 989309 - protein, 37 aa, Homo sapiens
FDGDSHVPASSAARAREASLPTDVSQSRMESLSLAPA

SEQ ID NO: 989310 - protein, 42 aa, Homo sapiens
EPPLSPPPEASPFSPLEETPLFPPDESPPSPALETPISRPPE

SEQ ID NO: 989311 - protein, 61 aa, Homo sapiens
  misc_feature (2)..(2): Xaa can be any naturally occurring amino acid
WXPAAEMAKGSFKYAPNFFGHAADQQRGVTIDTSVGKYETSKHYDTLIDAPVYIHVITNYA

SEQ ID NO: 989312 - protein, 73 aa, Homo sapiens
EFELEESYNGRFILGTIMNTIRVVTLQLLNQQEQEKEESSSEEEEEKAEERLRRPSQEQSVSASSGQTQARLN

SEQ ID NO: 989313 - protein, 119 aa, Homo sapiens
FDGDSLSHTVLRHTHNDTHTFQRHYTYPHPIQLLTLTNSQAKYIHTHRHTHHSHTHTHTHTHTHTPNTAPLLQHTHTPNTAPLSQPHADTSTLSYIIIRIHPIKTMEIHWMMIYESLRR

SEQ ID NO: 989314 - protein, 73 aa, Homo sapiens
PVLWEHNNCGVARHKPLYEAGYRRPARLGLLRMSDSSPNVLSSSRRLSPTKSNNLLSLLPALVIVIVVRGGSS

SEQ ID NO: 989315 - protein, 121 aa, Homo sapiens
PGAHQYTQSHSTVRPGARQYTQSHSTGRPGARQYTQSHSTGRPGARQYTQSHSTGRPGASQYTQSHSTGRPGARQYTQSHSTGRPGARQYTQSHSTGRPGARQYTQSHSTGRPCTRQYTQS

SEQ ID NO: 989316 - protein, 82 aa, Homo sapiens
FDGDSLNPITNDLERGSSYFINKRRGSIIQQYDRSAVDDHSEQKTLGALLGLCFEAPGCPGISGTLLGYHGLRLLDILQMTS

SEQ ID NO: 989317 - protein, 83 aa, Homo sapiens
MSISDDFENRILLNCPYCTLNADRKTLETHIKIFHAPNASAPSSSVSTRRAIINEELLKPKQSDSESKLFITVRRALTEILFM

SEQ ID NO: 989318 - protein, 75 aa, Homo sapiens
SRIPDMASCNRLRNTQLTRFAEDSTQPATLSYQNESLVPCPEAGSSVPYSALLEALLNPQLLTAADSLSSYPEML

SEQ ID NO: 989319 - protein, 55 aa, Homo sapiens
GPTMRGEDTGEALIVLGLLHSPPFLQELGAHGASTTSHVAPVEGSRQLHLYPGNV

SEQ ID NO: 989320 - protein, 37 aa, Homo sapiens
ARLLHVVALGGLVNLGMELMLGAGSRAVLAVRLRSSH

SEQ ID NO: 989321 - protein, 91 aa, Homo sapiens
LHRMSGTYVQDFSLTMLAKWRWLPAGVSVPYHTDPSLGLLVCSHDMAVGSPTVSDPREKGKTTTSLMAYPQKPHTIFLITHRSVSPKVEGA

SEQ ID NO: 989322 - protein, 70 aa, Homo sapiens
GTALQGAPSCLEQDFRKRSIVTGDRCMVLHILAEKFSCDDLARRGHSFWSMELHTVCQYDAQDFTVDTAD

SEQ ID NO: 989323 - protein, 84 aa, Homo sapiens
MLNKSGRHYGLAALLAEPFATKEGSTLCTEEVFRAPRPVKGWHHFIQDGAAAVVAALEKEVVVDLFTVGLAIPLEEVPESDLLL

SEQ ID NO: 989324 - protein, 93 aa, Homo sapiens
LSRSPTDDHEQTEHYSSIESGDTDLVFTASLHLNELSCSREYFFMTLRNQPMSLSLYRQFCEHQELQTLNDLYNQDDNHQELCSFHIRASYAA

SEQ ID NO: 989325 - protein, 47 aa, Homo sapiens
AYLLFSSDEELQICPMARSSSYGNDAVPGVRRRCSSLTFLGYGILTA

SEQ ID NO: 989326 - protein, 47 aa, Homo sapiens
HRWSDMSVISLKALIRGSVVLRVRERDRGRGGRRKKRKEEQEEKVHA

SEQ ID NO: 989327 - protein, 36 aa, Homo sapiens
MGHKKNAIKTQQGVPFSHKWEGNSLKGRKPGPEGIV

SEQ ID NO: 989328 - protein, 73 aa, Homo sapiens
SICAGSTLKRCPIMGVPGIERIIVKSIGADVNKMTQYITELSEMVAHIQRTVSEAQYELTILCMVVSHIKSIT

SEQ ID NO: 989329 - protein, 67 aa, Homo sapiens
SVIDGTLLRLVVLVDGGEVMDRRPRLTWLMLCSWDSPGPPGTKLGPECCCNMESVILSPVSVTFQYP

SEQ ID NO: 989330 - protein, 62 aa, Homo sapiens
MAVLEDVFSTLIVKGDSMGLTNRNLLHVLPVQYFILSLDESSSCLRTTFFNPPLSILYVIDV

SEQ ID NO: 989331 - protein, 92 aa, Homo sapiens
PITATVPVEVSRKIPNIYETVAENTLQVIRKKHREEEMWILLLHLRGHLSPAPPKMSCCPPERALHVTIVPGPSLQAPYSAQSLSPLWILHS

SEQ ID NO: 989332 - protein, 33 aa, Homo sapiens
MASHCEASSPHGNKRHVFHFGTVSPQTSQAGVA

SEQ ID NO: 989333 - protein, 42 aa, Homo sapiens
MLCRATKLERRWDAGYWYREVPAASRPCLDPRHIGVVWSRDW

SEQ ID NO: 989334 - protein, 135 aa, Homo sapiens
HFWPYDETFDFSALALLLHDPDAEHTGSCCLGQENLTTFWSWGLIEGLMKMMIIALDRAPSWCQKFRPEDIRGLSCWVSRDSPCKLPGDFFYVFPLYAACEDADRRQCIRNTEVGFCYSQDLLLLMSPVVYPDYF

SEQ ID NO: 989335 - protein, 97 aa, Homo sapiens
RHSLSACYYPDLTLVCICAYNKELSKERDALRLEFIQEQFIPFSTASGHNRSNEDLKQDKSELDEKLQVLVTEMLWWPEKLCAAGEAVSARRRCGTS

SEQ ID NO: 989336 - protein, 95 aa, Homo sapiens
PQASPPITHLGAHIGAVGLLRHQERVTQNELLKHVTVKIFEVVTSRWTAVLGTAFVRRRQSMEKLVEKLLVLVNLFNAQLKAFRDEEKARVAVVD

SEQ ID NO: 989337 - protein, 78 aa, Homo sapiens
PHSFFNKSSPRTFLRPSPEDEAIYGPNTKMVRFNEGRQRGPPGVAGGNDVGDIVLLAFNDRDPRAEQDEAVQERRPEF

SEQ ID NO: 989338 - protein, 71 aa, Homo sapiens
RHSFSGLWIPSIAEILATDVSVDEMRKGLQAPRLMFNYATWKHKEMLFSRCPSKLYSEPVYQQQQAKGRVC

SEQ ID NO: 989339 - protein, 137 aa, Homo sapiens
GAQLLPSLLCPWSACCPRLRQVSGLPDGTHPAPTLLLPNTSLTPKGQSGGAWSAACVRMRRKESKGSEGRGAPTTSPSTSLIPVVMETVARDGGSLGVSGNCAFDFPQAAGGQVRLRQEREGPQTMLPWAEACFVLG

SEQ ID NO: 989340 - protein, 49 aa, Homo sapiens
MCRSSLGCLVSDSLMLSPGCSGCPDYLAEQAGWRSGTSYLIKLWRAAYR

SEQ ID NO: 989341 - protein, 120 aa, Homo sapiens
GRHSFSAGVVSHFGRILKVLRCSNATSALLAWPPSLRAVTAARTSPLLEAEQEVTRGCAHTEGAGAAGAEKDVASKIWKLIFARIESLLGSHISRAPGSWLTGSSRLLDTQYSWVVPLRA

SEQ ID NO: 989342 - protein, 72 aa, Homo sapiens
MTHEAVHSTVLASILDASYASVRLLPAPVSYYFDRDDVVLKNVSHILSSPISLREREQAEKLRSFCAAGVPS

SEQ ID NO: 989343 - protein, 30 aa, Homo sapiens
MGRRREVPKPHIVQISQRLVQLVRIFVQLR

SEQ ID NO: 989344 - protein, 65 aa, Homo sapiens
MESGAVPPSGEQHVKAHRRPQCSPGPWDSHAERRRSFMCQSRLLSRDCGSARGVPYRCIEAERHI

SEQ ID NO: 989345 - protein, 49 aa, Homo sapiens
GHSFLGCTWFSRRPRVGVHVVRPSRRAQPVSRRSTVVKVGDGAGSGRPA

SEQ ID NO: 989346 - protein, 149 aa, Homo sapiens
SRDPRRTASQLCVFRRKDINTTDQQYHCASDMGSGMNRSTIVNYQMVKTKEAGMQPELQIRGVGFDRTLGGLSDVSSGFENVLSGLLNEQRQWSESLGWCWGNPACPGQAVCVEACVGFPGVLWAYADRVGHIEGLMGDVDFKAPVPGV

SEQ ID NO: 989347 - protein, 51 aa, Homo sapiens
DYSAIYKVLPALKKLASQNDVYLLHILYALAKLCFFFYILFVENGILALCS

SEQ ID NO: 989348 - protein, 48 aa, Homo sapiens
MVLSLGPQNLFSVRQSLALLPRLECRGVIIAHCSLQFLGPSYLLSSAS

SEQ ID NO: 989349 - protein, 72 aa, Homo sapiens
  misc_feature (25)..(25): Xaa can be any naturally occurring amino acid
SLVTLGAWDGHFMRSSWEMYKYGHXTDSFMTEASVCLKNMEHVIYEATHGYKLNATNELNLPLEYHVTICET

SEQ ID NO: 989350 - protein, 102 aa, Homo sapiens
MPELVTFNAGTCLYPVYRKMKDPSFQVLVNPYSPSATSNQPSLIGLPFSLPPQARNTSYTFSSLSEDVSYPSSSSSLKPPLLFQKLQSLCVSSKNRLDCCSL

SEQ ID NO: 989351 - protein, 55 aa, Homo sapiens
MWPGCFSIILMAYSYLVIRLIAWSVTSGMKLRSPQHTLLCSVVDRFQYLAARELV

SEQ ID NO: 989352 - protein, 56 aa, Homo sapiens
MYKYIVIEPTRIGDETVRWITVWHNACTRLAVLAVAPACLFNPFALLLGILPYYIF

SEQ ID NO: 989353 - protein, 31 aa, Homo sapiens
MQDRRYLTAKPFTAKQLRRFRTPSETTADSY

SEQ ID NO: 989354 - protein, 41 aa, Homo sapiens
STDDVNDAIRRLRYTEKTVLSATFTFYNILLTPLIDSYQYP

SEQ ID NO: 989355 - protein, 34 aa, Homo sapiens
TSIYTHLAYQGLIGSFTGIHFTGEGLHLSNRYSV

SEQ ID NO: 989356 - protein, 60 aa, Homo sapiens
VGYCTYTVSSSRGYSPDTRRHTEQDARPGVTLSMEEVGSARGERMVARDTESLVLGTEAY

SEQ ID NO: 989357 - protein, 44 aa, Homo sapiens
GKLGYVDTRGRALNHASMEELGQLSFNTDTALMTTHELCQWRTL

SEQ ID NO: 989358 - protein, 52 aa, Homo sapiens
VQHRAPCVEDMVNNNLKYADDEIYCGKTKDIVKGLRSVQTLADESKQEALKN

SEQ ID NO: 989359 - protein, 67 aa, Homo sapiens
IPKSTCQTAARSTSNGGITHMPLHGTHTHNMKDTCWLQGHKTAAGYKSNTAQNLHWGREGQTGVGRA

SEQ ID NO: 989360 - protein, 51 aa, Homo sapiens
MGTKQRALGSGMYTITGSPVSVALAQYLITACLETAKSTSRGTPSSAPADL

SEQ ID NO: 989361 - protein, 95 aa, Homo sapiens
IRSLRRRGYARVTRSVYGKHRPPAEEPAPHLELQEENFLGCSVQRACDCFARKDKPWEEVEFRTRPRAHCFCCGSQDRKSQNNASGGSCSQASCP

SEQ ID NO: 989362 - protein, 61 aa, Homo sapiens
RFVCHALRGLSTVPQDELSPQRESDVQVTGPVSGPNFASLSPLWILTLTLDSSAHGKNRIA

SEQ ID NO: 989363 - protein, 81 aa, Homo sapiens
YGSWCVMHYGALSQLPQDELQPARESSARHQVIRPQPPGPQIRPDSPALDPALYHSNLLLMGRPELILIKHTTGFPELEIR

SEQ ID NO: 989364 - protein, 48 aa, Homo sapiens
FENLRPFALVDTYHDVIVEELALSMRILRVIRNDITINHRAQAQLVPG

SEQ ID NO: 989365 - protein, 69 aa, Homo sapiens
MRFVVSCTTRHLVSSPKMSCSPRESSDVTSNQAQLQAPIASSPALDTALYHSTLLLMGRTELLLIEHTT

SEQ ID NO: 989366 - protein, 84 aa, Homo sapiens
YGIADSSGKNNDKRDLQYVARGNHRGQNSSHYKAEEEREEVPHRKRGEEDHARSSLGIGLRLPLVLGDTHLLNHALHHLNVGLG

SEQ ID NO: 989367 - protein, 133 aa, Homo sapiens
MQALCQTCRERRSPDPHRWRRGCFWNTPSASLDYLWYKSYLLCSHFHPPQNQEAQSPDPTHLWGPGTGFLSPFCSLHVIQSNFTFFSLSLRQNLALSPRLECSGAILAHCNLRFWVQGFSSLSLLSSWDYMHA

SEQ ID NO: 989368 - protein, 133 aa, Homo sapiens
LRKNDLPVAREDGHGGFPGGNPSRLLGCSTGHCLLDKRDAPRRFAVLGAPFLWLEGTVWSLWAKSPHKLSDRQVLGSQESQGIDSKAGKRQSSGPSTVQEFPYGVLGVSDSKALLLNTSEWNLVEPWKRNKSV

SEQ ID NO: 989369 - protein, 67 aa, Homo sapiens
YRTAGQVKEEALCSSEQSEKGGGGGVEVVCVSYWSEGTKLCLLMFVSCNSDRSITTDLLLGSYLTDA

SEQ ID NO: 989370 - protein, 37 aa, Homo sapiens
MTATLLWGVKIHTKIHMGTQLDFRHSRGLLQRQRSNI

SEQ ID NO: 989371 - protein, 68 aa, Homo sapiens
MKYTWQPVFTLHLVYTDPLYALISYPLRFYHTDKENETNGTGTLSSLSSRVSDGNNKKAPNKKDTIRI

SEQ ID NO: 989372 - protein, 66 aa, Homo sapiens
MHVDNTDPTLMHGHTAMRKHMPTHAWCRKLITQILTHSCTSTHMHGPTLTHPYAREQTHAHTHTHT

SEQ ID NO: 989373 - protein, 62 aa, Homo sapiens
  misc_feature (43)..(43): Xaa can be any naturally occurring amino acid
MIKSCVPQVLGRSDSLNGKNPADVIKADVLRKFLAVLQQSYLXIEADVHFCWCIFKVKSLLC

SEQ ID NO: 989374 - protein, 59 aa, Homo sapiens
  misc_feature (1)..(1): Xaa can be any naturally occurring amino acid
XWIPHCGSAPKRRMLIVVVSKKLQITVSLRGGMLEVEGESDFTAEPVAPSTDCVVCNCV

SEQ ID NO: 989375 - protein, 91 aa, Homo sapiens
AANALLSVGFKYVLLHMWNNSQELATRRVCWVQAGLSHAHPCTDHITANCTGGVVAPRLPLTPLRTRLCSHVRPRRPRVCHAGTTFGDGDS

SEQ ID NO: 989376 - protein, 33 aa, Homo sapiens
MEKPYLHYKYKISRAWWHMPVIPVTGEAVPAGG

SEQ ID NO: 989377 - protein, 75 aa, Homo sapiens
MCIALQRMAQSKTPSHNKKIPPSDLTCGNSVQTAVTEDHKWGGFTFLHNTFFSLIVSGGGKVHYRLRANVLPLAV

SEQ ID NO: 989378 - protein, 74 aa, Homo sapiens
SYRLCEVTWRPALAENRSDRNAVCPGTPRSLAFWLAAMRQSGAPREPRGSRLQTETTKLPGQPSHAEIAEVTPR

SEQ ID NO: 989379 - protein, 56 aa, Homo sapiens
AQVPWSESLQTLMILVEAVVAEKTGACDFGLEGAAPNVVGPRTYGDEVAARCHGGI

SEQ ID NO: 989380 - protein, 40 aa, Homo sapiens
GYDHRQNLKLYVGLRTSAHGDIKVDLDWPKNRGSERGNRQ

SEQ ID NO: 989381 - protein, 36 aa, Homo sapiens
MAQRLASLSIRRRDDLHAGRLSSCRRTHAVLFIAYD

SEQ ID NO: 989382 - protein, 79 aa, Homo sapiens
MPTLEGDSTMVTSPLAISSQPRLPHRWCPCILPTRQEPLKSPQVLGSSLSVRSPTDSPSSLKSPSMAVPSPELEEPHLK

SEQ ID NO: 989383 - protein, 49 aa, Homo sapiens
MPYIYFITGTHRHTAPTEPHEEDTVTASTLLPSWPSAEPGAEAACRILC

SEQ ID NO: 989384 - protein, 62 aa, Homo sapiens
QEHFCSSMSMQSRVLECMDPGRGEAGLEFGGLDAWALVTMVDVQQSLSWGGCSFILGGELGL

SEQ ID NO: 989385 - protein, 84 aa, Homo sapiens
PFFGSSFLPLPGHLFAIEKDIHAYTSLRGSQPAYEGQPLTHHRGSPHAASPRLISPPGFCPRGESCQGSLRNLNSLTLVDLREM

SEQ ID NO: 989386 - protein, 41 aa, Homo sapiens
LSPLLRWRVPRRLLNRRRRCRRQDHLGKVSLMMGLQTLSSC

SEQ ID NO: 989387 - protein, 68 aa, Homo sapiens
SLGHLQPGPTRTAHGPASPAPPVSRLPVGCPCGRHCDLAAGLQKGSQTGRQRTSEGDQLIRKKTHRRV

SEQ ID NO: 989388 - protein, 136 aa, Homo sapiens
SRASRYALRLPPLDLERIAVCKLPILILSCELRYSSPFSSGRSESTQHQEMQFLRAAKSGKHRHLTLLIKEQTERGANTEILSAHRTKNTMASCKAHNARGVGSEDGERHRTEPRLLGIMHFREVLHDEPSDSKTE

SEQ ID NO: 989389 - protein, 69 aa, Homo sapiens
PWTMEHSGDFFDGTSAFMLTQMGYRRSAGLNCSFLLETRLFNTRVSILIAGVKNRDKYLLRLLYLQIKD

SEQ ID NO: 989390 - protein, 130 aa, Homo sapiens
  misc_feature (106)..(106): Xaa can be any naturally occurring amino acid
ASRVCRDGRSPQGSPSSSGSECDLFYPSRPPPSRQQTSFPMQLQSSSLAISDQYWQSGSRIGKVARVLVNGKVYEAQVVVLRGDCGISMSKTKRNQGIQAQSLFLXLREKLGTTLLSLQFKMKRWRQMWH

SEQ ID NO: 989391 - protein, 46 aa, Homo sapiens
  misc_feature (1)..(1): Xaa can be any naturally occurring amino acid
XPLITATDEAEAEKFFETERQSLQRVKIMPLQDSLVIMSKTPKQQG

SEQ ID NO: 989392 - protein, 34 aa, Homo sapiens
YRLHSFSDPSLLGTPTDQDICFRYYSFQFQNFYF

SEQ ID NO: 989393 - protein, 59 aa, Homo sapiens
PDQCDKCREILSVDCSTNNPSQAKLRRELDESLQAAERLTRKYNELAKVLPEEDAQHLL

SEQ ID NO: 989394 - protein, 96 aa, Homo sapiens
FCTSSPGAGTRQLPKAVPTGTECSDDFEERDPDLRDGLENMLPAPSGSGHCSARLRPTSCGDCGAQPSAAECEAFMVSGTESEECFLTCHKRCLET

SEQ ID NO: 989395 - protein, 44 aa, Homo sapiens
MAGVTMLGFSKVAFQVDVVVLRGLSTAARTFSVTILVALQVMVP

SEQ ID NO: 989396 - protein, 134 aa, Homo sapiens
MKLFLLKLCLFYLVSVIEKSGYNCAGTDFAVESFWFIYRRNCGIHIEHRLHGFGLELHLHLIPLGKAKISCHGAAKAFFRAAQLLRAAQVLRAVTDSRAAQVLEQSPNIFYIRRSRPPAKSCHRFSGRHSFSGA

SEQ ID NO: 989397 - protein, 68 aa, Homo sapiens
SLSTPRQLEGGWKPVVPGDGDAVCGDDLLAALLISGHQTLSLALDFLYTMEPHIRRPVVCMLSDTTSV

SEQ ID NO: 989398 - protein, 55 aa, Homo sapiens
DCRRLEVEMKVLVGLVPFEGCEEESVPCLSSSFWRFAGNPWRGGAESQSLPSSSY

SEQ ID NO: 989399 - protein, 40 aa, Homo sapiens
HIDPHTHMHKYTPMHKDPHTHAQIHTHACTQTGIELNPHT

SEQ ID NO: 989400 - protein, 75 aa, Homo sapiens
LKDKRDLAWYRAEERDLLRLAEMRDFFIYGLEWDLLFFERDGMCLSALKMSQICLFFEEVLERELPRITKLVLRD

SEQ ID NO: 989401 - protein, 84 aa, Homo sapiens
MCATKHTPSPGPLLPWLHSSADERSRSPPLTRRAAAPEVTPAAVEAEAPRELQQHASELTLVFPEQGGGQLEDTIRGKPHHRLA

SEQ ID NO: 989402 - protein, 84 aa, Homo sapiens
MVPAIFRTSSGSAWRREYTSSAGDIPAAQQKPVRIPLRARRTRRALTVSEYCRDTMTRSTRIRNGSMTRRAAWIYTYTADTHCK

SEQ ID NO: 989403 - protein, 77 aa, Homo sapiens
AQQRTQVALDMANAYRGQEEQANQELDELIQRVKDFLNLSLPRVPGHVHGPFATLPVACISLASYVEPEGLHWVRSL

SEQ ID NO: 989404 - protein, 38 aa, Homo sapiens
  misc_feature (1)..(1): Xaa can be any naturally occurring amino acid
XTVDPARYINHSCASNCVAEVVTFDTEDKIIIISSRRK

SEQ ID NO: 989405 - protein, 56 aa, Homo sapiens
RSLLSLVKTSGEIGLILTSYWALEQQEGALQRCRDLALEEELGTEPTEGARMAVLL

SEQ ID NO: 989406 - protein, 74 aa, Homo sapiens
GSRSFTECPCYKEEQYIAEIKLYIPDKTHGIASDSVTQVKTVQGIQPALHTPQKFTDFRFVTSRSDTWRLVNPP

SEQ ID NO: 989407 - protein, 45 aa, Homo sapiens
PLYPSNHLMFLLVHLLALGKEVLSEGGEKCGFLRRAKGRCGAHLL

SEQ ID NO: 989408 - protein, 54 aa, Homo sapiens
VEDPREQDMQAPHSPPSHLYTWGLRNRQLAALILAPDLGKASCHNTCPYRQSVL

SEQ ID NO: 989409 - protein, 99 aa, Homo sapiens
QGKRQDAPSSAHLPDPNTISYLFLLEHQNRVAEKEPISKMPLHNQATARGPTPQRPSEVESKAHLTSAADICSHDVMAQDQVLLYYLQHPPITFAELKR

SEQ ID NO: 989410 - protein, 85 aa, Homo sapiens
FPVLLKAFSPRIYRLSGEPRISPGAALQLMLAVRDPHKAHFLFCHRSPALLLEPRVGVSGRWSGSLEEKHATVPLTTSEDGSALE

SEQ ID NO: 989411 - protein, 63 aa, Homo sapiens
SRTPSAAVFCSPGDRASTAFTGSELQPIAVASLLSCFLPSETSDFRVLFMISSRRFLRSCRSC

SEQ ID NO: 989412 - protein, 101 aa, Homo sapiens
KTCRGWSGGPQQSVSQTSMDVAANLHHGRVTGRSLERLKDGRGGIALDAITGGDDMQHTAPHLLTSRSSTQCDRELRTGATYQLQSTPDLSHRMTNLRTMS

SEQ ID NO: 989413 - protein, 80 aa, Homo sapiens
LSLQNNKTNYRWVCKTLQILNIMCGSRTTGRRLLDSCINWPNSSLMMSSSRTLINSSQPLCELTKPCMGTHESNGLDIIT

SEQ ID NO: 989414 - protein, 48 aa, Homo sapiens
MAGVAAVLRWLELTNPLVPKRPRRAEGTFREGIWYWRGFRLPMPPLTE

SEQ ID NO: 989415 - protein, 137 aa, Homo sapiens
MWSGVKKSNAAFTELVSISVWLAVLRRRLTNSKINAGAPSTKPKLGDSIIEAPAVLMWRDIVLSVSRGPVTPSLCEPVSLARERIFLLTINGDINTIVLLVLRLKTVDDPYAYLNLSRIRDTQYWAIAGPMFPEALH

SEQ ID NO: 989416 - protein, 87 aa, Homo sapiens
  misc_feature (14)..(14): Xaa can be any naturally occurring amino acid
RKLLVINSTQAPFXCGLLVTQRLHAPLSSALHSAPQAAGKSPLQLLTAGSRSFSSLQTPSLEPDTVTITRETEAGPGVVVHLCDPST

SEQ ID NO: 989417 - protein, 72 aa, Homo sapiens
FELEIRALSAGGQELSRLPLVSILPPSLMSAHALSACQARPTPKEVLCGPSSSAGPGSGGSSGEIRNGAGWA

SEQ ID NO: 989418 - protein, 32 aa, Homo sapiens
SGGNSNNSNTSSIHQQQQQQQAAPPQPQPQKA

SEQ ID NO: 989419 - protein, 40 aa, Homo sapiens
MSETGAFAETSNSRQGLPRRGSFVKSGPRLIFGGVSLMDL

SEQ ID NO: 989420 - protein, 115 aa, Homo sapiens
SWQKYALFEAVTGKGWDCVGQQVQPWRWIPSSGTARQNNIPFLPWQYPANLPAMNLPHRHPVSSHDNSALHYPPPGSKPFCSLFQKAQASTDTTGQQTKSESQSLPDQQRPLRNS

SEQ ID NO: 989421 - protein, 80 aa, Homo sapiens
LIAETFVLWFLSITGATSCFVGLAVGRRVPLVLLCRPFGVGLSLFYYTSVHGVTLLKTMWLDTLTWWLCRSERGRPREAV

SEQ ID NO: 989422 - protein, 129 aa, Homo sapiens
AGALKACGMAGVGREQCGAALPAPLLGPDLDMCADICRISLILLSWCPITQAIKSLGAKNSCELDWVTGSSPGNKLGVAKGTAWIEKHVEHGDLQLGSQAPNTRPWNRERPWYGREEEKVPREEARMEG

SEQ ID NO: 989423 - protein, 69 aa, Homo sapiens
GGRCGTKHCLRDSTSNDDSGSSFTVVSGSHFVVTVTFDFTSLLGGDLRRLLMRSLAVGLNRGGPRPAQY

SEQ ID NO: 989424 - protein, 44 aa, Homo sapiens
SVWLTVYAHACMCPHLPVPVSVCTCISVSLHHVCAWYSPRCGSV

SEQ ID NO: 989425 - protein, 80 aa, Homo sapiens
IGEEKILPTSETKQCTILDTYPGASEADEQEKLYLLLGLLLWNLMQQELVRLSEFTTASTLSLDNKCDVDLSLTTQDTEH

SEQ ID NO: 989426 - protein, 122 aa, Homo sapiens
TTCTHSAGSHDEHRYTHTHMHTHNEHGYTHTEHPHAHTCRYTRMSTVYTQTPTCTHIDEHGYTHAHPHAHTCTDTQISKSTHTTTCSSVCVHVCVCVCNRARLCTCTCVHMDVCVYPCQSRE

SEQ ID NO: 989427 - protein, 117 aa, Homo sapiens
SSAQRAECTLLRLWNQMTARTLPASSSGLEETQHYQTQALLYQHQASQTQPPCTSVGRVFATDRDSGPNVRLTFSLQHLSDDSQGLSASIPLTGEVTTLQTLDRELHSSYHLLVQVQ

SEQ ID NO: 989428 - protein, 36 aa, Homo sapiens
VVILYASPQLHTHNTQHTHDTQHTHEHSTHTSIQHT

SEQ ID NO: 989429 - protein, 89 aa, Homo sapiens
PEAPRRQTALRAETGPLHSSLGDRGTLHLSTTDQNSTDSHILNAWSSTLEYFQKRLHIEDLRIEKLLTYKREHLQGCHHTQDYSERESI

SEQ ID NO: 989430 - protein, 49 aa, Homo sapiens
VCVLMYPCSSVLCMWVCVYLLHTHAGTHTQTRMHTHAGTDTDEHGYTRT

SEQ ID NO: 989431 - protein, 71 aa, Homo sapiens
MRKQKADEKWNEEGRGMSRPREHQMSMRSKSLGQAGTDWNEDPAATHHLTVSHTYGPCTRACSTLGFGPLI

SEQ ID NO: 989432 - protein, 131 aa, Homo sapiens
RLTPSSPPTSSASAPLPPPFYAPLLEVVVPAGYFSESSPPFPLSLHQPSFCFCHSIETALVQVTSDLLLAHPKGLSPGLTSSISQQRLHSRALAPPCNAVFLWSPGLHTGLASSYPDGSSFSGSFAGSSSS

SEQ ID NO: 989433 - protein, 75 aa, Homo sapiens
  misc_feature (48)..(48): Xaa can be any naturally occurring amino acid
AHVRVGEGDAAQLQLLGRSGLPASVPIQPLFWGLCAYHPVGYCGGRAXAMLHKIASSCQHHSPQSSVHWRSAGVT

SEQ ID NO: 989434 - protein, 48 aa, Homo sapiens
DGLVDASGLRTKHGAGYNKKLCLSSGEIIKVTEAMTMMFEVQRPGGGF

SEQ ID NO: 989435 - protein, 61 aa, Homo sapiens
RTSGPETPEMCDVKHLPALGHSQLNVTRTSLLDRLCEQIIFSEAAAAVCFRYQPSEVDLNC

SEQ ID NO: 989436 - protein, 33 aa, Homo sapiens
MTECSDVTEDETYASVCALASYEDPGGSIIGGS

SEQ ID NO: 989437 - protein, 63 aa, Homo sapiens
NVRHETWRSTSKAVGSSMVQLLTCAAQGDEHYTGVAAREMGQALKTLSQAVRGVDALTTDPAV

SEQ ID NO: 989438 - protein, 47 aa, Homo sapiens
MSLLTSHVTLHADAITAEGAQIIPAARRCLYASVLTAQLTPHGAHLP

SEQ ID NO: 989439 - protein, 49 aa, Homo sapiens
EQVVGGIYGVMNRKRVHVFEESQVAGTPMLVVKAYLLVNESFGFTGYLR

SEQ ID NO: 989440 - protein, 69 aa, Homo sapiens
HAPRDQISIQKSRRHDQVQWLMRIIPALWEAKVGRITGGQEFDDQLGHMVKPRLYKKVQKLARCGGVHL

SEQ ID NO: 989441 - protein, 85 aa, Homo sapiens
YSHSAYSCNKYRRVKRQTKVRLAESAPKGLLLWEHGLSCRVKLSYVAYGPGVPQRDRASQLKRQHGSSVVCRQANLGDWRSSRAP

SEQ ID NO: 989442 - protein, 131 aa, Homo sapiens
RYTGSVWETFLLVNITPHLHLNAHPTLHSYVSCIPAATHTRTHSTQHNTAHTRAQHTHEHTAHTQTHSTHSTHMSTHAHTQRAHAQHTLTHAHTCTQTARDTHCTHMHTPHTRKPTAHTKRTAHTHTQHTH

SEQ ID NO: 989443 - protein, 105 aa, Homo sapiens
MSYVHKYTCPQTCTHVHTSHIHKHAHACTHIHLRKHAHMHVHTYTHLHTYTSTNMHTHMYTHTPPQTCIHARAHTPPQTCTHMHTRPQMCMHVHTYTSTNMGDPL

SEQ ID NO: 989444 - protein, 52 aa, Homo sapiens
PCSCYDTYNPYILHLNSHPKKHSYLYASPQLQTHNTQHTHAHTAHTRKHSTR

SEQ ID NO: 989445 - protein, 103 aa, Homo sapiens
TPQYLTSQCPILGKHSYFMHPRSYTRTTHSTRMNTAHTRAQHTHEHTAHTQTHSTHRTQMSTQHTHGAHSTHTHTHPHTAHKRTEHTSTHMHTQHTRKRTAHT

SEQ ID NO: 989446 - protein, 57 aa, Homo sapiens
LFRHKKHSYFMHPRSYTQTDTQHTHNTADTRAQHTHEHTAHTQTHSTHSTQMSTQHT

SEQ ID NO: 989447 - protein, 52 aa, Homo sapiens
FTLNPKSYISIPILQKHSYVYASPQYTHRTHSTRMNTAHTRAQHTHEHTAHT

SEQ ID NO: 989448 - protein, 79 aa, Homo sapiens
RGTKECQRHQGGQRHQGGRDPCLLAASGPQAEPQSPSLEAHAEAHNTQNRAQPCGQRERDVAVQIERHGNVRLGSSTHL

SEQ ID NO: 989449 - protein, 76 aa, Homo sapiens
EKDEKSESDDEKREHDEDAKKDFVKMEKSGVTHAADVRNQTEHQPYYTSSPNRTVKEWHQTIHCHEQDHTAVPTDQ

SEQ ID NO: 989450 - protein, 95 aa, Homo sapiens
ARRDGESAPLPAPGDGEERHRLRVAAAASLHRDQSSCCSCAQAQPMLCGHAPSMHLAIQWRLLQGHEHRAQAVHIFALIAELEGEVNRWTTFSDS

SEQ ID NO: 989451 - protein, 95 aa, Homo sapiens
RGTKERLPLFQALKELPIQSSDLHSTQAAILISVFFSVHLLGTPGLRLCWDLHLQRLLAFVVKSLLILPQSPLTITCTKAPGFPSCKPPSLVLWG

SEQ ID NO: 989452 - protein, 57 aa, Homo sapiens
PEAPSRSDEHSPKWLSSPPVNIVLTTFSPESAAHLDLGCPSVTLHVRLTVPSSLEPL

SEQ ID NO: 989453 - protein, 36 aa, Homo sapiens
KSASSEVAPAAGEQEPGLTGALESWTEPTSTRDTRT

SEQ ID NO: 989454 - protein, 40 aa, Homo sapiens
VRRRLSRIRRIAAGLYVSWQSPIRIRGLASRQYTCRRNCI

SEQ ID NO: 989455 - protein, 60 aa, Homo sapiens
PPTFRHAYYRGLHRLTNDTVTRNTPDTRDPTAKTPQLLDRRRTILTGHCTDEHPMMTTTY

SEQ ID NO: 989456 - protein, 133 aa, Homo sapiens
SSTETLGLCHARREKIKVSSILAVSITASCQEKQVRSGKGLSTENKEEWDRKAEDAWRDYEKAMKDYEGGRGESSMRDPSKKMTRVEVKLAKKSTPSRGSSSKVVLEAAMRELQEPRVRVYVMRALRESLRRT

SEQ ID NO: 989457 - protein, 90 aa, Homo sapiens
VRRRLSSCNSKVGRGETAENLQEEKERKLECVPLNLPLMTLKVSRSSSNYLMCSRVERRFPFSPSLTVIHEFLFSLGGKARKVSDWRGVT

SEQ ID NO: 989458 - protein, 37 aa, Homo sapiens
MWAQGDREPLKKQNSLSKSCFLMLEPPQLLESLRRTG

SEQ ID NO: 989459 - protein, 83 aa, Homo sapiens
AGITGVSHCAWPGFTILNAIKNICGSWEEVKISTLTRVKLILALTDDFERFKTSVEEVNYTCSGNRQRVSGELVRRRLSFINH

SEQ ID NO: 989460 - protein, 62 aa, Homo sapiens
MDIYRASDPLPWPLLYLLHHGSLIYVGQYVCMLLDTYTRCETAGRARRLTQCLYSYSLKLPL

SEQ ID NO: 989461 - protein, 46 aa, Homo sapiens
RTGHARDRTFQKWSAVVAPSGEEPRYTCLVQHEGLPTPLTLRWKPY

SEQ ID NO: 989462 - protein, 85 aa, Homo sapiens
STQRNSCVFLQSDITIVLYPWNASPCSWKTFDYATSITMAQASDGLYSMQVPWQLTSLPWSLTFRQEETIIIIRLIEQARHASYG

SEQ ID NO: 989463 - protein, 83 aa, Homo sapiens
MALNWKQVRVDYRGSVSDVPDFDLSSELYEHAMALSEDEDMRACYERSNEYQLIDCAQDFLDKTDALKQADYVPSDQHLRRYR

SEQ ID NO: 989464 - protein, 73 aa, Homo sapiens
MSSALDEHGHSPMAGPSDDIVVSLLYERKPTSRDLILEHYRYSRLTRRYMLSPAIHHDNPYSLGLYRLSRQRQ

SEQ ID NO: 989465 - protein, 119 aa, Homo sapiens
RAQDTQAPNLMPPPFLDDADGNPHPSRYQRLGSARENCMQEHLMPYKGATSPGLNQVLSQARNHEISPLDSMIQRLQQEQDLRRSGEAVISNTSRLSRGSIKFYLRGSFTTKRMTKTLW

SEQ ID NO: 989466 - protein, 74 aa, Homo sapiens
EQDKQVDQRRGLDPGRKKTLYVTLAIARPPASCQLLPTNAKGIATNTCMRAFALQPKILAMMHPAIPALGSKGK

SEQ ID NO: 989467 - protein, 38 aa, Homo sapiens
ENSSNEEETSSEGNMRVHAVDSCMSFQCKRGHSMHPHV

SEQ ID NO: 989468 - protein, 73 aa, Homo sapiens
NRTSRVLFRMSDVMPPEKKRTIATILLEISKGVVLVTNIKPKSSSLIPSHGLCSDERAVEQTESRFLNSGEVT

SEQ ID NO: 989469 - protein, 37 aa, Homo sapiens
  misc_feature (16)..(16): Xaa can be any naturally occurring amino acid
GYQWKMLNTFALLVLXNEQFNWVSVLSYLTQGEDQYY

SEQ ID NO: 989470 - protein, 147 aa, Homo sapiens
RTPAPTRHIDDLQSFMFVYQHRNGLVRGCSMAQPADAPAAPGVQLPLGSDGRTVSAPASDVHHVLPGLLSREGGDHLRLLQRHRVPMAQPSAVPTAPGVHLSSSSQGKVVLTIRMGSNFYNVSGGKALDQLWGQRVTIIGLCGHAAI

SEQ ID NO: 989471 - protein, 71 aa, Homo sapiens
TEYWSSARCSLCRRNLYRAGMHRSGEYTSTRLHLNELWRSTRCSCDRRNLSMGGMHGSGEYTSTWMHACSR

SEQ ID NO: 989472 - protein, 40 aa, Homo sapiens
AALWLAAVQTGCQSITRYARVPRDMVQTLDEGTRWTTMGP

SEQ ID NO: 989473 - protein, 39 aa, Homo sapiens
TQPAEEFLNQSSPFYFFFNGDRIDSLPENDRQQTHMLDV

SEQ ID NO: 989474 - protein, 40 aa, Homo sapiens
GCRPAEEFLNQSSRFYFCFNSDRIDSLLGSDRQQTHILHV

SEQ ID NO: 989475 - protein, 37 aa, Homo sapiens
PAEEFLNQSSPFYFWFNGDRIDSLLGNDLQQTHMLDV

SEQ ID NO: 989476 - protein, 34 aa, Homo sapiens
LLRGLDLRPATAVELLCRYPFLARKAMRLASAFS

SEQ ID NO: 989477 - protein, 83 aa, Homo sapiens
  misc_feature (11)..(11): Xaa can be any naturally occurring amino acid
GSRRRTRHQGXMRTPPHSSRGDSETVGGKTKTKQKNHPPLQRASLQIQKLPEILERQNKREEWAAQGDSRVYIPARCEAKERG

SEQ ID NO: 989478 - protein, 75 aa, Homo sapiens
MVSRLFLSMRSSRDSARAGGGSSRGSSNSRMYGGYATIRLIAVFFMWQILQGRQVWNRVTGGKEGQKCWQQELAH

SEQ ID NO: 989479 - protein, 39 aa, Homo sapiens
SSVGGKSVTAGLGGCEDVEEWRKTGALGVPELDQGVNML

SEQ ID NO: 989480 - protein, 34 aa, Homo sapiens
SVRGSSLQSTGSNLKLWVGLAIPPPIGDIKVDLD

SEQ ID NO: 989481 - protein, 70 aa, Homo sapiens
MVTHSRLATFTNVLTEDIIDECKTRFYIHWAHTTHKHHAKYRNKGHSQLQTSRLSSRVSRQTYNRVASRV

SEQ ID NO: 989482 - protein, 139 aa, Homo sapiens
RSNLEESPVAQPAEINLCRLKRQQTKMCADSWILANESTALAYSCPWTGNLSADLLLPNHDNQSQMDLTTTTLTVLTRYGMGLAWCGKAIDITRRRTDSTEQPDDQKSLPLTAGPSRSQTPRLSHSTVCSKISLHVPLF

SEQ ID NO: 989483 - protein, 85 aa, Homo sapiens
IDGLLSFQREAPEESFIQNLSLELDLLSCEQKSLAQDSAHTGRVHEAPKQQIRAVVPGAPVVDWRTLSVAAAWTRHSQSLCYHTK

SEQ ID NO: 989484 - protein, 89 aa, Homo sapiens
LEDSLCAALRSCFHEEAEKALTLTVCREKRLRNMGTERGLMRLTRKELSAVEHTRVTRFKSKQLAACGPEGMWLGAAPAFCFCCVSCTQ

SEQ ID NO: 989485 - protein, 64 aa, Homo sapiens
MSSMTRAYKIISTASCTINCKAPLAAVIHDTFGLVAQAHAHSPCHHCPPEALWLAPPGKLLAVD

SEQ ID NO: 989486 - protein, 73 aa, Homo sapiens
DRVNTLARGKKRNDSAIPMNHDIYPDHQQRQLREDTARIGGAILATLSTYQQMWISKQEYDESGPSIDHRKCY

SEQ ID NO: 989487 - protein, 43 aa, Homo sapiens
KHKMMMVSDNVQSSDWKRGQLRDSRSQELEAHCRDSPQISFPL

SEQ ID NO: 989488 - protein, 54 aa, Homo sapiens
RQLARMDEEVQSINEMARHLQEYQDLLNVKLALDNRDLHTYRKLLEGEEEPDHH

SEQ ID NO: 989489 - protein, 49 aa, Homo sapiens
YPGMCMADHRHEPRCNASHWTKPATTWKAMRQEVELLKITRSSMMESKL

SEQ ID NO: 989490 - protein, 47 aa, Homo sapiens
PTGVLGHCLRPRGQALNGVAKLSGTGKLGVDTSLFSTQMHVRGSGVC

SEQ ID NO: 989491 - protein, 46 aa, Homo sapiens
TADGLVLRKILDWEVPLLHMDQEGWEGPNATCPRIRDQGSHRAVKM

SEQ ID NO: 989492 - protein, 38 aa, Homo sapiens
MECWSPWTDAGLQPGAEPVLVWHEPLPPQIPGASRRFL

SEQ ID NO: 989493 - protein, 55 aa, Homo sapiens
SGAGSGRFGMVIDTRGGPVTQITTCTKVSGFPRAADPASFLQCYVSLGYLRLGRG

SEQ ID NO: 989494 - protein, 32 aa, Homo sapiens
MRRHNGDSSLSWCMILTLLLSAKEALGNFGKT

SEQ ID NO: 989495 - protein, 44 aa, Homo sapiens
YEQQQDTADIAIVVPATMPIVSPLPLGGGIGAGYTVAGMPLGCR

SEQ ID NO: 989496 - protein, 91 aa, Homo sapiens
  misc_feature (36)..(36): Xaa can be any naturally occurring amino acid
  misc_feature (46)..(46): Xaa can be any naturally occurring amino acid
  misc_feature (57)..(57): Xaa can be any naturally occurring amino acid
  misc_feature (70)..(70): Xaa can be any naturally occurring amino acid
  misc_feature (76)..(76): Xaa can be any naturally occurring amino acid
VIDSGLCAAYRVLVPEECEVVLLDVSQQHRVLCCSXGLEDTAYSPXGLRLGFSQYHXGPYCERAFSSYVXCRHPVXARTFYWQTQETAIYA

SEQ ID NO: 989497 - protein, 30 aa, Homo sapiens
MALKLQPELFGQIGEGVLGRGPLGAKGMWC

SEQ ID NO: 989498 - protein, 56 aa, Homo sapiens
DCTEHGMKKHLAEGQLPCRARVPEHDHDGPPTAQQKVAALFPNSDTGVDNDARCVG

SEQ ID NO: 989499 - protein, 56 aa, Homo sapiens
TVCEHRSWLAALSCSTDLVICRLGSQSAGIIGVSHRARLLADIFKDGTWLEHLRAE

SEQ ID NO: 989500 - protein, 36 aa, Homo sapiens
MSYDCATALFLGIGRDLSLETESRSVAQAGVQWHDL

SEQ ID NO: 989501 - protein, 46 aa, Homo sapiens
LASRGWPCGSWRASVSSTGCSSGSHTQPHCRRCACQIFSMSSQLVS

SEQ ID NO: 989502 - protein, 62 aa, Homo sapiens
  misc_feature (20)..(20): Xaa can be any naturally occurring amino acid
GAGARLALRCRRSRSVSFMXEKAGGILTLFMLGVFSVHLYGYAAAAAAAVQILVVVANIQTR

SEQ ID NO: 989503 - protein, 46 aa, Homo sapiens
MEDVHLKGQECVWEADEHMHDRPLGSQTMGWPKEVVVDADRGTQSD

SEQ ID NO: 989504 - protein, 66 aa, Homo sapiens
RIIGQDLTFCPDKTVMSLQCRSQLSVIEPNVWIQYEHSLDDTQFSSRGNQTFSPLLCLLKLLVPRV

SEQ ID NO: 989505 - protein, 64 aa, Homo sapiens
AVTHLLRSKGGLFQWGSRSKGHDIHDYVCWACFKVSLNSLSKQSFRENLSKLRPCSHLAKIYSS

SEQ ID NO: 989506 - protein, 76 aa, Homo sapiens
CLLSAETYALEAISRESRKDAYCTFPRLSLVVTLACGSPNCYHSERLSRVYEETSVYFLTTASKSTIISIVNDTIL

SEQ ID NO: 989507 - protein, 73 aa, Homo sapiens
PSAEVYLNMCRAYIAGHELDRNWAKKGCCEAADVPVDPAKRRGAPAEATMSERVHHETLTGVRSWACKGRLWE

SEQ ID NO: 989508 - protein, 49 aa, Homo sapiens
MGFLHVGQAGLELLTSGDPPASASQSAGITGKSHCTWLCKVFVDAAANL

SEQ ID NO: 989509 - protein, 32 aa, Homo sapiens
MVELKLLTMDGDKVVVNLVYFCSPSKINYKTR

SEQ ID NO: 989510 - protein, 105 aa, Homo sapiens
GLPAHFKSTNNLKVSQIILQLPENPTIFQTIHAFPDNPCLPSKLQDLPSSIKVYTANPSLPSNILVFTPNPSIFQAQSHVLPRQHPMYFPITFPRIFHPNTSIFP

SEQ ID NO: 989511 - protein, 50 aa, Homo sapiens
MFIWPDSTGCGKSVPIGRQSDTVDKAGVVANRNLNLNGGPQRMPGSFIAP

SEQ ID NO: 989512 - protein, 85 aa, Homo sapiens
QSTHHVLSVSYSYVVVKKTGDQNAANASASKSVKTVTAGAGTIRTIKSSAVPPGLPVYLDLCYIPYPQQYVRMLMCEFFMIVRVF

SEQ ID NO: 989513 - protein, 44 aa, Homo sapiens
MTITRKQHLVLDPRMPEYKQQNATVKSVNDDEWGTHRGSWTSEL

SEQ ID NO: 989514 - protein, 133 aa, Homo sapiens
YCPPAEIRLSTSGHTEHAEDIRFNRLQQITTALRVLPKGSWHVWWQTPIGDLAFLVSPNREAVGHVDSGGGVPFWSPAPSLTALGTWSLRDPDRRNHTQSPQAHGRDVTRGGEALKPGFRLSGELAEPGANTL

SEQ ID NO: 989515 - protein, 32 aa, Homo sapiens
MRYPAHLDIFRMLSALQLEREYSPAPSGSNSR

SEQ ID NO: 989516 - protein, 172 aa, Homo sapiens
CNFLDHERMDVFATTHLLLATPSPQETCSEKSTHLHDYWSCRCPVGIDNLPRGRVCVLGATGRDRRSDTVDSADAEEDDSDVWWGGADHRLCRMGVKTEVVLNVAEDAEVADVEDEESDDDEDDEDGDEVEKEAEEPYEEATERTTSIATTTTTTTESVEEVVREVCSEQAE

SEQ ID NO: 989517 - protein, 43 aa, Homo sapiens
VGTGRWRVDLVTKRDDEAGSPWGWMRQAVSAGEDMSDIAFNGT

SEQ ID NO: 989518 - protein, 85 aa, Homo sapiens
MRQRDIVPLQIKVQREQSQRQSDKEQPDTLWKIELAFDIQPLGPLQVQAQLLRGSLSSQLWAERGETAELIAGELEHLRERLQAA

SEQ ID NO: 989519 - protein, 104 aa, Homo sapiens
MPWLCGVFDATKRKRGHVSHSVDDPGISVQHGNSCLELSRVCYNACIENIITHALNLDAIELYWNSDKNRRDLNFDVEVDITASRCPVMLVVCDQASFMRMLVV

SEQ ID NO: 989520 - protein, 48 aa, Homo sapiens
YFSTGQGKREETSPRLLSLLICYKRFLLDRTPPPPTKTQLISPWLQYP

SEQ ID NO: 989521 - protein, 146 aa, Homo sapiens
YFSTGCCKTMKHVGRRADAGSPVRCLEDLENRQTWIRCNDVAELEDICFLEHVDLLEYMAWLNRPRFPEHTYLLLAYIPLLEDVPLLEDVPLLEDTSRLEDINLMEDMALLEDVDLLEDTDFLEDLDFSEAMDLREDKDFLEDMDS

SEQ ID NO: 989522 - protein, 98 aa, Homo sapiens
GLRADLWCEQYTCGVRILEPQDVAPVRSLSSIRLDCVCCAFASAYLSPLKLEPLVVLSTWAGLSGSFLYTGGIGFKYVALGDLIILITFGPLAVMFAY

SEQ ID NO: 989523 - protein, 109 aa, Homo sapiens
LQQVSMKDKNYFDVIIIGGSYAGLSAAMALGRSLRNVLIIDSGLPCNRQTPHSHNFITQDGEKPEAIAEKAKAQVLTYNTVEFLSDLALSAQKNGSTFTITALSRGTEL

SEQ ID NO: 989524 - protein, 70 aa, Homo sapiens
FSTVQKQADCEPVLRPSELLQREQGLATLPCTQRRPETDASSAAKEISVKLKQELTKNSRRRKTRKWFTK

SEQ ID NO: 989525 - protein, 40 aa, Homo sapiens
TLVSYGTRLDPALSWLWHRPAATAPIGPLAWEPPYATDVA

SEQ ID NO: 989526 - protein, 35 aa, Homo sapiens
TASTPADCIQRLPDCIHRRLTASNAAWLRPIAARL

SEQ ID NO: 989527 - protein, 104 aa, Homo sapiens
CIQRRHSGILRDLQPYSLSIGRGYGGHRPSLRIRRSPISQDLTDPCSTAVHVEPFSTSAFKVLVRILATYHQDLKLRRIHPCPRPRLQGSLVEVLIIVAEFGCS

SEQ ID NO: 989528 - protein, 172 aa, Homo sapiens
GIHTLLVHGLVISALGPKKRCLETAGCLGRTLARTLSSGQEDSMWNMCERLAVSVRDGLLAWHELLLTLMVGLVCWLSSEIRQWNREGKIRELGQVPMSLPLLEEADQVLVVPGPQVQVIDEQQHAEGVLIRLETQVELEVLQCRALAASLSPGSSSACRGQVEALSSGLRS

SEQ ID NO: 989529 - protein, 46 aa, Homo sapiens
VTGHLTDIFSTYHCPPSYCLQTLGMSIPGNDVQPTKILPDLTSSIF

SEQ ID NO: 989530 - protein, 131 aa, Homo sapiens
MTVHVTQPKDGGFCEVCKKLVGYEDRNLEKNSTKQEILAALEKGCSFLPDPYQKQCDTVSGRVRARAVIEILVAVMDPSFVCFKFGACPSAHKPYLGTEKCIWGPSYWCQNTETAAQCNAVEHCKRHAWIA

SEQ ID NO: 989531 - protein, 52 aa, Homo sapiens
MIISHYVAMTGLELLGSVIILPWIPKVLGLYAVSQRAWPVIRFLIFLVTKHA

SEQ ID NO: 989532 - protein, 75 aa, Homo sapiens
PAYHRHPSFFHVTRSNIGLAAVTKQNVNRCQGLRILWVAKVKNLIQQLIYEHKVVLDVFLADRAKVGSHHVTHLI

SEQ ID NO: 989533 - protein, 33 aa, Homo sapiens
GTGFGSVYGGAVTLGGGAMNSEVLMNSEVPMNS

SEQ ID NO: 989534 - protein, 156 aa, Homo sapiens
CAQERLVTALQNAGNDSLEKAADDSSEIGMKVIETPGPSKMSKSMELHVKSSSDEAKHIAEEADRKYDEVARQLVIIEGDLERTEERAELAESKCSDLEEELKNVTNNLKVFEAQAENYSQKEDKYEEEIMILTDQLKEADTRAEFAERSVALWES

SEQ ID NO: 989535 - protein, 92 aa, Homo sapiens
MEDSSSNTSEWDFWSKDKRIHGCTAPILKRRNKRPCLEHESWPYPIVRWCQLCHDMILFGCDIFVVPMVITYCATHTHLCLAECELGCAMHT

SEQ ID NO: 989536 - protein, 34 aa, Homo sapiens
AIIGTLQIRRLYDITKYSFSGFRQSWLLWFKTKK

SEQ ID NO: 989537 - protein, 116 aa, Homo sapiens
MEPRPVAQDGVQGHDLSSLPLPPGFSSDSPASASGVAGTTSTVPPSPANFGILRREWVSPCVGQAWSELLTSSDSPAWASQRAGVMGVRPPGWYNGSLLTDFFPFIRPVKFLRGAD

SEQ ID NO: 989538 - protein, 31 aa, Homo sapiens
MRELSADTQIGIAHYSPELLDSSDPPATRCV

SEQ ID NO: 989539 - protein, 40 aa, Homo sapiens
MSGSRADRGCAQLLSWRLLPGYLVTCIALSGGLQLVLRGL

SEQ ID NO: 989540 - protein, 84 aa, Homo sapiens
RSVEAVDAGGDGGHAGRSGWEVADHAMALRHPPLFADKMSAPESFQPFPLDQHRMNPQSQYQFKSVNYTGLQPGPRVIIMGYRA

SEQ ID NO: 989541 - protein, 37 aa, Homo sapiens
VLVALSDPPVPRHLLMASTSSCVWRLTPEMPVCLRLQ

SEQ ID NO: 989542 - protein, 42 aa, Homo sapiens
MTLEGKRTPRETDKGTEKPAGMKALPSGLLFGLLTGILLLVL

SEQ ID NO: 989543 - protein, 76 aa, Homo sapiens
MTLRCQNHIKPYEKQKASLPGVVKALGRYGPADVEDTTGSGATDSKDDDDIDLFGSEDEEKSEEAKRLREERLAGA

SEQ ID NO: 989544 - protein, 40 aa, Homo sapiens
TQSPLLTPLLLPTLPPGWSAPPLPQTPPVATPLASPGYQD

SEQ ID NO: 989545 - protein, 145 aa, Homo sapiens
MRALHPGSKVLGLVVVIRVYVLTAHDPVGQRVLYLRLVSEIPLGPVVFAGRDLLHLHDLNGVGSGAVPGTHVSVALGDSACGGQVPVFPVHVVGAAPGVIAQPDPEVLHPQGGLLKHLPTVDISPEDFFIFFNSDTKYQKRDLAT

SEQ ID NO: 989546 - protein, 41 aa, Homo sapiens
MPGRPERITTHNTTHARCTTGDRRGPHLGLAMAPLGPRSSG

SEQ ID NO: 989547 - protein, 70 aa, Homo sapiens
LLLVVSRLSPLCSSFLSVCDWRDLPVLPPGSAVLFVPPALGFTGTSLGSWWYDVPKYLDSAESPEGFDLS

SEQ ID NO: 989548 - protein, 33 aa, Homo sapiens
  misc_feature (8)..(8): Xaa can be any naturally occurring amino acid
  misc_feature (27)..(27): Xaa can be any naturally occurring amino acid
RYPQSPSXAIIPFVYWTILHRYQMKSXCEGYRR

SEQ ID NO: 989549 - protein, 98 aa, Homo sapiens
TRCSHHVLGGRIWCTYKDLGLSVSEKVGSGPGMRIWICQYLRRKGLALEDLGLFMSEEVGSQYQYEELVLSISEDVGIWYRFEDLGLSVSRRYDLVQA

SEQ ID NO: 989550 - protein, 72 aa, Homo sapiens
RNAFVVQGWLQELHFAPDTLLSINPSTGTLSAKVEGKTKTFHLSDSSGWGQISGPLLDAAKVIAPGNNGDLR

SEQ ID NO: 989551 - protein, 55 aa, Homo sapiens
RRSLIIKGLPTQLTDQLKRRELMLGGVLKKVLLVLLVVGAIQNWGKVERLFKPSQ

SEQ ID NO: 989552 - protein, 49 aa, Homo sapiens
GIDGWWSLESPIIGYDSHADPTKKSASANIAQTRSYDFKHCCHSFEDEL

SEQ ID NO: 989553 - protein, 40 aa, Homo sapiens
MKVYTLFSDDIFKSDALLNLASPDLMHLDTWAVPDLKRVS

SEQ ID NO: 989554 - protein, 37 aa, Homo sapiens
TSDSLLQVIPHNIAHYALAAMGANDAIPYIAAGDKVY

SEQ ID NO: 989555 - protein, 84 aa, Homo sapiens
MPCYMVVPPWLNCVGVQVFADVHVTLHDGVEGSAFLDAIGLHAQEGMLEECLRAAEPLIAHGHDLAFRQFVQLFSREELEAVVA

SEQ ID NO: 989556 - protein, 69 aa, Homo sapiens
MLLVDSMSDPLLTSLLGSRLPGVALDPDCADPLCCLPWVLCPACPASLARCRILGRIHAMCDLPLRTLE

SEQ ID NO: 989557 - protein, 64 aa, Homo sapiens
SLFVGTSLFIGTSLLIGTSLFIGTSLFMGTRGYSSAPVFGECCCRGGCNTRRGAPMNSEVPMNS

SEQ ID NO: 989558 - protein, 69 aa, Homo sapiens
MGRINIVKMTILPKASYKFNAIPIKIPPSFLTQLEKSILKFIWNQKESPGAKARLSKKIKSEGITLPDF

SEQ ID NO: 989559 - protein, 59 aa, Homo sapiens
MADSRGYTRYFIGTYSRSGVVLTKNNTTELFLDPVIGMIHFKTSNEGPLGGKSVADEYR

SEQ ID NO: 989560 - protein, 45 aa, Homo sapiens
  misc_feature (25)..(25): Xaa can be any naturally occurring amino acid
SHPDTGVECGAHQCAECATRYGAWXASEQFPPLCVYELMKVPMNS

SEQ ID NO: 989561 - protein, 43 aa, Homo sapiens
MAVSRGSTIMGELCEEKKDEGSPKFYDTEEKYQLNITCGLRII

SEQ ID NO: 989562 - protein, 78 aa, Homo sapiens
CQNKLMIPAYCSIASLCRDQFNLPRGSQTSPQDRVSGALLCAPSTLCTKQTVQFSLSITHPRPECRRVIRSLYRELQR

SEQ ID NO: 989563 - protein, 82 aa, Homo sapiens
MHPACTGYLVDKLADRERKVALTAMIITYVVSSSLLPLLFPSFRLELPLRSDPGRRPPRAHNPCPGPCFPIILLHSVLPSIV

SEQ ID NO: 989564 - protein, 102 aa, Homo sapiens
LRGELLWCQLLPLREPPIRLPSLSPLAIHVGPVYIAKALLLNSMFNFRSSTSSSSLGKSPPIKLLALLLLTPLEFTIIDIAVLCGANPCRENPGHGDGCFRG

SEQ ID NO: 989565 - protein, 47 aa, Homo sapiens
SLPCLDCTRGAALLFRKLCSVALLRVSVLPRDQRQVVVTKRSNIVAP

SEQ ID NO: 989566 - protein, 69 aa, Homo sapiens
ELLPESLNSTPSPAAAALCLCLLLVSLSPEHCEWRLKQHKLAPCCSPLQPESLAPSLHASFGPLGLALL

SEQ ID NO: 989567 - protein, 54 aa, Homo sapiens
RLMKDSPGTADGPLVIERLSSMAYGQISAMIQALGGFFSSLCDPVQKMASCPGN

SEQ ID NO: 989568 - protein, 41 aa, Homo sapiens
MTLSKVSLVCTLNQKAADCRRMHGLKSPMAQIARYNKMIEG

SEQ ID NO: 989569 - protein, 120 aa, Homo sapiens
MSGGITANTLSSISSMTIRRRSECRVWMKVTVVHEGCLSWRTVLVLFARAQLSAVPVIAPEWLEAGQPETQGSLQSPQDSPALQALSYLWRGQTGLVDECLAGSVELPDGCHQAGQQKRG

SEQ ID NO: 989570 - protein, 139 aa, Homo sapiens
QLRGELLKTYQGKMLNTLLLAGAAELSGLEWLSRLANLTQGEDQYYLRVTTVASHTSDSDVPSGVTEVVVKLFDSDPITVTVPVEVSRKNPKFMETVAEKALQEYRKKHREEGDVDVAFAPTGASESSSPQDELQLAPE

SEQ ID NO: 989571 - protein, 35 aa, Homo sapiens
YQRRYSDGIRVTELHDHLSDTVKERPSQKCGKPPW

SEQ ID NO: 989572 - protein, 124 aa, Homo sapiens
EGKTLSAAAADVDHGSFLDLKVGKHTPVLTAGRPAGAKVSVESKGLVDGQIGLDHKQWVCRHLLLLEHVAPFTVQNPVDATVHLLWTLYLHKVDGLHEAWLGVQHTGIEAAPCCGDDLAPSAVY

SEQ ID NO: 989573 - protein, 40 aa, Homo sapiens
LKKYEITSFLGLTWTCFFFEMYLDNVLILLCKDEPRSAVF

SEQ ID NO: 989574 - protein, 56 aa, Homo sapiens
KTFWGISLLAWDVLAHLESARDPSEQIPVNSLKSCESVQCPGKVLYGTKDSVNYRR

SEQ ID NO: 989575 - protein, 101 aa, Homo sapiens
VQNPAHGILNFLLGLFLEVKPPPIQLVFSSGATSGGQNPPFLILFFPRALLPGSKPPLFNFFFSRGQSPGVKTFSFSFVFSPGETPLGQNSFFFCGVFSAE

SEQ ID NO: 989576 - protein, 37 aa, Homo sapiens
YLGPRCTVAASSLLVVPCSIAYIKCLDTCNWYWLVWD

SEQ ID NO: 989577 - protein, 136 aa, Homo sapiens
MLSVVHTLWDGWRDETVLVVPEVGPRVYSDPNTPSRVVWPVSVVTLIADIKDPLFPDTHGVCSEDRTRGFQRKSASLISMESRIHSAPYLQLLKAQKQQLHLSFAQALPLAELIQGTQQGADTGHGCITSFDATLD

SEQ ID NO: 989578 - protein, 132 aa, Homo sapiens
SWTSVALSLVRDSTRELTISRKPNVREKYDDTMSQVASNNGLEEAVRKLTSMSVQNDKMRTGNLPAKLKNNQCLTDHSSMKFNRVIIPVKAGQTEYRLFERILIDCYRQKDSYIASQGPLLHSIEDFWRMIW

SEQ ID NO: 989579 - protein, 141 aa, Homo sapiens
ALMDNPTHLSKKKYVHELIPRCDDLHREQTVVPCNQMWTITGQLRDCAARLVAHICNPLSTSIKHHAMSRITKTFMQELGVRDDALDDSLWLHRRSWLSWDSIVLKTLILPRLPLEGERIRCVLDGPVLSCMSRIAADHVQ

SEQ ID NO: 989580 - protein, 83 aa, Homo sapiens
LTRGVHFTLTCLTFNPPPGAPGPNSDLQILFDLCIPSDSNFSFTLYESHFTSTPASPGLYWTPPSELQFTFDLASPFTPHPVG

SEQ ID NO: 989581 - protein, 71 aa, Homo sapiens
RWQITCSPGPKESIKNKTKKPKNHNEYVNARSDREYQEMYSRARMQVCDYYTGPSSGTGFVPPLDTCRASR

SEQ ID NO: 989582 - protein, 78 aa, Homo sapiens
GVFSPLRNSTNWIVYDNQLERVSPVDDRGLRGLTRLRMAGNTRIAQIAARGPGRPGEPCMELDVSNLKPAWPVFGLRR

SEQ ID NO: 989583 - protein, 65 aa, Homo sapiens
PALGLDGTKMQELGLEEAAKKHELGLAECLTERKFSGLERKAGSAVSWCLNEAICNCCEHVPCVS

SEQ ID NO: 989584 - protein, 33 aa, Homo sapiens
MWRGHFVRRLPGPGGALGEAAESRSLPSEALDA

SEQ ID NO: 989585 - protein, 59 aa, Homo sapiens
AHCGTDLMQSGTHGDGRLFSSLAWCWAPADGPAASSGAEVSRGPLNSTAINPGPVGLVG

SEQ ID NO: 989586 - protein, 79 aa, Homo sapiens
STDSQLAPCHTVASRGLACILTPVLTGKDGHLLLPCQQTPLDQESMPMVLAYKSRFKATLVKHSETVMKSAFHPCRASR

SEQ ID NO: 989587 - protein, 48 aa, Homo sapiens
MAILSMLQDMNFMNNYKIDCPSLARVCLMIKKAYRYPPYHNWPFNAYE

SEQ ID NO: 989588 - protein, 89 aa, Homo sapiens
QICDNLCGRDKGMKLGVCVVAHREGPVVEGDDCVLLPLLDGLPVPLANAGATSIVQDNATQIPEDLCIAGPLNGGAESARNLKWPFNAS

SEQ ID NO: 989589 - protein, 58 aa, Homo sapiens
LVRRHLLRTELCALLGACDRRDRRVQRLGHLGADDIHQALKGLLDVGHFNASEPFNAS

SEQ ID NO: 989590 - protein, 96 aa, Homo sapiens
VSDYMKCGQDVHRVMAAKDTAGAPCGGQYGEVMPVYRAGQPLDVQAGGHDQPGEGIYLLKFENSYSLLRKKTLYCHIYYTQLKDCVAQGQAVGLVG

SEQ ID NO: 989591 - protein, 78 aa, Homo sapiens
VQRLQDDNFSMAGKVLDLSAQGHSTPPGHSTPPAIETAWRPFNASDHSTPPAIQRLRAFNAFGPFNAFGPFNASGPLN

SEQ ID NO: 989592 - protein, 43 aa, Homo sapiens
GGAGMPPLGRVHSSPASIQRLRAFNASRSFNAYGPFNACGPFN

SEQ ID NO: 989593 - protein, 77 aa, Homo sapiens
RRYQHTQASDDLDEEQTQVHTVLCTSQHHDDPKAKSVFEVLKEKAGPGCDVELTASSGWCKQFKNRYSLHNGKVVSL

SEQ ID NO: 989594 - protein, 125 aa, Homo sapiens
KSVVFDRDEKHHLKEAFAYQDNKQKLDGYVILSILLLHFAGISIQEGILKEEQESPTTSYISCSALAKCVCIDMLEAPRVLNMPNHKGVQFVACNIAPKQTVIQSLKDLKPGIALVYLMDQSPFR

SEQ ID NO: 989595 - protein, 49 aa, Homo sapiens
EDPHPHQWYTEAGTASSSGLRLLVHTAHSRVRARNTHTHSRLPPPWEPA

SEQ ID NO: 989596 - protein, 36 aa, Homo sapiens
LGHSKDPHVISGSERQSLCEITVEEKAVSVSNHQWK

SEQ ID NO: 989597 - protein, 49 aa, Homo sapiens
MIRCGGAEIVAEAVKNLTKVPDERFYLSSSPQFDLVMGMIKMKGGVTNE

SEQ ID NO: 989598 - protein, 56 aa, Homo sapiens
HRARYHGTPIIAKVCEHLSSELQKFKIKIMGEFGQQTGSMTYQFPSRHYEACCMRL

SEQ ID NO: 989599 - protein, 51 aa, Homo sapiens
SSYWLLLAFAVDRQPDSAFLVDGLVWATGLIWADRRRVVEALADLPRLLLV

SEQ ID NO: 989600 - protein, 34 aa, Homo sapiens
MIISSYRIGHCFSSAAISVDIIKSRHLGILGFEY

SEQ ID NO: 989601 - protein, 109 aa, Homo sapiens
MLFSQYYLLHFAGISIQEGILTRGAGSPTTSYISCSALAKCVCIDMLEAPRVLNMPNHKGVQFVACNIAPKQDCHPVPKRLEAWHCFGLPHGSKSFQASVSRIERFHPY

SEQ ID NO: 989602 - protein, 54 aa, Homo sapiens
IVSCPRHRERLTHVQLAVHMATLSPHSAFNSSRFEVFAYTTNDLHHADGSTLGP

SEQ ID NO: 989603 - protein, 58 aa, Homo sapiens
MLWADAWSTHSEECTGRTQVRGDLELGGLQERMRVVRIRDAYQGRPIGYAALDAVGVR

SEQ ID NO: 989604 - protein, 53 aa, Homo sapiens
RATEIQQREKMDKKKARATAIFILIRNDVKCKTRGCPCTITDCPNSEAQTRWS

SEQ ID NO: 989605 - protein, 75 aa, Homo sapiens
MHDDTCPALGGITGGGRATVPGGLEELLRYPLTLLWVLVGAELVRMFDPRFAELSPITSCLLGSNLKVLLAKAQV

SEQ ID NO: 989606 - protein, 31 aa, Homo sapiens
MSALLVFHPARVISKSTMEENVEPRDRVEPE

SEQ ID NO: 989607 - protein, 55 aa, Homo sapiens
MTIEAADDVLGACEHTKYSCFSRSSVSLKEVYIWIQERLEMTQASASDVPCRASR

SEQ ID NO: 989608 - protein, 55 aa, Homo sapiens
IELGPPPYSCVGEGRGTRERNNVLRLLLLWLLLHGACLDPPAVKQVLYGSCNWYG

SEQ ID NO: 989609 - protein, 64 aa, Homo sapiens
LAPACTVALSQLPGVAAAMVPDPCLRHPFTSTNKIRAAELQHAPYRTAGYHGHRPACLISPNAL

SEQ ID NO: 989610 - protein, 63 aa, Homo sapiens
  misc_feature (59)..(59): Xaa can be any naturally occurring amino acid
MYSSFSQSHSQSQCRFARSLKLKKARRYMSASCERRTGASGCVSKDVVWRKKISISYGXAYVP

SEQ ID NO: 989611 - protein, 85 aa, Homo sapiens
LTEDEIWVGDDKILVGLMRMSMDGARLVWRREEPPELLGLRVEAEKEQRGFLADGAALARGTGRHIWDKPEARPECGDKVDPRGT

SEQ ID NO: 989612 - protein, 80 aa, Homo sapiens
MGFVMCGDEGYTTANKLCSLFLKNMLLRCGDMLSLSASFPNRCDFGSFSESNPAHAYNGDSSAELTALHCLYGLSGVDDL

SEQ ID NO: 989613 - protein, 49 aa, Homo sapiens
SRSSMAQRLVALSIREGMTCTLAGVSGADPAVFVLRLMCSVILIPGLGF

SEQ ID NO: 989614 - protein, 41 aa, Homo sapiens
  misc_feature (40)..(40): Xaa can be any naturally occurring amino acid
LNRITRAHQLRGGAGQLSFNTGHALLTTQMLVHGRTLLQXD

SEQ ID NO: 989615 - protein, 55 aa, Homo sapiens
TEGSRREPLSSAGQPQFQNMRQVIHAEPCAAALHCFQDSWASENPTCFYMQYHAW

SEQ ID NO: 989616 - protein, 86 aa, Homo sapiens
  misc_feature (1)..(1): Xaa can be any naturally occurring amino acid
XSAHQLRGGAGHVSSRFTRSVEHQSWAGRTRSTDHLELGQGLNNGDRSPPVPDRAWSGGSGARCFWSSSPCTRPLPVITAVCDPNL

SEQ ID NO: 989617 - protein, 91 aa, Homo sapiens
MTIRGGTSDRGLAEYRAEDRSLVLNSIQALKHWETSVPLLRPWPALGVSGACPPLAKLWVVSRALPVLKDSWARIPPRSLMRPSVLRWSRV

SEQ ID NO: 989618 - protein, 54 aa, Homo sapiens
GDVRVQYVRSDAVQPSDSAPGETVVEEPLPSVTRTVVCMAHHQWMGGRDLSYGL

SEQ ID NO: 989619 - protein, 78 aa, Homo sapiens
GTGDEVRGLIRSRGGAGQLSSTRTRSADHPELGQGGQLLHLTTHELGQGLNTWGQQVPHVLCQGSGCGRFMEPMGASW

SEQ ID NO: 989620 - protein, 75 aa, Homo sapiens
MAPPWLAEEAALPLALHRSLTPQGQVAEQEEAAALRQALHPLSAGSAPVGGRQTPPDGGTDGTAQLVVHLGLRAR

SEQ ID NO: 989621 - protein, 83 aa, Homo sapiens
MPIISNTLHSSISPSDVQRIEANEPFYPDVYYQSQTASDGELHVRYAWSFHDVMSHYYIVTMDIGSVGKIGKLESFCWIECRA

SEQ ID NO: 989622 - protein, 101 aa, Homo sapiens
MPLGGTASATGILALQLLFSALFSYGKKQYGGLFFSLHTNSLFLTYLLSTFYLSTHGRKSSQSLEPNSMSSKSGFATSQLRDVNSFLSAQVEGGIDKHRVP

SEQ ID NO: 989623 - protein, 74 aa, Homo sapiens
GVIDATGVYRKPLVFIRCHWCIIDATYRGMYPDTVQKTQSRRPRAEDVDLRVNFAMNVGTWLEQGLKPEERGDA

SEQ ID NO: 989624 - protein, 60 aa, Homo sapiens
MHLRGMLVSSPKYELQPPRESSERHQVTGPSSRPQFRQLSPLWILHLTLDSAAHGKNRIA

SEQ ID NO: 989625 - protein, 138 aa, Homo sapiens
CHARVCMHISTGARSPSVSPQQQSPFTTAGFAPTPASMNLPPTRSRQQNSFPAAQQNCLYAPSFSRSAGVIPTHPNMAHVTFILIVPSGRGSFSSNCPMRAMNAKLTKQSPGESPGPPSPSTVAYKAHSSLGATAHFP

SEQ ID NO: 989626 - protein, 41 aa, Homo sapiens
MHYGRMSQLPQDELQPPERALTVTKKPGPSSRAPTPPSISP

SEQ ID NO: 989627 - protein, 54 aa, Homo sapiens
WTTGSYTELEGRERHPRVRIDWHCLTDGVGVSKMDGPNHEPWQVGPEQQGWAVE

SEQ ID NO: 989628 - protein, 47 aa, Homo sapiens
MYCVCGWDEGASWGMRLPRWLNVWDGIRASDLGRHPGPAQCCEEPLV

SEQ ID NO: 989629 - protein, 34 aa, Homo sapiens
VIFPMQPASSRSVQQCQAPSSGAAGWRGSWVAVA

SEQ ID NO: 989630 - protein, 88 aa, Homo sapiens
EELTPERVQHSLSLPGTPTTPVSQLQSAPLQQLLHLLVRSKHIPQGQLMLKLLPVLLSDPHIGAEPQDHNFLQQLQSAQGDTLPVAMA

SEQ ID NO: 989631 - protein, 111 aa, Homo sapiens
LVSEGRRGMEEKIFFHCTLNNSHYRPDAGHDVPGPAGEGKQTAMCRHHAVHHLAVPQDSISALLNAGLPSQEILPMHFLTFYPHPLAKIFQICRFSPGLTILSSRPTHTTA

SEQ ID NO: 989632 - protein, 93 aa, Homo sapiens
VTDARVQEYDHGSGQIQPLQAQVIFPTQGSQVVGSAGAHHHAWLFEEYLVELGSMLPEAVLILLNSNNRSISASQSAEITDVSHHTMIVFLGK

SEQ ID NO: 989633 - protein, 106 aa, Homo sapiens
FPCPVTLHLSTSMENNFVNLSEGLYAENETRILIEDLHAAGKTTIVYKLKLIQIVTTIPTIGYNVGTEAYKSISFTVCEHPGQDKIRPLWRHYFQNTQGLILVGSS

SEQ ID NO: 989634 - protein, 64 aa, Homo sapiens
ADFREPPVGGLLSIQHTHKRTVHTRTHMLHTAHKRTAHTRTHMHTQHTRKRTAHTNAQHTRTHS

SEQ ID NO: 989635 - protein, 88 aa, Homo sapiens
NVYEKTTDYRGECRETCAKSTSSHVRRIYYYEWHSRAIVLCVSPSKPNPVFKVFGAAPLENVARKYKSMYNEELEILLWQNTPLRHRR

SEQ ID NO: 989636 - protein, 45 aa, Homo sapiens
VFVKSERHGVQSLSKYKPSSSFRVSKVKVQDLDCYTTCAQLCPFE

SEQ ID NO: 989637 - protein, 84 aa, Homo sapiens
MASVPALQLTPANPPPPVRSNPKKPGRVTNQLQYLHKVAMKALWKHQFAWPFRQPVDADKLGHIPSEWPPRDSHVLLVSSDQTC

SEQ ID NO: 989638 - protein, 128 aa, Homo sapiens
  misc_feature (107)..(107): Xaa can be any naturally occurring amino acid
  misc_feature (113)..(113): Xaa can be any naturally occurring amino acid
FLWLKPVSSLLRDGHPLPAPESSLRHESPPPPSTDIHVCLPSQFKCTNTNRCIPGIFRCSGQDNCGDGEDERDCRGVRGGGGPVVGDDTEAGQAESPHSFERLSNNXSRWATXIILGVTCFAHKNHHA

SEQ ID NO: 989639 - protein, 102 aa, Homo sapiens
  misc_feature (20)..(20): Xaa can be any naturally occurring amino acid
  misc_feature (24)..(24): Xaa can be any naturally occurring amino acid
  misc_feature (38)..(38): Xaa can be any naturally occurring amino acid
  misc_feature (45)..(45): Xaa can be any naturally occurring amino acid
  misc_feature (50)..(50): Xaa can be any naturally occurring amino acid
  misc_feature (53)..(53): Xaa can be any naturally occurring amino acid
  misc_feature (61)..(61): Xaa can be any naturally occurring amino acid
  misc_feature (67)..(68): Xaa can be any naturally occurring amino acid
  misc_feature (98)..(98): Xaa can be any naturally occurring amino acid
NDRFQKILNVKRFKTFCWLXIIKXHEVNNFAESAISPXFCTEKKXSVFLXSAXEVHIIVLXYNVLYXXINDKNKPCFMFHLVQKVKFPQCFVVCWTCXNYSS

SEQ ID NO: 989640 - protein, 62 aa, Homo sapiens
SAGAFIGDLMAAYFFSLQLLGTSSFASAASIFSSFMVPVNASVMGVRASAISAFSSSTLVSS

SEQ ID NO: 989641 - protein, 37 aa, Homo sapiens
MRRLLLLLLVLLPLLLLRVSRLCAGGRGLGAPGGAAA

SEQ ID NO: 989642 - protein, 40 aa, Homo sapiens
DLLARYWRMEAETEGAIKPGLQRMSGLTYPAGYTREGPGM

SEQ ID NO: 989643 - protein, 146 aa, Homo sapiens
  misc_feature (43)..(43): Xaa can be any naturally occurring amino acid
MPEVKDGKEVSNPSEYLLVVDAMTVHDAVNVAETFNNSLDLSXNNINKVDGDTRGGAALSIRDITGKPIKFVGVGEQMSDIEVFHPDRMASRILGMGDVLSLIEKAQQAIDQDEASKLSEKMLNQEFNFDDYFISYGSNEKAWTYK

SEQ ID NO: 989644 - protein, 37 aa, Homo sapiens
MLTRMANVREAVLVQDRVLQEAVRKPGAFSSSPMSNK

SEQ ID NO: 989645 - protein, 50 aa, Homo sapiens
MEQMGQWNHKLEPLDERHLLWPGTVAHACNPNTLGGEAGWSRSPDLVIRR

SEQ ID NO: 989646 - protein, 59 aa, Homo sapiens
QSRVLSRVCLSLFRKQSLYPPGHACRWNLCPHQQASLTSLPLCWKGLNPGKSGYVTYST

SEQ ID NO: 989647 - protein, 56 aa, Homo sapiens
GLSLPSLLHLRAGVLGGLDRIYCMPALHAADSLYHSSIYFAFVGETVSCRTSRGGR

SEQ ID NO: 989648 - protein, 84 aa, Homo sapiens
MPTGRHTLSQSVERAAAYNGVACGLGRHSDDRVLLDLCAFLKTIALNGCGGRANRCLSNYALEDDPLSGYTGPKLARRKGIKNP

SEQ ID NO: 989649 - protein, 70 aa, Homo sapiens
IFKDSVFAEAVTVPCEHANSRSPGSSEEQAQLLARLMVLKLCSPRHNLMAVQDFLMTVDRESLHLILIKM

SEQ ID NO: 989650 - protein, 34 aa, Homo sapiens
MPDSIGRGTQSAAGSLWREMWVQGSFLQPCWASR

SEQ ID NO: 989651 - protein, 80 aa, Homo sapiens
MPTALDLTEAWARSSPYSRVSSRPPLFPSCFGSLTPLEPVLPPPLEVFPSLNGISGARSLWCNSTDMIHGRSVLHIVAGL

SEQ ID NO: 989652 - protein, 54 aa, Homo sapiens
YPTSRRGGRKEKACNVQRIRVFPGKTQRFRWGDEVSGAMSTVLGGDRLHCRASR

SEQ ID NO: 989653 - protein, 65 aa, Homo sapiens
GVLRITDAGSDYLSTMSSLRSSTCDGAARCNDFGLMQLLALGSLRLLSLAGCPLLTTTVLSGYSG

SEQ ID NO: 989654 - protein, 55 aa, Homo sapiens
TTPNQEISTLNLNMKTFPFFQMEDKDDIFKRTIRINTHVVTICDLGRKCQVDAAA

SEQ ID NO: 989655 - protein, 46 aa, Homo sapiens
PLRLAGQGVEGCTKCIKYLLFVFNFVFWLAGGVILGLDLIACRASR

SEQ ID NO: 989656 - protein, 54 aa, Homo sapiens
AVRGEAEATDSAARAHPRAYHVVGVQVVAALQVVGVEVGLVLITGLVGAVGLSG

SEQ ID NO: 989657 - protein, 44 aa, Homo sapiens
PWVNYTLPRFKGQLESRELRTGRFQGMALSRDEPIPPVRVVAGS

SEQ ID NO: 989658 - protein, 41 aa, Homo sapiens
VTPLGNTCCVTPLLLEHPATEHLYGGQVSDRAPVTLGGAPA

SEQ ID NO: 989659 - protein, 68 aa, Homo sapiens
FSDPPYVLIHRGGPKYFCIDAQPVHGVSAGAAPVRCRARGLPGSRVALRNLQPNSVVVNSTLTAKVPG

SEQ ID NO: 989660 - protein, 50 aa, Homo sapiens
YHKLSAAPALAKVDNPRVSGHENGLPLTETRKVYRRYYLLDSEYSGVELF

SEQ ID NO: 989661 - protein, 34 aa, Homo sapiens
YLTITKTLLPALRPEPRLCPEFKGHWLRMVADCA

SEQ ID NO: 989662 - protein, 35 aa, Homo sapiens
MQRTRAASVRFPARTVEWRPNVSPSTLTERKNELF

SEQ ID NO: 989663 - protein, 47 aa, Homo sapiens
DPNAAESEAVAQGMAQQTMSACGGCCLHQPQWQMTHHPPMLSGTMTR

SEQ ID NO: 989664 - protein, 155 aa, Homo sapiens
TSGIGGSTWNVLTVHHTSNECAATWQDVVALAWIEDFAAVQCNAGSQLPAHIKHGRFHVGHVEDAADVERCVRLIVQGVAGLVVTLRDVAGRTPHVATHRTSLGGPIIRDGLARVVHPPSNFKYKGKLTKLLYFVTTFRTRGLVGKLLCSRIPRW

SEQ ID NO: 989665 - protein, 48 aa, Homo sapiens
DSRGSPMQRNREAAVIDDHFLFDKPVSPLLLASGMALVMALTPAVIWH

SEQ ID NO: 989666 - protein, 41 aa, Homo sapiens
MQRNLEVSGAMYDQQQWLVAEASDSDQSQGNGTEHVQWPWV

SEQ ID NO: 989667 - protein, 89 aa, Homo sapiens
GNKQLSLSQKSMCMWLDLYTDIINIFLYILIIIGRAKEYAELQLAVPAQVARAGLDPAPGTAVPIVLPLSLVPRHSLKEKDASTPTLLY

SEQ ID NO: 989668 - protein, 106 aa, Homo sapiens
ADSAVKRGSGRSREVQLSSVPAMAFTSISVIITETSLLLTRRLAFKAWMSVATPETPGKCHLLHGSALDLLQALGHDVGHLGALSLGDPAILSPKTLSVSGRGLLS

SEQ ID NO: 989669 - protein, 32 aa, Homo sapiens
MAFQSQIASTWACLEAPAKHSCLCRGARVRVH

SEQ ID NO: 989670 - protein, 73 aa, Homo sapiens
YERNNGTPNLITQRHIRIYQPAPAERDIVRKRWRLVKQVSHVGVLGQVDTRDKSKCLPFSSEPVREFVMSFQR

SEQ ID NO: 989671 - protein, 108 aa, Homo sapiens
LEDISTSACPQIHHGSCWDECKFFSHKVAKSTESDYIHFQSRGLGIHLVPGNIRKMSTGLKPNYDAIRTVLDDLRNNEFEDINISLHQIEPTLPFLLTDSCSYHYNLR

SEQ ID NO: 989672 - protein, 96 aa, Homo sapiens
MGRRYLTVFKRQLLSWIDFSKALPLRVQGQIDDLTFLRINQAREMSRTADALAIKLLYSISISKSALKAGESSETIVIFNAIVRLTRLTFCFIQFN

SEQ ID NO: 989673 - protein, 53 aa, Homo sapiens
YLLSPTLLNIHCARLCHADAHWCHVRVWLSCACRLGHHARSLVRLVRSTGLSL

SEQ ID NO: 989674 - protein, 76 aa, Homo sapiens
MATTEDRQRGQAGKRSEKYPSQEKGKLGKAASPRTRAAHAGLPVQFRGLRILFRVRSRLGGEKLGRGKGPGLIGSD

SEQ ID NO: 989675 - protein, 55 aa, Homo sapiens
GNLDLLASWTFWHTVDLLGYLEPSGHTVDLLAYVDLLAYVDLLAYLDLLAYLDRG

SEQ ID NO: 989676 - protein, 44 aa, Homo sapiens
EGVNGFGVSKSPSSHEYGSAGMSCIRYGHQRLAPSDLRSLRFQM

SEQ ID NO: 989677 - protein, 56 aa, Homo sapiens
WTSGIPATSGILDLLAYLDLLAYLDLLAYLDLLAYLDLLHNELTRNNFARREKVQV

SEQ ID NO: 989678 - protein, 45 aa, Homo sapiens
MKPSRQSTCSPPVSHHVDLPFRQHVAHNYQSTCSPAYQSTCSHLY

SEQ ID NO: 989679 - protein, 34 aa, Homo sapiens
MTSAYLTFWHPDLLAYLELLAYLELLAYLELLCI

SEQ ID NO: 989680 - protein, 145 aa, Homo sapiens
RPYVARTTGVCHMSANNVVFLSPLRWSLPPSPRLEYSGVISAHCNLCLLGSSDYPASASQVTRTIGAHHQAWLIFVFLVEMGFHHVGQAAFALLTSSDLPTLDSQSVIRCWDYRTATVPTLIFKFMVDKGSCYVAQAGLKLLASG

SEQ ID NO: 989681 - protein, 122 aa, Homo sapiens
KAQIHFVSFSLRWSLPPSPRLEYSGVISAHCNLCLLGSSDYPASASQVTRTIGAHHQAWLIFVFLVEMGFHHVGHAAFALLTPSDLPTLASQSVIRCWDYRTATVPTLIFKFFVDMGSCYVA

SEQ ID NO: 989682 - protein, 48 aa, Homo sapiens
VILDFSWCHGIPGLLDYLDLLQRPLSLPLSALSPPPFPSLQKVQVCQK

SEQ ID NO: 989683 - protein, 34 aa, Homo sapiens
AGLQEQQLFLQEVQFASSHLQESAQVRSHQKYAW

SEQ ID NO: 989684 - protein, 51 aa, Homo sapiens
TGHSPERTNFFFLFEEEVGSFTRRSRFPDGPAYASMVQVCQKVQVARRSRY

SEQ ID NO: 989685 - protein, 68 aa, Homo sapiens
PASGLLASGLLAYLDLLAYLDLLAYLDLLAYLDLLAYLDLLAYLDLLIVDTGCRGFSAETLQARRSRY

SEQ ID NO: 989686 - protein, 99 aa, Homo sapiens
RSPKRGWVIVHNDPEVEKMQAGPPGDMEAAALPCCEIQLRIKFLVIALKSSVWVYAWAPKPYHKFMAFKSFADLPHRPLLVDLTVEEGQRLKVIYGPRP

SEQ ID NO: 989687 - protein, 58 aa, Homo sapiens
IELGPGVHSPLRILGWGVENGTPVTVLVANSLEHCTGDDKWTSLNILRVTGSLLESNS

SEQ ID NO: 989688 - protein, 77 aa, Homo sapiens
GPRSRGLGVYVVVAVALLCPQDLRTPWSMAGYSVGLSCLCCGSRGCLTGSKSCHTGCKRSGSLDAAESCSLCWPSYP

SEQ ID NO: 989689 - protein, 74 aa, Homo sapiens
  misc_feature (2)..(2): Xaa can be any naturally occurring amino acid
MXPRRRGLGPGQIRQPQPGYKPTPRDSGFRPTPVLLKIQTPGASPWTQLLGPPQWMLMPDQHQPHWTQGPGLHL

SEQ ID NO: 989690 - protein, 41 aa, Homo sapiens
GGGRLKALHGAHHRLVLHAQLSQQLGADQARHQTPPAADCH

SEQ ID NO: 989691 - protein, 85 aa, Homo sapiens
GQLTETTEAALQIGAFALPFTVAHVDRQTHMSSGSDRMELLAHLLGREVRWVRTQAHFCTLAFPAHQAGSCDELDGERSDVSSPM

SEQ ID NO: 989692 - protein, 71 aa, Homo sapiens
LLGPQELLGEGVHYLGEELHHQNEGTQADTRESDKMWLVRHLEIIRKYVLDDLIVAKNLMIQCFPLHYEMF

SEQ ID NO: 989693 - protein, 115 aa, Homo sapiens
  misc_feature (111)..(111): Xaa can be any naturally occurring amino acid
CARSMRIPAEMTVGPVRMAIIQKSGNNRCWRGCGEIGTLLHCWWDSKLVQPLWKIVWQFLKDLELEMPFDPAIPLLGIRPKDYKSCCYKGTCTLVFIAALFTIAKTWNQPXNVHR

SEQ ID NO: 989694 - protein, 67 aa, Homo sapiens
RGGRKVGHEKSEMEEALTAITEELTASMRDEKKEAAEQMEEEPAAEEDEVAAKKSAEKATAPDVKEE

SEQ ID NO: 989695 - protein, 50 aa, Homo sapiens
DSNMRGSAGWVGLGLIGTDVLDLQPGHTITGSESSPTLSLVVAAQEKCAG

SEQ ID NO: 989696 - protein, 144 aa, Homo sapiens
SEAKNKRDEFPCPLLTVWISFYDLVKLSFFLSAMPGNPVTARPRAQAHLRGQVHRATPLLLVGSRCRAAATMMRLRTSLPVGSFLLGLTHRNHGLDGCAEGGSRTGCCCQGPWCCWHCSQRKSDRCEWFPVTFVSRVPCLSSEP

SEQ ID NO: 989697 - protein, 89 aa, Homo sapiens
  misc_feature (34)..(34): Xaa can be any naturally occurring amino acid
  misc_feature (75)..(75): Xaa can be any naturally occurring amino acid
TLEDPNAADSDHAGAASGANVLTLIEKDICTPNXLAITTVPEKLYFSDATLDNDRAVRVLTAPTGYVILKSQSLXTPLGLACVMAEHIF

SEQ ID NO: 989698 - protein, 36 aa, Homo sapiens
NAADSEERCLQKGRQKEEAGEKEVCGDQVKGPDKEE

SEQ ID NO: 989699 - protein, 112 aa, Homo sapiens
ELILEDPNQRNGTAQLIQAGSTRSFISEEMLLNTRFRSLWLRKLLQRQLSLGCQLRGPLLLAQKCGTAPLLCFEVGLLLSTVNGCCQVMPFGQQGGQRVHAEGPCQADSRAN

SEQ ID NO: 989700 - protein, 69 aa, Homo sapiens
  misc_feature (56)..(56): Xaa can be any naturally occurring amino acid
  misc_feature (61)..(61): Xaa can be any naturally occurring amino acid
MSGMAELWSSLEALQLTRVPRDMRRCCFCHEEGDGATDWACPVLLNLGPVTLWVHXQRVPXWSTEGCMR

SEQ ID NO: 989701 - protein, 80 aa, Homo sapiens
SRGSLGFNISARPSLWLSERRRGVGEWEQLCSVRQVPLLHESRYPLPERDSSPLAQDIHPLYALVICSSSSSVNLGQQGS

SEQ ID NO: 989702 - protein, 46 aa, Homo sapiens
MQRTRISEQSVFSSANSWVKLLLLLLQVGGDLARGGPVSTCEARPA

SEQ ID NO: 989703 - protein, 42 aa, Homo sapiens
MGSSILLTLVTRAQLLAPQRVLGIYGLYAHGARAICAVVYYR

SEQ ID NO: 989704 - protein, 47 aa, Homo sapiens
VTSWQGLACRVCLGAQVRKLVTVKKPVMTASSEQGMQSLLGEWGTGE

SEQ ID NO: 989705 - protein, 145 aa, Homo sapiens
LVGCFSTEKRCSLYKRENAEYVLSGATLLKISERYTTLHLPLLENANVLARNANICQQNGIVPIVEPEILPEEEHDLKRCQYVTEKVLAAVYKGPKVNIMYDLEGTLLKPNIGDPGPCCTIKYTPEEDAMAIVTDLRSNVAPAFP

SEQ ID NO: 989706 - protein, 68 aa, Homo sapiens
  misc_feature (25)..(25): Xaa can be any naturally occurring amino acid
  misc_feature (59)..(59): Xaa can be any naturally occurring amino acid
GGAQKDTFLLWCCPHVFQQRSGTEXSGVTSSDTLETYRLASLSRACQPERSKHEAGWAXFSPYQLFLM

SEQ ID NO: 989707 - protein, 100 aa, Homo sapiens
RRFQQEENRYKFWIGEKPLVRCFPSNKRCHGGLGKEYTTSLAKVVNAISPKTTTDEPSVVKHTCNTQIPGNLRHKNSLNRESGGCSEPRSYHCTPAWVTE

SEQ ID NO: 989708 - protein, 96 aa, Homo sapiens
EGHTLQCIKSHHQMWTWTQFPSVPSHPRVWTWTQFRCALAQSKVGTGTESLCGLSHSKVDADTEFLCARSQSKVDADSESLCALAHSNVDAGSESL

SEQ ID NO: 989709 - protein, 42 aa, Homo sapiens
DQQQAGARQLQDQSQGKGQSSARPGRAGISGSGPVENQGKFS

SEQ ID NO: 989710 - protein, 41 aa, Homo sapiens
MPCCGNGGCVAVGYYGTLVSGGSLQVVPAQRAALLLRGQVF

SEQ ID NO: 989711 - protein, 41 aa, Homo sapiens
AILEYPNLRNRSYLVLDEISNSGLWLGHVTWTMSQGNGQSS

SEQ ID NO: 989712 - protein, 48 aa, Homo sapiens
YTVPMSFSTTVPAFGPLSNLLPLPIVKLYMTDAGRLQLTCVQQCLARE

SEQ ID NO: 989713 - protein, 64 aa, Homo sapiens
NLKGKPTDDGAIEFTFDLEKETPGGGGQEMIESGFFQRVTVQIVAQSIRDRVGHNSCCGGRGSR

SEQ ID NO: 989714 - protein, 66 aa, Homo sapiens
  misc_feature (44)..(44): Xaa can be any naturally occurring amino acid
TLRIPDCIECRESGCGDGRREVSSAVTRRSRRSLVVAPGEEYSXSFVKWQWRPWNWVLPLRDGALV

SEQ ID NO: 989715 - protein, 51 aa, Homo sapiens
PDQPDSQLSPDNQDTRSNLDITVGSRATSHPRLDQHIPPVGLVGETLSGYS

SEQ ID NO: 989716 - protein, 37 aa, Homo sapiens
WCILLILLIHVTFSGILGIGVYPSAYLCPCAYEGPGM

SEQ ID NO: 989717 - protein, 54 aa, Homo sapiens
PGLSSQSLKATVRVLTSAQKWGAPARIWAEKKQNLIYTTFKNYSACCVEKCAWV

SEQ ID NO: 989718 - protein, 66 aa, Homo sapiens
TGLLAYLDASGIPDLLAYLTFWIPDLLAYLDLLAYLYLLAYLDLLAYLDLLISELTRNNFARRARY

SEQ ID NO: 989719 - protein, 56 aa, Homo sapiens
VSLPLKLFLLYLPPTSPGAPSSPSDGFISLSVTTQSYWHKFIFFQISFQNTQRSRY

SEQ ID NO: 989720 - protein, 34 aa, Homo sapiens
MSITYRRSGMPEWSRYSRRSRYARRSRYARRSRY

SEQ ID NO: 989721 - protein, 42 aa, Homo sapiens
ERRLGRTEHFQSSRWRDGCRVRFACDDDFPAVFVTPFLPSNR

SEQ ID NO: 989722 - protein, 68 aa, Homo sapiens
LTSQRSHGFLEKAEPVSPGCVKLAGHEGLVETVLLMEPWWMRFLQLYHEDLLAGLGDVALLPLEGPGM

SEQ ID NO: 989723 - protein, 80 aa, Homo sapiens
MRETIDISHRIDRPENASHELVKRESPTAITLQIPDHIDFTLSQTRLDHSITLSKVQVCRKVQVCHKVLVCHTGPGLPDG

SEQ ID NO: 989724 - protein, 69 aa, Homo sapiens
IIPGLLAYLNLLAYLTFWHTLTFWHTWTYLGYLDLLAYLDLLAYLDLLEGDRLGPKDERSSDIYLRYKR

SEQ ID NO: 989725 - protein, 116 aa, Homo sapiens
WTNDPKTEEHQVIHEAVSLAGWKGRIGAPGLDSSSLAGTPSDETLATDPLGLAKLTGPGDKDRRNKRKHRTRGGRLSDRDYLGAAWDGATVVYWLELWVGMPAWYVAAWRGNVKSC

SEQ ID NO: 989726 - protein, 125 aa, Homo sapiens
VVEGAGIGHGRGAIRMRMGLNISHRHNWCELSAVGVAAVVRIVPGVVNRTLSVGFSVCWVDGASGAVVVAVKSTTSSTSRAVVKTAWLSSIEERVERLLEGVVTSHLNSSSSREPSGRRSRGYGL

SEQ ID NO: 989727 - protein, 43 aa, Homo sapiens
MPDSTPRPLGCSGAAALGAKRPAPEKYRASSSGGSGGWQWGPR

SEQ ID NO: 989728 - protein, 45 aa, Homo sapiens
MLRLLYRSCCRMGPGEKADQRVLLQAGRSDNSSSVVHPWKLTWHN

SEQ ID NO: 989729 - protein, 46 aa, Homo sapiens
LEIAGGRTQRQHSYLRRRPMLDSTEQPGVSGVYCPGHLRTLFLGTS

SEQ ID NO: 989730 - protein, 101 aa, Homo sapiens
MIGRSGGWRGSRAACSPDRALAVVLVSDQHPPDAMFLVVAGSVRDGAKLLSDGIAHGVGLVAINVDGTNEQVVGDVIQVPMELEPGASSCHVVSGTLPFDL

SEQ ID NO: 989731 - protein, 66 aa, Homo sapiens
SNVIDLVYSEQVCLEIELDKISAIDVTTSRDRTTRILMLVINPSFLAYGVQVHERPERWGAVYHII

SEQ ID NO: 989732 - protein, 78 aa, Homo sapiens
LDIDRPSTSGSFDYKKPPPATGTDTVIAHWVVQPLSAMIQKSSGIPVKPVNGRKTSLDVYNSAEPGFLAPGARTNIQY

SEQ ID NO: 989733 - protein, 38 aa, Homo sapiens
TLTSHVTNAGPTQPSGGLLPSWDGAPSTSEVYPCTQRP

SEQ ID NO: 989734 - protein, 97 aa, Homo sapiens
ALKQLDEQRLRNWRTSTARAGGGQLPWVEQQLAGHMRAQLEALQKQIDSSDYPEVNEEEEEPENEKSSGQSRECELALWDYRKWQWYQFTSLRDLLW

SEQ ID NO: 989735 - protein, 58 aa, Homo sapiens
CTVSPSLTKGWLYTSDLPKWLPTALFFRLLKIDSTTMHRLLQCHEPMRRPESHSNTVT

SEQ ID NO: 989736 - protein, 35 aa, Homo sapiens
WLDASIQASRGSYVNLSLKSGAVWLGHQPQAQVPS

SEQ ID NO: 989737 - protein, 65 aa, Homo sapiens
RLRSAYRGSCGSDEGRSSCIVEGPRGSDEWETTPYGGGSLQFCIKGDHPRMARKVQSMPGDSSRR

SEQ ID NO: 989738 - protein, 93 aa, Homo sapiens
KQQNDAKKKWKPDRAIKVSMRLYALSVRIATGVKAGPAVFRGPPPRSLPQHMGILGDIIQVEIWVGAQLNRIMSLVYCEKIVTSCTQRVQMKL

SEQ ID NO: 989739 - protein, 74 aa, Homo sapiens
LWHLGLLAYLDFWHTWTFWHTCDASVLTWTFWHTLTFWHTLTFLVALGLIFKLSIDNVSLVLWHNITEFHEKVQ

SEQ ID NO: 989740 - protein, 131 aa, Homo sapiens
CCVNALQSHKERMSTLSVDMQGQALPDCIGKGHVAVGNSLPVNAQTLQAYLLQIVISGLPCSLFSAQSATNLMMTDYAEKNKPHHQLHATKLYSFKGRWFSEYCGTEASERQVCSGYDHSFLWRINSPFVA

SEQ ID NO: 989741 - protein, 69 aa, Homo sapiens
TMMCQMDDTAHMTGSGMEGGIDHLDICSAQTSSTEKEPHLNTLGAWLTIFSRYIREVIRFSCAPSQIST

SEQ ID NO: 989742 - protein, 41 aa, Homo sapiens
LALEYWGKYVGVDRLVRRSRLSSEPGLALNLGDQNGVWQVL

SEQ ID NO: 989743 - protein, 40 aa, Homo sapiens
LELLAYLELLAYLTFWHTCDLLAYLDLLVCQKVHGMPVWI

SEQ ID NO: 989744 - protein, 51 aa, Homo sapiens
  misc_feature (28)..(28): Xaa can be any naturally occurring amino acid
RDAFQEHPTRAIIIKMHKLFDANSSTVXNLPMGIYPYALFIITVHQNVICI

SEQ ID NO: 989745 - protein, 33 aa, Homo sapiens
SVWSSLREIPLDLNLGPTRGSEGGVLCGHREYF

SEQ ID NO: 989746 - protein, 66 aa, Homo sapiens
RLTSGIPDFLAYLDLLAYLDFLAYLDLLAYLDLLAYLDLLAYLDLLAYLDLLRNELTRNKFARRAR

SEQ ID NO: 989747 - protein, 50 aa, Homo sapiens
GLLVCRRSVIRSSGIQKVRYARRSRYARRSRYARRSRYARRSRYARRSRY

SEQ ID NO: 989748 - protein, 59 aa, Homo sapiens
KWDVRDSISSLVIHTFPVEVREEAGAEGEVSESDLLDGEAELGSDAEELLTARSRRCDL

SEQ ID NO: 989749 - protein, 35 aa, Homo sapiens
RLGPVCHVDFQRDGRKGSISVNSRSTPFLCHWRQR

SEQ ID NO: 989750 - protein, 44 aa, Homo sapiens
VGIAENVLLSLKTPDSFPPAISKHVKPTVEKMRFMSRKRDNYND

SEQ ID NO: 989751 - protein, 73 aa, Homo sapiens
VMGDVWHVLKTHCSSSRDIQHGAYFPDLSPSVSHCTVRKQNCIGEERRDKGQYRAVCPAYGPCTFSQATNTLT

SEQ ID NO: 989752 - protein, 45 aa, Homo sapiens
TFPRLYVEDEIYDQIKEHHVVSYTCMKMVWNSLQKCKDRPKDFFR

SEQ ID NO: 989753 - protein, 65 aa, Homo sapiens
PTSLTGLNSEGPVPVAGLPEGSYECCGPDWTTPVSSEAWESIKRQDVAQCAWGAACRASLGGVLM

SEQ ID NO: 989754 - protein, 102 aa, Homo sapiens
SAGSLLLVPSIFSLLVGGRDSEQPVHGGRLRWGLVPVGSRSPLGRGWSLLLADPLTLAQLGQKLPHAGGNLRAQEPQKYANVPRHRDELYTIITKFHASNNL

SEQ ID NO: 989755 - protein, 51 aa, Homo sapiens
PTSPTGKNGKRSPPMLKGGLIGSAIVLTNLQIQPRCVSLTALVQATVGLVG

SEQ ID NO: 989756 - protein, 122 aa, Homo sapiens
ECIQLPAFMLVDIQALVPARGLPVKPVVCLRLQQERSLVALQQAPAHGLVDGHLLLGVLQVDAGEAATALQQLSCTGAQLRKVLDRRLAVLELLKLGPAEDPAVLDAVDCNIFTAKESRLLS

SEQ ID NO: 989757 - protein, 109 aa, Homo sapiens
YSWAGRAVLEVFFSPLIFSPPWEGSDEQSRSSETALNGAWCRLGPEALWGEAGPCCNSDPVTLAQLGKKLPHADGHLCSSGATEICSCPQTTEMRCLPIITKFHASDNL

SEQ ID NO: 989758 - protein, 33 aa, Homo sapiens
RGATAEVHSNQDTSRVTTPREACKRATPQTITP

SEQ ID NO: 989759 - protein, 64 aa, Homo sapiens
RLARQAGDLLKETDISNASEGRQLHLNGSLKACLTLIVSMLQLVWASLGWVPESLNSVHHVSIA

SEQ ID NO: 989760 - protein, 153 aa, Homo sapiens
VRYPNPEAVSYPENWRHFIRHLQRQQILAASPEGLGTISSCNLQNLGSQPGLPPLSQGSHPLQSLLNLGKPFPAVYPEPGPQPPMCNQALGNQGQLGPKALGNPNPSASSGPWKPAKPDPSVSPGPWKPIPSVSPGPWTTRSICVFCILEIII

SEQ ID NO: 989761 - protein, 41 aa, Homo sapiens
PDQPDSCPQPGLLVGVSIGLVTPNVPWPQPVLLFRVCLASR

SEQ ID NO: 989762 - protein, 150 aa, Homo sapiens
YHHGHLRFILEGARLQQDCFIVMASTTGSYSCSGGGCSTRMPQWMPGMGSASSRDTHNTDCSFPAEGRNPTFRVGGRLGVENCATMRSWSIVSTFQLPPDPPAVREVTVPTWVSTANRSCRLLLSRVKNTLWLSADQNPKGKRMQKIPKK

SEQ ID NO: 989763 - protein, 30 aa, Homo sapiens
  misc_feature (21)..(21): Xaa can be any naturally occurring amino acid
MGVQADPSRTRARVGLRLTRXKNRRKHRVT

SEQ ID NO: 989764 - protein, 70 aa, Homo sapiens
PGIWTFFFLLSPFLFFNFRCSCFQWRLLGSYFFFFSSRAPLPFLLLLSFFSSFMETANSSVMAVRASSIP

SEQ ID NO: 989765 - protein, 50 aa, Homo sapiens
  misc_feature (27)..(27): Xaa can be any naturally occurring amino acid
MQIFAQWFGKSRTNIRYYFELNGKSEXYPRTSNGTFKNSPGQTPPFGNGR

SEQ ID NO: 989766 - protein, 38 aa, Homo sapiens
HNSRRSRVASGNTVLAMLVHAMGTWCPARQGSRHTTGT

SEQ ID NO: 989767 - protein, 35 aa, Homo sapiens
CNWAVMNWAPPACEKLGKCLTPPESIPKKCLWRGE

SEQ ID NO: 989768 - protein, 62 aa, Homo sapiens
EQEEEEDEESEEEEEEEEKVKAVTGDEEDEKVSDEKDSGTDIRLKTPSTRNEAHDSELMTSE

SEQ ID NO: 989769 - protein, 66 aa, Homo sapiens
PTSPKEEDVPVWLRKAFEGADGGDMTMLETGVDGGMLCPVPPTVEAYSGAVVASLGLSGLCRGLSG

SEQ ID NO: 989770 - protein, 58 aa, Homo sapiens
MEVEEGILSPSWGFEILNFTNISPNLTRLRKHLAFSKLKSELIQIQMPPTVGLVGGVP

SEQ ID NO: 989771 - protein, 51 aa, Homo sapiens
VSIGPRHDTAGGGSKFQFHTFCNVCVSFLGAPGGHICRLGGRVPLGGVGCS

SEQ ID NO: 989772 - protein, 42 aa, Homo sapiens
PTSSTVGPAWIWPTAPWGTLQHYMNVPCGHDWCATVPMISTC

SEQ ID NO: 989773 - protein, 38 aa, Homo sapiens
LGSSYVCEPKTKARDQVQAMNARSEEEALICGPGSWCY

SEQ ID NO: 989774 - protein, 48 aa, Homo sapiens
PTSPDSQLARQPRLARQRRHQFQTMEITHDVKAVCSQEAMTGPCRASR

SEQ ID NO: 989775 - protein, 103 aa, Homo sapiens
  misc_feature (65)..(65): Xaa can be any naturally occurring amino acid
VTLEVPPRLALTAALSSCHGHSPGHMAGLQLYGGLNVPEWFITWSPVRDTMGNKCQCSHAPVCIXRSLLFHALRSWVYSVGFTVNLHLSIICCPPVGLVGGVP

SEQ ID NO: 989776 - protein, 40 aa, Homo sapiens
DWSGQPGVTDPADSAVGVLADKDSTNFLVIPAESAVGLVG

SEQ ID NO: 989777 - protein, 31 aa, Homo sapiens
MELQKGCYSPHFSLPSWEQISGLSVAGPHEA

SEQ ID NO: 989778 - protein, 61 aa, Homo sapiens
PHLPVGLVGPTSREGWSDPYLEPKRRGIFRQIDSGSSSPFITSPQHSAQYMTGASAGGARS

SEQ ID NO: 989779 - protein, 84 aa, Homo sapiens
MTDKMLSMQPLPRCTLIIDPLAAGSHLTRIPIASWNSHTNPLIPHPLHENEVLRHQIFAAPYRDLPASLSAPSVSRSSDCRPCT

SEQ ID NO: 989780 - protein, 66 aa, Homo sapiens
HVIRMDQSQVRLCCPVTNSRFSVWFHGHVQLHQESSIEEPLSTLDFQNSCMVYFKYPQGNSHAWIA

SEQ ID NO: 989781 - protein, 44 aa, Homo sapiens
HILRERPTSPHNYQSHWGMQLFPRTVHGTDSSSRDPTEKITFIL

SEQ ID NO: 989782 - protein, 79 aa, Homo sapiens
IDEIDCHHMIVRHILVLLPGTVTVCLSSLLRPIHDQFGPYLIAPRLAALKIGRIGTSTGSDEDLKVPTTILERINRPYR

SEQ ID NO: 989783 - protein, 64 aa, Homo sapiens
MRMSQICLFYEVYSSEIFHVYLSFYCGILPRLGVLDRDLPLLGGVLERERPMRLAGVLERERTS

SEQ ID NO: 989784 - protein, 66 aa, Homo sapiens
RSVRCDQICLFFEVYQSEIFHVYTKLLLRDLPRLGVLDRGLPLVDGVLDRERPLHLTGVLERERPR

SEQ ID NO: 989785 - protein, 43 aa, Homo sapiens
TASTRIGRVLQKIGPCRIVVLKECSLHVPLSPCPVFQTALCSG

SEQ ID NO: 989786 - protein, 100 aa, Homo sapiens
PVITHVHQEALSAEQPHTCTSKLAAPVWASSGAEDKDEGPVAEQVKKSTLNPNAKEFNPTKPLLSVNKSTSTPTSPGPWSHAIPSIPLLTAGQSGLYSPQ

SEQ ID NO: 989787 - protein, 95 aa, Homo sapiens
MKCAAGYDSLVRRRFQQMDVLEGHQPARQHLMYISDTSWGCITCPGSVNKILHNAQYLEKKQGLDQRGRTWSGCGHYRVVNYERIKFLVIALKSS

SEQ ID NO: 989788 - protein, 54 aa, Homo sapiens
  misc_feature (48)..(48): Xaa can be any naturally occurring amino acid
PPALRSLDLDDWPRELTLVLTCYWQRGGQPRVGNATREACANALAGTXSLVMRE

SEQ ID NO: 989789 - protein, 38 aa, Homo sapiens
MVELTALIQIHKTALRCRPGRSHLVYEGAFASKVTIVT

SEQ ID NO: 989790 - protein, 119 aa, Homo sapiens
MTLNEPAAFKHLFNKAHLAPALNPFNPEWTQHMFQRAQGWGYGHRSTASQGRRIFLSNRTKWSLLCLLLSTQTHVNNLISLSFPHDSALFYTTNPPLSSWPVLSELLGTLTDGVADGRG

SEQ ID NO: 989791 - protein, 73 aa, Homo sapiens
SFTGLPAQYCPKDDAACTVPAPELTHTVKGAYSTSPPYSPYANAQVHLPMPMYIANAQCGLMNPPHCLRVTIA

SEQ ID NO: 989792 - protein, 73 aa, Homo sapiens
MASAEQQLQVLQEKQQQLLKLQQQKAKLEAKLHQTTAAAAAAASAVGPVHNSVPSKPVAAPGFFIHPSDVIPP

SEQ ID NO: 989793 - protein, 89 aa, Homo sapiens
QDRSKGVPQILVLMANAGAMTYRVTNSSIIDEFIPMSELHASGSNLASGAHLGGSPWLFGFADRVFWPHLLVGAMEIGAGLMTRTVPED

SEQ ID NO: 989794 - protein, 82 aa, Homo sapiens
ASSALEKEARILRLSVQTTSASVSVPDSSGPERILSISARYCKQLGRNSRRKIIPYLEKRACSMPYSALFNRAELPARNLDS

SEQ ID NO: 989795 - protein, 71 aa, Homo sapiens
LGVAERHAGGRAEVRQHLGHGVMLLFRGDLVEALFDLVVGVERFGFHLLRRTHELGGQLLDAHRVSGREQA

SEQ ID NO: 989796 - protein, 92 aa, Homo sapiens
QVLGRKNWKGTEECVQEWGEVGIMLPCVAQPTCSLTASIRGDGLSGLVWGLVGLVWGRVGLVWGLVGLVVGLSVLVCGTCRASRGTVWASLV

SEQ ID NO: 989797 - protein, 36 aa, Homo sapiens
RTPLHASLDCQQSHHTVHTLTPSSQVSPPNQNLPVG

SEQ ID NO: 989798 - protein, 60 aa, Homo sapiens
SSVPCISMRSPDLLHLVLIQARCHMSWAPPCLRTPLIVLVVVHAPPVRALCRSDVHHCLP

SEQ ID NO: 989799 - protein, 51 aa, Homo sapiens
MSYYCNFYSQTQAILPPQAPESWDRKRQHHTQLIFCIFGTDGVLPCGPGWC

SEQ ID NO: 989800 - protein, 81 aa, Homo sapiens
TCILRARKGGEKASSTSRSRRSFLRAICGYQELGMGRHYGPEMKWVDGGRPLLKMSHSSGFYSVYSGSGFTIIWSMYCQKT

SEQ ID NO: 989801 - protein, 51 aa, Homo sapiens
MSLDNAGCFNRQTWEHVGYSTVKTLKRNIAKLMHAVIIVVEQGECGITLGF

SEQ ID NO: 989802 - protein, 49 aa, Homo sapiens
AVLDEPVSSAIACKDVGIDVYYTIALHASLYKFRRHSEHCVTSKYRKLE

SEQ ID NO: 989803 - protein, 46 aa, Homo sapiens
TEWDHVDAQRMQSGADTPETRGLAWCSARVLPSSNTRPGLCGPVTG

SEQ ID NO: 989804 - protein, 79 aa, Homo sapiens
CSGIGGSSGSRAADGRSRRRSSCGNRRAVLSCRGTTGTLVSGGSLQRGPAQVQPLQYLQRGQRGHFLNMHQVLLLQGLG

SEQ ID NO: 989805 - protein, 35 aa, Homo sapiens
MFGVFHVGISELRGFGPSSVFWLEECRCHRGAEER

SEQ ID NO: 989806 - protein, 56 aa, Homo sapiens
MGDVVNEENMIPGFLDSLGQTLVLLHTDSCVLSIEDDNRVGADKILQELHVPPKFR

SEQ ID NO: 989807 - protein, 46 aa, Homo sapiens
SSSAPVSELREMFIIFSDDILQHVCALDGDLLVVLNHQVFHQLICP

SEQ ID NO: 989808 - protein, 95 aa, Homo sapiens
RDRVHSGLMAPVTGLRLCCALMLSQELTFLSRGSERRRGIQYNLNAIRAGRFPDPGRFTFSYDRALLASALNAWREQSDNSVGLPLTRVNQARLR

SEQ ID NO: 989809 - protein, 46 aa, Homo sapiens
PRTSCGGLDESLQVAERYYRKYKELLKSYQWKMLNTYLLAGAELNE

SEQ ID NO: 989810 - protein, 85 aa, Homo sapiens
LSSSSSTRWVSTPFDELLMIVVKYNNSGSPELPRSPELPRRSTNLPRKSRTCPEGPELAPNVQRLPRKFKDIAPDDPDIAPEIQE

SEQ ID NO: 989811 - protein, 68 aa, Homo sapiens
SGILDCAECLRLAFWAVSVVIAVMQLGPLSMQKHPGKLAGYISGLFTLASLCYMLFAAVVLCVNSFIW

SEQ ID NO: 989812 - protein, 35 aa, Homo sapiens
LAVVTKTGPFSFLWIEGLFFDVYRMRRLAMEICLD

SEQ ID NO: 989813 - protein, 40 aa, Homo sapiens
GPYTACTACTFKAYNSSYYSPILPVQQTDKAYTVSPRIAP

SEQ ID NO: 989814 - protein, 76 aa, Homo sapiens
LGLSEPMSLVQAWGECDLNTALKTRTGSLNASPATMADARSTVTISEPFGKLTKPKPQAESKKKKKEGKKQEKMLD

SEQ ID NO: 989815 - protein, 41 aa, Homo sapiens
KANEHTWTLCVLWYPDNNHSRHSVLLTFGAPCAQLPKCAPT

SEQ ID NO: 989816 - protein, 78 aa, Homo sapiens
MGVRVFSFSFSIVSLSSLRSSLVPTKMMGVLGPVVPHLRIPLCTDLFQLMQDSQGKSKLRTHLFADRIRGVNCHNLLV

SEQ ID NO: 989817 - protein, 58 aa, Homo sapiens
MLKSQKRKNYENQEGEVVRKALSSSSKIHCPLFAKPIFLAFLPLVVVQIVQPFPFCNP

SEQ ID NO: 989818 - protein, 36 aa, Homo sapiens
MASDYKKHTRPMVHKVALQCKLQFALPGAKPHYDEL

SEQ ID NO: 989819 - protein, 121 aa, Homo sapiens
FAFSFLTKGSQLSTPRLQQVCPPVWSLRHTPVGVVNAESSKATFPESLRRALDAPRTQGYHQTRQDEMQKEQLRTHEEDTSKAHGPEERKEDTGAKGERTGLPLISTTSAGRSLRDLGSVC

SEQ ID NO: 989820 - protein, 67 aa, Homo sapiens
TKTPGIALVCPTDHWLPSHVWSQSNCFVVGTSPSTFMYTVGTYLHKCTVNIMRGLGAHVTLGVVQGG

SEQ ID NO: 989821 - protein, 81 aa, Homo sapiens
DSGLAVLFDNSSSALAELGQDLPGSGSAGLPGGSKATSTFLLLGWFFREARAQKLTGPSSLQNIKVFLYKSPSCALEGTHA

SEQ ID NO: 989822 - protein, 144 aa, Homo sapiens
QIPLRVSCCCGRHRTGANRWDGAACLAHGGQYASKILVRSRARQLQLYMTTPSSLTWVSERQSMLAAAQVEVGLVHHPELGMQDAMGQLLHVHHADLGTALQQSLQVRLWLGPAGLAHSDTDVHALWCQGLQLPEDLLNLQGRG

SEQ ID NO: 989823 - protein, 61 aa, Homo sapiens
IRTDRQWDVSVDHMSDPLLESWTPRPLLGHIQINATNSSTPPTVLLEMPLIGTPSPTQASK

SEQ ID NO: 989824 - protein, 131 aa, Homo sapiens
VLAETARTDEVHALNDVHGSQLNTRTDILSVTQRQSINEEVAVVTPISLAVLILRNYISNEVLSPGHAWVLSGLGSSILRSSVASKYWKVVLKSTFPSKDFLSEQILLVEEQDHRDGAQPSVVPDALEEVQ

SEQ ID NO: 989825 - protein, 76 aa, Homo sapiens
MSLEARGGCLQYGSSALEALPTWGTLESNIIPALVTRKHHQEPALRDSGRAPDILNSGQGKEGWTQGRGARSRLHP

SEQ ID NO: 989826 - protein, 83 aa, Homo sapiens
TVLCGLSLCVYARGPLTSCWTCRRCATPSMPTELPPLHIVRLLHTVQLDSRRFFVITRSTSVIARSILEAFLSGRNPSSERHP

SEQ ID NO: 989827 - protein, 110 aa, Homo sapiens
LVTSVSTADTLHTYIPWTQNPLLLLVWTSSVMGNAREHSLEWLEFPCLFLIKSATTGAKDHLPSRNKNKGNNKNCALGKTGSYHSQGICGLSIKQKKVSLPPPSGGTLSK

SEQ ID NO: 989828 - protein, 83 aa, Homo sapiens
STASSISLSYSSDVYLIYSSPHNTFSSLSGNAPDVSSVATPDALLHMKHPIICWLIHFSYSNSINNSHDLRSLRFEGKVQNSP

SEQ ID NO: 989829 - protein, 73 aa, Homo sapiens
LAAEVCSLEGEGGTEESPISRPLTLIASSIQWAGEHLRQHKFRTTYLPRRTKDTHDRSRTHDKPVNKGTGLGV

SEQ ID NO: 989830 - protein, 41 aa, Homo sapiens
PSGVEHISVSSTTFGFVLCSLTLITLCTDDCSSMSRTKHRD

SEQ ID NO: 989831 - protein, 41 aa, Homo sapiens
NTGLRGILDFGAVLDYRGNSGLSGQFWTLEKDCPDSPELPR

SEQ ID NO: 989832 - protein, 58 aa, Homo sapiens
MLYYEGVNDLLYQLDPSLVHGLDYCCLWDTWLCVAGHDCVAVAYVACSPLSPEPKVPG

SEQ ID NO: 989833 - protein, 62 aa, Homo sapiens
VLVVLYMAQLPIVLLAKSTPSCQKYYTVLDILFTSQDFYLYLKHIRKTSRDLVESAQSRIAP

SEQ ID NO: 989834 - protein, 91 aa, Homo sapiens
TSVIIQHILVVVLYMAQLPLFSWPKARPSCQKYQTVLDILFTSQTSSLPENIMSKDQHEISLSSAHVQKLPRRGIRLVARTVQDTARLGHR

SEQ ID NO: 989835 - protein, 35 aa, Homo sapiens
  misc_feature (4)..(4): Xaa can be any naturally occurring amino acid
MSLXLTSDLSNDLNLVTYTYGAFTSGALTYGALTY

SEQ ID NO: 989836 - protein, 41 aa, Homo sapiens
  misc_feature (40)..(40): Xaa can be any naturally occurring amino acid
NWLQVDRPDPQAARSSSVHLPTELLSAQWSRQAQSPFPPXP

SEQ ID NO: 989837 - protein, 96 aa, Homo sapiens
TEERVLHVTHRTGGKLPRIGVPVTIISRGELSADCMLERSDKVLARVENSETSQSLKQFSNYYTTFSLTTLPAEEGAGGRRLDFDFWQVNPPPGDS

SEQ ID NO: 989838 - protein, 31 aa, Homo sapiens
MVAASSGRCGMSPRASSVVGDHSRVSVCSEL

SEQ ID NO: 989839 - protein, 90 aa, Homo sapiens
LCEPLEMLFSRIPVESAESSGRPRSVERQNADHADLACLLCRCLPRLNLIHGQLIGGLLCTDPKPGADKLKIYTWKVRIALRLGMGYVKC

SEQ ID NO: 989840 - protein, 56 aa, Homo sapiens
DSARVVLAEKVLQFDPGTKNVTALLMEAKELEARVISPFCQRGRCCQRVYRAARDA

SEQ ID NO: 989841 - protein, 99 aa, Homo sapiens
NLQQVSSYTPAPDVLHQLPLGLWEDVAPPCLTVIFDGILYDTIPTSREETCAHTPSSHLQSRTTPFRLLSRGGVLTYCNLTSWGELMKSKYSDITIMFE

SEQ ID NO: 989842 - protein, 150 aa, Homo sapiens
PYTSLCPDTRGPCVISNWYIICFSSSSMCCYASAHSGTRVFCVVPPCWCLPSFERLPSAPGTQQRPSSSTCGAPFSCDDGLKHRIMTEAIISPSLLPLAVLPVSGHRLGLVCSSGLRREDGFSLVIACSRLEVPKEAYNSCITRNRKPLP

SEQ ID NO: 989843 - protein, 108 aa, Homo sapiens
RWNSRALTARGVIMPHSSLSHLLTGFLKGWMDPHTWSDPGMVYRPLAGPSRVLGVGDLLPEHSLDVAEHQRVMGLHLAGQPAQRGTGAQLCAQLLAEVGGRARQQVAP

SEQ ID NO: 989844 - protein, 138 aa, Homo sapiens
SLAAQRMFYGRCGIARAPPDGSWRVGGCSISSSLRWTSLSQLRHANTEFWSLTPTHANTQGSVGWEREGRFSFCSLGLPRAFPAAERDTSSQVKGHSGPGPDPVVTHLGTFPDQLRLPCPPLSRKEPEPSPLSHPPQG

SEQ ID NO: 989845 - protein, 140 aa, Homo sapiens
HPAASCVVSVALLPGINLLAVVRHVLQRDLRSVRALGPMVPAPPTRWSSHQQLHWRTPRSWLAASLCQTGCWARCRCHRHFGSRWCRVSGPERNASPCWAGLAEVGWNLLSFQVNPELSEEARFSHSLLADERVRIVRLR

SEQ ID NO: 989846 - protein, 44 aa, Homo sapiens
MLSGTPLHALIVICNTPERPGSARVVSESFHCAPDPAPVLGLVW

SEQ ID NO: 989847 - protein, 35 aa, Homo sapiens
MPPILESLHASVSGTLCPRAPPGDAALSGYSGGYR

SEQ ID NO: 989848 - protein, 46 aa, Homo sapiens
KCESLDLNPGGLTPNPYDHYAPLLPQPFLSQPWTSSQPWTSGFRSS

SEQ ID NO: 989849 - protein, 58 aa, Homo sapiens
ADSPVYRGNLPVGALPMTKHRQQAKATRNLIFPRYLLRKSYSYLPYSGYHGLIVWTAS

SEQ ID NO: 989850 - protein, 47 aa, Homo sapiens
PLTLQTHMLDYILFHLGSIIGTDIIRKLCRVKGSGRAKGSRRVKGSR

SEQ ID NO: 989851 - protein, 40 aa, Homo sapiens
MSELPFTIASKRIKYLGIQLTRDVKDLFKENYKPLLNRVK

SEQ ID NO: 989852 - protein, 118 aa, Homo sapiens
MDPNAADSSTYIEKCVHAAAPSPDSGNVDILSFEESNRAMQTGVSGIMIARVALFKPWLFTEIKEQRHWDISSSVRLDILRDFTNYGCSTGARDTQGVEKTRCFLLHWLSFLCRFRCI

SEQ ID NO: 989853 - protein, 89 aa, Homo sapiens
RGAPPLLMAAQWLHSPLSGCLRCLCASVASHHRCCFLVSLRVLFAALSIKPINMQHPLLLHNGAFTRFSSTQQHQAVRGPVDLPSPLHW

SEQ ID NO: 989854 - protein, 35 aa, Homo sapiens
MQRTRHNFLYPFLRLSGTSSKLYIASTIYDPQNTS

SEQ ID NO: 989855 - protein, 141 aa, Homo sapiens
CSGLGTSPLPAPICSSRAPEEISSINSWEFCYVRHSLSNCIIDELHNIGTISSRDELQGPGELLGTFESFFGSRLCLHQFYWPPRMHGISGLNSLISVYHVLQVPIGDFPLYIKHHDACVGLVVLGGMLALEPLLACRFRC

SEQ ID NO: 989856 - protein, 40 aa, Homo sapiens
FRILSGDGNLRSGGYDAKGPELESEILNEDTLFSQPIPGY

SEQ ID NO: 989857 - protein, 66 aa, Homo sapiens
LVHGWRGSLTITVEGKEEQVMSYMYGSRQRERTCAGEPLFLKPSDLVRANRGLVLVHGWLQEGRRG

SEQ ID NO: 989858 - protein, 35 aa, Homo sapiens
GGIMGQAGFCQFIQHVNGGGVQWLTQPTVDYVGTE

SEQ ID NO: 989859 - protein, 76 aa, Homo sapiens
CHGWLSSTVGSRPWLARRPGLAPRPRVGYSSTVGYSSPVGHSSTVGSSSTVGYSSTVGSSSMVVLLSPRFGIISLT

SEQ ID NO: 989860 - protein, 36 aa, Homo sapiens
LVQVGELGDASQTVDDDWLAGELGFIDELDKAKPGT

SEQ ID NO: 989861 - protein, 135 aa, Homo sapiens
PLSVGHLAWLPPGLFAFSGWNFLNYFTEEMVEARKNLPRAIFISIPLVTFVYTFTNIAYFTAMSPQELLSSNAVAVTFGEKLLGYFSWVMPVSVALSTFGGINGYLFTYSRLCFSGAREGHLPSLLAMIHVRHCT

SEQ ID NO: 989862 - protein, 118 aa, Homo sapiens
GAGEFASPATEHTSFCFPAFVPGCVSCWHYTAYDNVVATYTPATLKNIANKFKCRLKLACATLLVLNFVLPFCRFDGDELTTDERIRSLAQRWQPSKSLRLEEQSAKAVDTDMIILPC

SEQ ID NO: 989863 - protein, 87 aa, Homo sapiens
HQRIFQVTLEYPLAVRIALTALPHYCLQRIGAPTPFPGVSQELAYFEDLILKATEPHMVLFNLYDDWLKTISSYTGLSRLILHSSRC

SEQ ID NO: 989864 - protein, 64 aa, Homo sapiens
QYGLGSGANVTTEKREVLADQWLQMAACMLPVPCGMLADNDCFIRSMLLLLQSRGWVRHLSRLA

SEQ ID NO: 989865 - protein, 60 aa, Homo sapiens
RRSRDPPSALIHLSSIYLAIYPSFYLSIIYLSIYHLSLIHLSSMAVVATRHNCTSHRTLA

SEQ ID NO: 989866 - protein, 83 aa, Homo sapiens
QCSGLGSTLALRRKKVLSTECTWQLYESGSEPRRGGPRPPTAVQRSCVDLSEQLTLLAPVAGRSNISHSPLVCPREYGYQSRG

SEQ ID NO: 989867 - protein, 39 aa, Homo sapiens
MHTGSQCSGLGMCLDIIILLKVKLKVEGRAEQTLEARVS

SEQ ID NO: 989868 - protein, 37 aa, Homo sapiens
NAADSAGEGDKRHILNAENDNTNKGIEIEEGIITQGD

SEQ ID NO: 989869 - protein, 86 aa, Homo sapiens
GSQCSDSAAVYALLIKSNDVCLELCHVDGSLISHCSVGGQSCRLEILARLEGSETQSLQNASDPKAYKLSSALVKRILSWGFRGIG

SEQ ID NO: 989870 - protein, 36 aa, Homo sapiens
AVDSDHHCAAPRNFWELLINVKRGALLAETYIIPEE

SEQ ID NO: 989871 - protein, 37 aa, Homo sapiens
MLADSALSPLDPYVKPKIVNKENQRSSSVHQVRPDMA

SEQ ID NO: 989872 - protein, 93 aa, Homo sapiens
LQRTRHTFSIDCSPHNTVKKTANEFSLFCLHASLPWILVHNARFSCYPAVTSSCVPCKAKNPQEKILFTKAEDSLLALGLKHFDGTDVSYPSY

SEQ ID NO: 989873 - protein, 81 aa, Homo sapiens
AASTSILAEYTGLWFPHVLRTGSMLGKLTSRVEASWRLSLKSFPFFSRASSNSMASEASPFLHLIPTQHRATLENCSARNP

SEQ ID NO: 989874 - protein, 92 aa, Homo sapiens
GTSLRKSTGTGSPTCPSGAMGHTHRQIDHGMGGDRDDMEIFMEGDERNQKKTEGAAVQELSAYPYSGSSLISMTHHYEFWPMSLTPGIYHEI

SEQ ID NO: 989875 - protein, 41 aa, Homo sapiens
ELISIIDPPRAGVPECRGQMSKCWGERRGWSLTCLLYKTYT

SEQ ID NO: 989876 - protein, 67 aa, Homo sapiens
MKIDAARSETRAEKKRMGIEMKSRRPWAPWAYDNEKGQVVTKDSLLKHIEELIEEPGLTCCICKEPT

SEQ ID NO: 989877 - protein, 106 aa, Homo sapiens
MGLERDVRGAEDGQCSFRLTWAMGKLGVDGPECPVRPHECEEIDVLELVAGLPEGYMFIWNGEVSPNLFEEIDKDGNGEVLLEEFSEYIHAQVASGKGKLAPGFDA

SEQ ID NO: 989878 - protein, 99 aa, Homo sapiens
TSRVIPHSGTSGRSVRGMLSHKTKRGHGRSGHVSRCLSGIPPSYDKNTRMVVPAALKVVRLKPTRKFAYLGRLAHEVGWKYQAVTATLEEKCAWGSAPG

SEQ ID NO: 989879 - protein, 95 aa, Homo sapiens
RIVTTWDDMEKIWHTASTMTLRVAPEEHAGVLSEAPSEPKANREKMTQISAEDLQQHSVMYVAIQVGAYPCTPLADPLCIVLDSGDGVPHVVPFY

SEQ ID NO: 989880 - protein, 76 aa, Homo sapiens
LDTPDLWSWSEMVTGGHEEAEEKSVVLLVCKRSVPTSAIFVEVLASMRQMGWPRSVANDDVPHTDPEMRVIVPSGE

SEQ ID NO: 989881 - protein, 149 aa, Homo sapiens
MSPRVYCNQIFINNEWHDAVRRKTFPSVNPVHLEKVICQVADGDTADVHKGSEVLPGAAYQLVSPLEPNGRYHTWACLDEPALVDLIERDLYTIWRPWRPWTNGQRYVISYLVDFGHVSSHVSGNKWRLCVDTVTTGQPIPIDGDYFRV

SEQ ID NO: 989882 - protein, 94 aa, Homo sapiens
PSESHTYDGQMKALGSVLLSIIAPLCIAFKASQRNLELLCLQWFSHNWGMSERVLCVNTEDKGLATFAWIITVTVLQTNTNWRLPIVTHDGCIA

SEQ ID NO: 989883 - protein, 177 aa, Homo sapiens
GGSGGGVAGSQTTAMSAVSLSACCTAEGQAGSGLRKDAHMCLEMKASREGCVCGHLSGCASQASEFLRSPNRHIPKWLYEDEHKNSRWGHPHPPLTMDWDPTHATFLLGRRFHIHGLGVLAWSPPAPVPTAQGPHHKWVSYSSSRNGLSNQHVNLTLCLQAESPQLFQLQPGQGHLQ

SEQ ID NO: 989884 - protein, 106 aa, Homo sapiens
PQPRKAGAPRSCVYLSWLYLDRDDVTLERISRCFLETNRKRRGSTPKKLIMLQNLRVGASAFVTSGNQSVNNWESGLQAMECAFHLKESVTYRLLELDSPGHGAGV

SEQ ID NO: 989885 - protein, 72 aa, Homo sapiens
EQIKYAMIMNTHPLWQMSHCSMEHNSLPRSVEHLGTDAELKQQMLVFSIPGAEKESYSCLIIKTDTVVTSAE

SEQ ID NO: 989886 - protein, 115 aa, Homo sapiens
  misc_feature (13)..(13): Xaa can be any naturally occurring amino acid
TPTRKLLRSRPEXQWSPCPGGLWVIQNVEVGAGIVISAKATRLFLPPRQPGRGTHAQFSGDAIPTPAGDGSPPSGRQETLRSTRFPQALTFKGPGCSTMVLGLKIAQSSSFPAGR

SEQ ID NO: 989887 - protein, 47 aa, Homo sapiens
YIYAAQTRNTERSGYGGTRRRLCRKLESNTGCRNLRISHTLSLYKKK

SEQ ID NO: 989888 - protein, 146 aa, Homo sapiens
NAHEIRFSIKVVLVYAELSTQETKTNIKSTKKETVHIIKVKTKVEKFYFKRTEHLQDISYLVPHMSLKKFTYTLYYYFPRLVKQQTINRSEKPALHMPDWLFVTHLKDTTQSMEAFNRTALPISGLLADADMYYSQQLPIDRYMGI

SEQ ID NO: 989889 - protein, 34 aa, Homo sapiens
PNSGAELSSRCDAPQLTHTEERAVRVRRLWPGFV

SEQ ID NO: 989890 - protein, 53 aa, Homo sapiens
TSSGRAGELGWVDHSPPTAPWLEVERDNAGTVTCATCECMKLHVMKHNRDGWN

SEQ ID NO: 989891 - protein, 52 aa, Homo sapiens
ITRNSSTLAFRYLFPPTVPILNQQVCAQFYCIVLALTQISTCRLSSTTPPPD

SEQ ID NO: 989892 - protein, 119 aa, Homo sapiens
AVLEDPSSGELRVGEVLGSVSRSAQATNVVPPPGTRVLVQLLQAGAELTDHSWFVVFQAQGAPGSPRGPPIAWTFSGRGSEGGQARLAEASPAEAACCCWAMSSLSEDCFSRLAPELGT

SEQ ID NO: 989893 - protein, 43 aa, Homo sapiens
PLLIRHGGMDQALFPDHGPVHRLLKATWWSPCSLGGHRYMMPE

SEQ ID NO: 989894 - protein, 72 aa, Homo sapiens
RQSDLSGAVIHRRRFSSGLVTQLRNIQDPSLPCLEFPLALGHSNKLGPRVSPFPPGPGHTHSVTSPLYLCQA

SEQ ID NO: 989895 - protein, 40 aa, Homo sapiens
MVRHSKSQDAHCKDFADKTGTDYSELWLSSLLHSRGIDNT

SEQ ID NO: 989896 - protein, 47 aa, Homo sapiens
MSPSLHSLLFCLQTQTTNALTVASINPSRLEDFNTRTPDYLAFLHDF

SEQ ID NO: 989897 - protein, 63 aa, Homo sapiens
VLEEPSRRVRTSNTHGVDIRTSPAIRTSPREASRRASLPPPAGQGLTEQEHGGPVQAMLMPRS

SEQ ID NO: 989898 - protein, 34 aa, Homo sapiens
ARYMRRLPAESRQLKAAYEARMARLDPSQDLSKP

SEQ ID NO: 989899 - protein, 69 aa, Homo sapiens
ASRQCHNNLIKAIYKEYELNAKNDGRGEVVVVEDIKEVLETEFKTLVPFKLSISRGKQSQGQVKTITEK

SEQ ID NO: 989900 - protein, 67 aa, Homo sapiens
TIGDTNSRLSLTEFNISVNISASDTLPLHSDTGTHFSTPSPTVSMSQCRKAVSIKLTSHLDTPNNNS

SEQ ID NO: 989901 - protein, 42 aa, Homo sapiens
HLWVHTEKYESERRLGSERRLLGLRGEPPELDLSKQEDLSKP

SEQ ID NO: 989902 - protein, 44 aa, Homo sapiens
ESNAVRVNTQIKDSYGNNEERKTLLSNLSKPGDLSKPGDLSKPR

SEQ ID NO: 989903 - protein, 41 aa, Homo sapiens
LGLLSKALLSNYYVLAQDSTRGQRKVHPVFMNTSSMLDSVA

SEQ ID NO: 989904 - protein, 43 aa, Homo sapiens
TSSHPDGPAEEDTCMAFRSICSRSEAVHPGPAWTQHPPETSPQ

SEQ ID NO: 989905 - protein, 49 aa, Homo sapiens
LCLLLVPLEGHTALEWASIPTPGIPPFASWGTHTKHPPLLKETVPIDLL

SEQ ID NO: 989906 - protein, 157 aa, Homo sapiens
TLTLDNVSVEKLLEMDDLGHAEVSINYHSNLLPRIHGLSRRCPGTSYVELVMSVHDYAELCTRLLWQMPSLLPSGTLDGDPNTLARATFKCELVVLHSIIFIQRVKVDELRPEDGGGWHTGPTHCAKDVVRYGDVDMLVKPSVCCWNQDMELAEADI

SEQ ID NO: 989907 - protein, 78 aa, Homo sapiens
MLDDDCYTQPGWLHPVIRQAPLMPFKTTVPCPRPLKETVSPRLPIRMSLTTSFRPIPESPCSGLRLQLWLQHRCKGPC

SEQ ID NO: 989908 - protein, 39 aa, Homo sapiens
TDKHRCLDEFYTAGNSEEEGCVDKIYNQTHRPKTSQETT

SEQ ID NO: 989909 - protein, 44 aa, Homo sapiens
QEQCVATSRNPGSGTVTTIKMSIAQCTSSHPNHPPDPPATETSQ

SEQ ID NO: 989910 - protein, 41 aa, Homo sapiens
EEYLKAGCLLKKEVKVGSEFLQAVQESSVGSASRGDLSNPG

SEQ ID NO: 989911 - protein, 54 aa, Homo sapiens
MVHDTEDRSLSGSSQSRAAAEAIQKLPPLPGTETDKMPALVVPDIKEIRVSPTR

SEQ ID NO: 989912 - protein, 41 aa, Homo sapiens
IRAAKAIDFEVSDDGSPMDACLNQVEKHFNAGRCKDYSSNY

SEQ ID NO: 989913 - protein, 58 aa, Homo sapiens
EDPCLLRALRVAVAGFAAELALRLRARSDNRSESDHEAVLSFVQDCNPATTTPQALTY

SEQ ID NO: 989914 - protein, 81 aa, Homo sapiens
PTREDSRSLNAFDPTLPDDDAFLEQGEPPSEARRALLPSCQSYHGGDLPGSSTRPDKGVCGMNYVDHCKEQRPVPKEPIIS

SEQ ID NO: 989915 - protein, 67 aa, Homo sapiens
HCVCAREEERRSLGSGRLAWIQCLSRSVSSASSLAAAAAVVVPALELGPSQAGAEENDWVRLPSKAK

SEQ ID NO: 989916 - protein, 40 aa, Homo sapiens
FISYQSVVVSSFMWEIDQNNSLTLVEYPKNKGSHPPFLCI

SEQ ID NO: 989917 - protein, 67 aa, Homo sapiens
KVFHRGPQQSSYHLSLTPESLFRTVVFPTHLHSPDSTSMRLLTVTAAERGLSKFLANSRSLIYMAMA

SEQ ID NO: 989918 - protein, 75 aa, Homo sapiens
  misc_feature (1)..(1): Xaa can be any naturally occurring amino acid
XICRTGAALSSGEGAAAGGHRAKSCRAVRAGPQEPLEIISGSALSLAWRCWTKGTAFAHPVGLQSHFSQQLPLPQ

SEQ ID NO: 989919 - protein, 40 aa, Homo sapiens
MVGGVAAGASSSVFLSLQAASFPEVTLGHLLSGCWETRAQ

SEQ ID NO: 989920 - protein, 70 aa, Homo sapiens
VIECHHLAKRGLVVFIDATTDQHGSLDVLRFQTWAGSPSLGNLVCFACLSVWSVANFAAGLHLVLRPMEV

SEQ ID NO: 989921 - protein, 50 aa, Homo sapiens
MSGRGDATSVYRVRQPSGLRIEDADLPGPRCATMAPETALIQVHYLLFIY

SEQ ID NO: 989922 - protein, 117 aa, Homo sapiens
  misc_feature (82)..(82): Xaa can be any naturally occurring amino acid
KSSCFWGLLPRVPRVLTCRGQELTSLVPVTPACLTPVIPGHLRPKRWSGDCVWSLWSLPVCVRICGQGTGRWLGPRLARPSXLTVLVTWPRALPQVSSVQGPPRPRQLVPVLFSVSD

SEQ ID NO: 989923 - protein, 187 aa, Homo sapiens
VCKNTRQAMSDDTVTGCLLHTARSDYQMNMENAKALRDAGGIREVGRNLQKQRRYTLSKSGQRLHLRSSTACDSTRDLRSLYKKDAWSQYHFVASYSTIERDRQRPYSSSRTPSISPVRVSPNNRSAVPQLHLGNMISLKELENRLRVHRQQSQPTMELKGEHTSRTDAMTAQQHWNFNLSRNSYGA

SEQ ID NO: 989924 - protein, 33 aa, Homo sapiens
TRCYDSRQLSKLEERRKIIQFWPGTLAHTCNPN

SEQ ID NO: 989925 - protein, 57 aa, Homo sapiens
YGTQLSHSFQYVYGCLTRTAKLNRYDRNSMADNTSWTITDILFITDLSSELFIYLST

SEQ ID NO: 989926 - protein, 108 aa, Homo sapiens
DSYKQERPITPPLLSDGGSHEGDRGPHGLLSDGGSHEGDRGPHRYSPTSAHTRETEDPTATLRRRLTRGRPRTPPLLSEVGSHEGDRGPHRYSPMLAHTRETEDPTAT

SEQ ID NO: 989927 - protein, 56 aa, Homo sapiens
  misc_feature (41)..(41): Xaa can be any naturally occurring amino acid
IDNDRVVCAVALRWEHGVDVRHKELIGKYAMRDYVTGFQEXTHSTTLQTRACRMHP

SEQ ID NO: 989928 - protein, 61 aa, Homo sapiens
SLVYNHREGRKGLLLLPHASISPVRVSPNNRSASAPASPRDMISLKERKTDYECTGSNANY

SEQ ID NO: 989929 - protein, 69 aa, Homo sapiens
MHGVYRSQPWTSGVYRYTGVYRCHRRARWRVPVVPATREAEAGGSLEIQEFWAVVRYADRVSALSGIDK

SEQ ID NO: 989930 - protein, 34 aa, Homo sapiens
QRNYYSLSLQDQGGWQLFPKSDSKALDLLDRMLT

SEQ ID NO: 989931 - protein, 47 aa, Homo sapiens
CQRREIFHVSQDSHYSADVGFDAQCGVLETCVHGEVNGVGGLSAVVL

SEQ ID NO: 989932 - protein, 97 aa, Homo sapiens
VKHIGSCMLMGLMERAANEDPQAARSNSDGEKAPTVQDIKNNLKEAIETIVGAMSILVPADGAGQSRQKQFRVDYILSAMNVPEFDFPPEFYEHAKG

SEQ ID NO: 989933 - protein, 61 aa, Homo sapiens
AQVERRKSDEVPGIGQSEREQLRGAEVVKHGNISVEKVGGGGDSAISIALIWRYQIPDVDI

SEQ ID NO: 989934 - protein, 52 aa, Homo sapiens
YVCAVALAGVMSDVRHKELIWQIRHARLVHRLPGGNNSNNTASKCMSDAPVT

SEQ ID NO: 989935 - protein, 69 aa, Homo sapiens
ATSGHRLFRLFSDVLPLVLPSYQSLWLHADCGSVFAALSIKPVNMLAPLLLHMVLYQILQHPVTAGGAL

SEQ ID NO: 989936 - protein, 76 aa, Homo sapiens
SDAPGMVIQDAEGIIFPERLSVHLQDKEMPVNNKMISRDSLGDIFVALTYMVRATKNSDFLCCLPSRLKNIIHGDH

SEQ ID NO: 989937 - protein, 70 aa, Homo sapiens
GDGTRSPMLGRSFTRARNYYAMGSHTKFVAVPTTRGATRQRKAGGSPLQSLHDIDVLNSRTQVFLVLFSK

SEQ ID NO: 989938 - protein, 42 aa, Homo sapiens
KAFAQTWEDLCLTGNVSSTAGHGCLVSGLKLSLYGQTKRRQG

SEQ ID NO: 989939 - protein, 36 aa, Homo sapiens
MKYVMLIWQILPCETYVLQASMDENNMQQHLKQRAC

SEQ ID NO: 989940 - protein, 80 aa, Homo sapiens
EATQLCEKRLTVVLCVVSERGGLGTMWAQFPLRESLSQNRGPLHGGRCPGLAVATVCVDLSPEHARVTQGVAAWGGLLSP

SEQ ID NO: 989941 - protein, 48 aa, Homo sapiens
IRSLSLRRVARRGSALITVTPLVRVPLRLQLWSASPPSTLSTRHAWTS

SEQ ID NO: 989942 - protein, 67 aa, Homo sapiens
MTGAWELLEQISCGLPSAVHISRSVSRCQGALPGCEVTPQFWCQRHDARIVCLPSSRLALGVPYAQY

SEQ ID NO: 989943 - protein, 72 aa, Homo sapiens
MSSAYPELSRVLRALLPWMSQGVLTYSGSISGGFKPLLSLRSWSDAYLLVGRVIRLHAESAALGIELDLVVV

SEQ ID NO: 989944 - protein, 45 aa, Homo sapiens
FIDAIKNNFCQTLGKVSGVGWAKFLIKIVQTGFLQAVTSAETEMS

SEQ ID NO: 989945 - protein, 54 aa, Homo sapiens
MASHRKQGLPGDLVMEMSSRWPLDVTVALHGGPRAASMNQPRFQTISPQQLSVH

SEQ ID NO: 989946 - protein, 72 aa, Homo sapiens
DVTIDRLSAVCQRHLWAHVLGVYTARDFIVSVHVLVYSNQTSMVRVPEQTYRPVEQSRGLRNNTTRLQPSDL

SEQ ID NO: 989947 - protein, 63 aa, Homo sapiens
MEQCLATFCLDCGKASGLRFARLLGRSMHLKILELEPLFNTVAPFAPLRNSFCPLPSGAVSAA

SEQ ID NO: 989948 - protein, 101 aa, Homo sapiens
VYRRHSTVPLSRDGMWHLQFLSDRLNQGLTLVFHFVFNISMNYQDTAFYREAPFSRSSWPFGTHSSKPKKVSTGSTHKANNGFLRKSRVSRRQPTSDVSFS

SEQ ID NO: 989949 - protein, 56 aa, Homo sapiens
WSVPLCGVWFGNEVVHKLLWWPPCSATVTVRGHLLDISITKSPVKTLFPCEAIAQP

SEQ ID NO: 989950 - protein, 68 aa, Homo sapiens
RYIIALSEDPDWLSAPTSKAKTDSINILADVLPDEMPTTVEQSMKLGVDVNPPRRGHCSGHFCRVRCI

SEQ ID NO: 989951 - protein, 32 aa, Homo sapiens
MIATHTSEDEEEKGQQGPGGLGEREEKVASIN

SEQ ID NO: 989952 - protein, 51 aa, Homo sapiens
GLSDVRDVWLSTNVALEPSRLAIQCVLAGVGPVDALSDIVQRQAIGPCDLG

SEQ ID NO: 989953 - protein, 71 aa, Homo sapiens
YSHGHHLYIIISFNSHVGITAWDGTAPPAPSHSECMSCNSLQQLCLNPSGRQPLYSSPLNIHSACVFIYGH

SEQ ID NO: 989954 - protein, 44 aa, Homo sapiens
DCPEAFHRRNAWSLGMPQLQTPATPLNDYEVMTVTLQLHMAVEL

SEQ ID NO: 989955 - protein, 35 aa, Homo sapiens
LDSGPVMLLRVSRRSLEPVLLCAVLSECGATASVC

SEQ ID NO: 989956 - protein, 103 aa, Homo sapiens
IQRRVLTPGTHCLTKKHNRKAFWALSKQNSADTWVEAGTNMYLQTTGVWGPYYPRSRSFCRKKGRGLVRLWARPGATNPITGTESPRGEEKKADPARPVGGVW

SEQ ID NO: 989957 - protein, 55 aa, Homo sapiens
NRCTGVIDATGVIDATGVIDASGVYRCHWCNRCQLVFIDATRLLAVDHSARGIDK

SEQ ID NO: 989958 - protein, 74 aa, Homo sapiens
MLEYLERAQTIFKVVTGTARGSSGDGTNTNGQPWIPYFFTIVLIQSEEEIDVDVESTEFSHGEVRHISTTSISD

SEQ ID NO: 989959 - protein, 114 aa, Homo sapiens
ICTHAQSSFAYSFKDVYGGPTLCQVVLSAGAITLSSLFFFETESCSVAQAELQWGHLSSLQPSPSGFKQFSCLILPSSWDYRLLPLCLVILVFLVEMGFHHVDRLFDLTSGDPP

SEQ ID NO: 989960 - protein, 154 aa, Homo sapiens
WRSRGPCIYSMAHLTHLLNYILCNILYSKSVNISVSLSSVSRSSKLIEPKEGVVVTPNLKAVSEKFQKPGLATGGDEGSLGPEPSHCGIRGYLQVDSVGTEWEDTSWCPLLAMWGKPPHVFIEGFLGVDDGCCGVKAEEKPSLRVFWKQPPFYK

SEQ ID NO: 989961 - protein, 66 aa, Homo sapiens
GPAQRRYHLAYKAYSPVPPLGRCAPHAGPQLSLVGLLLCCIRGAVFRFLLLLIAASSSIDLPSPLH

SEQ ID NO: 989962 - protein, 50 aa, Homo sapiens
ASTDVDEMIQEADIDEMQVIIKLSDMTESEGPRAAGDAVLLISLFSRAHS

SEQ ID NO: 989963 - protein, 39 aa, Homo sapiens
NLYLLEANDYRRQLQSLTCDLESLRGTNESLERQMREQE

SEQ ID NO: 989964 - protein, 56 aa, Homo sapiens
NLLIAQDEINELQFSLAEELVSSREADRRSRGLAGPAHCLSRANVIIMMQKPRVSG

SEQ ID NO: 989965 - protein, 41 aa, Homo sapiens
CCSYIADACHHRPCAVRLIIPLCHPVMRVLGTGGTRESDQE

SEQ ID NO: 989966 - protein, 44 aa, Homo sapiens
RSSSLPAARFSFSSSSSLVLILEPPLLHDAEVIQQQKRKEVRLG

SEQ ID NO: 989967 - protein, 33 aa, Homo sapiens
MPMWCQRLLHSIGNRRLVHGHRLDVDESTNELV

SEQ ID NO: 989968 - protein, 39 aa, Homo sapiens
PVRVCATNSEQASGRLRCLRHPPAYDKKKRMVVPAALQG

SEQ ID NO: 989969 - protein, 36 aa, Homo sapiens
CGALVCVCVCVGKGIVAVQWVMLSPLMDASRLLTCI

SEQ ID NO: 989970 - protein, 112 aa, Homo sapiens
SLLIADTTDLKTKTAPLQQWGKAASAAGIRGDHTQLSPAAGDRERPQAELHLKKRVLGFHAAEKSFKKAPKGMELSSTKDLSPPFSYFAVNLKRREIFSGEQDILSTSLGRS

SEQ ID NO: 989971 - protein, 86 aa, Homo sapiens
NERELGLGRVQMIEGPVLAEPGLTSTWLRPCGHPSCTSSPVAISALCIPLACVTLFSLSLCHSTGGLASPDARHFQVHPRQVQRDP

SEQ ID NO: 989972 - protein, 39 aa, Homo sapiens
DSSRRAPAWMRTLHTTASTGCHLIPQTLSPPQAHRVMNI

SEQ ID NO: 989973 - protein, 34 aa, Homo sapiens
GIYPPFYFYAFVSLVLLCVLMCLFISVLLCESAA

SEQ ID NO: 989974 - protein, 64 aa, Homo sapiens
REAKEKKEGEGREGEGEEEELVQQIEYHNEIMKQLGNHVRKEEEEGEEEGRGRRRKKREDKEKK

SEQ ID NO: 989975 - protein, 39 aa, Homo sapiens
VRTSAHFCVEKLQNFLPVVKVNPLGGAVALGHPLGCTGG

SEQ ID NO: 989976 - protein, 58 aa, Homo sapiens
PGVYRMPAEGTATPFSGIYLNNKEAGMYHCVCCDSPLFSSEKKYGSGYGVASINTGYR

SEQ ID NO: 989977 - protein, 35 aa, Homo sapiens
YQTPGLITWGKGRPYRLLVECLMEEDDTLPEVRLG

SEQ ID NO: 989978 - protein, 43 aa, Homo sapiens
MRAMFEELNADLFRGTWSRWRRRCVMPMLDEGQIQEIVLVGGS

SEQ ID NO: 989979 - protein, 45 aa, Homo sapiens
VTIQDLYRLALTGYPPLSSDITKWLSERHALSWYLVRAMETMNDG

SEQ ID NO: 989980 - protein, 135 aa, Homo sapiens
DVPVASPAVPGPYLKAEPIVSEEELGHTMQLVDDVQASGGVGERLQKGLERRARKTENWLSECWLNERLPPVPASLWSSTRCPCRDCTQAGLLWTCRFGSDLLPNSLRVCWLSKVIDLTTIPCPVMTLGEKATVH

SEQ ID NO: 989981 - protein, 79 aa, Homo sapiens
IPYRLARQPLLLVSFVSKLLSSYKPTQVPVVFVTPVSQVYTFPGRSEEVDMKQECDAQARYQSMIRRMLVFPTCRASRV

SEQ ID NO: 989982 - protein, 34 aa, Homo sapiens
YRVRSRRRHMLNPSYKTQISGVRQHCIQHCELGR

SEQ ID NO: 989983 - protein, 52 aa, Homo sapiens
LCVSTDSPSELAICSSHKIPTPVPKSIPISETPNIPPVSVQASRGLVAKRGL

SEQ ID NO: 989984 - protein, 50 aa, Homo sapiens
MARLLPAGCSAGGECRSHWMLLACAAPAELSTVVGVQVRRLPCRLVGLVW

SEQ ID NO: 989985 - protein, 42 aa, Homo sapiens
TCIHSAVHLLTMSCRHSDTVLTPNIVSWSWTSLEDRRVPEST

SEQ ID NO: 989986 - protein, 49 aa, Homo sapiens
MFSEVSAKYIKMASINTGVYRCHQDTKRAERQTQKEGDSGAGWTCGIDK

SEQ ID NO: 989987 - protein, 93 aa, Homo sapiens
  misc_feature (13)..(13): Xaa can be any naturally occurring amino acid
LSYPTSRQETRRXTVLRNRPAGGGGDSLAALWHPQEQQPSISGERGHTTVRVVAQLGAGDSLAALWHPQEQQPSISGERGHTSCGARSGGVPE

SEQ ID NO: 989988 - protein, 66 aa, Homo sapiens
MPTICGYPPGDSPCQARGPVPHDQLCSQHEAVLCQFFSRSVLSPRTVWASTGTCRGYVRGGYLRLE

SEQ ID NO: 989989 - protein, 86 aa, Homo sapiens
PRLADRWMQLELVGLAREDKENESTCVADPCRCHITQMSVFMPNKIVFQGLTSDPTPCLPLALGPMSFSLYPPFPRLLPGFYLAKV

SEQ ID NO: 989990 - protein, 38 aa, Homo sapiens
TGSSRLADRAEGSEAGRMHWAVGTEDKSLYHLTVGLVG

SEQ ID NO: 989991 - protein, 30 aa, Homo sapiens
MRQEDHGAVGPEEKLGSEVGADAVGLVGGV

SEQ ID NO: 989992 - protein, 60 aa, Homo sapiens
NRKCMPTSWSRECVMVNRSMEIRALLLPGLLQSMQTCSWGHFSLSSGVRVWGGIDKHRVA

SEQ ID NO: 989993 - protein, 62 aa, Homo sapiens
MPDRDRYGVPPEFPTGFCPCPWHSSPSFWVLTRALVLHLPGAAGLRWAWWCALVRTVWASSG

SEQ ID NO: 989994 - protein, 37 aa, Homo sapiens
GKSRRCVPCALLTSQNAATHAAHLPGVSPDSLVAFQH

SEQ ID NO: 989995 - protein, 34 aa, Homo sapiens
MIARQQDMLYSEQAGTFGQQLESTDWVGLYVHKV

SEQ ID NO: 989996 - protein, 83 aa, Homo sapiens
SPVGYYVTVGYSSTVGSSSRVGSSSPVGSSSTVGSSSTVGSSSTVGSSSTVGSSSHGWLIIHGRFQFHSQRHIVSHTWHSGSP

SEQ ID NO: 989997 - protein, 81 aa, Homo sapiens
PDPSRLARQPWLVVISVAALPETGGANSLWAIDGASARSLAPGSTICMFDVLWSYDMVDRELRPVSVVRTHLSGYSGGYRA

SEQ ID NO: 989998 - protein, 41 aa, Homo sapiens
ELGTDALSVGQAEGQVVSVSGAPVVKNLSWKSSSMMLDCAA

SEQ ID NO: 989999 - protein, 125 aa, Homo sapiens
MSSVPTLSLWGTLAQILPFPWSLQSADQEIHKVSMPPGPWVSSYQTGQPVWADTGLAAGVFFPYPSVWTGSAMEPGTFSKPGCARARLWGLRVGSAWAGGCVMVRVVLFDLMSLQSSLGPPTERA

SEQ ID NO: 990000 - protein, 97 aa, Homo sapiens
MAFVALSLHQAPRGKILTVLGLLVASELELEAWHLSASKGKCFIAVYINGMDCGALKKFYFVTCMYHGMHISFFFSFYKKRCLRRSDECYILRWNGL

SEQ ID NO: 990001 - protein, 76 aa, Homo sapiens
SGRIFRLIRRNHSSSYFSYVSQSLLLPLLKESRAQTQELASWIPHGGGYAVRISNTYADVSVTLKFSIRYPTMASE

SEQ ID NO: 990002 - protein, 40 aa, Homo sapiens
AIISVDLFSMDKTQYLRIEVDQCNDTCHYGNVTDDPGGMV

SEQ ID NO: 990003 - protein, 69 aa, Homo sapiens
PQVSELPSDFRSASLHMEKQAAACIPALHPAYADSVPTCVIAKVLEKPDPASLSSRLPVGLAALQQLGR

SEQ ID NO: 990004 - protein, 35 aa, Homo sapiens
LPSVMCQHGMDPELIMQVVNADVLHHMWAITLNNL

SEQ ID NO: 990005 - protein, 93 aa, Homo sapiens
QVTLRSYLQRCLSEAIREFASALPHCTRCFMGFAFMRAHSVFAYIFSVWWSLTSEEKFGLPLQHMYWNYGFMGRAFFGQGDGIRIKFPKFVHT

SEQ ID NO: 990006 - protein, 76 aa, Homo sapiens
EALNGQMELKTMAREPCEACKIFNSRFDQVEERVSVIEDQINEIKEKFREKRVRRNEQSLQEIWDYMGHSTRGTEL

SEQ ID NO: 990007 - protein, 85 aa, Homo sapiens
  misc_feature (51)..(51): Xaa can be any naturally occurring amino acid
GADTGNDGNHSRGGGGDDAKGTGGRAALEAGVEKEPQMASLAGASKPDPQXPPSLLISQTLSQAAQVPLPCSSPPRCLFATHTST

SEQ ID NO: 990008 - protein, 66 aa, Homo sapiens
SSRRVLSSNGSTDYDRGQLKIEEEGKRDSRIWEACKQSTPCRKGCRLSLVWEPGKKGSGDRITLLL

SEQ ID NO: 990009 - protein, 36 aa, Homo sapiens
RVDKTIQIFQVIIQSVFSVQATLKRTLDDKSDNDSY

SEQ ID NO: 990010 - protein, 101 aa, Homo sapiens
MDRKNKSIFPEPVSLGPSVSLTIQTLYYDTDPFLFYVMTEYDCNGFHIVGYFSKEKESTEAYNVACILALPPLQRRGYGKLLIEFSYELSQVEGTTGTPEK

SEQ ID NO: 990011 - protein, 145 aa, Homo sapiens
MLKQTLSRSWHDVQVSSAYVRTSEKLGEWNEKVTQVIPLQEDSGNSIQQAGQNDFGLPCHTVGSAISRKLGDMRAHPFSHSFNSYSIRHSISMPAMRNSADDFKSFEDRVGTIKSKVVGDRENGSDDLPSSVGSGDKPLSDCGTY

SEQ ID NO: 990012 - protein, 34 aa, Homo sapiens
MNPVLHGVNEKSIQKRQRMGAVIIWSTAPEYSEQ

SEQ ID NO: 990013 - protein, 158 aa, Homo sapiens
EDRICTELCWELETQNLYGDVWDGREIIAKKRGQVVYLWQVGLQVSTVFSFVMVMNAYQGFKLTHPGWMAVELAAIRPGVLVSCHSNYCFYELPGSTHSSNDDLALIYQSRICDVATISRQVCRMSHRNTVAQGVRAGGEMSARVTPDSKGERGDQLG

SEQ ID NO: 990014 - protein, 92 aa, Homo sapiens
LHLCIEGMRLTKQEGPLSDTHKLLMTWIEEQTQVHTVLCTSQHHDDPKAKSVFEVLKEKAGPGCDVGLTASSGWCKQFKNRYSLHNGKVVSL

SEQ ID NO: 990015 - protein, 75 aa, Homo sapiens
VHGWLAQWKPRSSSNLYGWVMVVLGKTTFVKRHWTGELGEEVCSHLWVLRFIPVVFHTNRRTYEVQGMGLAKRGL

SEQ ID NO: 990016 - protein, 35 aa, Homo sapiens
RSSPIILMSRTTTRHSFIQDLTSFLGLPLLYSLLL

SEQ ID NO: 990017 - protein, 36 aa, Homo sapiens
SISLRHRCSCPLFYHPVYGLVNSIPALRGLVAKRGL

SEQ ID NO: 990018 - protein, 80 aa, Homo sapiens
DLEDFPTSRQAFIPSSSLQPSCVITPPPSSLPSIHLPTHPSSHPASQPAFHSIHPALTINPTIAEGPSPTSEGRLSGYSG

SEQ ID NO: 990019 - protein, 81 aa, Homo sapiens
GAYGSYRLADWCLALRTLALLLSTMSSLRSSTCDGAARCRLRAEGLLALGSLRLLSLAGLPLFTTTVLSGYVGDPCLGLVE

SEQ ID NO: 990020 - protein, 45 aa, Homo sapiens
AHRKQTAMLVYQLSITYKVNVMQCKCYLKAITSVFASSPQAGDKN

SEQ ID NO: 990021 - protein, 90 aa, Homo sapiens
QQTPVQLRIGSYNGTAGGLPPAIINGRPFLPQKDRRQLMFGSDKLVPMSYTGSHAWYKELATGTKPTMGQYGEVQCTRQGHHTVYHLATA

SEQ ID NO: 990022 - protein, 125 aa, Homo sapiens
DCVLTVLYSCWVHMSVMVALVPRRCAVIIHDSYVPSVRLTIIREACDCPEYGRWFRLSHLVAASSLMTSVAFYLSSTEESLTHMSLRGMCDLTVDLSYHTERRAWRGEVVVSRDRSIALHPVRQE

SEQ ID NO: 990023 - protein, 111 aa, Homo sapiens
MVLALLCRLLSSYPAPCCEYLSSWHSSRVRGTGPTHLKFLGYAISVSLGASSPALTCSLGWPWRAMAVVTYSMSYAHDPVCMCVLCVCVCVCVSLAHSVSGVKSAPSLQVH

SEQ ID NO: 990024 - protein, 114 aa, Homo sapiens
MIGPEGTDNCHKFVDNSWLRTIFPLFMKSPRKLTKVGTTEKEHEEHVCSILASLLRNLIGQQRTRLLNKFTETDSEKVARLMELHIKYLDTMPVADKNIAGEKPDMVRRGEIID

SEQ ID NO: 990025 - protein, 48 aa, Homo sapiens
HSSFERWVKIHSCILQDHFAESSRLSIQGKLQFKPFQKKIPSSHDSHQ

SEQ ID NO: 990026 - protein, 42 aa, Homo sapiens
QDKRQQSSFTQSVRLSLFVSVYYYNYHVSSTWQVLSKTVLNG

SEQ ID NO: 990027 - protein, 48 aa, Homo sapiens
IPFQRIASDRRSDSPNSYFLDHPRGAYRKRFWDDRMKPGQQEVRGNGM

SEQ ID NO: 990028 - protein, 31 aa, Homo sapiens
MSFSDFRRHYSRREICNLTPDTLTSDTLEWN

SEQ ID NO: 990029 - protein, 41 aa, Homo sapiens
  misc_feature (4)..(4): Xaa can be any naturally occurring amino acid
IPFXAYNAVRSYIQFHSSVDRSNPGRFLSTSNSSRYAGMEW

SEQ ID NO: 990030 - protein, 227 aa, Homo sapiens
QFHCQTYNNYLILDKPEKNKQGGKDSLFNKWCWENGLAICRKLKRDPFLTPYTKINSRWIKDLNVRPKTIKTLEENLGITIQDIGVGKDFMSKTPKAMATKDKIDKWDLIKLKSFCTAKETTIRVNRQPTKGEKIFATYSSDKGLISRIYNELKQIYKKKTNNPIKKGAKDMNRHFSKEDFMQPKNTEKMLTSLAIRECNQNTRDIISHSRRRHQSGTGDVNDGYEP

SEQ ID NO: 990031 - protein, 146 aa, Homo sapiens
MPAYRTLNVSTSGSYVNLHYSWFVLKVLDLSYDNSIPYFHHHYSFKNLPSFQFQGVGGKACDIGVLKISQWSVRYEVDPDFNNSFFYFLIFNGVEIIWACTGSVVIIIFEWSVLKRENRHKVFCMGSILFPGNDVFNKFSFKLSTT

SEQ ID NO: 990032 - protein, 39 aa, Homo sapiens
QVPGHASSVATGWIVRADYVDKSQGSTTIAHHHSSGSPN

SEQ ID NO: 990033 - protein, 71 aa, Homo sapiens
MELNTFKCRWCRIAVTQFRRKISRELCATRATNIQNDRSMNWICVFRMRWVPKIRPPFEVAFLTTGKSMTR

SEQ ID NO: 990034 - protein, 34 aa, Homo sapiens
SRGYQTVVIHSDVPEEGPMTCKASATHPRPGGIG

SEQ ID NO: 990035 - protein, 117 aa, Homo sapiens
GTAEGLRAGTITSPIFISVKYMCGTCRFVAWYACAIVVSCTYQPVIYGFKPCMTKTPKAIATKARIDEWDLMKLKSFCTAKDTSIRVNPQPTEWEKIFTIYPSDKGLISRIAPKSRI

SEQ ID NO: 990036 - protein, 34 aa, Homo sapiens
GVIAYDRSIKELEAIEGLGDIIRSEELISDFGVE

SEQ ID NO: 990037 - protein, 71 aa, Homo sapiens
ELQSMRTEAPMEGRCAVHCSWRGGGAGIDLQQTGLSVPAHPVSARCRELNPYASYCAVKLVTAVLMRCEAQ

SEQ ID NO: 990038 - protein, 38 aa, Homo sapiens
GSELEPEEENPMLGFRGASRYIADDFAECFRMECEALK

SEQ ID NO: 990039 - protein, 122 aa, Homo sapiens
MVKAAEECKPTPEDQKAFEDYKCAKSVDSPGDKPLVTCDRERTMKYLESPVAITGTQVVSADSGIPQGQLSYVVNLKFNSIGTTSFSDATTYLCSKIEPTESVCGRPRLVSYLFPAAQRAGD

SEQ ID NO: 990040 - protein, 43 aa, Homo sapiens
RRYDYTRLKPKLTQEFLNTVNPTGAYTVDGKDKTWNRVTPGSP

SEQ ID NO: 990041 - protein, 37 aa, Homo sapiens
ILQVNTTDSQISLEHYKIWKMQPQVMQHAPELQLAPE

SEQ ID NO: 990042 - protein, 53 aa, Homo sapiens
SSYLARLAVIRTDRIAYCSAQTARPVVALHCLCVFRCQVVDADDYHNDSTIRT

SEQ ID NO: 990043 - protein, 122 aa, Homo sapiens
GPTSRAFSAYKWLYCQSLPRSSITVMRHQAGLNIVFLVEMLFHHVGQAGLKLLTSSDLPASASQRAGITGVSQCTRRNLGIFIDSTSVSDSSRTPPASTSRGCRQTRARARSLRSSPPVGWT

SEQ ID NO: 990044 - protein, 47 aa, Homo sapiens
EVDLEDPKLSGELRWALKSEFLVRENLQVLHVISRSNQRGRFLRILP

SEQ ID NO: 990045 - protein, 33 aa, Homo sapiens
GDLEDPNSVCELLAPVACVCGSLLVPYSGGCCF

SEQ ID NO: 990046 - protein, 42 aa, Homo sapiens
ICISRGILTQILRFPVCLQGFRITLHACGGDLQRGTHRSLAL

SEQ ID NO: 990047 - protein, 39 aa, Homo sapiens
IHSSEQLASICPLLCRRFYTPSIFYHMKTQLASLNQNLD

SEQ ID NO: 990048 - protein, 50 aa, Homo sapiens
PFSLEHRNSSASTWVVLTPAHEDGDRAGTSGICCWSWLRKHQVHFLLGTL

SEQ ID NO: 990049 - protein, 73 aa, Homo sapiens
WLRRNVKKAEGERCVTSGERILVIVLVVDMCSPLSQLQGRSRFVARDGFDEMKLVLFEDPVHALVDDGHVGQI

SEQ ID NO: 990050 - protein, 41 aa, Homo sapiens
KLRSELQEEGEDIDMSMVNVEGSKNILLRTQRVGVVNPFSN

SEQ ID NO: 990051 - protein, 90 aa, Homo sapiens
RLIRCSYGSTNIQCAVVAAVGPVEDPSAERMGTGGVEQNGACRVTVQSLSLLPYGIVRPRWLLASRPLGLLGPPLHPGTVEGSEAWSDCS

SEQ ID NO: 990052 - protein, 57 aa, Homo sapiens
VVACRARRLGHEVAGRGHERVAATSWSLVEEDIVCLGLHLILYTGNTLLSSKYFHLP

SEQ ID NO: 990053 - protein, 38 aa, Homo sapiens
PTQVRAALCLQSYLRGFWPEIGIARYSVSTKQSSFSSS

SEQ ID NO: 990054 - protein, 43 aa, Homo sapiens
RLSYLLFDYLMIIRNKLCIHAAREAPTAACNTSAMGNNNDDQG

SEQ ID NO: 990055 - protein, 53 aa, Homo sapiens
RIQLRCSCNSGASCNSRAELLTQCRAANSGPELLTQVRAATQCAALQLMVRAV

SEQ ID NO: 990056 - protein, 49 aa, Homo sapiens
SLQCAQLLTQCGELLNSVCELHPDAGVLLLLVGGVSEGLCGPPPEVGGR

SEQ ID NO: 990057 - protein, 178 aa, Homo sapiens
MHGGTAMYAAWRIGSRPSAQMHQDLPSWLAQRPVDEVVSRLEHLDAHVKGWRVVGLNTQVADAQPLIGLGRASPPAVGGIEDVRDAQAAKLPAVVSHVLVSEIEAWPDLVGMVTGCLACVEEPLQLEDIEEKDVERLASPPGSLEFEQETLSYSEEKRAIKVIEAQSQLPGHILEVEK

SEQ ID NO: 990058 - protein, 185 aa, Homo sapiens
YVFGVGLSVLHDILLQLPSHHQFMSALAPDSELGSSFAICYSALLTKTNCIARIFDGVKNGAQRPKFISPSSQVFICLGLILVQIVMVSVWLILEAPGTRRYTLAEKRETVILKCNVKDSSMLISLTYDVILVILCTVYAFKTRKCPENFNEAKFIGFTMYTTCIIWLAFLPIFYVTSSDYRVQT

SEQ ID NO: 990059 - protein, 68 aa, Homo sapiens
AGEYPFRGIRMTGRRGNSPFTRRSRGPCLATLDLPETLRGGDGGKCRARERVCICVARREEGFNVCSF

SEQ ID NO: 990060 - protein, 97 aa, Homo sapiens
RCALQDLVIVTRNFWPTTEKFLHKREVWFAHEDKVDSLYGDSCGWTGPRSCTGKTLGGQVFCYLGLQSLVTMATVVGSKPPGGGAWRVVWNWSGPVW

SEQ ID NO: 990061 - protein, 70 aa, Homo sapiens
LVFRAMNTDEAMVMLTVVAVARTGMLLGIEVDNQVVLHCVVDLPSWALDPVTRPYFLASTSKRGEVHALV

SEQ ID NO: 990062 - protein, 50 aa, Homo sapiens
SGQAIYRVIFGRTFWMSLVITAICLVLAYPLAYLLANLPTRQGNLLMILV

SEQ ID NO: 990063 - protein, 30 aa, Homo sapiens
MSLLWLWSLLWHGFNPWPENFHVPWVTTAT

SEQ ID NO: 990064 - protein, 40 aa, Homo sapiens
MSISQPLCKTVWRFLIEPKVDIPFDSCHVHVLGIYPDGKC

SEQ ID NO: 990065 - protein, 91 aa, Homo sapiens
GEPCREIVEDLPMRVSHRVSRLEVKENRCIEFLVVLCIFRSISKEFYAYNEQILPDNLRNICFCGNISRDMFRGRSSEYTTPLMQFRYFRD

SEQ ID NO: 990066 - protein, 41 aa, Homo sapiens
NKLTAHHAGMAMHAATWQHRTGSRQLNHTSVAVASIPHIHH

SEQ ID NO: 990067 - protein, 138 aa, Homo sapiens
CRYLYAGPVRCGINLAICVAEKVTVITKHNDDEQYAWESSAGGSFIVRTQQVNLMGRGPNSYPTPERRQTAVTLAGHDESKEIVKKPFSGLLDHPITLLVEQATCITSKKRMHRRLTHTAAPSTASKTQHSTQKDRTA

SEQ ID NO: 990068 - protein, 157 aa, Homo sapiens
RYKEVTVEGTQEAAPGRPTRLRKVACIGAWHPARVAFSVAALGRKCYHQRTEINKKIYKIGQGYLIKDGTLIKNNASTDYDLSDKSINPLSGLVHYGEVTNDFVICKGCVVGHKKRVLTLRKSLLGADDSDRALEQIDLKFIDTTSTLGHWRFQTME

SEQ ID NO: 990069 - protein, 45 aa, Homo sapiens
MELCLWRLLWGSRLICGDCRYVGYGPEEAIVSHELGLQRLTGESS

SEQ ID NO: 990070 - protein, 56 aa, Homo sapiens
ARYLQSLAGAWLRGQSVSSWRCRAGGGTACPILVHLDYDQLSQVLKHFPERQRNEV

SEQ ID NO: 990071 - protein, 49 aa, Homo sapiens
QFHSSVSKGLQEKKRERSGFSGSGYREPKRRATGVPATPGWDLGTREWN

SEQ ID NO: 990072 - protein, 35 aa, Homo sapiens
MDADSACGPAHAEITGTQPLLLHLAYPIWASSVAP

SEQ ID NO: 990073 - protein, 45 aa, Homo sapiens
MIHIMSTIGENILDVITNSPNCGTMKCIICRHKDLIAFQFNESLN

SEQ ID NO: 990074 - protein, 43 aa, Homo sapiens
MPITLNGFHMVLEPSWALKAKTGNGTFCAVTYAQRHTHTREWN

SEQ ID NO: 990075 - protein, 77 aa, Homo sapiens
GRTLCVCGGARAGWTRGVAVGVLRPVVQLLLVRYLPSGFLGEDHLGHGHMGDLLHVDRFHVSLADLHQDVPGLPGED

SEQ ID NO: 990076 - protein, 59 aa, Homo sapiens
YPFPASIGVASHGISMAHSSLKGHGHAAGGRAFIYPTQQVNSQIPNTHHMVVTIQHHIS

SEQ ID NO: 990077 - protein, 43 aa, Homo sapiens
YAGLPLDSFRAKEGEQKGEDGGELDMALVQTPSKRTSKWTAYT

SEQ ID NO: 990078 - protein, 96 aa, Homo sapiens
QRDGEMCPRAVTGHGADAGLSLEHREGELETRCQYSSWYRTQTSTPSCSEDTIPSQGSDYDCYSVTGDADSEGPPELDKSSSIPRNSNIAQYNLPV

SEQ ID NO: 990079 - protein, 30 aa, Homo sapiens
MTASNIVEMNSKPPPGANAASEKERSSSIA

SEQ ID NO: 990080 - protein, 44 aa, Homo sapiens
MMQEQTVGYTGQGAFQELREQPVQTLGDAGPVKKEQRRPGVEAT

SEQ ID NO: 990081 - protein, 33 aa, Homo sapiens
NKPALIHVTNNNFCDKNQEQDDDKRGKSQRLSR

SEQ ID NO: 990082 - protein, 145 aa, Homo sapiens
MTREGGGSGTFLQEAVVGSHSRAAQFAQLCSSGSAWGPLHHAMADSPEGFFLRRSQHGEDDEEPPPGSNDQQNRHSLTGTPLVPAGCQRHSVLKSPDGVEKGKPPLEPERISPFGSLLFPAGYQSSLYYRGNASILFHVEPFLGR

SEQ ID NO: 990083 - protein, 55 aa, Homo sapiens
MADSPEGFFLRRSKMERTMREPPPRSMISRPDTGSRGTPLSQLMPAHPSESPMSG

SEQ ID NO: 990084 - protein, 77 aa, Homo sapiens
  misc_feature (77)..(77): Xaa can be any naturally occurring amino acid
WHLEIRLLRDASATGTDMTTRGLCWRHAMLPDRRTQPIQVKLAKPPAHSVKGTRQTQKCLCPLYNQQAPRKKFLLLX

SEQ ID NO: 990085 - protein, 63 aa, Homo sapiens
MPCGKNFISSCSVPDFLKFLAPVDEHNTSEFMNTNSDFESTANHLGDSGATPVQTRRLSGSRD

SEQ ID NO: 990086 - protein, 72 aa, Homo sapiens
FHSVFVFYYFSMLQCVGYSVRIISSYHPNLTAIVSLCDASSFYLRALLGWITHTGGSKPGTPLAPGETQAPP

SEQ ID NO: 990087 - protein, 47 aa, Homo sapiens
DAESKLDFTAAISGHCNAACLILLPQPAICLQLQVRTDSPDCVSYFI

SEQ ID NO: 990088 - protein, 34 aa, Homo sapiens
PVVAERETKSVSVEGTYDTDLTDRKLMAALLTRQ

SEQ ID NO: 990089 - protein, 62 aa, Homo sapiens
RLGAWTVLVRLVVQEPCHRSYATTNVDRQIRNGPWTASPITAENFLGIALVINRSQDGPAFV

SEQ ID NO: 990090 - protein, 49 aa, Homo sapiens
FSIVIIECATYATTLKLIKPQFLMAFIVIPTPTLALADRHLGLVGGVPS

SEQ ID NO: 990091 - protein, 37 aa, Homo sapiens
TFPQIHLAKYQAFKCGSKRKRTTQERGVGRSSPGVDL

SEQ ID NO: 990092 - protein, 59 aa, Homo sapiens
MLFSKDRSGAAGKKAFRRLIGLSSEEVIALILFLDTTQADVLGEAESRLPLDEINWRRR

SEQ ID NO: 990093 - protein, 47 aa, Homo sapiens
VIERVAYKPLRKSTRVAALITAIGVSYLLENAMSYFFGAESRPFPSD

SEQ ID NO: 990094 - protein, 50 aa, Homo sapiens
NNPPSNPPRNPHIRNHRIHSTRAREHTRIAHPQPFTPPNSSLLINSAIPL

SEQ ID NO: 990095 - protein, 57 aa, Homo sapiens
MLVKREGKKARPTARRGRSKLRKISQQISVHSSKKMSLHHQGNDLERISQGEQVRAG

SEQ ID NO: 990096 - protein, 80 aa, Homo sapiens
AVRESNSDLQSMDTVLHEHVSTRISALFMTFSRSMYRYRTRGFVKLYHIYTCRNLFHCSLVRNLGWFNKMGKTATPKNTN

SEQ ID NO: 990097 - protein, 40 aa, Homo sapiens
VSSPFVLPGVMHMPTPRHGDNVIDRLSTICNFIQQHSDKP

SEQ ID NO: 990098 - protein, 133 aa, Homo sapiens
MALTVRHNVELIGKYAMETESTGFHGGNNSNNTASKAMSDDAVTAVCCTLHEGVTKNMENAKALRDAGGFGEVGGISKSKGDKHSPKVVKGCISGPQQHVALPRSEESLQTGWMVTIPLGSLVFNHREGPAKA

SEQ ID NO: 990099 - protein, 47 aa, Homo sapiens
  misc_feature (39)..(39): Xaa can be any naturally occurring amino acid
MLLIDIELAYMNTIHEDFIGFANAQRGATRRTRRRLQGXQDEILVST

SEQ ID NO: 990100 - protein, 45 aa, Homo sapiens
  misc_feature (7)..(7): Xaa can be any naturally occurring amino acid
MRHVHCXKVNAEGSVDSVFSQVCPTWSPKVGTLEPLPRSELGPPR

SEQ ID NO: 990101 - protein, 60 aa, Homo sapiens
VDICAAVLHCRSGNRTKFVINMVSSRERRTTRLPKEERGNRVEATGSKKRQTAVSRGNRQ

SEQ ID NO: 990102 - protein, 37 aa, Homo sapiens
  misc_feature (35)..(35): Xaa can be any naturally occurring amino acid
EATSGIVTIHPFVETPQISVRAHAVEDLRCSLDHXSE

SEQ ID NO: 990103 - protein, 64 aa, Homo sapiens
VPEPELRCLWADPLLYVPELGLASAHPFECRIDGTVGNRGKPIPAVTHMPLSTQPKCSERDEVM

SEQ ID NO: 990104 - protein, 165 aa, Homo sapiens
TGYEGIRRFSTVIRDVGLKVNIRSSRSRAMESDLGKKLGPSHLGLGGQRLLVVSGLHVDDTIQVLLGWGAQDAQNVVELIQVVLCQGQMGRLESISARMQPTDQMSMDLVQPLEFSMISGARYQRVATYSVRKPGVVMLRIGNPGQAEITNLKVAGGVDEQVGGV

SEQ ID NO: 990105 - protein, 78 aa, Homo sapiens
AVYYQDHLAESTASDTEEASIQLSEKIPARMISSTQKIVGGTSAGMKKLFLYTIVIPIMPGSCATTGSTKRQQSKFSQ

SEQ ID NO: 990106 - protein, 120 aa, Homo sapiens
MLSPTLIPGLRVVYGHTWRFFVVVFETEFHSCCPGWSAMAPSRLTATSTSWFKRFSGLSFPSSWDYRRLPTQLAHIVFLVEMGYLHVGQAGLKIPNSSDMTDLASQSAGITGVRQRNQKR

SEQ ID NO: 990107 - protein, 59 aa, Homo sapiens
MWKSRGSCCLCRCLIGLTFRLRETGHILSGFIRVAGVPKCVGTILRVIIAIGDVIPQPL

SEQ ID NO: 990108 - protein, 33 aa, Homo sapiens
RRTYDRALRALAITQHSRIRPLYLRFRALTPTA

SEQ ID NO: 990109 - protein, 64 aa, Homo sapiens
AVVKGKGCSLIGVPKLGWALSGTARLTPEPAFWLDSPGLSLALQEKRQEFIMPTKNETIRDWQV

SEQ ID NO: 990110 - protein, 37 aa, Homo sapiens
RACYLRGVDSRRTELRAGAAARSNGGVSMVWADASSS

SEQ ID NO: 990111 - protein, 44 aa, Homo sapiens
RIVNLSALMLVSRLEGGGGGGGNIGVGRNGLCTLPWLLPLQCAS

SEQ ID NO: 990112 - protein, 63 aa, Homo sapiens
TTLGVRMSGCPADSPRAPTLDNRVDRLKTRKRVDLPQPDGPISAVTRLEASSDIDVVQRLDTL

SEQ ID NO: 990113 - protein, 122 aa, Homo sapiens
TLCHKAASVFSHYAEKESVKEPWARIPGLWEWLPGELNTPIFSEVLHRWDMAWRNPGLQAFLALVVRFLALVAKLLGEAGLEERLAAAVQAFGSSCVLEMWLGFVSQWRQGIATFLFHYCTP

SEQ ID NO: 990114 - protein, 118 aa, Homo sapiens
TEGCFTIESIHSTDMNLLWCPRTLPHCTVWKPQLSVVYLFLKLFLFFEMESCSVNQAGVQWRDLHLLGSSNSCASAFQVAGVTGAHRNAWLIFVFLVETGFCPVGQASLELLSSSDPP

SEQ ID NO: 990115 - protein, 34 aa, Homo sapiens
SVHEIEDSVLAKDTFTTPGPPYALAVVDVTKRHV

SEQ ID NO: 990116 - protein, 132 aa, Homo sapiens
SCVRYHESWVCRSTHGDEPLHSGTQHLTLARDGWEAGIRSPLCCPRAILPLGGVGHKRAVLCWRESARLSRGRAGGHLAESLLALCADDEARGMSGQKSLLRPFTVHREMSRDWLRGVTTEMSPYVHEPSGD

SEQ ID NO: 990117 - protein, 66 aa, Homo sapiens
SLENGGGEQGPDAMVRRVEGDDDRESEMSMAVHRMSLTSAASRVPPRTHLDGWKIGTSSVTHDGQD

SEQ ID NO: 990118 - protein, 57 aa, Homo sapiens
IPTTPRFATSPRFATSPRFATSPRLATSREGCFETPTSPLKKEPPGYEEAMSQPWTS

SEQ ID NO: 990119 - protein, 112 aa, Homo sapiens
TPDPDPKWYDVELVRDTCLQLDEPTVDYVATYLLVANIPIAANCVKVAYPGLVANREIAANRILVANRGLVANHKLVANRGLVANRGLVANRALVANRVLVANHRLVVNQAL

SEQ ID NO: 990120 - protein, 187 aa, Homo sapiens
ELGSTIAASVELRLHEGESDLNRLRSRIRQDLSHFEGNAQAIRMVYSLLKLNLTYAQVGCILKYTRPAYWASDIPASHSYLMKKPGYYLAEEAFVDRLRRELHMGEFDRFPLTYIMEAADDISYCVADLEDAVEKSIFTVEQLYQHLIQEWGEVAPGDLFDKTVASAFRKIDRGGARRSAEDQFFMY

SEQ ID NO: 990121 - protein, 41 aa, Homo sapiens
RYSSAPGFGYARKRGEKSMALRLAGELLDAAEGKGAAVKKR

SEQ ID NO: 990122 - protein, 31 aa, Homo sapiens
MQLVVWKLRDSTEKPVFPPPPPAEKRNAGNA

SEQ ID NO: 990123 - protein, 38 aa, Homo sapiens
PRDPRHPRNRERAINLSILSVVRMTSEVPMNSEVPMNS

SEQ ID NO: 990124 - protein, 59 aa, Homo sapiens
LGVSFAWLRLRDSVSKWLSPKALLIGFVAVMAGCGIVDHPSTVQCRTPSGVAPGFDWAK

SEQ ID NO: 990125 - protein, 116 aa, Homo sapiens
ISDGDECVVVMELTHDVDREKPAEEWSQGSMRSEETGGGKVDPQACEALGRLLVLRKGPGDAEQCAGMKAGTQAAGTQHADTLRESASETPRWRCCGVWQWVSSSRKEPMAAVINL

SEQ ID NO: 990126 - protein, 60 aa, Homo sapiens
  misc_feature (24)..(24): Xaa can be any naturally occurring amino acid
MSPGCTLSVSVELLSWLCDKLNPXVFSGHRSATPRVQDRLSEHQQLLAHLKSRKDRGDCG

SEQ ID NO: 990127 - protein, 69 aa, Homo sapiens
LLLSIVVMLREDNADLRRDWTQAVNRLVDDVRWARHSEKLERIERERQRLRDIWMHPESRNVEQVNAAV

SEQ ID NO: 990128 - protein, 45 aa, Homo sapiens
TLEDTLAIHRHLAIHRHLAIHRHPPECYSPPGSSTRRIPVPMSEV

SEQ ID NO: 990129 - protein, 167 aa, Homo sapiens
SLFIGTLGAWLGKPYYLQARFSYVRMKYVVSCWIAESVASWIIYVQHSTYTELCRGKGCKKIICDKYKTGVIDGPACNSLCVTETLYFGKCLSTKPNNQMYLGIWDNLPGVVKCQMEQALHLDFGTELEPRKEIVLFDKPTRGTTVPGGLAKETLLPPGSLLIGADE

SEQ ID NO: 990130 - protein, 98 aa, Homo sapiens
SEIQSLGGTRHISSAQKPHVASGSHGMLPQYILSTTHYESSAGTGPSAALDTTVACGHGNHLAPYLALLSSHSTHMIYTPYYVSEHPRFITFIVISGV

SEQ ID NO: 990131 - protein, 65 aa, Homo sapiens
QTCVLSREVGTIDVRIVCITGVLHLALVIGMDTVRVLISEQKSPVREPVDNLSPEARDARTCFLY

SEQ ID NO: 990132 - protein, 67 aa, Homo sapiens
PRDLADFFSAVGKVRDVRIISDRNSRRTKGICYVEFCEIQSVPLDIGLTGQRLLRVPIIVQATVPWG

SEQ ID NO: 990133 - protein, 111 aa, Homo sapiens
MGARPRLSGSGETYSLEGNGQEPFHYGTHYSSAMIVSSYLIRLPPFVQSYLLLQGDSFDHADRLFQSIPDAWKSASSRNKTDVRELIPEFFCVPEFLTNMNGYDFGRRQSN

SEQ ID NO: 990134 - protein, 66 aa, Homo sapiens
LQVVWSLLDGPLQTLFVWVSPAEAAEQHILHNSKYCCLILPLEASSQKGTRLYEVSAGPYCEVSPS

SEQ ID NO: 990135 - protein, 77 aa, Homo sapiens
KNSRHASSLLHALMDLAVQGNDWRPPGTRTGGKTQHRTLLFRVAGYICHHLKVPRLWERSMSWTSPLGSLEKLSMKT

SEQ ID NO: 990136 - protein, 54 aa, Homo sapiens
  misc_feature (47)..(47): Xaa can be any naturally occurring amino acid
MARLTVYQQFLAQRMGEGLAIIIASGWCSTMFRWLCEQVDSCQLPLXDARFIDA

SEQ ID NO: 990137 - protein, 46 aa, Homo sapiens
KGVTDMGRITSHMLPDITSSYSDGYQGLKSSSPMLLGEAKCSEGEI

SEQ ID NO: 990138 - protein, 40 aa, Homo sapiens
MPARSPRGRPLAVRQIIGPQQLQRLQLQRHALALRHQLNM

SEQ ID NO: 990139 - protein, 48 aa, Homo sapiens
  misc_feature (19)..(19): Xaa can be any naturally occurring amino acid
AARWFHNVRVGPAGLVCVXEEAWYFSLYYSLNVMLCSCVNFQCSSREK

SEQ ID NO: 990140 - protein, 69 aa, Homo sapiens
MMSGRSRDDYEEMLYELPLHGWTSWITMAGPAAGVLRAGRPWTHMPQEQERRDVLLRTKYQYRAITGGR

SEQ ID NO: 990141 - protein, 32 aa, Homo sapiens
MTADTSLTQSAYMVLNITDHMTICYIHRYCAV

SEQ ID NO: 990142 - protein, 138 aa, Homo sapiens
QKKKSTENTHKKNSLHVFWVNTSWASQSLIHPSLPPPPQVTLKWSSLSSETKNQMAMSRKIIGRGNIMYHITCTTPTTLQGQGIHHQTRHLVPLSPEGYFYILYTALQSATVNGLRVGRRAQNLIFPAAKYTVPDTRI

SEQ ID NO: 990143 - protein, 45 aa, Homo sapiens
DPSRSCHKDVVVDLVCYLAATCHNDDGGAHVHSSRIMYKQILQDR

SEQ ID NO: 990144 - protein, 44 aa, Homo sapiens
SRHVHNGAGMEAASRRLHGQDEVPEMTLSSLTALNCVGVLRKRP

SEQ ID NO: 990145 - protein, 76 aa, Homo sapiens
GTEFTKLEGQMGEDGNSIKVNLIKQDDRRVPHQTLSGQDTETKLSIRSGKQKIRAPSLADDHCHADESLELDMLRY

SEQ ID NO: 990146 - protein, 65 aa, Homo sapiens
MSHEMVAMSRSRQCQADRKPKPVLQKYAEAAGCCRLWSTCLSMREVISTFDNDLLGSLWTDLKMR

SEQ ID NO: 990147 - protein, 34 aa, Homo sapiens
SRGSLTPCPQGFGYVTFSMLEDVQRALKEITTFE

SEQ ID NO: 990148 - protein, 53 aa, Homo sapiens
MRAVWWTSGVPVPRAFPSDPFFLGGVLLLPFPVSLFSLRVSLPLSVPANLILY

SEQ ID NO: 990149 - protein, 162 aa, Homo sapiens
NSETSQKRLLRWTGASSSSIYDPCRASKTSSQKFFLRVLQVIIQLRDDTRRANKKAKTDRQARVPPVKAQTNRIQAAVRELEAEADAIIQLSESSQSEASVRREESPMDVDQTSPSAQDTQSIASDGTPQGEKEQEGRPTELPMLREQLSLDELWDMLGECL

SEQ ID NO: 990150 - protein, 56 aa, Homo sapiens
DAQSRRRWWWVELAVSGPVLSTRGQTPEAPKALGSRGKEQGGAQLVSEGKQVKWNW

SEQ ID NO: 990151 - protein, 54 aa, Homo sapiens
MSHARSGDWLQHEHKSLIRNKHRLYLTSISLNDSGTSRYSGFADPSLSSRHVQS

SEQ ID NO: 990152 - protein, 41 aa, Homo sapiens
WPWRCMASLNAVPQQTRFGVFRDVTLCHDLQPVAMFTKVLI

SEQ ID NO: 990153 - protein, 35 aa, Homo sapiens
MVAMVTLTPLGGAAFYIIFQTEDPEELGHFYDMVI

SEQ ID NO: 990154 - protein, 70 aa, Homo sapiens
SACSSGTVIFEVTEKLEGEDIAVEQLNTSLIVHNATSHLFHPQPPNPIQAENQLAPFTNTTTDLTLKCNT

SEQ ID NO: 990155 - protein, 74 aa, Homo sapiens
QEVLTFGSVVYCDVLMTKTVTSILERGRHSFQEMMQNWWRKQRPPSGNNGQGISLCWLVVTDNFVVSSFPNELC

SEQ ID NO: 990156 - protein, 63 aa, Homo sapiens
WDPASIWLGGVPRYPVFMPNGPVIEEFTKKNSLIIPTIIATITFINLYFKLRLFTPTPALGRS

SEQ ID NO: 990157 - protein, 52 aa, Homo sapiens
STDVLLDCARRILAEGGAPCLLPRVSSPIVLGIIPVVRASDLARLRRHLMET

SEQ ID NO: 990158 - protein, 35 aa, Homo sapiens
VDRSEGCLEIIILLRVEAAPETLGGVLILSSAEGG

SEQ ID NO: 990159 - protein, 75 aa, Homo sapiens
WHTIPQRARLHPRPRPQASSSWDRESSRPSTPSIPCVWPPVHHSLSHSPNDPVPAGPFTCPVSLRRSCAWVPERR

SEQ ID NO: 990160 - protein, 45 aa, Homo sapiens
YRVQQKFAVDITRVVGLMNKFVEDTKKGVHQKEGWPSSAYVGDDR

SEQ ID NO: 990161 - protein, 71 aa, Homo sapiens
KGNPTIFPPNVSRKPMSPEGLQVVMGDDLPTKKGILGMLADTGNSSLIGPLQKYTALREKDDPYEEKGAIY

SEQ ID NO: 990162 - protein, 46 aa, Homo sapiens
HEQMDTFCLHPLKRQLGTIPPLTTAQVHRVYPHRPTNDAEQYRGAG

SEQ ID NO: 990163 - protein, 54 aa, Homo sapiens
MLEIPVAEVGLSTSVPTHSREHWRWSRLDWKNLFVVPLPWWWGGQTTSVLARGT

SEQ ID NO: 990164 - protein, 70 aa, Homo sapiens
MKSDAFRSLNLNSAPRLVGQGALGKGLTSRYHRCSLIVGRGGGSRASFQGLPRVKGGAAGKRLTNIGVPS

SEQ ID NO: 990165 - protein, 39 aa, Homo sapiens
KPSACARLPGRSVEYEYRVSGYSSGAPTAVRHLRALAAR

SEQ ID NO: 990166 - protein, 37 aa, Homo sapiens
LGPVVGLYLHYDAVVTCFLRSTFSWLKFSGYLWCARA

SEQ ID NO: 990167 - protein, 33 aa, Homo sapiens
PVLRRCGYGLYLHYDAVELCFLRSTFSWLKFRG

SEQ ID NO: 990168 - protein, 45 aa, Homo sapiens
SSSLFTLNRPKELKRFSRYSITATTWRRRPIRTTALSTFDGSGYR

SEQ ID NO: 990169 - protein, 46 aa, Homo sapiens
MEIVSMLEKNATLLKFGYHFTQQGPRPAGPHMFFAYGGNAGKCLEQ

SEQ ID NO: 990170 - protein, 62 aa, Homo sapiens
HQRTTIAYECDTNTACSIGKSMLTPSESNINPHTKGSTSNAKKTKPSWARGLTPATPAAREA

SEQ ID NO: 990171 - protein, 40 aa, Homo sapiens
FPEKGRRECKMHRENRRTHTQGGKEERRKAGREGGERLQL

SEQ ID NO: 990172 - protein, 34 aa, Homo sapiens
VQSSAAVGFWVFDPQRYDSKTLLRVSKVIVSIDS

SEQ ID NO: 990173 - protein, 53 aa, Homo sapiens
STVLDRSTHVLWSVESPSSRSVWNTDLEAQDLKSAVQWRTFYADVVIFIYITL

SEQ ID NO: 990174 - protein, 43 aa, Homo sapiens
TETVLVTCVQVNMLVMFVMKHLCSCEIGGAPLLLDELSWDLIA

SEQ ID NO: 990175 - protein, 87 aa, Homo sapiens
MVAVMDSDTTGKLGFEEFKYLWNNIKRWQAIYKQFDTDRSGTICSSELPGAFEAAGFHLNEHLYNMIIRRYSDESGNMDFDNFISCL

SEQ ID NO: 990176 - protein, 41 aa, Homo sapiens
MFSALPVSRLYLVSRLYLLYQLNEMDQWILRQGRAEGQGRA

SEQ ID NO: 990177 - protein, 35 aa, Homo sapiens
SRATANRQTQLGGDVPIKLMNHRGISVAPHYHMLF

SEQ ID NO: 990178 - protein, 34 aa, Homo sapiens
DKTETEILQLETREKLDEEYDMGANRSTCSPEEV

SEQ ID NO: 990179 - protein, 109 aa, Homo sapiens
MNVVRGYTIWSYAREIRAADINLERYNTHVVVYNVTRQNDITEGVIMNRSEKLSRTLTLRSWKYDEPAQGTLEPAREIGKTKNRDTVLEDKGRICYRTTTAKRSVRADN

SEQ ID NO: 990180 - protein, 103 aa, Homo sapiens
MFRDSAPTASHLSTLQKLEISLISSSDGQGSTAAPGEGPDYSTIDPEGEELQSFHGGFPQHPSGDLGPWSQYAPPEWSQGDSGMTPTPETPFSPDQGNTPQED

SEQ ID NO: 990181 - protein, 72 aa, Homo sapiens
VPRIPVGRVCREQESELAESLGNQANTDKGKEKKDQGLQEVGDNVEMTKPKKDEVYLRKKRNVNVGKTYLRE

SEQ ID NO: 990182 - protein, 62 aa, Homo sapiens
MKPGLYTYQQHQPGSGGTSLWSQLLRRLRWAYGSSPGGHGCRHAVAPLHSSRGNSKTLVSNK

SEQ ID NO: 990183 - protein, 42 aa, Homo sapiens
MGNTSRKPACCHANEVPRPGDYLFEHALCGWSNATDSAYTYY

SEQ ID NO: 990184 - protein, 59 aa, Homo sapiens
MALSDLKLYYSHFLVFLGLDQVQSLLERYTKTAWYWYKNRHLDQGNRIENPETDLYIYS

SEQ ID NO: 990185 - protein, 37 aa, Homo sapiens
MCASIVLCDFDPVIMMLAGYFIDLYMWLLLYWAHIME

SEQ ID NO: 990186 - protein, 39 aa, Homo sapiens
MGTWWVKAEDAGALEEKRHRLGQQGLGAGHNHCSDFSNR

SEQ ID NO: 990187 - protein, 66 aa, Homo sapiens
MKKYVPSFDIDTVMVGVLGREQGETLAVEAHLVELLVIRIDALLAADATEPDRLRLRIDAQHLGDV

SEQ ID NO: 990188 - protein, 150 aa, Homo sapiens
CWRRTYDEGCLHTDNGRGGGGVTSTSSHCRCHRSTPQRITLNLRSHNSEFVLVKWNESYLKLAVLLRRVRHIRVDPVRGQAVCADGQRTQSARELLTRGSHDGPHALITYRDEFVLVGSASGQDTAHPKSTWKVTSRVEYGLLTPTRCCL

SEQ ID NO: 990189 - protein, 35 aa, Homo sapiens
SVSRDESSPFYCWMNGDRIDSLLENGRQQTHMLEC

SEQ ID NO: 990190 - protein, 55 aa, Homo sapiens
MRPSVNLNLKGCQTSHFLEFESGALHDNRTTPPRAAGRRGSAVRSREGGPGRFTI

SEQ ID NO: 990191 - protein, 74 aa, Homo sapiens
MIITIGQSIVYVMTGMYGDPSEVGAGIGLLITIQLFVAGLFVQLLDELLQEGYGLGSGISLFIAINICETIVWK

SEQ ID NO: 990192 - protein, 181 aa, Homo sapiens
MCAHASIATQSSRRKGISDEDQINEIKQEEKFREKSKKKRTKPPRNMGLCEKTKSTLDGVSESDRDNGTKLENTLHDILQENFPNLAKQADIQIQEIQRTRQILFENSNPKMYNNQIHQGRNEGKHVGAATEKCRVTHKRKPIRLTVDLSTDTLQARREWSHYSTFLKNGITKPESHLQTT

SEQ ID NO: 990193 - protein, 59 aa, Homo sapiens
MERDKISPVWSTCAWGAVFSYTPGAARLPGSAASPCELHGQSSFFQWAEVVVCRPPSLR

SEQ ID NO: 990194 - protein, 167 aa, Homo sapiens
SGFIYVLVLNKYAANDIFHQDDEALICHSDFLACAVVCRPSNMKIPYWNAAWGKASLLFIYSRDILHWRYQSPRAGYRAPSCDPGPFCYDPSSSSRIQRQVIHRGWVARCITVGHAKEISQLLFVFWLLQRFCAFPASRPSKLFIDGLDQLLGRPRSFVNVHGLIIY

SEQ ID NO: 990195 - protein, 48 aa, Homo sapiens
SRAPSTPEFKPAESTPEEAEFHNSIIMEVQSLYHSALDDLEALVAGVP

SEQ ID NO: 990196 - protein, 119 aa, Homo sapiens
REDRMQETCSEYMSRRTRQPQEKEEIQEASTKMLKEQGHKEHTMLAGKQTKTRHQRLLRILCCSRRAVSSTGGRMPPGLMVQAVWVQPALLAPGSMIPNVDVIQTCSFKKRSHRGQGQG

SEQ ID NO: 990197 - protein, 31 aa, Homo sapiens
MEWVMHTARVDRKRMSTVSEMHYEHGGVWCV

SEQ ID NO: 990198 - protein, 35 aa, Homo sapiens
MSLSKSGGKKWSGPRCMSPRGSVHHGVFKAVFKAH

SEQ ID NO: 990199 - protein, 51 aa, Homo sapiens
  misc_feature (49)..(49): Xaa can be any naturally occurring amino acid
MCLTHPGTTGLMEVEHRDYEVNGGVSHSGLQSQWTVGGTGNCMSQWRWXHS

SEQ ID NO: 990200 - protein, 105 aa, Homo sapiens
MSDPPARPYFPSLRPVDTVSAQVKGHWQQGGLSALINAVAHVDDMLNALSALEELHAHKLRVDPVNFKLLSHCLLVTLAAQLPAEFTPAVHRLPGHVPGFCERSC

SEQ ID NO: 990201 - protein, 139 aa, Homo sapiens
CDASLALAVSGCVRHSDRYADSDVVYNKTWLALGEAGSYHSIPHNAINAHPLLTVCGVAGMDGQMTQEAVLDEPGLGVLLADAVVLSATAPRSDPCSGASVLFHINSGVLCMSPMFPQSVKMRRITVPTITRLQKDTMR

SEQ ID NO: 990202 - protein, 77 aa, Homo sapiens
SVMQGVDEEGVSLSYRTISVIFVHEARSATRESSSDSECSFMCDLGTHPCSKIHYCFSLVLSVVPVRNTCVNDSCDI

SEQ ID NO: 990203 - protein, 66 aa, Homo sapiens
WRSKQWLVIVMTAESPGSRLSWAHGPGVSHGCAPSDFCSNRDPYVLNLTQEETGLQLRHPEAIISG

SEQ ID NO: 990204 - protein, 37 aa, Homo sapiens
  misc_feature (23)..(23): Xaa can be any naturally occurring amino acid
  misc_feature (34)..(34): Xaa can be any naturally occurring amino acid
EPVPLCLTTMEAAGFTAQVIILXHSRQISAGYAXLYW

SEQ ID NO: 990205 - protein, 130 aa, Homo sapiens
SRGSGSGDYPEIIQAKISAVVCPLVLDCLLRLTFACKLSVRLKDKIDAVHGKKLDDVPYILAGLVMLPYGDMVAGKPMCVESFSDYPPLGRFAVRDMRQTVAVGVIKAVDKKAAGAGKVTKSAQKAQKAK

SEQ ID NO: 990206 - protein, 39 aa, Homo sapiens
MRMKSCRPCGIRESKNLNSLLNKSLDSEFPRGEYHRLAT

SEQ ID NO: 990207 - protein, 168 aa, Homo sapiens
MEPLALGLSILLLFLTEGCIWADAAQEPTGINAEILYSVPLELRSPAGPYFSDEYYDRYTQSCRQFRVRGLARGNAYLGFYTWEACDDACWRIENVPKVRRLQVSVDEQCEGSTEKYFFNLSSMTCEKFFSGGCHRNRIENRFPDEATCMGFCAPKKIPSFCYSPKDE

SEQ ID NO: 990208 - protein, 101 aa, Homo sapiens
TRYVLNHRRRFWEINEKFQSTRTKALYPPYYYNRHSGPYVCSVRNLATGKESSKSMTGEVSDWTVPGILLVPPIPFSPMESLRARPTLFQKPYKLEVDNSM

SEQ ID NO: 990209 - protein, 44 aa, Homo sapiens
PTFHSGGDVLVSKLAVVPESNSKPKAPREKQETAPASPGCSPAG

SEQ ID NO: 990210 - protein, 88 aa, Homo sapiens
RYVLTHPLHVTKKTRVCPFSERGPLITFRASLSVRAGPRIHKQQKQSKQPNRLVMGKDPGLGLEDEQAMQLAQEKAIDEYRPAIFPDI

SEQ ID NO: 990211 - protein, 58 aa, Homo sapiens
RSSSVPIPIRERDKDRCRNFKLRHIRKYYLIKFLSSDGITFRNLSFRNSGTSYSRILS

SEQ ID NO: 990212 - protein, 55 aa, Homo sapiens
SLPVLYDYTLDVYPPRLWARTSHSNPDLRDRPGARRAGGRYLDLTPSTGAVGQHI

SEQ ID NO: 990213 - protein, 57 aa, Homo sapiens
MRVAHHDAAGIWRRKCRNTRAKVKPDRFVHRYLYDAFEVVFDRLLCGDQFRIDCVDL

SEQ ID NO: 990214 - protein, 44 aa, Homo sapiens
MSSVPLCSDPPGSAPAVARPGPVLYDSGSTACGPPSRLRDPFHG

SEQ ID NO: 990215 - protein, 57 aa, Homo sapiens
  misc_feature (23)..(23): Xaa can be any naturally occurring amino acid
  misc_feature (47)..(47): Xaa can be any naturally occurring amino acid
MFVHSAPRALVMRSSATLLACGXLTLGMSLWLSVERCGTVVLGGRVXNSKGDPSRSR

SEQ ID NO: 990216 - protein, 45 aa, Homo sapiens
LTQELLTQELLTQGRAAAGKETEPVAVRAKVGGGDVEGDGRQLPL

SEQ ID NO: 990217 - protein, 104 aa, Homo sapiens
MQGCGQLLLLLLLLLLLLQKKFCIELLLRAYLGHHRELSNCWLLGCWMYCLKLLSLGLLLLVKRACRLLLCWRWLLLLLLLLEEELLLVLGCGLGLSGQTLGLS

SEQ ID NO: 990218 - protein, 36 aa, Homo sapiens
AIGLECYQDNFSKIALCPFSDVAQLSLVRPACPGFH

SEQ ID NO: 990219 - protein, 46 aa, Homo sapiens
PCQVIDQKTSSRQGRKVWEKLRAVISGLSLTRVEEQSGSDTDTDKH

SEQ ID NO: 990220 - protein, 51 aa, Homo sapiens
LTLTGFLVTSSDPSERRQDSETGSSIGAGEQKWKHPMTHADMWNHVRWLGG

SEQ ID NO: 990221 - protein, 36 aa, Homo sapiens
QELYVIPLRHSDLSLDRIIFVRARLLCRLPLREEVT

SEQ ID NO: 990222 - protein, 61 aa, Homo sapiens
VGSGLGLFSIRAKACEVQGGLLRRVPVSADPNVPNVVVTGLPLVCSSAPGPLELELSGYSG

SEQ ID NO: 990223 - protein, 36 aa, Homo sapiens
RLFDWLGAPRAAVRGGGRSHVMLRPVRTRELSTYVG

SEQ ID NO: 990224 - protein, 37 aa, Homo sapiens
APPEHCGVMAAGSPEHHPCLYWRCKGCGQGHPCRASR

SEQ ID NO: 990225 - protein, 75 aa, Homo sapiens
AENRWAREAEVAVSLRSCHCTPAWATERDSVSQQNNYVTSQASLLDITRVTISSHFSELKFPGTAILGHIALTSC

SEQ ID NO: 990226 - protein, 68 aa, Homo sapiens
LGDSEDPPRLADRAVFEARYFHGLAIFLDTYPKDETTERVFPYISVMVNNGSLSYDHSKDGRWTELSG

SEQ ID NO: 990227 - protein, 68 aa, Homo sapiens
PRLADVVWQLGVSGTTFGEKRDHEILSRGGEGELCLGTRLAEERGMIWGTLGDHGWELSLEEDAQLSG

SEQ ID NO: 990228 - protein, 32 aa, Homo sapiens
MSLGRIANCYSFWGINSCGDGAHNGLRGHCAM

SEQ ID NO: 990229 - protein, 127 aa, Homo sapiens
VQYNTINSKKDPLDQERERERERARARSPYSRSVNAHTAWLGATDSLRHGRPNQTQGTRQEVAVPRLKARRETEAVRVTGEPDKDREVEQGTEGDGRRNGRVGMSKDHITLGAVHRLAAGTPGLYYL

SEQ ID NO: 990230 - protein, 31 aa, Homo sapiens
MAGRKRQSPVRSQLALPSVSNSTSFVEEVDS

SEQ ID NO: 990231 - protein, 138 aa, Homo sapiens
NGKCDKERRSHTGDSGLIRSEVHIGDGDAEEHYSRLGILNTEPYNFPAGSLNIQIRSISVHTGSRHINVSLGQIHIHFRDLCGEARHTELGHFHLGHFQVPIWVVNLHIWGINVHFGPFNVNIWHFHFTFYLGHRHWQ

SEQ ID NO: 990232 - protein, 123 aa, Homo sapiens
LSIPVSTEAVVSPELWDHQDITEDMLFPLLVAGAAELEIVVVGTGDRTERLQSQVLQAMRQRGIAVEVQDTPNACDTFNFLCHEGRVTGAALISSNRRDFTYIFGPSCSNDTPGTDLLTALWQ

SEQ ID NO: 990233 - protein, 35 aa, Homo sapiens
KSCGKVPCGKYPVEKYPVEKYPVEKYPVEKYPVEK

SEQ ID NO: 990234 - protein, 146 aa, Homo sapiens
DTGILGVSYSEVYWYYTGQRVESWFLLHVEMCSELRASVGCVVSLDSGVKLQTFAVSVTVLRAARLELSVPPGGLVVSLASGVKLQTFAVSVTAHKGSVDLQSEQQQDLLQRAKEQSFHSVERDPSGLPLRAGAACFYSLIWPHPH

SEQ ID NO: 990235 - protein, 51 aa, Homo sapiens
MPAMRNSPTFKSFEEQVENLKSKVGGTKPAGGDFGEVLNSAANASATTTEP

SEQ ID NO: 990236 - protein, 92 aa, Homo sapiens
MGVRDLGQPQCCPGLLCGFETTSCPLWSGVAGTWTGGHGAGLWATDRTQEGLHLKGLPSSSGFIDLHPGSGYCTGETGHELRPSVPYRVPEL

SEQ ID NO: 990237 - protein, 66 aa, Homo sapiens
LSTQRTNILHASMLWYTLDSSPCKPGYYRPVLRELGDDTGTTFHPQSEEPLVLISRTQHPYIQYNL

SEQ ID NO: 990238 - protein, 66 aa, Homo sapiens
RPGIHIPGPQASPHPVLSCTRTSGPHTAHRSISFTPYHDIGPSHPQNQVSAVTVTKQVEPSIAPHG

SEQ ID NO: 990239 - protein, 59 aa, Homo sapiens
WAEPGASSPPSINALCGSLKCLIVEVSLHWTVKKADQMKTTFYKANNNNSFCELNIYGA

SEQ ID NO: 990240 - protein, 165 aa, Homo sapiens
  misc_feature (25)..(25): Xaa can be any naturally occurring amino acid
MDPRAVRDVILPKASTRSCFHRLEXVLPARQAAWMRFERRSSFVVWSVIVLGLPYVAGSAHLDVPAPQDITEFICSKAICAASGTSYSTKAKPLCFMVTESQDMSDALDGAKGGKGLADGVLPQLIVDRAHVDAAYDGQRPLPLAAIDCKGERGSPKPIVTAAIC

SEQ ID NO: 990241 - protein, 123 aa, Homo sapiens
MSELLPEDKTTSGKAVILAVLIPALKKGDSEDSSEASESFGPGKEEQEEQEEEYEEEPEEDYDEEEEESSEDQHWSDSPSDADRELRLPCPAEGEAELELRVSEDEEKLPASPKHQERGPSQA

SEQ ID NO: 990242 - protein, 62 aa, Homo sapiens
TRGVFSSSKHVHHCVMVLGTQSPDAGTTATPPRACAVSGQHCAVACTECPCRASRGLSGYSG

SEQ ID NO: 990243 - protein, 50 aa, Homo sapiens
LTTSPTGLARGYGTIMACATSGSANHILAKARSSFYAKTHQPPTLSGYSG

SEQ ID NO: 990244 - protein, 48 aa, Homo sapiens
WGLSSCSDRPRFPLRLHLRDIFSAISCFWDLQHRIVVSSFLPPTMSSR

SEQ ID NO: 990245 - protein, 92 aa, Homo sapiens
RIASPVLGSQTVLTPILKQVLLWVKVLPSIITWYREIFCERKLIQPTSWLSYFKKFPQPPQRSATTTDQSVAFNIEARPPTRKKITTHWQAR

SEQ ID NO: 990246 - protein, 35 aa, Homo sapiens
RGDQKNLLRKVSRSVHSGDEEDLTGVGITVSHQVC

SEQ ID NO: 990247 - protein, 60 aa, Homo sapiens
LPTADRCCFPSCLWFVVSIRILGEMESFPQGAAVGLELFQDRFFTRGAPGYLPLPVGLVG

SEQ ID NO: 990248 - protein, 30 aa, Homo sapiens
MHDTAQPITSGTEGEPASSRVRSLGCRASR

SEQ ID NO: 990249 - protein, 73 aa, Homo sapiens
SSVPIGTEVTYPIDIADIAERLKVLVVDKSTPMSSYGEDDALARVLASGFDYHHSWSPWFSCVSTFNYNIGQT

SEQ ID NO: 990250 - protein, 38 aa, Homo sapiens
YRSQYAVFLIVLLPDISPFRVSKVHCISLYAFGHSRLS

SEQ ID NO: 990251 - protein, 37 aa, Homo sapiens
VESDLEDLPDSHEAVRSPPPAGTCTMVAASIPVLAPH

SEQ ID NO: 990252 - protein, 34 aa, Homo sapiens
PYDSRQQTCVMGCRTKQLMLLLSCRASRGGTELE

SEQ ID NO: 990253 - protein, 53 aa, Homo sapiens
PPTSRQQALLALRWGEPAVYCCWRELTARCQLTTSLYFACCHWPASNILSASR

SEQ ID NO: 990254 - protein, 63 aa, Homo sapiens
WSGTERLVMALPPDQALRPGQCAEAVVMAADSLVSELNAWSVVYSDMACGWHATTGITGRGTV

SEQ ID NO: 990255 - protein, 142 aa, Homo sapiens
GEDLRRDKGATWFRLGLASQVNIVAFEQLGIRFWGCRTRWYYGGNIPSGDLQIMLYEDQQANELDVTFSDADYANSLGDLDVLQRRFQFILRALNASTAGTIEALDRQVAALADTEAGGSFYTNRRQPPAGGIIRWDRPAEA

SEQ ID NO: 990256 - protein, 51 aa, Homo sapiens
FLGMCVCSVQNISSLLALQVWQVILAERELSCMLRVALPRVSVGLTCRASR

SEQ ID NO: 990257 - protein, 176 aa, Homo sapiens
SGCASGGGIRRPNHAACTTLNPGPARRGSMHTRTSPGKRALDIGGGGGILSESMAGLGAQVKGIDLSTEALGVADLHSLESGISVEYEAIAAEAIAAREPGSYDVVTCMEMLEHVPSPGDIVAACATLVKPGGWVFFSTLNRNLKAYLFAVIGAEYIAQMLAKGTHEYARFIRPSE

SEQ ID NO: 990258 - protein, 59 aa, Homo sapiens
LRHKEPPDLWHAVYRSTDVDGKGIIEENFPGLAERSMTSKYKKLNRYTRKTHCIQDYNL

SEQ ID NO: 990259 - protein, 52 aa, Homo sapiens
MLHHPHHHPSLTSTFYLRHILHHTPYQDKDGLLASSNLRKAIVTLSRHVANI

SEQ ID NO: 990260 - protein, 45 aa, Homo sapiens
CWVPPPYLSFVVVSRGARCAGRPVEGRPWSGLGSLGVRCSGAPAL

SEQ ID NO: 990261 - protein, 34 aa, Homo sapiens
SYVPCSVPPSFWVLTMCALCSTSPGAVSAHGPGG

SEQ ID NO: 990262 - protein, 33 aa, Homo sapiens
CSYQMITHLLIFSFVCRILGTQGLKFRMSVNIF

SEQ ID NO: 990263 - protein, 67 aa, Homo sapiens
GIRGSCVGIGREHLHGEWQFKRLALLGGVNCSRYQDLGVRQLDLPSAGRWNSPRSAPSAIGGRRGVE

SEQ ID NO: 990264 - protein, 37 aa, Homo sapiens
NTAPEIRNLGQGGFWGENHFPEKLGIGAGRFQGEKPF

SEQ ID NO: 990265 - protein, 61 aa, Homo sapiens
ILMADSRGETFATQGGEVFGQGIDRAYQSLAVVFLDLVVGHEAAVRGFVLGQDLVHRGEVL

SEQ ID NO: 990266 - protein, 54 aa, Homo sapiens
LDPRFAVQETPQSSRIFPLSAWDLGCRLHSLRPWRSRSQLYSTISTAVTASCLL

SEQ ID NO: 990267 - protein, 69 aa, Homo sapiens
MFSLEFVGLHPTPTAGVAGERRSPPSLPLGNLVVPGSPPNPIKDVSFAYPTRPERPVLKGLTLPIRPGD

SEQ ID NO: 990268 - protein, 120 aa, Homo sapiens
TTPSAFKYTKLHIGWQGPGSSAPAWQDTSASAHLRAAGFCTQPPRNPSAISTKSWQQQKRPSVSPPTVQCSQGTRSLTGADATRFERRPHGGEVCPPPVLEAGCLVGGPELAHLNPSSLG

SEQ ID NO: 990269 - protein, 98 aa, Homo sapiens
LLSRYRWEGAVHIAWYIHQELGHPANTLRCNGNGKAPNSFHQLTPWDRINGWESPSVTGQNLPYRLVVNNMNSWGKAAFSGTTASEGSSDGSGTHNEG

SEQ ID NO: 990270 - protein, 115 aa, Homo sapiens
  misc_feature (28)..(28): Xaa can be any naturally occurring amino acid
EQFLESPKVWQLAQVSMLIVCAELRWLXGRAEVGQGQVVVVRQEQVQVESESRQWLQQEQQLCVTGRFNHRGPGRKILLAGTGGRAGLVKEQDNISYLSLDLVPEVPPEQPTSQY

SEQ ID NO: 990271 - protein, 174 aa, Homo sapiens
IPCLTTSESSFRRCSAPTVSQHCGRRGGGSLESGVRDSLAHVNLSLLKSTGSTVVPATWEAETGELLEPGRQSCSEPRSRYCTPAWAQIKTPSQKTIKVTIQPDQGGGQERSRNRGLRCFRRGGPCSDFSLIHFGLSPQFPGGNGVLRLSPGARPAVPRDTSGSLGANNGNSRG

SEQ ID NO: 990272 - protein, 41 aa, Homo sapiens
LFIGTPLFIGTSLFIGTPLFIGTSLVIGTYNSQATRCQMNS

SEQ ID NO: 990273 - protein, 42 aa, Homo sapiens
IPSGRAALRGELQRQLVWLLSHVWVHALDLGQPAAGCDNKLA

SEQ ID NO: 990274 - protein, 69 aa, Homo sapiens
VQVTSCSSRGMQPPDGSGSSAGSRETCCEELAERRAVLEYLLPEHHALYTNRGVWLRSIKEPREDTPLG

SEQ ID NO: 990275 - protein, 114 aa, Homo sapiens
TTAGKDRLMTKAVSLRENKGPGTQNHRQGRFLKKKAPAVPSAPPSYEEATSEEGMKAVAFPPAPTAVPLHPSWAYVDPSSSSSYDNGFPTGDHELFTTFSWDDQKVRRVFVRMF

SEQ ID NO: 990276 - protein, 70 aa, Homo sapiens
  misc_feature (26)..(26): Xaa can be any naturally occurring amino acid
SHDYRRDEGGSKDELALRGEVEQHQXASASPITCDQGRYGNCSLNGEMKNYGVPPSMGNEGGSAEAGGAA

SEQ ID NO: 990277 - protein, 153 aa, Homo sapiens
MLGLLDAYLKTRTFLVGERVTLAEHHRLSAPLWWLYKQVLEPSFRQAFPNTNRWILTCIKQPQFRAVVGEAETVVRRWSRFVADKVGMRPNRKRTRHGREKGYKVKMEAECPRLSGKEENKGGLPRLHEEEMDECEQALGAEPKAKDPCAHLP

SEQ ID NO: 990278 - protein, 114 aa, Homo sapiens
  misc_feature (97)..(97): Xaa can be any naturally occurring amino acid
MRTPSSKVCPEHFYLRTTQSLTASSRLEEPGNECLKSWPQLMTPPGIGTPTAFGSLTRGVRIILLFPVRHFPYLRYGVFPGISPNELLCTQFPVFSXEFRSMTLSDVRNANVRN

SEQ ID NO: 990279 - protein, 75 aa, Homo sapiens
YIIFPNVSVKPCEEWPTVSHAISITHFKLHACLNEDDMLENQVIAFEYVMRCSDWTQIKNWMAYCVAYARGEQKP

SEQ ID NO: 990280 - protein, 63 aa, Homo sapiens
SYASCMSPLRKVTYRCRTYCGHPIGIAHYSPELLDSSDPPASASRVAGTTGTRHRARRGFVES

SEQ ID NO: 990281 - protein, 109 aa, Homo sapiens
VQLTWHISGYQLATGTLQTPGHPYALQLDLTASATSYYMHSHSSAKSKMRSTKKVDQILHHGILLIDKVEAHILSVTKHFHPFYCWRNTLTPLSSCPATPQPPRTDLKL

SEQ ID NO: 990282 - protein, 40 aa, Homo sapiens
TPVIKLGDADPTLTGYYAECQQLKEDRQVERLNEDVLIGQ

SEQ ID NO: 990283 - protein, 34 aa, Homo sapiens
TENKTKQNKNKQNTSDHPKVGHTALTHIDPTHSW

SEQ ID NO: 990284 - protein, 93 aa, Homo sapiens
KKKKKKYQIVCTPSSIMDHCEELIPEYLNFIRGVVESGGISLYHISRADVATKPTILKVHPGKPFGPKMLQTLFHCNWLADKANYKKFYEQFS

SEQ ID NO: 990285 - protein, 83 aa, Homo sapiens
MTGHSLIHTPCSFTGRILSHNRPRSYILITILPSKLKLGTHSQSHHNPLSRTSNSTPTNSFVMTSSKPRYLAYFTPTPPLGRS

SEQ ID NO: 990286 - protein, 36 aa, Homo sapiens
LHSYILSHGRSNSTPTNSFLDDYLANHRYNRGILYE

SEQ ID NO: 990287 - protein, 75 aa, Homo sapiens
MSSGTDEGDAWQSQVIGASMKNPDGNDVGVTQVVDEAADVDIVTDIYAATPLHPCSTKSEEVSLILSHISLKIRD

SEQ ID NO: 990288 - protein, 70 aa, Homo sapiens
DLEPSSHCPAVDLLEVHCLCPSTEEAHCHPSGREPRAGQAAVPLLAGPLPTQTEDVGTTALVGQPTLEPD

SEQ ID NO: 990289 - protein, 36 aa, Homo sapiens
MTLVGSETLAGSETLAGSETLAGSETLAGSETLAVF

SEQ ID NO: 990290 - protein, 76 aa, Homo sapiens
SEAHETPDYQSPVIYVIEKKFLISLIVHLLKACTKRALELQGSDMIVPKDLPRVVSGKRFIFLIYMPCLKLRTLHK

SEQ ID NO: 990291 - protein, 42 aa, Homo sapiens
RAQKLLAYLGDLAVNGSQIKGQIGEPKFKGDIAIPTLHDEQK

SEQ ID NO: 990292 - protein, 69 aa, Homo sapiens
METAKDEDGKRWLLHLIYQSSSLSISQHLLSIYHVPSHGNTMMNNIVLTFTELPLYDFTFQNFGSHSKD

SEQ ID NO: 990293 - protein, 65 aa, Homo sapiens
ECASLVESDRARLRIGAAILTWPEFFRLEQTFPLAQVISFRAIVLVGFAAVFVVMLLLCVARPIR

SEQ ID NO: 990294 - protein, 75 aa, Homo sapiens
LFHGDEAGVGQACLSGPTPRGICLPSGSPISGELLSFNKTLHSFSKPTCDPILPVHQDKNLGYINPSVLVIRKGV

SEQ ID NO: 990295 - protein, 47 aa, Homo sapiens
IIIISISSSSSIMLYMAGNVTARYGSDYYSKNRKGSEEAGNSGINQL

SEQ ID NO: 990296 - protein, 58 aa, Homo sapiens
MAHLMDASQIRSLSHNGNFVDLHFKITAVATGMENGLERKPGGGEIREGCYGVCFEIV

SEQ ID NO: 990297 - protein, 34 aa, Homo sapiens
MRANKLCKSGGGRVTELTTKPLFNLFYPELTGFV

SEQ ID NO: 990298 - protein, 64 aa, Homo sapiens
HYLFRGLKPAGEGLLGATAVVQRKRIAKCRLNQTSAEQSQRQADCRGVGRIAGRSGTGEIALDR

SEQ ID NO: 990299 - protein, 46 aa, Homo sapiens
MLMEPYLVTVLMGQFGGCSHKSPIMVVKVVLLGLGVSDFEFGVDPS

SEQ ID NO: 990300 - protein, 46 aa, Homo sapiens
ALPGDVLYASLLMSHQILDKAGDGGGMLCLGASDYEYGVDPVLILS

SEQ ID NO: 990301 - protein, 120 aa, Homo sapiens
RYLPCWEARNVVHTTGKLGKNSARGVHEAVHLEESVSRQEDVAQQDQCHLLHVQAEDGVEQLHCPQCVLLPRLLQQLLNQVVAEPVDAVHVQQSVKDVDGAAVHPALLQHLGKNVLSAPL

SEQ ID NO: 990302 - protein, 51 aa, Homo sapiens
LEILALPGSLTYGLTPGSLTLRYALPCAECSGAITVNYSLNLLSSSDASTF

SEQ ID NO: 990303 - protein, 84 aa, Homo sapiens
VITLRCPVMLVVGDQAPHEDAVVECNSKLDPNHDLDTYKMAVTPGGQPQYDSAKSKLTEAFKYFLQCMGYMASITAMTRLSRSR

SEQ ID NO: 990304 - protein, 43 aa, Homo sapiens
MLTIAEGRCGILDFSSGQSKGRRNQKYLFPSSRPGYKVCRATR

SEQ ID NO: 990305 - protein, 70 aa, Homo sapiens
GVYRLADSPPEYASRLDRASPLSFSMARCSPLAAVLGGGRSHWMLWPVRTRELSTVVGVQVVAALSGYSG

SEQ ID NO: 990306 - protein, 40 aa, Homo sapiens
EQCAIGVVLQHTLWLAAASEELPALVPVTVVPPAAPCHSE

SEQ ID NO: 990307 - protein, 61 aa, Homo sapiens
VQDSRIVGMMKTLLLFVVLLLTWRVAGLGDQTVSDNELQEMSNQGSKYVNKEIHNAVGLGG

SEQ ID NO: 990308 - protein, 33 aa, Homo sapiens
CQCRARGHRVPLTEACTDSRIGGMMKTLLLECG

SEQ ID NO: 990309 - protein, 86 aa, Homo sapiens
TLSAHITLSIMTSHTPTPPTTNTADLKNTSGGMWVTLLPPHWVQNIKQIDTVILSLLWTVWSPLKSWSWQEPKLAALLIHSNHSYV

SEQ ID NO: 990310 - protein, 176 aa, Homo sapiens
VPILSQAVEEEEEDRYSRVLEKRIKKKDDPIGIHDYFGVSVCMNVDTVILKIDNYYDAILILLTYINAYSCAESRRAPSVAHENIHVEPNEYFKNELLTKTYVLKSKLAYYDPHPYRGTAIEYSTGCEIDWNEGKNVTLKTIKKKQKHRIWGTIRTVTEDFPKDSFFNFFSPHGIT

SEQ ID NO: 990311 - protein, 150 aa, Homo sapiens
MSSSDEGDTQVGPLHWSQEDKMAVTHTLPSPALRRAREGVLDSRKHRDTGRTVCAGGRCPAGPPTLPMPTALGLVWVGGSVREPSGAECSHEALALCHGPSCIVAPGACKPPCSCLRACCSLERGLHTQTPLILSLVSCMGPSRLCLSVG

SEQ ID NO: 990312 - protein, 73 aa, Homo sapiens
MLMFQDATQLRLSATEWSREYSRLTLVLCTATGLLLEISAASAKAASSMTSLSGNTRLTSPLPRASSAIILQF

SEQ ID NO: 990313 - protein, 36 aa, Homo sapiens
PSPACAPAVWVCSMLMYQDATVVEALEHEWSREYSR

SEQ ID NO: 990314 - protein, 89 aa, Homo sapiens
LPDSRQRATGKRSRLRPCAEDHDKASATEPLPLPGGQDQLLSAFSPMDPMTRCVVLCFEHEAPWHCGRTGRECAELELGPCRGYVGGGT

SEQ ID NO: 990315 - protein, 35 aa, Homo sapiens
VRGTGFTDEIKRYIKKTRRFQSGPPDHVQTYSHSD

SEQ ID NO: 990316 - protein, 40 aa, Homo sapiens
MGCDLRPDPERCRRVAELAVNHARLRHIPVHERRIAIMLS

SEQ ID NO: 990317 - protein, 94 aa, Homo sapiens
DKLLYKIRKLGICGGMPLYVPATREAEVDHRETQEVGAVVSRDYAYLLQPGVTRVTRVSSEKNRKLPQYEPDSPADSRKFGGSLLEIDRARHGE

SEQ ID NO: 990318 - protein, 50 aa, Homo sapiens
MTEFVVYAKGAGFASAVYGKAIVPIAVAAGFGARGMRLNVVFAPVDFADH

SEQ ID NO: 990319 - protein, 43 aa, Homo sapiens
MANCTSSTCKPDLVKRLLFKRLKAYFAEVLNSENTKIKSPHMR

SEQ ID NO: 990320 - protein, 106 aa, Homo sapiens
TLTCSYDLYDDCNDLHVHTCYNFGASIKSLSANVLVSWRTTGGRVFTEKALTIRQIIDEFDYILKNLKTEISFDSAIPLLGIYPKEYKSSYYKDTCTCMSLQNYPQ

SEQ ID NO: 990321 - protein, 41 aa, Homo sapiens
MVTFILTSLALPIEIVILPPVSHECSFGRSYRKQLSMYRSQ

SEQ ID NO: 990322 - protein, 124 aa, Homo sapiens
TSIGLEWTSGHGHQADASWEADGPSVSRIGGFLVSLTSRMKPRTLTVSVTAFQVARLESVPPDVQMYSEFFSFWWVCGLPGSGVKLQTFAVSVKLYKVALRELFVLSSGLVVSGVKLQIFPVEK

SEQ ID NO: 990323 - protein, 58 aa, Homo sapiens
IELGTVSSFCGTPGLVHRLFRPSPPDEHDAFLLPPHEHDAFRCLPMNTTMTLFLRFDP

SEQ ID NO: 990324 - protein, 100 aa, Homo sapiens
LAALEDTLKPTLDTHFTVAGVQVGGVTFTLADVQVGGVTHIHAVAGVQVGGVTHIHTVAGVQVGGVTFMLLQALQVSGVTHIHAVAGMQVGGVTHIHAFA

SEQ ID NO: 990325 - protein, 79 aa, Homo sapiens
MREEKESKEEEKGKHTRHGLADLSELQLRTLCIEVWPVLAVIGGVDAGLRVGGRCVHKQSGRHATLLGVVYEGSTSAKV

SEQ ID NO: 990326 - protein, 38 aa, Homo sapiens
MARRIGPGRGLTCFLSAASPALLTDVSGSYSLVPEREF

SEQ ID NO: 990327 - protein, 44 aa, Homo sapiens
NILSASRSRWSSESSNLCKERPGKNPSLPPVSSDCHPLPTPELP

SEQ ID NO: 990328 - protein, 134 aa, Homo sapiens
MFRPQPCHYINPETPGYVGFANLPNQVHRKSVKQGFAFTADGGRRLRSKKPRSLIDSLFLTDLYPDSVVPGAVQTIDRTVQIEASAVEIEERGVKLRLTVVDTPGYGDAINCRDCLETIISYIDEQFHRYLRDE

SEQ ID NO: 990329 - protein, 70 aa, Homo sapiens
MASVISLRRTHDLDGLDLFFLYPGLRGSPMHDRGTFLFLMEELRFAFRKEARLTMRPRLLLSGYSGGYRA

SEQ ID NO: 990330 - protein, 75 aa, Homo sapiens
GQVVFPGTGEALVAFSTLFLGDVIRVSGLQIGLVLVLVLPESVYFSLICLRFLLIILISVILLIGTHIFTLGLFF

SEQ ID NO: 990331 - protein, 37 aa, Homo sapiens
MVLSSAHFWWGLFLVPTAGRASRGSRTCYPPHCRASR

SEQ ID NO: 990332 - protein, 49 aa, Homo sapiens
  misc_feature (22)..(22): Xaa can be any naturally occurring amino acid
EIPRLARQAGDPTLRSDISKAXERRQRHRRLTEGRPYFKVSRCSCRASR

SEQ ID NO: 990333 - protein, 67 aa, Homo sapiens
GVLWCSSGSPFAQPPSQRPSQLLLAVALTRARAGARPAAHAGAPPPAISPLGGSGRARRGGPALAFV

SEQ ID NO: 990334 - protein, 52 aa, Homo sapiens
MCPIRENGMKEEIVMRVFCNIHSQSGRFVGNRKFSLFFDTALALVTTGCQCS

SEQ ID NO: 990335 - protein, 43 aa, Homo sapiens
TLSNGADQHEPGAELVRLCGHQQQRGAVMPGSPVVKGDCRASR

SEQ ID NO: 990336 - protein, 50 aa, Homo sapiens
MSQVPKATGTAPVQAYMQVGAAHTVPLPHGHTGSGQGLLCSLLSGYSGGY

SEQ ID NO: 990337 - protein, 33 aa, Homo sapiens
HAGTLLRGEGVEKKVDAREEESIRNSCRIRSSC

SEQ ID NO: 990338 - protein, 55 aa, Homo sapiens
PDYRRAPLLVIDPCIDGANGSQSASTRNTQARVVEVAQRFPQYDLRPFNTASLES

SEQ ID NO: 990339 - protein, 122 aa, Homo sapiens
TRVQAGATQYRKGRSREPGLGSDVGQCLETMLLAEYMKRLLHLWVPVYRDAVSLGWAGWRGDSGITVASGATYLQQMLDVRGGVDSRSLTARKHTLESTDGFCKPVPDQESGNSYSYLVRGS

SEQ ID NO: 990340 - protein, 61 aa, Homo sapiens
GLVMSARPAAARSWRRPGRRRERQVLGLDAVDDGRVDLLEVQVADALGVLADDRDVVAAVV

SEQ ID NO: 990341 - protein, 70 aa, Homo sapiens
FHYDTKNVDSIVVTFIMASKKSWYRLHLMSSFEEHLAYPDEAGYGIKETTNGFIHSFVHSLIHCWEYKGN

SEQ ID NO: 990342 - protein, 87 aa, Homo sapiens
EASVRITDVNATAERTYSRREIINSSPGERIGCDQAFQATQLQLPSSPSSTHNATQGTGTTQRKHNQSIRENTEQHCGILLALLFLS

SEQ ID NO: 990343 - protein, 34 aa, Homo sapiens
MALGCSSLALGPVFSSASHGYDTLDYFTIDPRLG

SEQ ID NO: 990344 - protein, 109 aa, Homo sapiens
FDTWAHAIIDIQKNIAWLNTEREQAFTDSGFDYDIASTSNFMKVSRKQPHILSDWLWQFFWDSPIFLKEIAPEDGHFKIHMWPKPASNVDRKTIFQLSSCFIQGGKVSK

SEQ ID NO: 990345 - protein, 102 aa, Homo sapiens
TFAQWEERRIFLAYKNNLYPRNLDSHQNATDDVMDTLMPRFTQLCSYLVTVVFSHYAQPPELRRTRINLTSPTNKSADVTYSFSDVLLLTIFVEWREVRLSR

SEQ ID NO: 990346 - protein, 44 aa, Homo sapiens
MSRLCCTVWYKHHMQLSQDTSRFVEQVAASRISGNLDAPEGGFD

SEQ ID NO: 990347 - protein, 45 aa, Homo sapiens
CGRSNAPLLFHGLCVCSWDMPGLTWLAGRTDLDWVTGLDGLATLP

SEQ ID NO: 990348 - protein, 87 aa, Homo sapiens
VSLLALRCWIIGLVLKPSSVLLIKLGKDERGNPLTYPADAIVSSFDNDIRKQVCAESKPSFWANLLQHVICLLLQRLPKLYRLNALI

SEQ ID NO: 990349 - protein, 38 aa, Homo sapiens
MLSYCCARTVHVLRNGQFDCRNPRRRYLKGYRDERHNE

SEQ ID NO: 990350 - protein, 32 aa, Homo sapiens
RSDFCWTLSGGWSVQSLELEMRQALLYCRASR

SEQ ID NO: 990351 - protein, 99 aa, Homo sapiens
CLACSSRCGVGRARGPGVAVFGASGPVVGRARGAGGGLRRTNPIVGPGLRRPLLAPRWPRPHFLVGLSRGLTASRVSHLLPADPIALFARSRLSCLIWA

SEQ ID NO: 990352 - protein, 80 aa, Homo sapiens
IPDSRQARVGWVLCWSCRRVGAASCSAHPLSIPATCQAPSGVFETACQASSRRTECPGDSTFLPGGRGAVGLGRGGTGAR

SEQ ID NO: 990353 - protein, 82 aa, Homo sapiens
QESAPAKSHAEASHPWTMPPEDKEPSDGEGMGCRMALELPPENTLYNALSHSVRITYADKPMLALMERPGSVRDFGDRWNTD

SEQ ID NO: 990354 - protein, 31 aa, Homo sapiens
MNALVCGLCALGSHVVGVQVVAALQVVGLVG

SEQ ID NO: 990355 - protein, 54 aa, Homo sapiens
SAALWCPGTPAGAPSAPCLSPPRSAVPVSWLRCVLSAVRAAAVGGSPAVRRSAH

SEQ ID NO: 990356 - protein, 33 aa, Homo sapiens
TDLLSFFKDTFGRGPQSHSSSSVNEAIATLRRM

SEQ ID NO: 990357 - protein, 35 aa, Homo sapiens
CYYSAASTLLWQAFWECVVVAWVYGADRFMDDIAC

SEQ ID NO: 990358 - protein, 44 aa, Homo sapiens
PARTALRYSQIRSSWLLPKQFSHRVRCRASRGCRASRVLSGLVG

SEQ ID NO: 990359 - protein, 58 aa, Homo sapiens
AGRQSEYYGLEICLKSSNQAWKQLLGAGRRLQSRILEIFSHADLWTPSENGAGFLYVS

SEQ ID NO: 990360 - protein, 81 aa, Homo sapiens
STMRCKSVLYHSRLIKEYSRRDTIDSVDGGYDMGSSASHKWISVRRGIFTIKAIVLASHIKLFAQEFDSSWPVACESYTVS

SEQ ID NO: 990361 - protein, 89 aa, Homo sapiens
LTLAGSHPTSPTGPHSCPGVSEVHGLWCPGEGLKRGGAHSPHLEWHWAHSCPSLGLRWTSGSLRVCCALSMRPPHPMMCLLVGCCRASR

SEQ ID NO: 990362 - protein, 42 aa, Homo sapiens
ELQGVPSIYTGFLPHWMQSIDGFIAVSSLLQLWYLRLVGGRA

SEQ ID NO: 990363 - protein, 38 aa, Homo sapiens
MLTVTVGVPTAGSRWFALFFLLFPRIDFFHRYPFDETN

SEQ ID NO: 990364 - protein, 40 aa, Homo sapiens
MIQRGDDTARFRISSEVNAKTVGSVGFAAARQRPRVGLVG

SEQ ID NO: 990365 - protein, 48 aa, Homo sapiens
KHVELDSPDCRLIEEAYTALERTGKQERCFIGAARSGAVVGLASGGRL

SEQ ID NO: 990366 - protein, 49 aa, Homo sapiens
VHIEDRWRTLVPAVGADGAELKVYEGSGYALPDTDRDRLHAELLAFIDS

SEQ ID NO: 990367 - protein, 51 aa, Homo sapiens
MNYRRGSPSYYDNRIPFNNWDDKSIRKAFIRKVFLGAVNLQLVGDPVGLVG

SEQ ID NO: 990368 - protein, 70 aa, Homo sapiens
LYPTSPTAGGGEQRAACRDRRRNSPGQELLQPEVLHLAAPSQVEAAEGRHWVDKKAEAMCPGDAYTPVSG

SEQ ID NO: 990369 - protein, 39 aa, Homo sapiens
HGVELPLQGSPVADRAFNAFVVFVRSIPWFISSRLMQPL

SEQ ID NO: 990370 - protein, 72 aa, Homo sapiens
FWVTLRIPPTSRQPVVVAAGSCRDGGANSPVQEVLQPEVLHLAAPSQVEAWEGRHCGQKLEAVSVMRTHPVG

SEQ ID NO: 990371 - protein, 55 aa, Homo sapiens
LEDTFPTSPTDWHADSYYNTTYVLLCLCIRSVVCSQSPSSGSQTKFDFTSCRASR

SEQ ID NO: 990372 - protein, 54 aa, Homo sapiens
  misc_feature (48)..(48): Xaa can be any naturally occurring amino acid
EDPLSSPFVRDKSTSSMRDVSSSPIKGWHFFSYSSTGINQAVGVIFHXIPKTKF

SEQ ID NO: 990373 - protein, 43 aa, Homo sapiens
FTREKGDEIAHGCLTDVERGMRTQADLAPGATSFNYYYNPYLY

SEQ ID NO: 990374 - protein, 37 aa, Homo sapiens
DAARPSPQLTALGGLLIAAVLAGEQAAGERAPDQNRA

SEQ ID NO: 990375 - protein, 37 aa, Homo sapiens
CHPLRGQDSLFYSGSNDDIVFMHVDEPERHWVWHNLY

SEQ ID NO: 990376 - protein, 51 aa, Homo sapiens
GSLGNYGSLGLSSEHCVISYPGPWLSEALFFFLVSETKSCFGPPALKDIVA

SEQ ID NO: 990377 - protein, 166 aa, Homo sapiens
RYLRIRVIPFVMIPKLSCLAACPGRGRTLAVAVFLRLLSQHPAPLEEQGLWVPEGQRARITVAALDASNLLGSFHHPQRSEHDVLFQVTQFPSRGQLLVSEEPLPAGQPHLLQSQLAAGQLVYSHGGGGTQQDGFHFRAHLQAPAGAPWLGPQTSEAFAITKGDRT

SEQ ID NO: 990378 - protein, 44 aa, Homo sapiens
YNFRGLLTTPGHDQPDHEGLFPASKRRTSKKLRLQSGYREYKMK

SEQ ID NO: 990379 - protein, 82 aa, Homo sapiens
  misc_feature (54)..(54): Xaa can be any naturally occurring amino acid
MICFILLISTAILRRRNYCDRLGDMSEVPQLGSSREKETDNEDTGLPIIHAILXPSRNLTGSIQVMECFFMIVVAVKSVKTA

SEQ ID NO: 990380 - protein, 113 aa, Homo sapiens
YFHGQLKHAGRHMRERENHLWVPQTEPGGAGSTHVCLPAPLGIYLDLPTDQKLVEKLIVLACLSSRGALVLPSSEAPHYCLQLPLKGTKSESMWLVWGEEEEEKGAGEGTRIY

SEQ ID NO: 990381 - protein, 35 aa, Homo sapiens
  misc_feature (16)..(16): Xaa can be any naturally occurring amino acid
MYVMPFSFMTSANSYXQERMGCLRNFIFTGHTVGK

SEQ ID NO: 990382 - protein, 69 aa, Homo sapiens
IREDPVIQGFGSSDVYVITQAYSSRAGTTEHLASDITPSYGDCPVPCRMFSKSSLDLSSLDLSNSCHQS

SEQ ID NO: 990383 - protein, 162 aa, Homo sapiens
PCHPLREEGLESGDAGLQVIMADSEICGTKGPTFQRHLLDTRFELALDIPEEEARYSAKKLEQLNAMREQDEYSFQDEQEKPLPVPSNQCCNWELFVGWGEQHNDDPDSAVDDRDSDYRSETSNSIPPPYYTTSQPNASVHQYSVRPPPLGSRESYSDSMHS

SEQ ID NO: 990384 - protein, 60 aa, Homo sapiens
  misc_feature (42)..(42): Xaa can be any naturally occurring amino acid
LSRGLRKAFYTKFISSPNDTTTDRILRLAVVMHMQAGRKWAXSLQHLVPLSCRVSLISIQ

SEQ ID NO: 990385 - protein, 93 aa, Homo sapiens
  misc_feature (64)..(64): Xaa can be any naturally occurring amino acid
  misc_feature (76)..(76): Xaa can be any naturally occurring amino acid
RGSFTLRTAVSGHPGSTPVCVKKDGPALLAQRWYSFLGSEPAGITALCAHPSAERGPGPSSMEXVVTQEQAEPSLXRSRQGPTLSTLMGGPSG

SEQ ID NO: 990386 - protein, 56 aa, Homo sapiens
MGFWWNTCNFRHDIFNIFHGNQGVILFSFQTTLCPCFINDINGFIWQETIINELCR

SEQ ID NO: 990387 - protein, 34 aa, Homo sapiens
RIFALTTQLGRCNIFTLKKRQDMVGVLALGIDGS

SEQ ID NO: 990388 - protein, 55 aa, Homo sapiens
YANPSTTMLIIIRWSAWTRKVSSRISSKFCYQDTANKLLTFLYVKFSGFKNIQTI

SEQ ID NO: 990389 - protein, 98 aa, Homo sapiens
SRDLVSPPHYTSQSVSLGIVLTLLAGICLSCTRRARTDSEEGSSGSWGFPPGHSLALPRDEATLSEQRVVTLSFLLPFRGRRRVVTFRGELGQESMVA

SEQ ID NO: 990390 - protein, 181 aa, Homo sapiens
  misc_feature (19)..(19): Xaa can be any naturally occurring amino acid
RFSTHPSCMQVLPQEAEQXGLMGPSVGHLVASSRDLACLMPSPVCALEVWPGFKCTEGQVAANRTSSPGRKLLSGDAAYGLGASCGPDWSLDCRVATGLRSPLPLWAAPPHHGAWAWGASSKAGFALGASGPSVHIRYRDKLPRAGGGGFWAPKGRRPGSLGWALWGCWGQELRWSFPFQR

SEQ ID NO: 990391 - protein, 71 aa, Homo sapiens
  misc_feature (2)..(2): Xaa can be any naturally occurring amino acid
  misc_feature (14)..(14): Xaa can be any naturally occurring amino acid
RXKARSRLAELRGXPRGLYDGPGCEVTVRRKTVTPASSAKTSPAKQQAPPVRNLHQSGFSLAGAQIDDNIP

SEQ ID NO: 990392 - protein, 63 aa, Homo sapiens
FSQGGNCTFKEKISRAAFHNAAAVVIYNNKSKEEPVTMTHPGTGDIIAVMITELRGKDILSYL

SEQ ID NO: 990393 - protein, 93 aa, Homo sapiens
MMAGDHRGRVRLSALAERFLADLLRSLYLSSQRQRDGLKLVSPLPAQGLQGKAQVVRFCQRTKIKIILGIDTGRNIDVELQQFKKLSLKLVHV

SEQ ID NO: 990394 - protein, 59 aa, Homo sapiens
LVMVLASISISSLYAVPLPAGTAVLHRLEPMSLIPSEDARSQCLPQGRIWTWAQMACHR

SEQ ID NO: 990395 - protein, 71 aa, Homo sapiens
GLRTHATLLTGRGLACPLLLSCPCHALLTSSPPPGPGPALAPGLLHCLLLASPPLVLPPTVDCPCRAQSDL

SEQ ID NO: 990396 - protein, 102 aa, Homo sapiens
RLARQRANHGCKSKSPKAEELGVGGSRAGSMGHKRKMKAGRLGRLSRLRESALPSSSVCFILATRAADGMVPTQMEGGSASPSGLTQMLISLGSTLTVGLVG

SEQ ID NO: 990397 - protein, 147 aa, Homo sapiens
TSKHMQAKGSYWASGLLSPWLGRKGREDGWGSLFGIDDVHEVRDLRGSITHKRSHPHHGWLARLLARLPHVTERSIKLIAGALEPPASEIVGLQHILRSFSLYFLGTVGRVARLAKYQLAHTWLKASDDLAPVLHVICDDLCLLENN

SEQ ID NO: 990398 - protein, 50 aa, Homo sapiens
MSVRYMIPSVPGSYSARTISVQRYPVRRRDFSKRVEGHRQDDDQADDDLL

SEQ ID NO: 990399 - protein, 147 aa, Homo sapiens
MTVLSELTSGIFSDEKIPGIGTLTQDTLWCFSHSERHYLKIGTTVRCALLPTSPSAMIVSFLETYPRHAELARTMVQSHFFPCPPTPGDWLRGGIIGYLSAGYLEPTQVSLLSMEEDIDTRKINNSILRDHSNATEADIISTVEFNH

SEQ ID NO: 990400 - protein, 41 aa, Homo sapiens
TVPQEPCHISFRPNSSPLLPTVWATMKQREDPERSSCQGLP

SEQ ID NO: 990401 - protein, 44 aa, Homo sapiens
KTIMVLVGLSGATIASNLPYNDIVTSASAKYGYDPLLIHAVIQK

SEQ ID NO: 990402 - protein, 112 aa, Homo sapiens
RVIPLRKLPPACSQVTLVGLLREVYEGTADNVLSLVEVWAAPPDTRVYCGHEYTINNLKFARHVEPGNAAIREKLAWAKEKYSIGEPTVPSTLAEEFTYNPFMRVREKTVQQ

SEQ ID NO: 990403 - protein, 42 aa, Homo sapiens
LGKKVEKVVVSTDGHVLDSKHERIMNTGYMAAKKHLEINPDH

SEQ ID NO: 990404 - protein, 52 aa, Homo sapiens
ALAGSLSPFVMSDQPGNTSSEITTKDLKEKKEVVEEAENGRDALANGNANRG

SEQ ID NO: 990405 - protein, 77 aa, Homo sapiens
  misc_feature (3)..(3): Xaa can be any naturally occurring amino acid
DPXSSPFVREPLVGSVRGNVGLKAPRRVPTGALPSGAVRRGLLFSRMVEPLAACTLHLEKPQTLNPACDSRLNSAKL

SEQ ID NO: 990406 - protein, 121 aa, Homo sapiens
YRILCHPPSCACCFKDTCTRMFIVALLTIAKTWNQPKCPSMIDWIKKLWHIYTMEYYAAIKNDEFMSFVGTWMKLETIILSKLSQGQKNKKLNALIHRWELNNENTWIQGGEHHATHRGLS

SEQ ID NO: 990407 - protein, 49 aa, Homo sapiens
LDASWSSSRICMRSLNLTSEIFEKEKGAVVGELRRHLDSAGSIAWDELM

SEQ ID NO: 990408 - protein, 80 aa, Homo sapiens
MIGVGNTEEEKRTRGEKRASVGIFSDNLREFKGIAKRLTRTDKVRATRFYVLKRLLGELYGVMSLCIQYLSCKSEIDVGV

SEQ ID NO: 990409 - protein, 69 aa, Homo sapiens
NHAVWDRYYSKPKPPKKIHSNIGINDIDILHQYSCINSSTSSSSYTIQKYMLIVYYIADFQSGVDASVI

SEQ ID NO: 990410 - protein, 74 aa, Homo sapiens
GERRKGGMQRSPPRMMSDSCRWRERCPIPEAESQKKKKKPEFPIGGLLVFVYHFWKPEIGTKGCIINFYAHWVD

SEQ ID NO: 990411 - protein, 53 aa, Homo sapiens
VEHDLVKVAMRGHVGVHGGLSHCSRPQELSSVLVDAMNSYYHALGSGRSKLSR

SEQ ID NO: 990412 - protein, 51 aa, Homo sapiens
TFPQERKASYMAAQEKNEEEQKAETLINPSDLMRFIHYHRNRTGPFDSITS

SEQ ID NO: 990413 - protein, 71 aa, Homo sapiens
GLPFLPSSLLSFHFYFLGQELLLEAHRSVVDEEFPILVSESSTLDFTIKPNWIRIPNLELKRLQLTYGYLN

SEQ ID NO: 990414 - protein, 74 aa, Homo sapiens
VLVWIGQRHLQDLGPALDSLTAPKPTKSNAALSQQYQTIGVGAQILRDLGVEKMKLLSSPLRFNALSGFNLEVV

SEQ ID NO: 990415 - protein, 73 aa, Homo sapiens
KIHTASLGFSGPKIQRWSKKALACARHSLIIWSEGVASKPFDPVPGTKKAAVMTASFIVSLQPCRTVSFSLFS

SEQ ID NO: 990416 - protein, 44 aa, Homo sapiens
ATEKNEEEQKAETLINPSDLMRFIHYHRNRTGPFDSITSPPVEK

SEQ ID NO: 990417 - protein, 69 aa, Homo sapiens
ADLLGIAWWLAITKLASDLPFLSSFTVVTLTLRTGSLELDKRMGMIMPVARVCFAVLAEIGIVAHCALV

SEQ ID NO: 990418 - protein, 37 aa, Homo sapiens
VLKNADDDRRSRLGARQQRGERLLVLDLLQRAVGSPR

SEQ ID NO: 990419 - protein, 51 aa, Homo sapiens
  misc_feature (5)..(5): Xaa can be any naturally occurring amino acid
PSPGXWLTAPRRRRDGWAEEPAPLDALPVAGLRIGVPRGLLFTETEPIVAE

SEQ ID NO: 990420 - protein, 41 aa, Homo sapiens
MLVPIVDWYDGATHLNVLALPEGNVSSSIEFYNLIESTSSI

SEQ ID NO: 990421 - protein, 51 aa, Homo sapiens
MNALWVLSSHTVSSFSVLFFFKPSVHVTVECTSSRQNAKVKERRRGILLDV

SEQ ID NO: 990422 - protein, 35 aa, Homo sapiens
NYMQGSDRTHKIHFPSILVAFMLTAAWFHDSQMAT

SEQ ID NO: 990423 - protein, 35 aa, Homo sapiens
VDIKERCARCLAPSVYWHPDDWCFLGVFACKHFLD

SEQ ID NO: 990424 - protein, 37 aa, Homo sapiens
RTVFPKFSGSRDMDWFAEMQQEAAAPSHAENSVTSQV

SEQ ID NO: 990425 - protein, 40 aa, Homo sapiens
SRSVPGSWGMSKKLRATGHYVCASPELCAFTIRKKEYLQE

SEQ ID NO: 990426 - protein, 72 aa, Homo sapiens
MSSYPIWKPVEKYRVEKYLGKRTLVKSTLVKSTHGRSTLGKSTLGKSSLRKSDLGKSTLVKSALEKSSLWKS

SEQ ID NO: 990427 - protein, 36 aa, Homo sapiens
LLRLSVPVLLIGFDRDGDVDTCKVLWCFPIWFDPVE

SEQ ID NO: 990428 - protein, 99 aa, Homo sapiens
RASVLRSSDCTVLWFFVMDSTLVVNEDQAIEEVDIEKYTCVVIYDEYDWGFEHQLVEKDDLLLSVPPPLFPDIFCDSSISHFPCVNPSMDASAFDHSYN

SEQ ID NO: 990429 - protein, 75 aa, Homo sapiens
MRRLVSRGFKTRTIFLLIDGCRRCCCCCYCYMCVCMCVRGCTRTVCVCVCVRVCGAEEVEVAWPSLLGVALMNSL

SEQ ID NO: 990430 - protein, 59 aa, Homo sapiens
AVRRRVGDPGTVCRSRSTTGQPGRGHACCPAPPRSRCVAVPARSTERNASRDLDVPVRK

SEQ ID NO: 990431 - protein, 149 aa, Homo sapiens
LHRLTNLCCTVNDEYATLAYLFHSSQMHCFPAIFLTTACRRLQGQTSGSHSKQSSLNEQPQPNTMSAFEQFHSHYAAIFLMLLYSSSMLPQASQCFTCSFTMKLYIVLLSKIHLPQRYRCTTPFKMFHGRLQWLKPVISALSDAAVGGL

SEQ ID NO: 990432 - protein, 37 aa, Homo sapiens
RGYYDKRLLEVTCRMCAWVNELFYETGLTNPDIAQKL

SEQ ID NO: 990433 - protein, 41 aa, Homo sapiens
PTSREGQCAIRSLAREALSDMLCDSDHMNDGSQTKRNDVDR

SEQ ID NO: 990434 - protein, 37 aa, Homo sapiens
RCWTSQRRPRTSSAGHSSSAKVRSRSAISFIARADSE

SEQ ID NO: 990435 - protein, 70 aa, Homo sapiens
EDVAMSLGTFRSYSPSTRGITFSFLLDGRKLLVLGRELKASVIFPAALSVTSLVTLLSTAVRVSPGGLLR

SEQ ID NO: 990436 - protein, 54 aa, Homo sapiens
MCPFLANSWCYTLTNVFTWVLALTLCLHQDLLNCMRCIGLSTEVAEVDRGFIDL

SEQ ID NO: 990437 - protein, 125 aa, Homo sapiens
YPHTGTRVACVVHLLVASLVLNGFLSTWDPPETSFSAAEDGRSAVTKVLKHRIRTEAMMSPSLLPLGASTVLRSQTKICGWSGLRRERSYSLVIARTRIGQVPKEAYNSCITRKRKPLPAGGICS

SEQ ID NO: 990438 - protein, 69 aa, Homo sapiens
MSIRSTHGVSKRELTGGQYNLPVEQKGKSSLDLDFQYEYSTVKAGPHDPSDLLGFKQEVSEQLPQGLLA

SEQ ID NO: 990439 - protein, 50 aa, Homo sapiens
MCRPIYRYEWGNWSHVHSLPSLVLRVQLELSFTLSPEIAKLGFTKRHTQG

SEQ ID NO: 990440 - protein, 127 aa, Homo sapiens
PSAVGHAWGSALVLYLPLPASATTQLALDAGAPVGSAHPGKRTGPEPHSLSCVLFDKSLNLFELQCSPLQNSEDDSICFMRLLWLSKALTHTESLAHDKGLRSASCHWHSWNYGRGPQEQQQGGLED

SEQ ID NO: 990441 - protein, 55 aa, Homo sapiens
  misc_feature (53)..(53): Xaa can be any naturally occurring amino acid
TYHRINILFCPAARPPFQENRISILCSICLININRQSIVPTRVHALIGVSCAXVQ

SEQ ID NO: 990442 - protein, 48 aa, Homo sapiens
GPLVYTDFRGTWRRDVCELFYRKLTGLPRDQSPGLFMRYPGVIFISHY

SEQ ID NO: 990443 - protein, 59 aa, Homo sapiens
RKLEKRNEGFPHAQRTLGFSCGPFTQGLDAYRLQVPNVCLQSNTIVPGVVLVVILSFLN

SEQ ID NO: 990444 - protein, 82 aa, Homo sapiens
ARAWPYGIARYTAHLCRRRGAALRGLPMSRIWESGLQAARARNLPSSANTSTVSPGRALPFRRPTEPAKIQGWRRSRERSLP

SEQ ID NO: 990445 - protein, 50 aa, Homo sapiens
MASAMFFSLSLLACGALLWGTTGLSSLFISSSNLVSILGKVIQLSCLFKQ

SEQ ID NO: 990446 - protein, 36 aa, Homo sapiens
HGQSRILVAGWQSILKNPKFEQPGQTIKVAANQVWF

SEQ ID NO: 990447 - protein, 38 aa, Homo sapiens
MVCTIGPRVEPYTGKVKKHSSFYGLNCDSQKFEHMNEM

SEQ ID NO: 990448 - protein, 80 aa, Homo sapiens
MMAQDVPRHGRRHQVVNGKSSGDRSRIVVDDTSRVFACTSRIRVCLDKSAASGASQARYCSSGVRANACSSVVPGRAITT

SEQ ID NO: 990449 - protein, 200 aa, Homo sapiens
LLRLTDPDPHTYKRSYLLSHWKTHLLIPVPDGKLLQTLTDADPHSLYQNSYPPLDIEQTPESSDSSYQSGNSLSTWTSPRILTTRCQYLTSFRHGQTQILIPGPDPTSSDTDGHRSSYLYPASLPQTLEDSGLHSCARCYLLRHWKPKGLKPESKLTILKHWKTQILISVPGATSSDMEDPYPHTCARCYLLRHGKNQIL

SEQ ID NO: 990450 - protein, 39 aa, Homo sapiens
MQQQVCKVHSILKCCGDRTRLQGFRRDLSVGISTVLKLP

SEQ ID NO: 990451 - protein, 65 aa, Homo sapiens
SIGSPESWMLYASYVNRVHVFTTLIRDDVVLTNLPYTFFTNLLKTMEHAEKLTNAAELKRVGYIF

SEQ ID NO: 990452 - protein, 128 aa, Homo sapiens
PPRRKLIQYTLQNRFLTHSGKESEVAIQGSHERPEYTICILSRWGPGVWRCIPCAPNLAQDVGHLSNTLINPYLETVFKHHAELIQNRIQFHLQLLQTVCSFKVQLLASHGLKHFLRLDPQLLQRCHQ

SEQ ID NO: 990453 - protein, 36 aa, Homo sapiens
GTSQGLLCELRPCQKHYVCELSPPCQKALLCELRPL

SEQ ID NO: 990454 - protein, 159 aa, Homo sapiens
MPVLGLLLPAHFCMRNCISLLSLTGLRTYMSSRPTPILWKRVSGPMVLLTTRYRGSAWMPRRFKCCRVRQASSMLRLAFREASGSRSFSGTLKKTTPSSGEIRFFTQSLELLEPWDCSSSSSANLRCSSPLMPGRLSDPMCVSSTELNAVKCRTGSKKD

SEQ ID NO: 990455 - protein, 45 aa, Homo sapiens
PEPPTREAQGQGSGFLISSDGYIVTNNHLVQGARGSGTVDRVTVT

SEQ ID NO: 990456 - protein, 53 aa, Homo sapiens
IHFTRLARKGLDIALGKPVFVVEIDPARNRVVLGEQQHLQRRGMLVKNINLQK

SEQ ID NO: 990457 - protein, 39 aa, Homo sapiens
TAVRYKVKSGTSSKSSADIRYKFKDNFFSKANSSFVRVG

SEQ ID NO: 990458 - protein, 109 aa, Homo sapiens
AEVIQRIPQEQGSVGSSDDGVVRSDVFKLKEFWSSQEEIVELEGVQGGGGEPVLGVLLLGNPLWASLMAQLGGARTRSLKGSSSSLKPSMYWGMGGLILGEELAEAGPG

SEQ ID NO: 990459 - protein, 47 aa, Homo sapiens
DRVLRGVMAGRMHGACGNREKLGSEVGADAVGLDRGDNTFASCRASR

SEQ ID NO: 990460 - protein, 91 aa, Homo sapiens
VAKTVGSNKGAIIVTHGWAVFVKATRDSSSPCVMLEEETVHIHSSLAVVEVDACCHPMRSATWSKMQQNGYENPTYKFFEQIQNYNPGKVF

SEQ ID NO: 990461 - protein, 55 aa, Homo sapiens
RYEPGENGVLTVRWEEEDVTAVWIGTLFGQSRCRNNTFPYSPGSKSVGLVGGDEL

SEQ ID NO: 990462 - protein, 36 aa, Homo sapiens
RARYLSLTVDVCLNLSEYRIRISRKRIRLVVPDDVD

SEQ ID NO: 990463 - protein, 138 aa, Homo sapiens
  misc_feature (26)..(26): Xaa can be any naturally occurring amino acid
TFHRPQVKDIPTEWEKIFTNYLFDQXLITRRYKRSNDYRKEANNPIKTRAKDLDRHFSKEETQMAIRHMKRCSTPLTNREMQIKTTLRYHHTPVKIPYMQKRGNKKCWQVCREKGTFVPHRVKRHAHRMGENIYKLSI

SEQ ID NO: 990464 - protein, 42 aa, Homo sapiens
RGFLFATIGGRWSAWRLKTAALTLKVAGQLIPWFLFYLFGLI

SEQ ID NO: 990465 - protein, 56 aa, Homo sapiens
DRVVRALRSGVNLRSRSDSSSRTAGIQLSATCRLYAALEGAVEPAEDVNPRKTAEC

SEQ ID NO: 990466 - protein, 57 aa, Homo sapiens
  misc_feature (38)..(38): Xaa can be any naturally occurring amino acid
  misc_feature (46)..(46): Xaa can be any naturally occurring amino acid
TVLHWGLAFSGVASSFTGDLAFSGGLCFFLHWGLGLLXGTLLPSPXVENVRGLRLES

SEQ ID NO: 990467 - protein, 61 aa, Homo sapiens
RSAETAARLYFDARTLEEEQVVNILYLALGTLKWVDPNNAANIRHAPLILVPVALERGNAA

SEQ ID NO: 990468 - protein, 78 aa, Homo sapiens
HRPRTHRSLPSGRELTRAQDAQITPVRPGADTGPGRTDHSLSGRELTRSQDGQITLVQPKPSGMDGTCSEPVSGSDRT

SEQ ID NO: 990469 - protein, 74 aa, Homo sapiens
IPLTPQQSQALGIPLTPEQAQALGIPLTPQQAQALGVPLTPQQAQALGIPLTPQQAQALGVSLTPEQAQASGVP

SEQ ID NO: 990470 - protein, 40 aa, Homo sapiens
IRGEDEGKRVVLVKDDPCSDRKRSPYTHTCLSLFPPPFPL

SEQ ID NO: 990471 - protein, 127 aa, Homo sapiens
DLEDLRSHPPTVLFEARAPSPPYMRDDAGENREVLGLGLRHFVPSPLVGLVQRSNVEDALSTNKPESGNSVNRLSNQQNEANCIKHGTPDEDKERTAAFPGQYNGLKAKRDKVTADCDSCEEGWVES

SEQ ID NO: 990472 - protein, 37 aa, Homo sapiens
  misc_feature (12)..(12): Xaa can be any naturally occurring amino acid
AEKGIIRQEREXREKPGKGRSDETVRDKDDTHVTEDI

SEQ ID NO: 990473 - protein, 50 aa, Homo sapiens
TFAQGTKGILKLLRNAGVLSDVLKVDCACVVNANMKRRYYGCVLLSARYS

SEQ ID NO: 990474 - protein, 41 aa, Homo sapiens
TGGHHIDANLVRIPIGIGTTARTPGLKRLQLSSRVARIQER

SEQ ID NO: 990475 - protein, 66 aa, Homo sapiens
MCAVIMMMLIEHAVSTQKWLDTQGVVAHFQARHYNKCVYANTPHDEFLCMTHCISCESMSTAEPYV

SEQ ID NO: 990476 - protein, 138 aa, Homo sapiens
LAGSSLSTHPSQGVVIVQPHLGNHTSPTDLCNSPIRRVPYMRPCQQGLGSDTQSYVESRQSSHLGTCRDPGVLNTPAPGFPERWEIHLYISLGRELNPGSQAATFCGPHFHSTSQVKTDWRGIPASQWQWIRVHQRQL

SEQ ID NO: 990477 - protein, 68 aa, Homo sapiens
TEATKDTHMSSDYRKMYDDKKLGQVTYVLPERHGDSDRTPRRQTSANPPTSQHPEEMEGRQENEEPTR

SEQ ID NO: 990478 - protein, 78 aa, Homo sapiens
  misc_feature (14)..(14): Xaa can be any naturally occurring amino acid
RILSGSCDVQVAKXHKDYVPGHFPTKTPDDEGQALTGHFFGSGRTSGPQKASCDFSCASSSFLRSSSCADISPSVGNS

SEQ ID NO: 990479 - protein, 123 aa, Homo sapiens
ILSHPPSSRHRSYFFFFHLSHFFLLRYFYYFVFNPKLDMSGVCSAPTDIRVILLRISRIHIVTFFSQWATHKLYPSELVNSAGQQHAVVMQVGTLLTACLFGDVCASEDEFRKHPSSPGVRIC

SEQ ID NO: 990480 - protein, 156 aa, Homo sapiens
ACEKCSEGFDHKILIVRLKNVFDMTLLQYWHLQATALYNQVIWNLKVTSVSMVRSALRALDVSLALRYYDSICRKCQCHGHVDPVKTPKFVKPESGECINCLHNTTGFWCENCLEGYVHDLEGNCIKKEVILPTPEGSTILVSNASLTTSVPTPVI

SEQ ID NO: 990481 - protein, 83 aa, Homo sapiens
  misc_feature (31)..(31): Xaa can be any naturally occurring amino acid
DKDRVIPFVRSDQFIPSSGTVLVFSFFCNPXLCPDTPNQLKINALPPASRSLTNVTAYPAKNLAQPRTLKYDLGRTHSPCKIP

SEQ ID NO: 990482 - protein, 38 aa, Homo sapiens
VIQRIRVIPFVKLSTKRSLFPEPALPWLPSRSPLASLA

SEQ ID NO: 990483 - protein, 53 aa, Homo sapiens
SKSGAYLIPLLERLDLKKENIQAMVIVPTKELALQVSRNLHSGPAKHMGTGPK

SEQ ID NO: 990484 - protein, 112 aa, Homo sapiens
SSSQCVDVVMLLGSLRMRGHFPESHGSHADLYFYEVLKRGKRRAGAAEKAVTKEEFQGEWTAPAPEFTATQPEVADWSEGVQVPSVPIQQFPTEDWSAQPATEDWSAAPTAQ

SEQ ID NO: 990485 - protein, 166 aa, Homo sapiens
GYKIFLATIGGECVRSVLLAAVVNSSAGTACFSLSAACRLYAALRGGMEPMQIDVDPQEEPQNAPDVNYVVENPSLDLEQYAASYSGLMRIERLQSIADHCPTLRVQALKMALSFVQRPFTVYMYEEIHPKLSEATRELQNAPDAIPESGVQPPALDTAWVARTRK

SEQ ID NO: 990486 - protein, 59 aa, Homo sapiens
PIILITICHIHGAELEHLMVAKVRSDFVDAIVSPMVIAPQPSITHKPHSGNGDAETYRP

SEQ ID NO: 990487 - protein, 57 aa, Homo sapiens
APRSYRLLEEHDFREYEVAVKASDVFLAVAAYQELASQVDCPLHLGITEAGGLIGGT

SEQ ID NO: 990488 - protein, 58 aa, Homo sapiens
SHGRYMNVWVTLGLGLVTFGPEIHENYRIKGIEERSTGAGGVGILDGPSQNMEAIASA

SEQ ID NO: 990489 - protein, 48 aa, Homo sapiens
QRFAGGVVYYFLGGQITLVPYQQLVDICTGHNDLFPGSHWFNSYGNGL

SEQ ID NO: 990490 - protein, 131 aa, Homo sapiens
MDNEWVATQLVVIIVCNEIKASVACAAAVLLTRYDALAIMSHDAFTVIKNCNTSGIQTEWSPPLTMLFLCATKFSASAPSSSTDITSFLSSDPSSLPKVPVTSSEAKTQGSGPAVTATKKATTSLGLCIEI

SEQ ID NO: 990491 - protein, 50 aa, Homo sapiens
LEDPGRNGERIHGLLEAGLASLVSEGNIHADKIREKADSMERRHKKNQDA

SEQ ID NO: 990492 - protein, 112 aa, Homo sapiens
SGRRGDTPCPDDAERPGNPRVSAVLCYFEGGLIGHGGGRTIVSEYSSIAVPKQRKVRGGHSMADKSLNKTELVAKIAASTGQSQATVDAVLGGLFDTLAESVGSGTKVSIPG

SEQ ID NO: 990493 - protein, 32 aa, Homo sapiens
MVQGGPRPPQGPGVLLSIAHGPLHLGQVSPGD

SEQ ID NO: 990494 - protein, 46 aa, Homo sapiens
  misc_feature (1)..(1): Xaa can be any naturally occurring amino acid
XSTGSVQIPGDSMFEYIGLPQKRTRTDIGIISNQMLLVSHRLISHG

SEQ ID NO: 990495 - protein, 34 aa, Homo sapiens
SGEDKGPEGDDAKLEAELSRWRNGENVPETERLA

SEQ ID NO: 990496 - protein, 43 aa, Homo sapiens
LTEEGQPKLSENQTTVSLTQSPSELPWIKSAATVQFLLYYELI

SEQ ID NO: 990497 - protein, 63 aa, Homo sapiens
MKRRSRARRLRAVIYERVYWAQHLSYWGLLHSALDMLNVGTLTETHDFFQDMGYDGPYRAVRT

SEQ ID NO: 990498 - protein, 66 aa, Homo sapiens
  misc_feature (51)..(51): Xaa can be any naturally occurring amino acid
AEFMVIQTYLYDVSMIKGALTVASSCATLYGKAGTQCFRDSSPSDEVADHXYQPTIYHFRVVFAGA

SEQ ID NO: 990499 - protein, 44 aa, Homo sapiens
MAEHGYQPTIYHFRVVSGGAGVELSLFLVQPLNQVNAQALAIYI

SEQ ID NO: 990500 - protein, 36 aa, Homo sapiens
VFVLEGLFLRVGVLRLWRVEGRLQYPMEKGPRIAAG

SEQ ID NO: 990501 - protein, 48 aa, Homo sapiens
SRNLYNKVEMGQKRASEDTTSVFIIQEIFSQDQKKMPGMIYNPSLVEK

SEQ ID NO: 990502 - protein, 50 aa, Homo sapiens
EYEYVHIFEGYETIWKMDSYAFKQRIRKIEKKKLNGRIIRIARKEESMLI

SEQ ID NO: 990503 - protein, 62 aa, Homo sapiens
YFPQGESLRKEPSREDRCVECDTYMCISHSPSVTLLSGYIPGNFNDTVSWPSLVLPCLGFRN

SEQ ID NO: 990504 - protein, 108 aa, Homo sapiens
SKYKSGHGVGWSSPAELSSMSLSLCTGHHLFQPSVIYGLEQEEESRAGRRAVLQEWRLKSKGPALRQDRSGSRASNETQTARSHKGGQLCDRTQCGEAFSEHSGLSTH

SEQ ID NO: 990505 - protein, 50 aa, Homo sapiens
IETMEPRAMPGVPCWRVGHAVGGRAVHVGLRAGHGVELSGYSGGNELESE

SEQ ID NO: 990506 - protein, 48 aa, Homo sapiens
MPKWIEYLVHPGEVHEVMSLNFWQQTPQKESKFSIKFLRKSFLYSGKR

SEQ ID NO: 990507 - protein, 104 aa, Homo sapiens
TFHRGSKVINQGGHTKQQMFSVHKTAFYWKKMPCRTSVATEEKSDTWLQSFKVQDRLTLLLRLNAAGDCKLKPVLICHSKNPRLLRIMLNLLCLCPRNGKTKPK

SEQ ID NO: 990508 - protein, 57 aa, Homo sapiens
QWAGLSCIPCSILALQAPSVCLETSCSTSSRGRVPGDPLSCPSDVCCRPSRGVPELE

SEQ ID NO: 990509 - protein, 43 aa, Homo sapiens
SDSILLSCTAGSLGVSETAAALRRRQSAWASTSSQGRALSASR

SEQ ID NO: 990510 - protein, 44 aa, Homo sapiens
MCVHAKQSCCRSWPPLIIVPGAVVGRLPGIGQAEAISLARLQAL

SEQ ID NO: 990511 - protein, 39 aa, Homo sapiens
TSRQPVVVCSGQLPETGGANSPGQDVASARKSCTLAAPI

SEQ ID NO: 990512 - protein, 69 aa, Homo sapiens
SRYPLCNLETVYESFEYYSMKIVLGDMNAKVGKERMYRPNLGIHSLHQVSNDNGIRLIEFALAKNLYIK

SEQ ID NO: 990513 - protein, 30 aa, Homo sapiens
MIEYRVEILCHYAANPSLSQLGLKCPGGKV

SEQ ID NO: 990514 - protein, 54 aa, Homo sapiens
REALDQLRELCHQWLQREGTLKEQILELLVLEQVPRCTACEAPDMGGIAEPMRT

SEQ ID NO: 990515 - protein, 67 aa, Homo sapiens
PIPTLYEATLHLYRAYRTSRSDSRHFYTACYLQSSVLKRTERCGLRIDNMDAIVVAEAGLEDHAQND

SEQ ID NO: 990516 - protein, 30 aa, Homo sapiens
MYVQGGTSLIQKSKIGTVPKSKINRSRCAR

SEQ ID NO: 990517 - protein, 81 aa, Homo sapiens
IDKFHMLTISISVKKQLTEESSRDLVKPGGRIVLRQLTPPSNMFSLYLPLPTFGLGSIWICSNNDFISLLVMDLAHKILLL

SEQ ID NO: 990518 - protein, 49 aa, Homo sapiens
MDSLPTDNYVPFLVTYFTTLRWTYLSDYFLTRLNLLRPPVCYHTPGVNN

SEQ ID NO: 990519 - protein, 104 aa, Homo sapiens
  misc_feature (2)..(2): Xaa can be any naturally occurring amino acid
MXQIKNLKLKMILVSVHLSAAYNRVPETGKFTNKRNLFLTVMKAERFHVENLISSENFLSGGDSLKSPEEVQDVNDEGTECANVLVQVIWSSYKATSSTHMITH

SEQ ID NO: 990520 - protein, 45 aa, Homo sapiens
GRRWMSTTMSFPFSRKFTQKWDLPGPAPDRVLGPACNLGSVLPLL

SEQ ID NO: 990521 - protein, 381 aa, Homo sapiens
MPHRTHLNPLVNYNMYSPKRNSIFGHLRTQNPMIRRRRQNKKHTHTTTQTKQREKRAQPNHNKRTHKDTTNEESARRKDPKREKKKQGEKKQNTHTHTQEERKQETREQTRQKKKHNRETKKQTPRRKRTTTNERATREAKKEGEKTTNATNNKKATQDTHDRKHHTREKQTQQQEEGTRSTRDKQREHKTDRRKTDTRRTQNTAEEDKERKKEENKRDNRNELKDKEEKPRTDKRREKENSNGKETKKKAEEHKTNNEERKSKDRKSKRKKERTRSSTDKQQEDRKESSSRTPAKEEKKEHEKEREEGSPRVARNQEEAAKHTKRGQREREGKERARRTQQQRRSSRKSSKQQKATEEGDDEREKAKREPREIARRAERK

SEQ ID NO: 990522 - protein, 33 aa, Homo sapiens
TARPDIHCTPSLPKYRDYRHEPVCPANSSDVRS

SEQ ID NO: 990523 - protein, 70 aa, Homo sapiens
RSPDLLTGLRRRSPGSLLPQLGIAGGGSSSAIAELVAPLSSRWITGTISRHRGMRLKGVDVSIALDQHGE

SEQ ID NO: 990524 - protein, 113 aa, Homo sapiens
MWFPPIVASGTSGVDSILGSDIPKSVEDKQVGPRMRTNGTFVLSHQDLAFNAKVHCRRTRFVALLSIVCSTKSANQVMANGATETGNSLRATMTTDGTLRKKLSFRSRKGKEE

SEQ ID NO: 990525 - protein, 183 aa, Homo sapiens
MDTKNYKLTQKQTDTENPQRKKRKRQQTTHQPQRQKNTRTSSNHTKERTEKTTQKTQPNTKRPKNRDTKQREHDAAQQHKDYENHTTIKDTHAETPQERIINKNNQEVSATPNGAKTKRPRRPRTNNHRSGKHRPKNDQRKQQTTTRPRTTDHITQTTQPKRNTQPQHNYKKDRKQNEPHKQN

SEQ ID NO: 990526 - protein, 522 aa, Homo sapiens
AELAVSRDCATALQPGRQSKTLSPRLKARTSGREPGRRKLCSEPRLRHCNSSLERQKQDICTQKQTQQTKQKTPNSTLQWTQKTNTTQHTTHTDTTRTMLQQIGNNNTKRHTETHPTSHHTYTHTYNKNIILIKLRTEQNITEAPRHDNTNSQNKKNNNHRERDRDNRRHPSEQNTTKRQTTTAAGDDSQAEPPHDDAHRASNTQRAEHTARTIPKPRDSASTVARTSEQQGDGTDNETHKTNLHNKDSNTRGQVETQSSSSELLANSPQTTRHIRNNQHASREQTPTTSGRHYNTTRQRNPHHRAQPTTDTTKYTSARDTTERHTHTPAQHRPQPTNTKEPRPNPTPQNAYNSSNTTTEHAGRRHTPQTTTHQPTPPHRSPPKRTATTTPTTSRTTTPHNHQNPTQRTKRVTDLDTFERCPHNRQTASTLSKPTPSTQRECISLTRYVLRTELARRSDGQHYDRETKRGEQAEPAGGIRAAARSCSDDGRTHTRAAHAQRPLHETTSAQRPPSRDQPTREP

SEQ ID NO: 990527 - protein, 138 aa, Homo sapiens
MVPLYLVRARNTVQHRTTRHLVHVTYFAMHYFKRSNPTSGSTATSQYRPADRSHCSKPPSILTRLRPNKQHNTTTVRAPPRTTQQRGEHPERNRKHAHTRQTGGSTKADELHTRGQPNDSHNATQQTPNRTPPQDATS

SEQ ID NO: 990528 - protein, 290 aa, Homo sapiens
EIQETNMPQVSRGSETPEARKEIKVVKRGSSQNLVVLELCKMPLTEMRGPIYYDDQGTSGRGRTDFTSISPFQPPDLLNWKHSETLTSCSWYQRALFVHNCVESVGTPVYIQTDLISGTALGLISRLKAICGQETVQSTHTERDVRDMWWNAWKLSLKTRIVAPKALQTQKDELIALIWAKNSRQGKEECSDLQLTRGCQTNTSKGRRSIYRNRDVNPGDGHKGPEDEHRTKGGEVTQSVGRGTRGKGRQHKEARRHRRQEGRRKQTAKTRTPPTQRRRRGHKEGSATDG

SEQ ID NO: 990529 - protein, 135 aa, Homo sapiens
MLRPEKNDEARKTREGNGEHEAERATRESKRDNHRRNRKERENEHEQNTERRRRQANKAKSKQDKGAGGENVKKQQKSEKKRREKDREEENEHQRGADYNEEEETKKVDKESRREKQQKRTRTGPGGKDEEARKE

SEQ ID NO: 990530 - protein, 63 aa, Homo sapiens
MSGPQKKNSAEQKEKAAGGTPPQKENPPGGNQQAFRHTSKEDIKETKGDSPRGGNKDQIKIRR

SEQ ID NO: 990531 - protein, 142 aa, Homo sapiens
MCVPVPESISQWGVSRSRQIDRCFAPSTREALHVPFRIRWGAYSELLGRDQSNQLAGSQNHVDKECALGTHPQKQTVRARPPNLNKWCRAQGRNGRVQERTEGGPKTRAGWAQRRQYERATPAEGGGPTHKRATGHHWVAPS

SEQ ID NO: 990532 - protein, 105 aa, Homo sapiens
  misc_feature (11)..(11): Xaa can be any naturally occurring amino acid
MTHAYEARGHXGVNEKGNKGDHKSTDESKRGVDTRKKSAATRVLEHHKRVSKRDTRKDEAINIHRRRYTGERTTNGQTHDISRATMMGIENTNGSDGTDRSTEAN

SEQ ID NO: 990533 - protein, 126 aa, Homo sapiens
MKSIILYVLSLLLILEKQAAVMGQQGEINQANSQADLPNFHMDKRASTILDNKINNILNPKGRFSYSTHISCRHQLTHDWTRNKITQYEVRMPYIKANNNHNTQLRSEVPPTGSNLYNHSKGQQHQ

SEQ ID NO: 990534 - protein, 106 aa, Homo sapiens
MSRNRRRRHEHIFTSADHNHRYPHRRQSIKLTRHTPRKQYEMICCSALSPRIHLSCFTVGGHDMGSSLANSSLDIVHTRHVLRCKPTSHYVLSIGAVFAIIGGFIH

SEQ ID NO: 990535 - protein, 187 aa, Homo sapiens
MAPGLRPGESQHFGEPEVAGDHLEVQESEASLELDMGGNPGSTKNTELGRVWVACVPVAGEAEAGEMAWNPGRREVGTWGRDWRPLGLQAIGHKSETPSRKKQNKRKEKQKNHRGAAAVRRPTEKKHVLKTPQTNAVGDGAGEPKRERTRRKQWVTKKEVTTQGEHSGKSKQSGRREQQAHQKKTAR

SEQ ID NO: 990536 - protein, 101 aa, Homo sapiens
MPEGRRLRETQGTETEERAEGDGRTRADCVGVKRTPVRRKAESRAQSRWHTQADLWGTKLKRPTNRSNPLRGPKSSARNAIGNRRDPQSRTYCQSKSESAH

SEQ ID NO: 990537 - protein, 285 aa, Homo sapiens
MCIFSLPDVHETLLYDLGRTNRGTSLNRYTNVMAAQGIARKHDTKDTPHDRCCPKKAFHDGIRPMYELRNLFLRRIYHEAFTTRSLRPLTRPNKEKGNEAHQDGITIIVNSSYDMVAFLKTVCRITRIVGVCNTVDDSSDVYIAESTEDSMNVKRVLYDIITGGLYCNLPSEAATVTCRRSSLSSNRRGATLRDSTRGCRPQGILGNLRTCMARFPHDGVVRQVTLHDVRESVRLNAAERVVQGRIGGTTGGARKQKEREPANHGGAARKEQERPEAKREERDER

SEQ ID NO: 990538 - protein, 121 aa, Homo sapiens
MSWIRMKHSGCLHDVTRGPDVLLRQFLRYVRPKSVLSRCCAGIKEKPGTIYEDKVIVSLAVYLDSPEIIIVHLVRRRGLEQYTCDMDMTEYGRVVYSDYCLDQNPIIDVYYRRENVFADNH

SEQ ID NO: 990539 - protein, 456 aa, Homo sapiens
VLVACCLPDVQLNGQMRVHIWLFAIKQRLPSHVLLVCSLPVNPMHFGMCLTAGMITHQCQVVFRDHACANHCANNPLSLTKNYNNISLGRGGRRRLVNFSMTTLQVHRLDSVTDDLNILTPHGTGTKCLAKMDGLDRTHLPCLAIDATMAHCDAHTSDDGPTTRTLILPTYTTHTEYKPHTQDYTSFCTALYSPSPHSNGPQEQLAGVTSTILHNGVTLWNNPRPTDTYVFPPNFWFHILRLLTAWFGHSFLSIERLWTPHYTVTCQTLLCKLEPFLNFLLYLFSPTPLTRNSLRPVLILRITLHPPPSPTIGSTNGIQPLSATELNSNGQHVHTHALINTLLIAVGLDHSSPNTHDIDLKPAPVSNTGTLRHNRRSPELAIRPTTHHLRKTSRATTGPQPDYAPDHHTHTPPTNLPTPQHQNTIHPTPHNHPTTTTHPRPQPPPTPHPPSRIPRR

SEQ ID NO: 990540 - protein, 170 aa, Homo sapiens
VKQSSSISLQSGWDCLRGHHTLANLVVFCLFSVLGFRRAQWLRPAIPALWKAEVGGSPEVGDQPDQHEEIPVSTREKDKQRNKHKNKSVVRGAPRGAPRRKQPSLKRTHLAGEGGTRGPPTTSEKSHNRVAHQQGEAAHKREKHPRGTRDTKSDGGTSLTTKSEKKAPAG

SEQ ID NO: 990541 - protein, 272 aa, Homo sapiens
DCYGVVGTEVTDVSARHSGKLILHLELTCKLSDLVIPGTGARPDLNARSKPSYSQHVITWLVPGSSHLCVSTERVCRETGSERSRTIARASAAPSKRTQYDRRVRKRTRRHTGELSRFSRAEPSLPERHNADEKTRSSTPAKVVRQAERPANGSGIPGARSWEAPPPTKQRAHLKDDQAYTVGNTTAGGNDHRANNGMGKRTRTQEPSAAPHKAGATTPPAPHETGATAHPWRHATAPRHPPWHPARGPQSRPAAPTRRGPPHTPPKTWDAT

SEQ ID NO: 990542 - protein, 308 aa, Homo sapiens
MGNKGVKQTSVPPKKIHPKEKKNKGEANTQMTQNNSLTTVQQQHTVRKPPKYNGVKPPYKTVATAYNNVGPEGKDEGKPEEIRLDKRILQEQFEGTAKHNGGDRTKIYTKGRQHQQRTPVYYNTSQNEELAHRRGQDYTTQVNRTRTKNRGNHCDDTAHRTKHMKQVKTGIKTHTIGEQQLGTSKETIAAGTTHKHTTGRGQRTLIGTGLTTTARKNRDNSAEKEKKARQKKKGGHTNRPEKMNAQGKSSTNRRKKRHHVSWNRGRPRHRTSTRLVQHEKQQPANKAAREARDRTKQSSKQARLTKPE

SEQ ID NO: 990543 - protein, 366 aa, Homo sapiens
TQYRHIHKVCKCMLEKYGLDLITALSPLVSLCQIFSAPFPYRDFFSHQQSIHHDTVFHAPPFMVLNILFAHQQFPLYFNTTTNSSMAVFIMLPSAGSRNSWAHSDTILPWTSRRCWDCRHKLPCLGLNIISRGGFIKPFSVQSNAWCHISPFANVVSLNKNPPQEKQHGITPSNVHLHIEEQTSSITQQHHTSRDTPHKRRPNKKQPWQRDKTKNQGHPQHGHNCPGETHGVAAICMGDTHTLYLRRQSRNLTTSTLSRTHAHSVLIHNYTSIEYLRHLLERPQGTTERSRTNLEHHTPKRNTTTKGPRRHPHKDTVKTQQKKDPPNYYETQRKAPKDGAPHNHRDTTAPRNTNEKKTAAPYGNTH

SEQ ID NO: 990544 - protein, 377 aa, Homo sapiens
GQGNPRKMKPNIIFVLSHAPHLGEASSCDGTKRWITKADYHSELSQLSTRTTGPATILDKKASNKLTSKGRTTIQYTYHVDANDHDQDPKQSDNHDLNDLHKTTKSQTDIQVEDQQLLNNPHRQSETMITSKGYICKGKSNNTITGGNTLTREHNKHPISHDPTGHKAQLDTRKSTMSTLPHTRKRTPPRSTLDLSQRQNLTPYRRQQNRDDKQQRNHKDNNDTHKRKEAPHNENKNSRHNTLPSTTHRAQTQICITHTEHDANQTQEQTDVRTTHKHHRNNRKEKKKTLNNKNTGQNPQHTQSANEHHKPNADDNQRENGETTEESREKTIAREAQAARTTPTKSRSADLNETKHDKNQLSPDEKERSADDGAREE

SEQ ID NO: 990545 - protein, 283 aa, Homo sapiens
ELDHLKLRPIGLDQINTKKTYRNKLPFCHRAAYRKYTLLSVQCTFPQISQQLALIHTISQALLGSLQNIFPYHSRTMHISQNAFNQVSCQIAVNISVYMFTLPIFVHSSIPNSLAIQQAGGVPLLLLGPAQFILQVQQHKKGLVTRVYPLYVKYMGVGEGTTTSYNTRWPGPGYAAWGNLKGCTLMGKFPFLESSPPVYEHRASTGKGPNTAFFDTWNLTTITSLPTAAGTASNGWTIFYSGLQGHLHLALSTRLGKGSAQINRKVVHSQGPIDKPFPAKVAR

SEQ ID NO: 990546 - protein, 88 aa, Homo sapiens
RRPNAPESNTVDPRARSRALMDPSTGAEIGMRRGRGTQEVMLGCQGARRATHDLALCLQTHLAGTPEDRRSTIPKPRHNNISDYSTTL

SEQ ID NO: 990547 - protein, 105 aa, Homo sapiens
MLYRTASDALTTLILPICLVPTPSGTNVGILRDALPANSSEPPGAAGSTCPAREKNASCRDKDVPEPHNLRQGTRRAHVGDSTHTKIHLELKREALTPVTWVHAV

SEQ ID NO: 990548 - protein, 166 aa, Homo sapiens
EHYYHHEIYLLILTFVAAADMLPPIDDDRQDQLGGLHLVEENSSTHYTGSTFELLGYHYLASRLPIIQQTQIGVGCTSSVQLATKVPDDTEVDDLRTTHTQSDSTLGTAELTHVSVICRPKNSSSTHRKSTHRPGHSWHQVDTPCTESKATTITTLGTYNTDFHDD

SEQ ID NO: 990549 - protein, 380 aa, Homo sapiens
LIYILVFLVRDGEFTHSKSIDGLDLLTYVIRPTSALPKLLVIIGHENNCDLAKFILILLTILFLYLKSGNQTTLLDHTESHTKKHTPHTSHNNSKLNTKQWVCGAATEQPSTTKTEYTTHTQKPNKERAARRNPPAVQKENSTRAKPKTGEPTQCADTTTHVDANHGTAAARNEEKTNPATKKKKQIRDRESRGQTHNTEQSQTRNSTHDTPQTSLTKPHKEGRQRYTKPAEGGTTTPRPRRGGMSTQHNATRVDEVDRDSGSRRHARQEGGTTHTRRKTQRTNATSETNPTEPGIPEGNTRPSRVTPTPETAQAKQGGSREITRTHSGHTHETHTKNEDANRLTRPRTTQQHASENALGRPGNRQNTTYQQKDKINKKT

SEQ ID NO: 990550 - protein, 275 aa, Homo sapiens
MNPATWQVSSDAADHAIRTSSLGDSCNDIHSQPNTQQTEHTTPTQLLLAHTAPTCHTPTLYTPRKPPHSPPPTYTPTPPHHSLPPHSPPALTSAPPPHPTNPTHGPPPHSTPTTPHAPQRPHDQRTQPHGKPPRNPLPPPHTPPLSSRTPPLTPPTHSTRSPPVRARTRHHTSQNTQPPTDPTPLRPLPRPPPTQTPPTHTYTIATLAHTPQQSNTRGHDNFSSHSDNPETHHTLSRPFPNNKHNPAVHTASLSRTHQHASNDRNTPALSTNDPP

SEQ ID NO: 990551 - protein, 119 aa, Homo sapiens
MWELFIPRVLLLQSAVYTLSQLVSEPSEGGYHIEISHVIVDYTVPVLCLSELKPCVSDVQLILTKKAATRPEDTPKKGTPERTERIIGADSPSQCGSGSRRTPTRRAHRPIGIDALNND

SEQ ID NO: 990552 - protein, 270 aa, Homo sapiens
MQVAVVPNSSHYFTEGLRESDRHYWSTENHELRIAGGAVQGFITLGRTCLRHIRLLPAAANPYISMTRDVTTSAGDFALNKQQTGRLRTAHKLLARPSMHGTIFRRLTTTTDWHVTTDLEDIACTVKLNQLDWQQQHAARPEILTYNFLMLSGHRWHLRIDLLYMGYTAGISRPANEQLTDRMGPLLNQQNTAGIILHIEAILSRFTWRELVDHKLVDPLYRESLVGAHLSAKWLYALVRASHRARRDLCALLRTSILLWEPLSRFVWRP

SEQ ID NO: 990553 - protein, 343 aa, Homo sapiens
MGPHNKPNALTQYYNTHTSMTHTNEVHTLHIRTNQSQTTAPNNTSYTATQRHSHAHIPTSTTHRETQQRPRKEYHQHRPRTYTSPIATATTTPNFRSHTQPRRPRNRTLIHEPTRKVTQRQASTPHQTSTRSPNREIQRTTATLPQTRILYSNSNTKMHIYKPTHQSHTTPLSSQTINITVLPTNAYEYTSTHTQEHNNHHTQHTHIITQPHTYTPPTLTYLYTIHHIYHIYDIELNTTETEHTIDTDTHEQPHIVKPTRRADRGKTRSENTGRVISYARRRSIARLQDRGRTMSHPNVTPRTSTREPKTPACAKAEQPVAMRVYATTHHLNDDPSDANRNTY

SEQ ID NO: 990554 - protein, 171 aa, Homo sapiens
MAHAAQVASTRRYVHPYPYQELITLIMDHALINRFSYICIPSSCDALYIANRLTYKNVSSRLNNLRTAQRNGKRQNYPARHHAEVLIALPSLRILYITDEVNDPSLTIKSIGHQWYCTYEYTDYGGLIFNSYILPPLFLEPGELRILHVDNRVVLPIEAPISYNNYIINDV

SEQ ID NO: 990555 - protein, 480 aa, Homo sapiens
QLPKIMQYVHLTVLEESKNDELDHYAQITEGHPASMITLDHGYPRPFYVDIDMRSANHRSRYLLTPKTSHRVPYDFTCTASTLASSTLQYYSMRRLTYRRGSDARHTSLAYDLTFTRNFFVLQHRTLPRRTYTCQNISGTVSYRLKALDTSMWMSRCEYISDEGSRYTKTTTVRNGRKQHDGSYGTNDRSARLTWTEVIDTTPTAYASFDRIRSHVNIALFLHFSSQYLTSLYSHTAWTIQPLSQCQSSYFTHICHVRQQITSLERQNNNITNISTSTRHTSQYKYMSQPHNNSHSTHISTITIPSRHYDIVPPHMPHPPIHVSITTNITIHSQPSDHITTYHQSTSYTRKHCPEHTILAITHWTHSYNRLSTTHSTIQIPKTKKTDRQIYHTIQTHPQFTATYDIPIYNNTPQSCFVEFEMYDPKQHSYTVDINKTTQSAPAVRSAHHSMDTHTLPHYTRALTLTSLDMLTYKNAADAT

SEQ ID NO: 990556 - protein, 194 aa, Homo sapiens
MVAHVVVIELRVSRAVHPELRFAHIAEIGGHDASIRWPGSVTCTQIPAKLMPVKKSNRMNTMLGLYILLLCTQVLTLHCADVSTVAKICSSRSQCFSTMALLGKNNPSHEIDTGSWLVLGDNRSPAVPRASLLPWNPGAMGTTHGAGIKGSPLGTNSRKYLDHWGPPHGRRSGVLAGGVTNCRTLAGSRRAQWG

SEQ ID NO: 990557 - protein, 116 aa, Homo sapiens
MRRRSKSQAVIKANTSHKQPEPQGRGPCDYHRVTLVATGEEKHLSQTFRQELASPFTLRSCSSSKLDGSKRFVSNFESSRFLTGTDTSPWSVYDLLEQRSRGHLREKPLETVRAVS

SEQ ID NO: 990558 - protein, 281 aa, Homo sapiens
MPFSVSRHSHLCHSVIVHISRSSYDVQDTVRSELYFRMQVSMIYSFGPMPISANGSNLDDAVTAWEQDWSYELKSLQSQLTLGEGEITSFTARNWQSRPKLDSIMAEELGAINYIDLYELEDEGEGDTRNLSTLAKQIRITRCNYYFCRMSWRKEAKPGSMTEGRKARSRQPSTVDAQPQARRAQDGTTGLTHRPEDAWEHKEEPLGSRRNKRKQEPRQEAGNTGQDEDTRPRQRESHHGTTRVRNPAGKERPDKARGRNNHKAKGGTPKKQPEIRNAHAD

SEQ ID NO: 990559 - protein, 140 aa, Homo sapiens
MIRTQKHNKQTEDNSNDREPGEPHTNIYTSKATAAATQDEDKETTQTAATQLKTKRALNEDERATRQTNESVPHTTQSHSKDKEKNKQLRHKKQDLRTAPQQTQTRTTARMREKTQTEKCKPATRTRNERACHTKNQEAA

SEQ ID NO: 990560 - protein, 271 aa, Homo sapiens
MSIRFDFYPCYHLMMNFMFPFCVNGILSPSVISEPEHISIGVDILSMAGQMTVKFGTAKRWAGIDARVSAIVACRNGGDCGLSRQGGYHGASQETPSELAAHRASSKALACTGSKWTRLGVTNNTTHEMGQQDKGHHKPKKPTEGSGSGRPRQTPNQSHEDNTKIIKPRAQQRWTQAAPQKRSRPQEQSGPTTRDDTPRREETPRGRSPLQQPGRKDNTQEDINQEQHGREHRASGQRETNHNRTHQRPKNNARDKHPSETRKGGAQVYTK

SEQ ID NO: 990561 - protein, 294 aa, Homo sapiens
WRPGAADDRPPQERPFVIVAERPGRQCHLSAHRPHDLRVHRVLCWLWLDERLLMWTHRCGIIQSSFTCPRSPVCRAAHPSVPPSPQPLDSLIFVLSARFWPFLDVESEPYSVCPCETGCFHSAACVYGPYRSLQGLVLFCVWMEPGVNPLTYECLGSTCSGLSGLLLADKGGLNQCQQLSLNSVLPLTFSFDGRKGSLALDSVLVSIMSPATGGSGSPPGPVTRRSGVPGMLPSTGRGTHGNGLAGNGVPQPLGGSTHSITLLRPRGTHLAEPGVMAARTRRLGVCPLLRRIYG

SEQ ID NO: 990562 - protein, 62 aa, Homo sapiens
MQKKPRPGDAADYHEHPHAQLRWTRKHTNRRQQHHGDTPSGKATDSTTKRNRRQTATNQPSK

SEQ ID NO: 990563 - protein, 613 aa, Homo sapiens
TASLPNQEFTDRPRSRPTPVVSVQQELQAPAVATNHQRIHSSPQHNTSTVAHSQQPTHTDTRNTNREHNHTPTVGGNETQDAPPNRREREKKETKKIREERREVGQITHTTNGKTQNTKSRTNDTNVKTTTEQTKTTTRQKEQNEKQEGKKRHKKHTNDRSRKQQTATDNERENKDRRDREKEGDTNQQPRRKETERNDPKKTTKENYNNTREKSIQQHDKQQEEKVKTRTNDEKTPHTQRKRKQRTDKMTKNHQPTKGKTRQNTHTGQTQDEEQKSKKKKTKTTQQKEQKTKKTRQQQKTQNQKRRTKKTNTQQTEGKNDQSKANSQKKKKTKTTRQHNTHTTETTEETRHTRDNKAQTTEKKANATVGYTTASQEKQQRKAARKPKRREGNNDNSSSNNRDRTQKHSDTRQSKNAARKTLRTQQTSKQTGNAKDEKQEIRRVKHKETQDQTHSNARNIANERRHEHRKTTGTKHNEAQQKHENKGHDTMKTNNHTAETTTADQSKRATQRPRDITSRKTENAGVQQNSEKHKTGSEKDNLRNRHDKEPAGAETTSNERQENGETANKRAHKKDNKRKGQETTTQRRREDTERHTGARAKDTPDHNKTRNQQ

SEQ ID NO: 990564 - protein, 186 aa, Homo sapiens
LPELAGSVVRGSTIAGYGACTGSFVRYMGYPRLVIRLPPSRVLSAANQYLLMRSLRLLADRMPTESNTTNHSGTSFLEVSGLTVRSNYHRSTCMLALSGGPVRWGAHQAVVMRPCRAKKPDESPETYCASVAEPGGLVGLCAVIVIGYELRGLAPPPACTLGIAVSLAHSMGRLEVLGTVFAGPKV

SEQ ID NO: 990565 - protein, 251 aa, Homo sapiens
MKPEDDRLLLIALAPDVPYISATKQQQLVMGQKGGSRRPIYADVRLFTQVVQTLGAKKGRDDICVCTETKAHDQISTVDPMASCLILQVTHNPCSDDLDVVMKPDPEQSHDNYALVELPLTIKHRAEDSTSRALYVVECHIMAVTPYSNNTHKTRVSTHPIDDKVQKSGRSSITRCMPYYSTGKGVWTQSATARCEPSQKCSILRRSRARLVHMLGQKGYYTPCFEIHFEIHQNSNEGCRGSPVGTFICPL

SEQ ID NO: 990566 - protein, 579 aa, Homo sapiens
PPLAALKSHLCSCSFIRLLARRSRLRPLAASSARPRTLGDAFHSRSSPCSLSSSLLLVPCIGTQPACSQPLSERRPIDIQSSEHHQPRTYKRRTRTACGTMARTMERDAPATPGTAYLTHTRREAGHVCTHRRYDATTSDARVARPTDATARTTRQADRAHRHDACPRAPLQGRPPVQPTGPSGAAWQMHSTDGRMVAHRRKAKTNRRRHDPGPGNTRRLTRRHTHEPSGPPRAPHQTASTTHTIVAPPAPTQTHGGPAPPAGATQQRRKNQAGERQRTKSPAAPEDGNNPRTARHAAHQTPATAATPPPPTYAPLAPPRRPPTPPRATLAAPRGSAPPIAMLYRLPTRSDSPAPPPPPRVAPAASPGPGPCPPARTRAARASPPRARSAPLRSRPAPAPARLRPAPPPPTSPGRLRRGLGPPAPVRLSAVSPPCSCPRSGRRAAGRPALSRAACRCGGPERSGRVGRRQLARGPDRRCSVPSPRARGPAAVCARRPERATGVRRAVARPPAGAGAAVPAAPRGRAARAAPGDHPSAAAPAPAAAGGGARALGGEPPARAPAVAAAAGPRAVRSCSRGA

SEQ ID NO: 990567 - protein, 142 aa, Homo sapiens
MSSTVRISTLCVIVLVSLLNGSMWTELGRRGRVFVTWFPAMLTDIRQVEGHLEMHRGFHSQTVSTSRVMSYSVTTKLRRTVTRSQSLLRLLPRFQGDEISEKIVAICTLCSLGFTAIFACYGVSMKPHTRLGGDKHVHLRTR

SEQ ID NO: 990568 - protein, 74 aa, Homo sapiens
MHPRQQTSDVYTSESSNEPRTTMRQRRSTYRYDSRQSDTRSHTEADKPVHHTMIHKQHGNNILMDERVGWQAYH

SEQ ID NO: 990569 - protein, 229 aa, Homo sapiens
MDTTAEHDKEKHNTIEHKYKNSIANKRKYNEGTKQKQQKHTKTKKNDTKKKDTNKHTRERRHEHTDHKKTANITKSNKQHENNQKSCTMMKHKNAIDKKSNRDRTQPTRHNEPTQRNKRKKETHTKTHQQHTRTKKAKNSTNASEKQPKRGHETNQTNRETRMQSRKHGSKKQHKRERTNGQKQNKMQTERNSTNNKTNKGAHTKARKRHRRTEKNVTDTEKKQKTTQE

SEQ ID NO: 990570 - protein, 93 aa, Homo sapiens
MLSETDSLTITLLLIKDNATDELDGHSTSSRKEQQGQVSRAKEYIGSVQKRTDARQGRSEQINDSRDGQDEEPGSNIEHRTVTTDDTIKTSTS

SEQ ID NO: 990571 - protein, 169 aa, Homo sapiens
MTVPYAERNKNNQNTEQQQVVAASLEPHHPTHDTQQTIEGTPRRHQQKEKIKEGEQKGGQPRKNHRPDKQTRRGHTPPIPKLHRSTLRGDAEAENRSPNTKQRRRGGKNKQRQNNQQKKAQKHDPPHTNAKTQRRNSRRPHETHTTHTQTATYKQTDTTQQGKKEERGK

SEQ ID NO: 990572 - protein, 95 aa, Homo sapiens
FNCYLNGPTVSHFKALIIVMPVEAVTRDMTMSKTEKVPYAESYNLLMLTVPNKPTGPIKSVRKHSAFKNLRLECASSGDENPNLRAKYYAKTSPV

SEQ ID NO: 990573 - protein, 107 aa, Homo sapiens
MICFLKKKVSGLGAGAHACNPSILRGPAGTTAFEPQGFKELAWATFAETLVRYKETPRIIHNSPLCLHAETTFVWAPCAPLEKVFYTHICVARGAPYGMCTVAHTGV

SEQ ID NO: 990574 - protein, 304 aa, Homo sapiens
MKETIMNHGNNSAQTCQATSAHWWRRGTARSNARRWFIDTATADDKKLQFSLKKLGVNNISGIEEVNMFTKPRNSDPSFNDTLTVQASLAANACTITGHAETKQLREMLPSILDQLGADSLTSLRRLAEALRQTICGWKRHHLLLEEDDDDEVPDLVENLNEVPRMRQTGMESTSEGLNLEKDTGSCYVLILTCFTKISGQWIRYNQISRRKAKPLNTGALCETGANTQVTTLTNIAEEAGALGGTRQEKGLASTRTDDDRRKHRAQATPTKPHGRTERTDMRASTERANGAPRQGTVQKVTLH

SEQ ID NO: 990575 - protein, 109 aa, Homo sapiens
MLDGRPCVDFFDKENVQAIFPCVVMWCLVRPRLIGEADAGGVIEPGVKVAVSQEQAINSSWVEKTPFKRRKREETVGPAPKIQTLWGAREQSKARKRRGVPKTGRVKQV

SEQ ID NO: 990576 - protein, 80 aa, Homo sapiens
MHTEQPETAKAKRGTITTATQQTTTQTPRHKTTRTNRNNTETEAYTHHGKQHANSEQPTQTPREGKNRKPQPKTKQKTKQ

SEQ ID NO: 990577 - protein, 252 aa, Homo sapiens
MVCEMAGLCHLACDVNVKFAPTRVCVLGRRPHRATHAFQNSLPSSPEQVSHHAVSSDFIKTHCMILVQFAHLSVWCSPVGRWAVWVSNRWGILSEDLRATVSSAMQIRSHVGYFLIVAGVVVFARWVSCAVYVCSGLLSKCALVTCLLHPPPHLHWLRLQLPVVALVVHHQWLSSFLTYAGSVCHHERLWFPGRLHSSVEHHHERVKLLWFTNYTDFEDSPYFKENRCFPPFCGMTTFQKGNEPPSKGPDTS

SEQ ID NO: 990578 - protein, 188 aa, Homo sapiens
  misc_feature (100)..(100): Xaa can be any naturally occurring amino acid
MRPPDRIDSSGQVMTPAHELMLLRLFRAPAELTDAVKVMDLGGTQEPALGETTLYASGWGSIEPEEFLTPKEDFSVWTSNVTFRLDLVLRRVNLRRVPQXMLVLALDRGQSTWWGSIEYRMNMQPAEGLQGPKAEKEVFINKSLEGPGDRETECLPHELKILDAIKNKTQGDTIQKNKDKKKIQMRPQ

SEQ ID NO: 990579 - protein, 122 aa, Homo sapiens
SKKLCIASYGRDQILREVWWVIKREVGDRFRSPGVAGRWFHSLGSLKPAGLTPGGRQPTRRGRVDTSRGNGNWETDGHASGKQESHQGEWAIRGVGRTGRAVVPGGGALRRYKVMWRGAKVE

SEQ ID NO: 990580 - protein, 317 aa, Homo sapiens
EPYCSSPTTRILPLIQHLPLSERYSGAPLGPKSKAECEILMMVGLPAAGKTTLGHTNMQPPTLPSKYNILGTNAIMDKMRGDVAYTGSGTMLAAGHVLIHQATQMPQPPHPDCCPPRNTQLYPTSHNCSYCDSPTARKMTPSERFQRKAIANSLPPDERPNKTDQESRTDEDREGMSHTHAALKKMKAQTYTLPTLSNGPPLACRVHCPLDAIATATNDRHAYLKAIQPGRPQRHRTQPPHENAVLRQPKVLRAPNRRDRRQGNRNPTRHTHTTDPPRSNTGPPPRTPDTIYPLTDTLPNQLPIILILSSYSTTHIT

SEQ ID NO: 990581 - protein, 116 aa, Homo sapiens
MLAKLAAARLYTVERAQTYRAWLHSLRLSKTRTLSFNFNTIAHSNPLNPPCYNFTPASTLPTRANTASLCDTYRNTTPSVPRTHATQPHFTHPQYATALHNPSQPTITRKSRFNDF

SEQ ID NO: 990582 - protein, 393 aa, Homo sapiens
ARKLASALTKRMAAPRAARPPSRYQLATAAARARLLASTPIRLYASSCTAHAAHTRAKPAALPRSARSLTHARSRCLCHLCCSLASACTTRPHPAPATACLHPATLLLHPHSAQATAHRATLAPPTRATPTPPLTPPHAPSKRPPHCTPSRQPQPHSPLTHSHRSPSPHHPAPTAPPLRPCSTLLHPPPPAPTPSHPPLLAPYAPHHHPNQPHLPAPTPQPPPPPHLPPTHPHHPPTPLPHQPPLNHSPTSHPSLPTSLPTPPHPSSPPPSPASPPHSPPPTPPPPPPAPPPPPPPPPPPTPPPPPPPPPPPPPPPPPPPPSAPPPPPPAQPHHPHPTPTPYPPPPAPPLPATPTSPLPPHPPPPHTPTHLSPHYHTLPTPPPPLSPPSPPLP

SEQ ID NO: 990583 - protein, 35 aa, Homo sapiens
MREDNRGHKLSKDGGEEWQFPHHNNMKRKENTKHK

SEQ ID NO: 990584 - protein, 73 aa, Homo sapiens
RELVCLRKRKSLKEEVSKLRSSSLVSFTICSYSPQNFSGCLCSLNSQVNQIDPLWKEQMKEEWIQTSGDKHDV

SEQ ID NO: 990585 - protein, 76 aa, Homo sapiens
MPMAAQYDEPDAYVTPRAPGGGWQSHCSSGESTVPEPGATFDGGGATERSPGPKSDNEAPRQEREQKTQTHALQKA

SEQ ID NO: 990586 - protein, 423 aa, Homo sapiens
MRAAGFPVYSAFPFSRQHPDTQFYSHVLAGFITIRSSLHAFVMPGDTTERHDNTGLIRPTYTSYPGTDPICAGRTFADTLMIQRHAGGRPIRRGDERLTAWPGCHGGRSEGKLSTRRAADTTQATAWELALDSREYPISRRHRAGDPRDQSQDPRTRHYIHGPPHTLPDLPPSSNHRPWPMGQARAHELRMGTPPTKHHQDITRPGSVQPLTTPRLTTSPPISQTHSHRLLPRNPLHPADLTGRLQPTSGPQPTPAAPLGTPTTTPPGNNPGCGTETTTIAPRPLLTRRTYNHSWASRPHYNTPYGTPTLVTTPGTRTGTTRARHSPKQYCRHNTPTTPPLANTPPAPPTDAPHTTLRGDSNHPQHTTHRHAPAPNATPRPTPTNHPPYLRTTTEPTTERTNRRNPNEPDTKHTQPNTHPSRP

SEQ ID NO: 990587 - protein, 465 aa, Homo sapiens
MSTFTTSLLADATSLSPDYSPFMLNRSEPNSQGNFTSLCAAALPPSPSLQHSLHCTHCSLTHTTTAHAQCTATTTAPASKPSTPPSATPLSTAHTRLSLFYTPLPQRNLTFNLTWSLTLANFRPYNSSNPLYASTCTPCSTHTCAYSPCSYSIPFQNPVRTSLLRITPPPLSQPSPYAHATPKHNSPPRIPTLLTTNDFTRHRPPPPPAHTTCVTANFSSLSRSHSSMEDQLPNRQASNPHSPKVDSERHSRRTAKATVPLANLHNPPHALSSQLARRRHVTAAPPRNRRATPTRTLTAQMPTYTSDMRSCTTDIGSRHYPHLQHEPLYTTRHAGPPALAHSSQCPNASRNPPPDTPYLPATPPQHAATPTGTTTVRDDCNHEPHTAHLSDDPHPYAASTHTPRRDQSPQPTVPPTGQASTQPLKHTRYHDSPRHAHPAVTHHTATTTEAPTRPHSHPPPEDYYN

SEQ ID NO: 990588 - protein, 281 aa, Homo sapiens
MELAQRAREITSDPYTVETHKTHYGNSKLSPGLPKELAHMTGSVMDTWKTAIRKQITRQDVSTLRLTTPILLGAMRVKSTYRTYSRSKKKTHLHVSDYKRYQRTEDLRNLLDPYDSTEEYPSTKLLQREWLLTSCTSHHSVTCVAAPCYLKPNYEYVYTRIADEVCGSWTGRQEVTGEITLKGPGRRTTDKARSETETEERGKKGGQKVYEDMSIQKKERSIDDEKEAQTNNRQLRPSQTIKEDSKHRYDDNMQANDSTEKTYAKIYNNNNQNKREERMMS

SEQ ID NO: 990589 - protein, 60 aa, Homo sapiens
MAKCYQPGAVDKVAQRSKGGPWKGGLGANEDGTANVVLVVTTNTIWNVWFDTEQKRGSSP

SEQ ID NO: 990590 - protein, 345 aa, Homo sapiens
  misc_feature (252)..(252): Xaa can be any naturally occurring amino acid
MERFQGPPGGEPPQPKNFGPTPGGGEGKGGRGQGGNQAKLDYTKERGSPSRKGLSPRELGTAGGLQKREDICERRNRDTVTTTVMSGDRGWTLGDREKTSAHRRAELPYIGREIYPPAGGEHPTEKAGNTCAEKKPTYETHNGGRNYYQFCVDTSDKLVLGRRVGPPQSGRQKNPPCVHKQGGLTQRGETQSGATEVLIPARKANWFGGTVLSDKQTDFFTKIGRRLTPKRWSIRTQHRGNNLFVTIPNGEXKQLRRRGSGAARHETPNYGRQQRDARDQMRPTGALILEIKDTCAAHRPATRVVMQPGRETTEPKDTKHRMRAERTRIKTQPETSDAPAESRND

SEQ ID NO: 990591 - protein, 188 aa, Homo sapiens
  misc_feature (38)..(38): Xaa can be any naturally occurring amino acid
AELLLSPSQSDMVFGACPVLSFTSPPSSRWVDRESLSXEQRTQSRRLQYFLQEKKKTGAGFNPWLASKGPDSLWLGYSRIARRFWQQRLVPWELDLKNSNCGAGEIIPYPSFHFTQDKELAFGSLFWGQGPKGGGITMEKDLGLSWKTREGKALQSGPPGSGWPTIGCWDGAQAFQELVRTLPWSRSA

SEQ ID NO: 990592 - protein, 144 aa, Homo sapiens
MRITKQHTQGANERTDMENNKYEGPNNLEINTEAPGTKLCRAPKPKTPNRRYNQTETKANDHNAPGKNKQRERKLNPKNQNNRRPRDRDLGNKRTPEDNKTDPGASNRNRNKKRARNHRHNEQQTKYHPDTEEDSHTNHSDKKK

SEQ ID NO: 990593 - protein, 319 aa, Homo sapiens
MDAKLETLKDLASLSRYVTMAIGIYNTLDVYLSASRILWQERALMRYQKYKEIIERLAFGRPLLSFTLNGLSSELDVTRGYSWSVEYTIGRMACIKEDRQGSVNNVRQRLSLILLAGPWTFRSRWCSDSHDLYQYSATHGVSRIGPGHSTTCKRSVSRNPNNYRILHVIIAIFLQGLLNERQAGDGEYSWFRELLRSIIGPHVIRVASGLMKNEMVHRVCLYYECSTFNLRDDGWLTGMVPRDRIRRGFHIGRRRTAMNAGLKLYKQWGCEPRAGDAENKERGPIVTARYPKQRGVSGNWFSPQVMLWLNDQTVISQTT

SEQ ID NO: 990594 - protein, 171 aa, Homo sapiens
LLLLLFVLVCSISLSLCVLFVLVSFCFHFVSFCSCIFPFFVVFDFLCYYLVLFVVALLFSLCCVLVCVSQSCCACSPYFVVVSAVFSYFPTLSSCWGLLCNLAVFFFLVWVSYGGTWCTVSLCSSICGNGFTTFWHSRMLDVNIVWLYSRKSLLSVKRITVSELPSLSMSL

SEQ ID NO: 990595 - protein, 253 aa, Homo sapiens
MQNVEMEPNSLQMGRLTVWLARTLHFLQGFSIPALERRRPRILSLVRLCSYVRCTPNGSRFAIAELQSCRGKRGPSRLTFYPALNLISSQKTLPRAEIATMARMKSLLFRKGDFVKLEDLVNVVYILISPMWKMLASTLDHVEKLGLVEGMDMNGSSAEVQAVKPYTVDSNFKDVLKGEGMTWGVGTMEETNVIVLQAYPPVTAGYRLDCLKTASQDNAICPFLTGTQFAFGLGEAMQLGKSGTFRSGLVGTP

SEQ ID NO: 990596 - protein, 62 aa, Homo sapiens
MGEGGAPRRVYNRETTMALQENSAGKTRGGGSPQKKTPGNNAWAHTRGPERTEDTRGPGGYK

SEQ ID NO: 990597 - protein, 333 aa, Homo sapiens
LYCLILCQDFLQNIIKQRMRLHKWKQPYINTTMLTILRVSEMGNGEHVVPFSIYPESGTDSYTREVIRQFVTTTGGSLHIHGSHVCIFSQCIWSTPKDDVVIVRREDSVARKSALSPMGWTFSYDLQNYNSKRCKALKAFAPASLGHHYTYELTIEHDTIVALEDLDDLACYVPADHVVLGLVDTSTVTLATREPVYDHGMNKWICEMRTKKYLQRGKIFWVGPYGGGFYTTRVRASQVSFEEMLHGEFSTKKIWFANWRGFCTPEDSGKGRFGIQMSPGSGGRKPSRGRNTGREEIVEIGTRAEGLGRNPIVVFARRQVNLMVIKSSLRSAA

SEQ ID NO: 990598 - protein, 85 aa, Homo sapiens
  misc_feature (66)..(66): Xaa can be any naturally occurring amino acid
MRRTIALSSCHRAKLNPVGRMRFRHAKASSNLFYILFRDYQEVLTSPERTSGTPDRTSRTLIVRSXHASLSTNPLVTGRGMSHVI

SEQ ID NO: 990599 - protein, 132 aa, Homo sapiens
MRPRSLEEADRGFGCLLLEGGGEQNRRRHVTGRREVRAWDSRETYSSLYSSSPLYPRCGTWADTKDLGSPIKPELAWSSDGQLEGQTRISKKITYCVTIRDNGFLGMRQSNNKRPGEITPGPVNVRKTCIPT

SEQ ID NO: 990600 - protein, 194 aa, Homo sapiens
SGSLAAAGASGVVFTALCLLLLEAQLLWPRYLQVWEIHSYDARTHWKPRNGESAGSDIPREGAGLVGTGGKWLWRDSGLPAAGSKIRGPEFSLAQLGPQSPSAKDGGRADSSDPGHPVSSLRSDCALVWSPLWAALPQQPQLSPIVQGSLDGRQGRILTQDAEFMNGKSFGLRGSQSPFFLLKICGSLRRNIKN

SEQ ID NO: 990601 - protein, 183 aa, Homo sapiens
MVRHEELRRRNSVAGAGNPGVPPHARDPGDQKRRTVYSIQRMMQPPGGTHTRANRSKKNNAGSARCESSHTRDQAPEMTQKQGTIEHTPQHLTKEHPTNTRDQPRGHAMMNDDSGTHRTRQHTRGATPPRKAAHKAGTQRKQPGKDASPKDSAPHRPGTHRQIEETATKRNQRGARAERNGGR

SEQ ID NO: 990602 - protein, 237 aa, Homo sapiens
MLNKVRHSSTVPSRLELESKSQRTCRLCECAVSHVLLGDALCVHWLLTWAWCRFGVEVAWWCAGTFESPSTCPAGYTSSLGWTYYCPNIADPEYYVLSSVNGDATCRFSEYVDLMGDRASVLLPFMVVLLAGLYGFVHLHARSSSWHDLVCDLRDRQSVGPGLSRNWFSGGSDGRGRSKMALHPRSVLLAACLCPRLGQYGFGAFPDKVCVAFRIPDRVVASVVVAVICCVCVRFLE

SEQ ID NO: 990603 - protein, 102 aa, Homo sapiens
HITLISRRCFSPPSGSFVDLLCAVCSTLFVLRFLFVFLLFLFLCSVFLSSPVSSFCRSRHFSRCPPVLLLLSLFVYIFFSGLFVLCVVISSCLGASFCSSGF

SEQ ID NO: 990604 - protein, 150 aa, Homo sapiens
SRAMVLLVVLSFSLFFFVAPCVCFFRCTSLCGVLAYLCFPGCSRFISGIPGFPLIALALCLLFPAGMSSLPCCAMLRVVDLAWRGMSFFGVGSFGPLFFSCGVDPVLCFLFSWLVSSAFVPSTSSYLYSIVLLPKYVMYGSLYYCNRDLI

SEQ ID NO: 990605 - protein, 176 aa, Homo sapiens
VARVPFLVCPFSVMLCFFLSVSCVAFRFIPCFPGSSGSIWVIVRPFLLYPVVHVRCTCPYGLDTSYAGFSLLVCRYSILLLFFGIPLVPCLLFLRGSIAVGFYFFSAPFIRILCRPVSLLLWLLALHRAALPALLYLVPFTLLPLLTMAYLKGDLRRMWSEPFHFHSPSSSRFLEV

SEQ ID NO: 990606 - protein, 78 aa, Homo sapiens
GGKTGGETSFQGEVQVFICADPSPWRVLCVSGRSRIATVLKARHMTGEYWPEQHGEAMPKVPEGPGATQAAERNTQSA

SEQ ID NO: 990607 - protein, 113 aa, Homo sapiens
SSLLFVPRSLSLFIFLPVPFVLVLPWFFLFCSVVFFVVCPGPVCFVVSSFLLGGVFVLLFRCGPFGGAFYLFDWLGSLGPMPAGSLWDVVGSGVFGVRALGFSVSSVCVAPSL

SEQ ID NO: 990608 - protein, 169 aa, Homo sapiens
MVGTYRSRTAKAESILESRPSGIKLPGSSANSQVAHPRPRGHHPSPPRGPYFRSGQGEKIPSGTRKLAKRQAQGALEGKELLAESRRWFIEQPQQDDKKRQFSLKKLGVKNISGIEEVNMSTNQGTVIHFNNPEVQASLAANTFTITGHDETKQLTEMLPSIFKPAWCG

SEQ ID NO: 990609 - protein, 225 aa, Homo sapiens
DKFKSRGAFMGLRRRWEFGIRERMSLPILLGHSMSGTTRAKPFCFGGWNGVQSSSIEFSDSTPVSVLCMLAVIESPRFCATPCCWLGALESVRILKSACRDGCFSRQQPAQRSPLMRQSAYTGFPASLGCPHARSHIIPVRVQMLLKTTEVCDRTNDADRRHLAVQAINVSPYRLAPGEKRPPTECAPTPAPHTPQMMNYCAGLRNLLVTWKHSGAGTESRSFLS

SEQ ID NO: 990610 - protein, 239 aa, Homo sapiens
RGRAPANPLLEPCGPLEHAPDSPCWPGALVSPVPCYAPPITWWPADDLRHQGPTPRYFTWDEVAHDAQCCDGRGWPTDLTRKVYNNQRRSPAWHPRVDSLGHHAHYRQGTAATDPFSGLPHQQGALLKIAYDTLSLIGELSPEHTQHLEPTKNNELTDEFRRSYRTQLQRIGAHEGPTKVFFQLYPAAHLAAGCCNLGYTLWVKWHAFHAYHPLCESCTVHSRPGCTAQQDLPTDASAP

SEQ ID NO: 990611 - protein, 107 aa, Homo sapiens
MAHALIHFDSWRTHTTPLAQAFPNNCLFNRDKRGLAKKKVGPTSNYSIESSLGGNSTTTIGALTGKTHIEQGNTEGQDSLFRPTHWAIAFHMGNYKEPGKAAPTLGV

SEQ ID NO: 990612 - protein, 129 aa, Homo sapiens
MRREVRCSVHCVSWYCRVSPSLMSLTPTEGAFECSGWHPEVMIQGRSHPWGSQAFSPWVLPLNRCYNLHPLSCLLGIAIKNSRTPGDRSEVPNFLIRMTLQTGEKAHSGFLREDMRPGNSENKRDHKKT

SEQ ID NO: 990613 - protein, 234 aa, Homo sapiens
RSCRLLRTKSPGPPMRTKCMALSKLVLFACLAIPPRSSAFCRAVKVLEIPSLCDEVSDKGLCSSAAVSGLYRLASDQHISMVTYGKPVTFDCAVKPSVTCVDQALHIRNKKLHHEHDLQMCWQLPETDYECTNIHRSRNDGVLSSAVLPMPTCTVRDHVHCLGNRTFPKMLYCNGLEAIMVYVVWLYSITLVGCGADRFYLGSGWEGLGKLFKLRVGLGIMDRRLEGSCSLGGG

SEQ ID NO: 990614 - protein, 164 aa, Homo sapiens
RGTQRLGSVVYGTLLLVLSDALGPDPDLVGLPLLEVFPHFRVPARPWRSPASSLWAYVDATTTIVRCASDITVRRLEIRGWMTQGSTEGWHPMEGVENNRGIGEHHWSASGTPIQDFSGVESCAQACADTYNSRCDGRVVMTLDYGMQWMRSLGTVEGASSAVL

SEQ ID NO: 990615 - protein, 116 aa, Homo sapiens
MVGGKILGVLGKLRHHSPLRIARRAIDGISLGRLLLSGGEENRPCKYPQIYGERCNLMGAEVSNSYTKPGQRNVECGATYHYSFSANINPQGELGQQTEIDFGALNTFRAPLYSQW

SEQ ID NO: 990616 - protein, 298 aa, Homo sapiens
REGTDAETRAGQRRGDAGRWARGWGRRPRGRRSARSGDEQADRWTGGRGARDSLGQAGAVMEAERPGTGSWCHCTSWCPGVAAAAHGLRDGCGALRPVEYLETFGKGRSNADGFSTYFVLMVLLVGNILRDSLLSLALCQAGVQWYKSRLTAASDSWVQVILLPQPPGVVWALRGACQRYPGLAGALSPRCCGRAPSMILTCCLMLEAVHRGPCGPRASMSGAAPLQVAMPGVRSHVAPRRSSPASGWCSCGHALSLQDGLSAEGALCVSGCRCSRCGALALGGRLASPEGLRARAAA

SEQ ID NO: 990617 - protein, 283 aa, Homo sapiens
PLGSWSLTSVAPFVPPALLSPPVSFLLLVLSSVLPSVLGTCGSMPLRFSSVLLRGAPHGQWLTGAGSRVLLAPIALLHATLGASACAEIPFASGAADLHFLNAVLDVHLARRETVSGPGELEGCLLPAVLVLAEWRLTLLPWAFGLKQIPEWGRYLGLCPHSCPGPLPTPVCWLPHILAAVGVRQSDPCHRTLCPHPVAKRSHHVTQPFTDLQPGPQASSSYWMLPCGSNRHRLPFRRWRGRFPQASELCRRGRGPWEDVPRCLTPSSGSSGNTLECLSEGPA

SEQ ID NO: 990618 - protein, 59 aa, Homo sapiens
ERRARLRKRQAQLQSRKEYEQELRDDLNVERYATVLGPGHKKDQRLQPPRTCKIGGVIL

SEQ ID NO: 990619 - protein, 112 aa, Homo sapiens
  misc_feature (78)..(78): Xaa can be any naturally occurring amino acid
MGLGIAWTHTWWSHAVCGGPRQARSLEGQNVRDQGGANHVQNTISTKNIKITPGQCVHAWSSQLFGKEAEGTKNWRWXPGRAERVTLGGQRFVRTGMSRPQGKKGGTMSQKN

SEQ ID NO: 990620 - protein, 74 aa, Homo sapiens
WLKTSAGATSPRGIHNRGLGRVENRTLATRGSGAPQGVPGGRCAKPGPAHLEAHLAEVTHLHHVAVTSCFSEKG

SEQ ID NO: 990621 - protein, 308 aa, Homo sapiens
  misc_feature (209)..(209): Xaa can be any naturally occurring amino acid
RITPDRRLCNPASYTPAPWRQQFDSMVGECYLSWLWELLRGWVLALLSSGTLKSPLDEENSDPGDTKTERSHVRASDFKRSVRTVELSSYRACYNAKLRSLKARADNEMSIYLPRREAISMRLARIALSLGWPISSTRGQEILEGPQVQHLAEHFLRQKYSIAFEQPSCGHCIEISLEQIESCEVVMYGKMPLYCLRASQSAVTRFHEXDCHEALYWVLRRFATGRFSDSGVPLIECSSTDYVKNGTRGNIADLIDDLDFCLSMIGLVDPLFFNAYGGCFEPEKFSPGSWHDRWVWAYVVLYYRKILP

SEQ ID NO: 990622 - protein, 113 aa, Homo sapiens
MIVLALSRNLCLPIVGIVGIGRCNETACNIAEADIRNGVVPVDSTGGRLKSILFLEQPLNKYRCDKHYKRTMNVLVRTSVAIVCVPYCGDARADSLAKGWLRRYHGRQAQGVT

SEQ ID NO: 990623 - protein, 290 aa, Homo sapiens
FGPIKLGDEGPSPKGDRSIGAEKAKSSNSVFLQIRQDSPDAIIIAVCQPSGHSYVCYWRTKWITRDTALIEKMDVIWSSAEMFATLRLKNLAFIPAAAMDGFWGNMVDLKCRLCGVVLNVAGVSLQELNPDKWERTMIVRYLEEVHKMAGLQSAYCKSSSVKGYTNWAIGLSVADQYESMLKKSIKDSSRVHNGKGDVRHLRMKSSVSLAMYPSSARGLTSVTHTQKTKRMMRLLRLKKSADTLWDIQKDANNDPVTYVSSDGCSNFKTSNVIKLEPLSLESMYMDNSVA

SEQ ID NO: 990624 - protein, 82 aa, Homo sapiens
LCSLGLFGVFRFVMAVGRSGVFWLFLVSVLRVRTSVADPGFIVFGGFHTVAKALSHWFPVFFLSSSVGVFRLASAILLFYAL

SEQ ID NO: 990625 - protein, 104 aa, Homo sapiens
FLDFSSRLSVLGVCLTPLFPPSGVAVWYLSPSPCLWLCSYFFCSPMWVVSLIVLFIVCGVAFCCYLRSVVGLSSRIILFFTVSFLDVLIFWSFYFLCALIILFL

SEQ ID NO: 990626 - protein, 363 aa, Homo sapiens
MRKKRRRRGDATHNADARDRQDVRDERARRNRTKREKHTEGRPHCEAQRQRRKKREREKRTDRHKKIERKRTEKGGGSTTRRAQRKGADTGGRMRHEAGRPNTPQRTKTENTIHPDRPQQEKAPQRNRAHRPAGECKHTTTTTEKHEATESPNPRTKRHEKKKNKLKLTTPLQSPLRRSKSITLIHSIHTALIHIHYRTIEDTKHPPATHIGRTTPAEKHTANTEKKKAKTEQEPEERALTPEERQKERARTREAADQQTTSRTQRPEERQDKEKKTKEKTAGKSRPGREDEKTNQEQKQRESNTTTTTHRDEKEKSKKRETTATAKKTGPPNPRESEARETAKNTRGKHNKTGKENAEEAET

SEQ ID NO: 990627 - protein, 169 aa, Homo sapiens
MTILYRYVDLDPWPIIPCPSLVISFLMMPWSAGSLSVTLDVQIACAYVRCSFLCGLCPCGLSISLHVWWRWYTACHAPGPCGCVPPGRTAAYGSWARMIVLLSCWLSGVHRMRPHIFTLSSAFSRLPLDVRKLAHWCPLASRCRCPIQSGGWEGSHSEWQDPGRPLERL

SEQ ID NO: 990628 - protein, 395 aa, Homo sapiens
  misc_feature (208)..(208): Xaa can be any naturally occurring amino acid
MLAMMVSISCDLVIHRASASQKVLGLQALATAPGEFFFLETELWPLCGPGWMFAGGATLSALTVEDLSTPPRVSKPNFSLTTQALPKYSRGIYRPLSTTQRPLDLKIVSYIYESIETTEGFSLQVFVGLREPWLFDNFVCTLPGVNFQPRPFGLSPKSGAWDIYRGHLERTTLLRVVPTMNACDFFENPYIGPSKRGKMWPPQSISPXQKTHVNGRCPPGGVPATGGGRSPVVSAPGLYNHTGGFLHCGAPRSHHFPVDPFSHDFRVNMCCIQKGPVVKYFSPEVWGAPQRVRYLLERAHFCRACPPGGGTWPVWCGSDYSTPPRFGFLAGRGATHGVVIVPPRGWRRNHPFFLITAIIEETPRGEIHNDDVCSSVKTGGGGFIGGSSLANTYDI

SEQ ID NO: 990629 - protein, 90 aa, Homo sapiens
MTASTPPRKPPSVCSRRKKKDPQKQGNTAHEREEAREQRTDRRGGERSAGERTHTNSHPAKQHTENRQNKGKQRASPQKADRRNHETSPS

SEQ ID NO: 990630 - protein, 109 aa, Homo sapiens
GEVVGEVGTSCRARGGFCPLRGGEGAFPTGHQCKLEEKNKFFLLSHGLSVIQKYYFGKQSSGEPEMSSYSLNRSPPKLALQVLLQLDKAINAATGSEASGNSSQSSGAL

SEQ ID NO: 990631 - protein, 147 aa, Homo sapiens
PRPKTKSPVSPQGVRSLEGGACPNGRYRPTSPSGMTYYTKDTVSHKDLAFWEGPINVRTPPTPTGKNFPRFRLTLPLHQGNLEAHFPPYVLRPLPVHKDFWGKPGGINKKNDRPASQRPEEQRYSLPKTGIFAPKTAKYAPSSKPER

SEQ ID NO: 990632 - protein, 88 aa, Homo sapiens
FIDDIAYDGFHRRACDMDAHLVGSRSRLHASDFSVLSALYTDALVFHTVTNVPPGDSHVLWIRDASCRKHKLRQKLEQIILALVSSDS

SEQ ID NO: 990633 - protein, 229 aa, Homo sapiens
SGDRDRRTWVFCSLSSYDSSIDFTYDQEWQLDEASTPVHRCSDRGVELSSTGSMTVLGEHLPWLMRGTSSPSPHCHDAQRMIKDTIGVERRLTSLYLSKSSTCATDMECTSSVRPSGSPKWASHEYSATRLWGTIGQGLGFGNYAETFVEEEIAPRNESNLRNSAKGYSRGNNGAHTFKQRFPRIACAEIALEADRVYDTTLWVEKATRIGLVLHIKLIDSRKERLEEH

SEQ ID NO: 990634 - protein, 156 aa, Homo sapiens
  misc_feature (67)..(67): Xaa can be any naturally occurring amino acid
  misc_feature (110)..(110): Xaa can be any naturally occurring amino acid
MSNLLGGPSVRDQRRSNCPVLVEKREGYVPSKATSCYTHMTTFCQGMHHCARVHRLTRYTLHDLQMXSHVRSVCSLMMRITPNARSTRTVLFLSYMQAWATSVHRVFRRXMHIHILPHIYLGTTSQIRNATTRDSAIPSLLTILSIKVGIRNTLVS

SEQ ID NO: 990635 - protein, 262 aa, Homo sapiens
PLPESTPRCDNLEFGIMKANNLRDMYDHEITAATIAVHQRLIYFVDLFVPDWPKVSVSISSISVVNQQRVPRLNVTLGRNSRYKERRHTCTCMRRKALGYVPRRHAKDVGDHRYDSLLGPRPRAPSFRPHLGVATTRALLFCASFGEFLRWDLRERSDARKQVLQHDHEVAVDSYSKSSARYQLEVISAHHPIFLYHTFVEANTLNLICKRSLNHTLNRASLAHVGPKALSSVDHGWTAIRSIAEGAEDIGTAYVLPLSPKV

SEQ ID NO: 990636 - protein, 148 aa, Homo sapiens
MRLQSRLRSNPPYSSRDWAMPGDLLGNEHTSTSVILVTRTMHFVSNSSSIANTHHNREAYVAKRDLRLPPELNRVPARIVAVFRRHYNKALMPFLHSFTIPLVLLLLRHLHTRWRPDTRNTDCTTRYYASLSKGNISSHPWNAFPVRS

SEQ ID NO: 990637 - protein, 73 aa, Homo sapiens
ALFYYGTLLDYEEGRLAKPDSYYQVSSPGKESASIPARTAVVDYRSTRDYRPYMTSTPRGTHKREELLDTTAM

SEQ ID NO: 990638 - protein, 69 aa, Homo sapiens
MHFDYHNSVRGYTLNYSFPRRSHFSRALIPGKLPPKKGPGPNPRNGHKNPTLKSIPYCHPRNGPIPCSY

SEQ ID NO: 990639 - protein, 364 aa, Homo sapiens
KRKKTHNRNSGSEREKAAEHKAQVLGGSEISSSLMGPGGLEAAKEEAALGFLAQTGNPVSMALAHRGLSLSYASGLFCEQRLHEKIRGGPGARDSAKELSPAALEKRRRRKQERDRKKRKRTGAVGERQGHGTAEEANGGPGGWWQAIPDGGLQRSRGSQPGLIFHKAEASVRRVRSSKAQRRKEKRQRVKGNLTPLTARNYRQLLERLHARPERLDELRGPDDAHGASYPNHTTTGNRTTAQRQKPTRHRDANTDHTPHAQRNNPTHRRQNDTRNPAVDNHAGESNTRHQQTPHSQTTPWPQHHTRDHTTQHHAHNLLTTRRISNKSETPTSSLLSDSQHETMTTRESRYTPPSHTATAGDDH

SEQ ID NO: 990640 - protein, 96 aa, Homo sapiens
LSKKDEERTAASSLAAVLRSLCSASRQPYYVLLRCLFSARCLEPRFFVALRSCVLVRCLFSTYYSRLLDTFDLSALWKFDRRVSSGVRRSMYHRRV

SEQ ID NO: 990641 - protein, 354 aa, Homo sapiens
MSGVCVVAAGALWGDGCCVVGRCVLGLVWLGDVWRFLCPPWWGFRPVGVCRCGLLSSLVALLRGRCGLWVCAVAGACAVRCGVVGVGSRRARWVRWAGRGGSEVRGSCVLVGDGVKGKSCVAVEEWVSRVDVGVGGGVVGGWERVGVVGFAARCEKVEMCGWGGDVICGDVRSGEGELCRSLVGDVGFVWCGAARLVGVVARVVCRGPGGGGEGVGWEAVGCCAVGVVEGGRGVQRRMVEQGGCSALGFQVVGGELGARVCVGGCGMGEDALVRGGEGVGGERGVSMAEMVRKGARGGGAQARFERWWKEVEAWVQRGVGGEGVGGRGVCVCVCVRVSGGEAVSTVCVWRCAGR

SEQ ID NO: 990642 - protein, 150 aa, Homo sapiens
  misc_feature (123)..(123): Xaa can be any naturally occurring amino acid
MSGTVPPGGYNIRGTAANGYGSCRYRMLLLRGQLGLLTSIMCIIPFLPCTMCASATAWMNYDLAAVCALVLSSVMVWSVSWTGRQLFAAVHSLRLPFDCLSHTRFRTGPGLSASWMERRKHGXYCSPTGPSPENVTEMPMLQNVSGHGPT

SEQ ID NO: 990643 - protein, 165 aa, Homo sapiens
MHIINSSMKKQTKDRTHENRTGQHRGHHKATIYSCPWTQRTGREKGITLDTNQKYATRDGMEQKTQTHDTNAQTLHNTKTQTHGQTTVATTYERQEQNTPKSIREKETRTIINNTHKPRQKQQEIERTNKNTTTQQPAQDSRSKTLQGTNQQEQREKEDQNNTKP

SEQ ID NO: 990644 - protein, 184 aa, Homo sapiens
WQVLLLEACEWVVDMGLVRTSEDFRKVCIYEEGQLNVEFLPVHLSFFFPNHWLLSQLGISLAIANAGHLASNMYTLATSAFNGECNIPRLLVTVTFRRANHVVQYVKGNRGLPNMNGFLNEAREDKDLYNSKATYLGIIVKIDRDLPRDKWNRREKGGLWFLNTLRYVRGQYMDVCNPKFSIQV

SEQ ID NO: 990645 - protein, 188 aa, Homo sapiens
RPPFSLLFRLYSPRPRAPSAQPVSAASSPPASRRPGPPRFRGEISPRSPEAACGRTVAFMCRKTGLALASHASCPAAAIIRSRGPGAHGGRRALCLSAPNGAWSRGSWCRRFARRRQADSVLALQLPNSLPGRTPNAGSAGDLGGRARRGGTARGVKVRPDIANRRTGPSAGCDVSSWAPAGTPATSP

SEQ ID NO: 990646 - protein, 184 aa, Homo sapiens
MDYPAQLIWGKNLTDHTYDLRRPDTVWTCAEVNSWKGYLTRKYTHTLSWSTTGNVTGATQRQEKGRHKTTHTSPKEAKRTRQNGRWHMAAESKHAAQTRTEYCKHTPRENAGRRPQAHSGSTHKMTNHHSVTGRNQRNHPPRQKRASTQEPPQPPGGDGTTQGGRPQGRRPYRQQTVRAKRNAN

SEQ ID NO: 990647 - protein, 39 aa, Homo sapiens
MRVTSKIGSRSPIRSSNRIRLKRIYCLDLVAVNYSESNE

SEQ ID NO: 990648 - protein, 420 aa, Homo sapiens
MAAGSQMELNRCCKSTHTLPHTKPATATKAIALSIATVQTKLNPGSKPQAATQAHHSSQQHQNYQSQHCTSAHQLTAFITRDQSQAQQHLHTNHTREVKHQQWQPSTHHCSQDISQHSFPNSHLRESCFRIQDTQPGHAQHSTLVGNKCKEPTMANDILAMQSQGIHTDGTELQHATRHQNQEDTRVSHAAQYRGSNTKHMRDTKAYHQRTTGTNNEHRTHHTLPNRQTQQQTPNSAKAQRSYAHTRRRTRTRHQCDPRHHHAQGQGHAPNNDQHRERPHNRHARTHRSARTTHPQQHRELDDNQQHRHRTHTDTSRDQHGTRPRQARSYKYKRTPTAPHTPNGTDAGRTDTPTRRGTQRAREPCQRHITRRSAPRPQHDERHGTSSTQPRTNRHNRADTCRHNTRQLIEPHRTSHQQPR

SEQ ID NO: 990649 - protein, 311 aa, Homo sapiens
VTRSGKSELAEPIAIRPTSETVMYPAYAKWVQSHRDLPIKLNSVVQCGALGIQASSALPTYSCNFFGRKGDSALCYRWKRQSEEVLQILDLHMLRYMKNRPGNCCSKRKKEGKGKMCVEETIQTTIEANVYLLVEGAIQVENITSFEGRIVPKCLKSFLKIQEIPGEKQVCLSKSSWGLTTRTIGVMTMVHGDKHGFSITTPCCMCSGGELSSLWRLAQCTFWKKTGKRDAKCDDYRSEYSSVTIRVELIRDNYSPGVESTWGPGVPLLVLAVFETPVCVRHKDIGETKVAKGPNIHLGNSTLTGEKTQSV

SEQ ID NO: 990650 - protein, 102 aa, Homo sapiens
VTRRIQQQGGGPHGPHGLQGVKTPGPPVPSKMHKSEEMRPSLLGESLATLMSPTTLNLPSSQIAMYDPLKSGTGPSGACTFAHVPSINVPMMLNQKKEKNMW

SEQ ID NO: 990651 - protein, 216 aa, Homo sapiens
MQVNDRAPSIGVPTMSSASRLPLLTLLQLYRQIRTTETREKHSTLLNLVPRQFMLNSRRQNLLALSEYTCSKHILTKIVYRSPPFYHKHEETFHNSWIVLHHSEIRLWMMANCFLEALNVSVDMNNGERETFFLRGIRKSIISGVVVGLLCTWALMSEDANTIGRAQVLHLAHPWVPLSYTLWFKTNWKKHPGKARWGGSTLWQSLFFALTWVRVG

SEQ ID NO: 990652 - protein, 148 aa, Homo sapiens
MNFLILAWSSTAGEIPVVAIRTAKGEKLCHAGTELLAADGKALEHGSCTDYFAWQIMKRYLKSEPTPREQPMGHVKELASRRTLDDNSELMKTKDVLTRINMPLAVVTANEPGAHSYYTATCAKSSATDPNIVIATMDATANRCAFSI

SEQ ID NO: 990653 - protein, 72 aa, Homo sapiens
KISGIMWTRLYLRLMYTFDDIKGENIEDIPEEVLMELCPPLLKAKYACQGCKMKQVNVVYTDRGLTLKENGC

SEQ ID NO: 990654 - protein, 102 aa, Homo sapiens
ILGKTRPPTPPSHPHRHLQGPPVSRALTRRHQMMMIQDPGTAHSLQHTYQTHDEITDTEIHHWNASEHRNHKYQLEINMTKFIREQEFHTQHTETRKTRTKT

SEQ ID NO: 990655 - protein, 240 aa, Homo sapiens
AFMPPAPMPTCLPAKTPTPTSYDSHGPCYNGYPGGYPVDDVEQEIAQLVAKAPMYPCFGDADSSVASEVRSGYRIQASQHGRLSCRVRDTTGEKESGRNRSSPFSILAPPVAVCERAMGEVTSLHKDDWRSRAIPGVPAPHSRFRDEGVCVAMSPLESQCDGILVALPGEQATAGGWRAQAAPGPRPWDALGRAITSVEHRTESGSQVVPRGNGGRRSLGRMMHRAEPQQGRLYERRRLE

SEQ ID NO: 990656 - protein, 188 aa, Homo sapiens
MASSEPTSVACVAEQEPTVVTQYTRSIGQSIATLRGLGLFRMKCVQSLEQTKSTVGYNLEIDLQASLVKDETNAVEIAKGYGGETYYMKKLDCTAHPTEALFEEYDATTPLCSWLFLYEPNVVLIAIRRLDPWIAQGPRKSSLIMDRESRSRTLLVGYRSLRNRVWLLPCTRPRDQGTFLCALKGIFI

SEQ ID NO: 990657 - protein, 238 aa, Homo sapiens
TQSLTIRDAEMGPLDWLSGNAIDIWRVWIRVLRGCPRNVAMAYSLVIKSKKPRVVKVANADSELGRSEGSYAVMHLRQISPNGSLPRASSSVVDPLSRMSDFTFDNTSTTSKRLSMKYMAPGVWLRVMAHCMTGGDAIVVGRAENGAYGISYRVEEAVFFTCLSSVHCVHAIISLRVALKTHCRRLRSALSSVTRSTFVYLILLIILQSLNVPGTWLYVREDFTGAVGNLLVQSLYKD

SEQ ID NO: 990658 - protein, 233 aa, Homo sapiens
MRGREYFFSRKRRLFQVDICHMRLSSLVLQSSWDPDIRRVCAYAVDEENYLPQLSVSPASIEEKIVEIDASHRLCHEWANCVTAKSFNDKARVDDTEATGSPTMRTMTVESVTQAVSNLALQFGEEDADPGAVSRPLGVDYSFGGVDEKGPQAVSYGALSGDLRTSVMLEALGLLQRVPRAPCMRSFHKSSGFERSHHVSLIILNQYGGKLLPLWLPRQRQVPFPADSRSGLD

SEQ ID NO: 990659 - protein, 121 aa, Homo sapiens
VRRWARDWDLRKPFDLFILYSSYVLDVMGDESCWTFTTVRILKSGKSSPDDLNYACKPNDWFPYTTYESHTRSRVFKLNIRVVLWEKTHLDTNVVLGLDTTKDIVEKYHCIRDDQTIVPTK

SEQ ID NO: 990660 - protein, 232 aa, Homo sapiens
EPVFDLSELSTISMTTIEPLRALSLAMPVYSGSHSSYRDQTLIIAPLYRAYRPCSARWTRMIAPLVMLTAHRQMAEQGTSPKGTMDRINMLFCGTSRTSSPSHPYMLATRSPPGVIIPPWTATERSAKDDSLWKIHASLNQGTDSRRAIGCKDILIEWRMSKERESPKTIRGIFPPQEEPGQVSQGMAPKVFSIAVDISYSKGPRTDVEPGRPGNGLIVVYARGREDPQGRY

SEQ ID NO: 990661 - protein, 86 aa, Homo sapiens
RCQQLISCRPCTHSQTELQRLALEQQHVAAMPITLLHSVPLPAQEDYYSHLKKEKRQATVKPAIKRAPWSPTLDLGAPPPSPHRVP

SEQ ID NO: 990662 - protein, 76 aa, Homo sapiens
IIRDIKFWTELRLVHCHDGPLDYWVTLIGSEIDGWREEWLYTAARFLIAIDTVHKYIYTRRLVARVRCSSWKLAYV

SEQ ID NO: 990663 - protein, 397 aa, Homo sapiens
TASENSLEDSVRDGSTVRKVRDLQAGRRRGSPGGCIPGTAPDMPRTPCRTPAPLHRHATPRSALGLERPPAQLLTLGIPQTHRGTGARHGRSPEALVLTGRHDQRKHSAGAHQTSSPPDQTIRSTIQQLKLPDPAAPPDLHATAALRPPSRALQPRHTSPPLLISATPPERSPRLPRTYQELTRTHRPPYRDHPRDIQTSRTPDQPPQAYQHTYDTPAASPPTHPQQTPQPRTDLQHDNPGRQSKPSQQTQGYRRPYQDRSAHPAQQPPAAPTQTPPGPEAHTKPAGDNIPRRATTYDRANRSTKRPRTIPTTGHRQQQPHTNTADAVREGKATTKRRAPTHPRPHPRTEIRPKRHTRAHYPPTHPKATQQRTERHITRGRPNTTRSTRTPLPRRPT

SEQ ID NO: 990664 - protein, 81 aa, Homo sapiens
CKVSLDDYCPSDQVDTIQEKVLNMLRALYGNLDLQVYAAESPPSGNKQNIRLLCIWFSNRPLINLFVHESSREHCFILTFS

SEQ ID NO: 990665 - protein, 212 aa, Homo sapiens
MHDHALIIIFRYLLPTAVWPFANTHNKSKVIHNISDAQEIETSEAILPAIILVLIASHPYVILYYKQTEVYSSALSYSSKIKWAHQVVLIPTQYSATTVDVILQVPTYFPQLFLEPGDLRLLEVDYRVVTPDRKSPHSIEVKLSMHKTVLWQLMRLLPNIGFEKIRNAIPGASKIQDLIFQRYTSRGYTTVNALKSVEQNHSFRCHNPCLRM

SEQ ID NO: 990666 - protein, 206 aa, Homo sapiens
TAVKWGGSMLRDENVDASGSLAPGTFPFRLQMDPGKDKEGVTQPQGRSKEEICDTTSTRMRSLLDWQALITRSTTEDLPTCGTTSAPGGPIRTTPNMHISQTSGRGMGPKCHTQGVRARREEKKTDTKQRQTEKRGGQKNKNKTINKRTKQQRHEGGNIDQIRKQGNRCRPHATHEEIKGRTNKNTEIMIERRAERQDAGNTRKET

SEQ ID NO: 990667 - protein, 142 aa, Homo sapiens
MAPLWWFPFFLFPSIRVLLFLVFPLHCCCVVIELSALLHSTHWGSGLASQGKFVTLERLFILLGTKNFREFPLHPWARVPPGYICGYRGMETLGGSDLFNTTTLIKFPTTCTTVHLCDCINPVLFTWLNNNKKHNTFYHNTK

SEQ ID NO: 990668 - protein, 173 aa, Homo sapiens
FGKTVHTQMDNLVALATGEKGFGYKTQQIPSVIQGTSCIQGGRLHPGADGTGRQSSIYGERFPDENFKLKHIRDHGWDEQWNNDRSQDTNVTPRFYHQQTSQDKPWTENGKDTDGCKAKDSSRSMEGEGAETDGKTHKHRQTGINHLTGCDTSQTANKIEDGRSTIMTYDKGS

SEQ ID NO: 990669 - protein, 105 aa, Homo sapiens
MKLRLTPWRLPDPPISATRTIPTSMHYSPDCLNRPFHQSPTSLETYIMAEVIQLPFTSNVRPQYSLFCPLSIHSRDVGAIIIGSISTTHETLNSIGIYPPALQSH

SEQ ID NO: 990670 - protein, 291 aa, Homo sapiens
MAYGSPRGVRRRARDGPPEGAPGLVLDAGRVVRRGAQRGCFKLDGVPSCWGLGGPSFPSSLACESLPPLPRLIFFPWPIESSCLVSMGSRSSVRTSRARYVELKASGNVRSSVRGESRRSDSIDQLPCSSRVYQVCCVAPAALRRLGDSQYDARSPRGFLARCSAGNSGLREVDLVALRVPPTHCPPVGLPGYVSRGLDSFLLVCVIRGVAVNPRAIVQVKSRSAANGPSAPPCPGPATLVKVPRHLPFRAPCGIKGAPSPRSPTPRVAPGRISHAPGPDTRAFALPPAPP

SEQ ID NO: 990671 - protein, 298 aa, Homo sapiens
  misc_feature (217)..(217): Xaa can be any naturally occurring amino acid
MSVDPEDFVGQNVLILGRGNSAFETGRETSLWCHKLYPIVLSRIPGSGHVLGPPIYVGKTLQDANQQLRHAWNTLPSINVPGSGVLSDVLTLTGFVAIRLNGHAYGNVAMSRREFFLEEASTRPECLTPCTLPQDDKWTTLHSARARMSVVSPTARGLEAFDFSASSISPSDLTRENAFGKKYPRDSKLATNPKKPGSVIPGYCSHSVGLTGNLAGXFIHGFRYTGRAVHRLLEHRQHKVNWAATEVPHHTKVTNPQRRGRDRRSGLTDFGGAMTSRGENRLQEEETTNCTRTRGREH

SEQ ID NO: 990672 - protein, 37 aa, Homo sapiens
MSREDFQLNRAVVPRTPATPVDLPVRGGNIKGVQACA

SEQ ID NO: 990673 - protein, 308 aa, Homo sapiens
MAKVTTGSIKSSQLDNRSSAVPNRFLQYACGSSADNPGSVRCTRERRQFGVIEMRFASEVKTFGKRLGKRDIGDGAAISQTAERRLQRVGVAAGFDNHIGTLLAGQRLDLFTYISADGVKAEIRAVATGNITAMGDEDQTPITTEDRQRVSQSDGNRPMRQALPPPQKSPTRTWHRARRHGKLRRVVQTGFHGAATAGYWRQLKVMHCVNDEPPRRAAETHTLVATGVRTTQRPENGAQQCQWNCKTRRRDAEAKNTARERPQYGAGNHHARKNKLQGPPRTSKNRKGGERQREPARGATDQERNREH

SEQ ID NO: 990674 - protein, 108 aa, Homo sapiens
  misc_feature (41)..(41): Xaa can be any naturally occurring amino acid
MSKIFRKNRSDYRHKPMTLYTFEASTYSPLVTSSSFAYTYXESNFMYLSQVYRYLRKSITFYRYTSSDRKSNDTTSTVRPLLVIDACSIVVNRQLMRQGRRIIAASET

SEQ ID NO: 990675 - protein, 172 aa, Homo sapiens
MAWKKGRGTKGRRAYMYKFAPPLTKKGRPTGSKFFVMAPGGVHKRDARRGKGPKEIPQLGLGFAEHPHSERHTTGESHQPGEGEKPQEGSLRRDEEHTQRWYRRKEERKNPPGGLRKGGEGPWLDTFVSHPTANIVACLERAIRKQKGKTRKTQGTREISSHRGREKNNPRE

SEQ ID NO: 990676 - protein, 58 aa, Homo sapiens
MRRHNEGRSKKKKEEERREKRERRIKNNNMKSSQEDEQHRNKRNNKEHDLPSTPPDDR

SEQ ID NO: 990677 - protein, 104 aa, Homo sapiens
MNMRCGLPPQCVTTKGGELYVHKFFTHSPKFNVYILKYLKNSAPSGLRYKPPKLYTDKRGAGAQISRGHSVFLPVSPLKLHTNGSKYTQLYPCLSTVRYSPCST

SEQ ID NO: 990678 - protein, 66 aa, Homo sapiens
MKEALAPNKINPIYKKYPTLLFSPTQEIFRQSNVVATKSHYMKEQEELTRRGSINTQTHSITRYNK

SEQ ID NO: 990679 - protein, 170 aa, Homo sapiens
  misc_feature (1)..(1): Xaa can be any naturally occurring amino acid
  misc_feature (41)..(41): Xaa can be any naturally occurring amino acid
  misc_feature (66)..(66): Xaa can be any naturally occurring amino acid
XWKPLYVRPLYMPCGGIKRCETRANLTLHVQSCVQRKRTAXEHANPDICSSHSQRIHVNGFALGDXDHLTQLTRCVPTLRHRREGLWLPRQAEAGAWELKWTCVRYAGPLVLSFPSIRVLNLCPFLTKLLRSKQPERAPILGSPPEREIHDLPLRTEISWKGHSRKKCGG

SEQ ID NO: 990680 - protein, 78 aa, Homo sapiens
  misc_feature (69)..(69): Xaa can be any naturally occurring amino acid
DIWSACSCYLTHRCSISAEAISRFTNARAQESWLVRRYRKYTLCQPECGYFTRNTYITLTKPTVHTTLXTQVLLAADS

SEQ ID NO: 990681 - protein, 154 aa, Homo sapiens
MCMYSQSADLRIDSNSAPITSSNAHRTPSRSVASLCLTSDIVCGKTAYDVRTPNSVTEVSSPNYNGNSCDYTGVPMLTTTPILRQQVTKSHEAGIVTPNCSGVAMNLSELQAHIWHDCSRWPGILSANRVMPVLVIYPGMLSHYNGIVQKIGTK

SEQ ID NO: 990682 - protein, 134 aa, Homo sapiens
  misc_feature (30)..(30): Xaa can be any naturally occurring amino acid
  misc_feature (56)..(56): Xaa can be any naturally occurring amino acid
MSSVPSVTRKDFVTWFQYEYSGVPWQLLGXLNPIASYRRMMLLSRQTGHDELYGYXSKQSDVSVIVTPQYQNRGVAIVHIEPSLLVNSYDHNSSGAHDTKMHDPGHESPYVPSMVLRASVRCCALQIAKYVVPN

SEQ ID NO: 990683 - protein, 115 aa, Homo sapiens
MCGLIVVHADLRCVSLPTACRGASVLVGDVLHSAPERLILECKGLQVSLDHKATDHLVKTDTRGGAVIIRDTLVLLWYSWMHMTTLAAIDEGPGQLVRDSLHVLHCKTVSFLSPL

SEQ ID NO: 990684 - protein, 50 aa, Homo sapiens
MLTPASLTPRGRDPIRYKTYSDFGHLKLYSYSTRVRNIPFGILFGKKTFG

SEQ ID NO: 990685 - protein, 122 aa, Homo sapiens
LWYHTGHSTYILANRLYPESARDWFTMESPRRWSRDNVCSVRATCKAFPGLRDHVPNPSIASMSVSLSKNGKVSSLDLDVSPIILYGQDVNVYSGIMSRNPRHVEWIRWGEQMVFSYQTQTN

SEQ ID NO: 990686 - protein, 275 aa, Homo sapiens
SDRSITLPSCPQRHDLDPVGLSAVYVGEPRAVRCAPYFLFSTRRFIFHDNNNTWEGHYYHYSDPVCKHPTFSYLRPGPLQPRRPLVQVMGGTDFVFKVNHMKAPPMDAATASAAQRLQRPMICCGPRAPGRWASMLGCDPHRWLSWPWASNYLTRSTRSSQMEQDARGRYLLFNGQRPSRRVQPRQWPEKRATSYQMPLVQCASSSPRAEDLAGRTVEAACMGGPWEARLVLLVGDLLLVPLCLDLGSGILTSIFPQDLFGVVSRSFFLELMRMP

SEQ ID NO: 990687 - protein, 103 aa, Homo sapiens
MVRTLLLLHSPAVRLSAEEHVGLGTPGRNEPWFLMEYRKNTAWQPGGGYFEAECRDQPIADDQLTLNNRLRRTGVLPDHMNNEALEEKNFVIMLNMDHVQNCT

SEQ ID NO: 990688 - protein, 158 aa, Homo sapiens
MGYFGCFHLVPVGWVLMLEGGRLRGGTGPFEPPGRISEGMWRRPLSGLVSGGQWVGSPECLEGGGGGGAGLSLRVSGGVPREATGGGSVDWPEVGRRGRGYRVCNQRVSTQAGAGGPPSAHLRNPPLSLGELLARPYRPCLVSRRSELWWTPLGARVL

SEQ ID NO: 990689 - protein, 87 aa, Homo sapiens
APIIVFRGEHGYIGCLQVTESALDCQSLLAMTSSMLEFNDGAYTHQNDSIEANTGAVGSDSGVTSSGDAPVDFFFEFCDYNRGGHSR

SEQ ID NO: 990690 - protein, 150 aa, Homo sapiens
MATMISLGASSPYARCYSLPCLHFGLISVALLAYRSCAVGIRVLEGRDGEHVLPCLVCCSLLEVCVALLCGVRHIQRHRLGNVGKGPTSGDGLVRIPLPIDIYTLKISLIHKVLLNRYASVHFLYPRRVPTLATLGAAFQGSLGVFLGKR

SEQ ID NO: 990691 - protein, 132 aa, Homo sapiens
MSPLIKLINALILSTSPPHPNISASDETSAHSVGACLILQTHHRTIPSHAASSPDRLNRLFIEIAHYHSMTYNYVAEFIRYLHRQWRLNYSLSASSYTSGEAYITDHFSTQKPEIIGRVILLLATDSQASRS

SEQ ID NO: 990692 - protein, 521 aa, Homo sapiens
MRSLRFTQPVHGTSDVRLRSETPSDLRLAIRIYPARLMGHFENAGDYFPQKTFGSQGETVVPVCLVTLALGNWHPHMYNGGIPEGLTIWEADLLRPSLKAFPTFWCAPHVKNPQANIFPRPGESSDKDGSTNNPTKTQGGPQPPGKTPPSRPPTHDQHPTPTTTRQYSVPTSRHNLNCLIGEDNYIILTPTTTNHTTHPPTPLHPTQNHAPLHHTTPPATTILLPHNNTHQTPLRGRSPDSDDRRHHTEKERRGGTGDTHQRPHRRTTDARREERGKGTAEAENSRSSELEGREHDEERREVEEGEEEDREEVEGRTAGRDRREAEAAEEQSNNKESTEDSTKKRAQTEERNDSQAAEVREKRQQEEENREARTEKRRTEQTDGCSGRKQENHRRRRQQSDRRHSDGKLPRDTHAAHTHSGQENMTHNETQQTHAPHTQHARPAKRDGATETHTQTANTTSHPRTHTNACQQHSETVRLTATTQRLDRKKQLRLATDYSTHDGVRSSACDAAIRPTPHAHT

SEQ ID NO: 990693 - protein, 255 aa, Homo sapiens
KKQKATTIFFLIFSQKGRERGDTCVWGLGPNPRPTPGPVARARENKGTRRGKSPGTQAENRNLGQRPSERPWGNAQEVRGWEQRLHLEGKQMESHVGKGGGNTKQKPRKNKRKHTWGGPPLWEQPQKGEHRGPERRVDTPSGQKEERVERERPERSRRKEAKKVNKGVRRKKRKEEAERKTSGSEKEPPKKTGRAPGCVEREGGVKHCGGGGAPKKPKEEQRAPTKKRAPHTEPPRTGVWGKEGRTQHTKKSAPK

SEQ ID NO: 990694 - protein, 500 aa, Homo sapiens
  misc_feature (127)..(127): Xaa can be any naturally occurring amino acid
SCWSSESPRSRWPPPTLASVSYPVLMYDMWACNTFSPARKIISRCEYASMRSIKLAFVQPLEIQTFRGCVPSCGEENDFPTDGAQQLIEKIVEYCMLTIGMCHEWAQLLMLRLLIDKARVETQNQLXSPYNETMTSGECDPSCCPNLVCMHVWQKNDARLQVPCLGPCGASDYYLEELMQTGPQLVPYGSILGPLYSVMLEQLGSASEGAQSSLQEVYHKSMTLERNPPPGLPSIIFEPSNGREKVHCPQQWAFARGNLGHNFPVCPQGHMSKGYRELGRPVTSGNLWCNTWPYEAPHNFDPGWAETPGGQVNRRSDDGDHTPNTDATRLPPVPTLILLTEYDSFAFIFLAWYGAQRARGARGETGHGPRGTWGSGMEGHRRTTMAPRAGREQTRGHDSTTRPRTRTAAREHGAARRGEAGASRARQEWHEGKASTQPATSGEGAGDTCAEVGARDTRGARAGVEARGRDGVHGDGAGRTRERWGRGRVETAGVREGERR

SEQ ID NO: 990695 - protein, 176 aa, Homo sapiens
MSPKSTGFPIPGENSKPVFPASAGGSWVPGRWSRVVWSWQHTLAPPQAVFKGGFQPGSPMQACMVHGRTVSGGWIRTLLGLVLTGRVACRPLFNYPVLKTSGPLRWPTCSWGVLQGGRGWGPLRFTQPPPWARPGRCGWTPPAGVSPPGFIAHCTGGTCVGPPRVFTGCRHCLPPQ

SEQ ID NO: 990696 - protein, 434 aa, Homo sapiens
MPEKGRARSAISHSCGEAHGRARGGPQKHGESTTPTTHSIKQKARSHRSTRTHTSHDPILTPHYYPPPKQARTTTTHPRTHPHTPPPTTLIYYYNIIITTHHTNYTSIQTTHTISRSLSNITPQHNYTTSHHHPTPRHIQSPTYNFNQILYITLNSIRLTNTTTNNEQQQTPNRPEPNKYHIMTYNILIFTTYFVITTVRANYTDMLLASNSYYTIISHNHRIETDPIQRITIQRTQHVINLRTIEDDYIHSHTLHTSITNTIINLQIQNRAHTHPTHNPDQTLDVSLEHPHKSPDITQFTHKHHHTHHTVHHTQHHTHTNNHNEIYNHHPHTTDTHGSKNDRKEENRTKSSKIEIGTKQEAKRDTRTRDGTMAGSTTRKQQHQRCDNTPSQQTQTHRRSTDHRREDNPHQRHTKTTTRPQQGATTGGHNKMET

SEQ ID NO: 990697 - protein, 231 aa, Homo sapiens
PFGVVLFRNLPNIQHNYDSPFTPLFVFFHSVIEHKSSFTGFHSVIYKCAFQVQATSPNPSRETCVSHSPFYMCIKSRIISNNLTYHYTGWWKINAFSFILKGDPKRIVPPWHSDEVHSECYFHMLGITTLTFSYHHSLLHAISSRGAVPHKRFVTTVPNFSLVHTSLWFLPFSLYGALYPLTIIPSRGVVCVYSGESARTFSQPTTHHLISFLSALNISLSPRVLCRGGEI

SEQ ID NO: 990698 - protein, 95 aa, Homo sapiens
WMRLIKEFSIYMTKEWPHLCGRGHLHATWATLPMPFTRSPSNVPGARNNRDNRFLSSASAIESFDTDNERGWMVVMWIISLQPTVCNTQAFECFS

SEQ ID NO: 990699 - protein, 120 aa, Homo sapiens
  misc_feature (79)..(79): Xaa can be any naturally occurring amino acid
  misc_feature (82)..(82): Xaa can be any naturally occurring amino acid
  misc_feature (91)..(91): Xaa can be any naturally occurring amino acid
  misc_feature (93)..(93): Xaa can be any naturally occurring amino acid
  misc_feature (113)..(113): Xaa can be any naturally occurring amino acid
AIPATDEFFPGETCQLRIGTGLIAVMLTLSNKSHVRGARLCVVVSDLESLPSSVTGEVVASESQSFSSTCTIPNKARLXMCXSVLEIFTYXPXINHLLRPENYLRLTLVKHDXSGACQNE

SEQ ID NO: 990700 - protein, 68 aa, Homo sapiens
EIGNIISDAMKKVGRKGVSSQVKDGKSTDYDELQIIEGMKFDRRLYFSILYYYIKKVRNVNSRMPMFC

SEQ ID NO: 990701 - protein, 238 aa, Homo sapiens
MRQTLTDAGVAGRASRARLVRRCDLAVRHEGARRGGREHGETRAAQPRKRAARGSGQSTEGGVGAERGERYGAARVRGARGPATPESVSDGRRSDRRREAGREREQQGRVTQRDGAHTGGAPMDDERMGRASGSKLGANSSKRTGAAQRAEAKSSRADCAGRAWAARTDHQADVSQKDHKHTRTRSHALQRTSDIAPTQRQQRGRAGGDAVAGDPTPHRTLRSGTHPTQRATALAYRR

SEQ ID NO: 990702 - protein, 105 aa, Homo sapiens
MLRMGCVMGRALNVLAPSPGWGSESMALIPRGHGGELADREELRQGNAAKVAAWYVPAQDGGSPGEAPNARLGAPNLGRGELISEQGSIARKSTAGPHGPRGGNS

SEQ ID NO: 990703 - protein, 281 aa, Homo sapiens
  misc_feature (77)..(77): Xaa can be any naturally occurring amino acid
  misc_feature (122)..(122): Xaa can be any naturally occurring amino acid
HKVFAVSLVKPNPIILYLGGACVLLLSSRKLYPSVSERMIIMSTFSVPIRPSSLINLTPFIDAEQHRNAAYSLMCTXTCKLFIYASIYVNTIQGPTLYSPPWSASIGRILHFWCDKSRNSFXFDERLFYAVSVREDSVYLRSYYSPTIRDAMVISLTTLQNMAQGDYMEISLANKRPYYLTLSMTNALTSGKDSPEPNAYEGNYSQIISTFRNLTRRIEPNAHHWQGSIRNHQSLIGKGDTRDKGCIEHAVIQQCQDERSAHILILARILPQAWGDNRNFQ

SEQ ID NO: 990704 - protein, 74 aa, Homo sapiens
LLLLIGPILIGNGIANAYSNDKILEHIYKLRKGPKRCRPLRVYYNLFADAIKLFTKRGALKARSGSTITRSTSN

SEQ ID NO: 990705 - protein, 119 aa, Homo sapiens
MWKKNIRGDNSTCEEHKKLNRRYNSTVTEQRRDDEKIDTKRKEYKERREADDAKNERRAPQQRRRKEHNDEQLHTQSHHRQQLKRAPNKETDTKNTERGKRKTKRRKQHATDTTIQDTK

SEQ ID NO: 990706 - protein, 100 aa, Homo sapiens
MIDAWCMSDEGARGTEEEEVRSRRNKNRITLIQVGDSEFDSPPTKWVRRNDRWKMVNISRGRFDERIIGEQGGTYLWVVHTKQRREQEEKAQHEDDEEKT

SEQ ID NO: 990707 - protein, 193 aa, Homo sapiens
MDGKETYRGRWRYNQQKKHPEWNSDTTDTPRKRATQTHKWEKRRHTALKRYKEAEHTQKKADHDQNAKRNQQQQGGKLTKPGHPSRHPEHKKENTEQPGPTPNMKTTYDKTRRARKSMQQTQEPKTSTPHKEDDQESRVRKTHNHQEPGKKAHGITENRRTDKPRTATHEKRTNPKEPQETSDNTQNQHRHEN

SEQ ID NO: 990708 - protein, 204 aa, Homo sapiens
MEYSNHGPTRVTRGRRVPTGCTFRCSARWEALHKGRGTRRDGDSTKEGRPPTCDKPFGETTRERQRQPTTGRRHAAHIAHRDRLQNEASPRGPEKWYKRAPQGGTKLGKTPVEYTAKEEPVRPGTVVHPREKTPHTPSRKGTQKYNKHQRARLETDERDRITEKNTKVGTRGRKQNPGEKGVTPISKSNDIKRKNTNNNGDPTK

SEQ ID NO: 990709 - protein, 73 aa, Homo sapiens
  misc_feature (44)..(44): Xaa can be any naturally occurring amino acid
SLQCHHPRKAFPDPARNKQGTKCAHIVLESRLSCVCLPPPHLPXSSVWCFARLQAEAPVFPCFFSDREIKCAP

SEQ ID NO: 990710 - protein, 269 aa, Homo sapiens
MRKEEKERSTPIREISSARARNTYTRNNKEIQREADKVRQDKGITHQGCQTNTQGECNEAQDLTQIKREQKGQQRDRQQPSIVERQPQKKETSTEQQPQDNDNRKQMQKQHEEKQKSHREKKDTEENDKRDTDENTTRTRDNEGEQTQQHNERPRVNETKEEQAQDERKKTSENKTEAADRAQEDQETDETRRQREIAEHRSRHRARAENAEKGATHHQDRKPTQKGGNKQTKSTHNDRDREHDKQTKHTDDKKTGHSRHTPKRAETKR

SEQ ID NO: 990711 - protein, 346 aa, Homo sapiens
MAQEQSKGLLPQQSSQQTDHGSSQQPVQILIDGPDPGRTHTHDQCNQPDNNHTPHPRMGTIPIIENNNIERETRAIENRKLGQDKGILSTTHIEKNEYHHKPTLTSLCLSSSLNQKEKDKQPHHKRERGTTPTKSAPRHRSKKKGGTNNKNTQDKPRKRNTKENKHHTADQQQKTQQQARDNPEQKHAEHNKHTNHAHNHEEDSTEQTTKRHREKQAKDTKKREQKDTEKTNKQTRNPRMNGGTPARERRQRNTAGAHAGTERNQRGRQQERTQTEMNRDDEEGRKTARGRMSRRPTTPRRAATTTKRRREEADTRGTRRGAEGEDGEDGAQRKGTTRSKRSPTAV

SEQ ID NO: 990712 - protein, 280 aa, Homo sapiens
MYHLTQKPENIREQEYRPCLPTNRTNKHISLEHMIHHRGGHKISSLERGQQELTKAIQSPDQSPSKIEEQNPGTQEHLERGQTSKEQKTPTPYKRTDINLTNNTRETTTSEKERNTQEEKTQTSRKNKDEDKQRNKKKTHKSEKMTATRNEKKNTQNTTRKKSERTGGREPSGRNDKAAPDSRATQEAIRKTITTTENTRGTEPAKRKTKTRAPTKTPTNRKKQNTTTTGDRKNTPAEERKKQHENGKTKRKEQKEDRKKQKKDAREESNEKRRKNHQTK

SEQ ID NO: 990713 - protein, 72 aa, Homo sapiens
  misc_feature (28)..(28): Xaa can be any naturally occurring amino acid
KHHQDPSRVTTGNGLMHRDFVADSDQMXSDESNENYLGHKWWPPLSIDFLAHPSTGSFYNVTRMAMWNPMTS

SEQ ID NO: 990714 - protein, 103 aa, Homo sapiens
MGLYELACRITDIPRVQSLSWVRVVLTDEMCYVTEFMIRYVIQSLVFIYFKYRSLYRIGTKRYKAYFTIAPSPVLVILIINLVLYPKPATYNRVSNCANEPLI

SEQ ID NO: 990715 - protein, 120 aa, Homo sapiens
MALFPLVTSLRKRPQGVPPQRLFAMVGATQAASPRGTNRLAPSPWGKQNSAGARAARMSTLRRTSRDSAGDDLSKPHVGTSQSRLDSYGKYTPQPAAAPLIRNKHDEGQRGTDATTPPPP

SEQ ID NO: 990716 - protein, 137 aa, Homo sapiens
VESECKSDVEHVVPCSLNYELDNPSETFLSCCSYCLVLVATSLYAQEGTSPNTMADAAGRGRGQSLYSRSEAVLACVASDVSVLERLVSIVLLPCLLGVVRRSLASASRCRLVFGSIIALLAGPSRGDLLFDLNLFL

SEQ ID NO: 990717 - protein, 127 aa, Homo sapiens
MCYFVLPTSSYATQRNLYAVAFIVSTYKINIMLLTKQQTPGFDYTHTVWDETSEVEVSAHPGITRVSVCLIYRSLLNLPVHTHSRKLVTPPHMYHPNYQSTASICNDTPYTHHTMKYDYQPLIVPAP

SEQ ID NO: 990718 - protein, 107 aa, Homo sapiens
  misc_feature (21)..(21): Xaa can be any naturally occurring amino acid
  misc_feature (29)..(30): Xaa can be any naturally occurring amino acid
  misc_feature (44)..(44): Xaa can be any naturally occurring amino acid
  misc_feature (71)..(71): Xaa can be any naturally occurring amino acid
  misc_feature (78)..(78): Xaa can be any naturally occurring amino acid
  misc_feature (102)..(102): Xaa can be any naturally occurring amino acid
MVKPHKSRSAFLNRFTWPCLXFSKHNCDXXNLRSPANASKFHYXHINSTNACNVQASRVTCTSFYSLSLSXYSMSSRXGACLKSMWIITHNTLVLTGKIFLXHVSYL

SEQ ID NO: 990719 - protein, 123 aa, Homo sapiens
  misc_feature (38)..(38): Xaa can be any naturally occurring amino acid
MWPRCVTTRKRTLPRATTHPPVSKKAPSQITGINSLFXYTSQEGFFLFSAGDFSLEPFLPTSRGLEPPYPPNLRKGHCGPQTEASPRLKFPLEESPTSYKPHSVIYFANSRRVSQSNLEAFTN

SEQ ID NO: 990720 - protein, 169 aa, Homo sapiens
MGPKKNKTHLGKKGAPQKETRPEVINDQEHGHALSPQRDGENTSDHRGSPGQQEPLQSGGRATSGDTLPTQQSESAQGANTRDSRGYRGDTTTASNRTGAHKHKMRPQRRINNQLNATYLSTRARTPPKRNHTNQTKAEPTDRQQPQNRQINTDNTQRPTRQHAHPPTS

SEQ ID NO: 990721 - protein, 204 aa, Homo sapiens
MLNLHTTYEAIDYVHNLNHTSNAENYVVPQQLVSPTTEKDASQHNTCTSRIPHERPTARRAKPSDRHYIKGTTPDVKHKQSHNSQASERHDNQYGPDTQQTIARTPPTTQQVQQEKQNQTEGHHPTHVASPPAATDQHKIPQRHANGHQAQHKTKQAHHTTERITAYHTGNTNTKHKTSQARTHKKPQAPSTTQATHTQNEDRR

SEQ ID NO: 990722 - protein, 109 aa, Homo sapiens
MVYTHVTITGHIRPLDMLKGQGLCDEQSIPVNFPKEWVGCNWNSLLKNLAQCGTTFLMEATRYILNRASIEYSGLLFPSLWGDGSERELLVFIGVQIYEALGDSKNNEE

SEQ ID NO: 990723 - protein, 194 aa, Homo sapiens
KQEHTRTIAPSDTPHYSPKIDVIPKNIPVHVEDSMQSNDNEVERRRMYQIISEAEDRPDFRNSFQHCNATDPARGERDKRRDPCSLRSMQITILWRLDSYSNLAHARGDLSTQERPQRLQDGQRAPEAARSEELKNENRLMLLAPCMQQAPTMGVWWAEGNPGSVDAPPATAAEPAPRRMLASVWAPFSQSSYA

SEQ ID NO: 990724 - protein, 197 aa, Homo sapiens
LRATSGPVCTVPGCGCPGLIAATHNLYSMNDCAQRRSCPVLCGLTDISWSNIPLRDRGLHGPSARFLSILGSLCFGMDPIQSCDVTCADVHVLCSLLALWHVEDAWQLVWAGWRRDAGSLLLTSKLIRSHPCHCPREETNYSSKAPTPEGHWVGRVDGWTDGSTCQQGQCRSLTDRWDVRKYLPRQSLVAERPHFCV

SEQ ID NO: 990725 - protein, 55 aa, Homo sapiens
  misc_feature (11)..(11): Xaa can be any naturally occurring amino acid
RKCNGAIPGGXISHAFPLYLMYLFAGILMLRRNLGYIQLRKRAPQRVGLGYNLAD

SEQ ID NO: 990726 - protein, 216 aa, Homo sapiens
MPRFIVIEELTAAVSILRVVAARIDPRLAYFASPSLHVTVAFCLRVTDTGRRCLVDRNRFVLLLVLRLCFATARFIVGLIWISRIGSARLPGLCASDDKMRFEVGKGLLPFQGVSDLAVGPGRVCSRAAVEACVSPRPYVFIPKKSCIAWWSRPDRSGCIQRLPRLHGAMRCELRSLSLLRYSLIRSRVFRIDGLSRVQAPPYFEIRLEIGRSDVY

SEQ ID NO: 990727 - protein, 565 aa, Homo sapiens
WCGGGEPGIELPRSERAGHRLHRPFRPPSGRPQPCGSPRPDPPNETSPTRLLNDLIPENHRIDRSQETHRTDTERIDRHETEETHTNTKNYRARPRTPIRATQRHTKPKHRETRRSTKDKRPRQRHPSTHEDTQMSQRERKKTQAAEVDRDHRHTTPETQAQRQSRTEARHRNENTTGAGQHRPRREAPGRPEQHGDRARQRATATGHGDRRSTHNRGSSRQKPTKRDAKRSRSATERATEREKTTAEQRKRRDLSEQGDRTKHAEQAGDRTAKTKEEQNQTPHPETRQAKDDKKHTRADKEMPDRDTMTTDTPTRRDQARGRDSEERAARHEPQTRRSRSEEHDAAADEEATRESPHERRTERTSTHRRARRRRRRRGRQRNEATDQRRTDAANERGERQQRQAARGRRGTERAGRTMTEQEHGHGAQSAAHTPQTAESRQAQRKRQSKADIEDSHTARAATAPPELRADQEGEKRTPRTATTLDADAEAEPIGEHHMRRLRRPPAARAQRGRRRVANRTTREEGQRDDRERRELRGATSDGKQRHREAPLGGAERAHEETETE

SEQ ID NO: 990728 - protein, 319 aa, Homo sapiens
GGGAMELKDGANVNKAQMMGGLTDAAALDTPPRCRAHKVQPESKQTWVGRSRDSPPTGWAALATPDPSQACSLIHEMELGQGGHRKALQTVKCSAYVGVPVASPEPVGEHSAVQARAPVGHPAVHPARGRKARTLANRSRVRLVRASAWRSRRWKSLGDMMAGEKKRRHRKLVTAMNGTFWRGAEERGLESPRPGLLGSPLPLGSVTGPRRDTASLVIPMGSWYATVFAGLAQPVTRPASQRVRAHSCWTRENSGKRGRVAKGADQGETARTAGRDAQRAPVGPRLNVQRPPCEEDTKTQVRGDEKDRKAPQKGPRDEE

SEQ ID NO: 990729 - protein, 419 aa, Homo sapiens
  misc_feature (110)..(110): Xaa can be any naturally occurring amino acid
  misc_feature (411)..(411): Xaa can be any naturally occurring amino acid
GKHQAEHIALNESDLHPLPSFAYIVNLHSHRMKKYYGDHWDHGLHCDLVRPQRARATKQLTGDLGKSVMASTSMWMCGRQGKGNKCSSVRGSLLMLESKQDEELLQRIVXVSIVAAYGPGHGYPLPGTLSEVTSSYQELHAGGDRKKLEELLIKTKKEKPTFIPYFICACKEAARRKFLLGYQPRGKPRIEYVTVTPEGFRYRGQIFPTVNGLFRWFKDHQQDPVPGITPSSSSRTGAPSSINATPVNIQLAESDTGCECPGLRSMTFTDVQGQIAAGDKARDRTLNATPSQWWLHSQIRVMEAMEDGTEWFTHGIPPTAQEQEHRGPPHYNERREVTYTRHRRGSDKSARSRTKDYTGANTNSERRAHRHISRNEGRNRPYNACENGDAKRTKRKRESASSTNRTHEREXARTYTSDR

SEQ ID NO: 990730 - protein, 478 aa, Homo sapiens
  misc_feature (19)..(19): Xaa can be any naturally occurring amino acid
  misc_feature (89)..(89): Xaa can be any naturally occurring amino acid
MQRWSRDNPTMQCDCRDSXEKSIGSCRIRGSQDQDPVNSQSLTNAVSGTQAKLKSSQMVRWYAQWNLDAEYSRGDKLITFKSRRSHVDXTACQSCHSLKLGADESPHVYATEQLVHYSATYVTSARHRFGTRDDGPTANKKQVQKISFCERGGLDPGNESCRLAHSLIAHPNLNAVMEGASGSPQFRAGIGHARIVVPCALLDIVVACCSALQIPLGVPRLRWVELVRLSTGELPRYQLGFIRHERKRNIGWHLRRNPRSASIERKKTVLRWDSTPRVAFWERSPFIRQETLSVNLGWRRSPGLAPPLRTLSFLGILSLSPRHFVRVPFSRVSCYRVGPPPVAFVPRGMSVRDFALLEGEGPSLAGETLYFLHLVRVCSTNYSWVFPLWPRWYVFTGLVATPIGVERFKKYLPVTFTTEGVSLGRRQPSRGITTMRASRDNMTHVVVTDSLEDERKYPKKEDAASVHHLQTKDRMPHD

SEQ ID NO: 990731 - protein, 463 aa, Homo sapiens
INILLERLRPAWADTRFDTYSIGHFGRKLPCTDDAFARQRAGRTPSHRTVRVCGWCEYDAETVPSKQPEERGIGSLRSRAGTYSGLLASGAVRDAMELYHTDAKRRSTECPWCVVVEPAHSERARVLDLGRFAHTHMMGWPASYRRGMANRRRRGRRNCPQTCSVRTQMGRVLGTRRQVRPRAFRTTRSVGLRDRGRPRHTVENRSAAAIPGAPLGFYTRAKATGPCTFTGTGLGPLIVAAWRPQRMGFRGWFRPRAYREGPFGSRAGGWVRFPRPKESNASFPCERGLGLALGGIKIAQATLAIRAPGSTPNNPHLIPFRSKHAHSPLQTSNSNLKKPRNVKHIWFVNLHRNFFSHANAQNHVEIFRLLRVLASLLTRGRQEAALGQTAPRGTRQKLAFEIALWGFIGCQKGVPLRPGGRNPKGPPCAVVWEFYAHFEAAEGVPSFFVGLLPSPPDVSATSV

SEQ ID NO: 990732 - protein, 435 aa, Homo sapiens
TAAAPAAPQCPECPAGPRRSGKWDPGPRQNPGAAPGTPAEESRLPSHVPFRPSCPESPWPDLTMSYPGYPPAPRWLPTSCTRVVVPGVGACRTPPSAPVDAPTSGWITVVTYCGGQITTRDLSLVGMADNSVWDSLAGCQTMPQSVYPWVPLWAGLAKQKGPPGRGWRLGAHDTDRSPNLVPVRIWDMVSRTNLIGGIKHNRSSEWPLHVFPVKYSQGEPRLWPEGDEPPLGLAPPGMKRESLKEDRYSVGNVNSGKELHDAVKVVQDGKSPHESKEEDTDERNKAKENHGEPGAGETTAERTPKTQARKHTERRVTLDGSPGINPPSDKAEGTGEQTKKRENRQKKRTKLGDVGIVSEREGEKSKYQEGVRKNGHRMDTKWRNMRRSGERKTDLKLSNDEWRRRANTPESKRSNKDERGYMQKCARRSRVANEK

SEQ ID NO: 990733 - protein, 220 aa, Homo sapiens
  misc_feature (28)..(28): Xaa can be any naturally occurring amino acid
VESSSEHALNKEALIKKIWMEHPMMPHXESLLETSGSLASEMMMVDMEPGDPNQMYTLGAESTGNSYGMCLGDHFIVYDRSRRDIIIHVIDVSETPGMMRVEHTYECRPHRMYAALRYVGQWTPIGVLASAGKDCRKEGTHCTSIHTPIKFCHASEPVRRYSKKQKSRGVNLWVERFLILAQVRTWDEIRPELLGTPGRPVDEIRRIGTKVLAHSKCSKP

SEQ ID NO: 990734 - protein, 356 aa, Homo sapiens
MSYCLIPDIVPPSRYRGAVPLSLGSLCNNTIPSRPLENAEGGSEGGISGACWMLTSKTSDLDLGEANRVTLVLDSPELVCTLISEVLIRQGSYEPFLSSEDLFLDYANPSGFPRTGIEAKGRTYRGPGLRGELETGCGERWATMTLTKFAVEPNPIKRDTATGKETAVPRGTRKQRNPPGCTGRARNKRRRGPLIPEEQAERATMETGPDTETQRPGDPRQVTPAPNKDHPGRAQVYTRDDPQESDTPLGTGTTLFWGTPHSRGKREPRLITNKDIPRETPWRHDEQTTQLKTIQGSIKQAMPVPIIRQEDNNYRVIGPSTPQPNKTSKCSRATTRYLFSPHPARSLLSRSSISGR

SEQ ID NO: 990735 - protein, 108 aa, Homo sapiens
MDLTEPVEHRSFLMTVPVPGVRGTHSEEEGFAMDEEDVVTGEAELTVGSCLEGTKLSRPNGNSLAIFLLRTGTSEVAKQIKGIHMMLTTSRRAFLKELKTLGVLCPTR

SEQ ID NO: 990736 - protein, 212 aa, Homo sapiens
MEYLLNTLTRFMRYQRFFSPCCLTHGSIKRTKKPVKLDQKRRAMRASHLAFAVTRSDEDLGEGCHRILQEDVTVTSWNSLLKSHARHQMGNCPGSPCVTARVDPGIHVRHLPVEYGSDSVWNQAAFVHLRRDYHTFKVAGVHIACQDMVDSVPVVHKQHRGATGTESRFDKGPRSPDAFNLQADELARAELEKYDSFTGLIGTRFERPNGTF

SEQ ID NO: 990737 - protein, 570 aa, Homo sapiens
PGRGVLRWRRRRRCSPRGPRERGDPVLAQTMGRRRHLLDPRHKPRPQVIRTYTRTEKTRKERKKKRKKRLPTGAGAQAEKAREESSGRHENGKKEGGRERPETEETDERSRRDGRRRQGSRDSKETEGDREHDGDSASAAHEAQESRERTEREPRGERSRERKEGEAKKKSQRGGSDRHRERRAEREGEKRGDGEGRHEREREQRRGGEARRRQRRREEKGRKGEREGRGEGSGDGGEHERTTEGGGEKGGKGGRSGRGGKGKRGPGTTSGRRRGGRRGKEGSEERPGETQTRREGEGAESRAQEGTKGERRQKNEAGRRRGREKGNEEHTSAKSEGQSETAKEGGGSRRRDRGRRGRKKREAKGEEKPGRAQRRATRERRESGGKKDKEEEERREREEGTRQAGEGEGARRGEREKAAREREGADEEARERDEGMGRRRGSAGEQGPERRERERREAEGRRDARKRKATEAGPGRRQERGEEDTADDSEPPPHEHDEEEARQSERRVHRARRSGETTEGDEKRSRVRQREAEEVARTATEEDEQQAEREGRRRDEEADEAVLRPGVDGG

SEQ ID NO: 990738 - protein, 79 aa, Homo sapiens
GGLLSNYADARLAVHQLDSVVRRSLANFPSVFVEDARKEGPAVGRYDQWLQFRSAVIKTSLYRKDMRQLSHRMRSRALH

SEQ ID NO: 990739 - protein, 627 aa, Homo sapiens
TAMQLTVKALHGRECSLQVPEDELCVHAEAAWIIRRKLVDVPVAADAAGMHVLRGKALADGTDISDYIIVAPNSIASNLSVSITPWKKVLLRNEGRGPEAVGDSPRPREVWTGESPKSLARHLQCWQMPGQGPGTVYRRDYGEVPEFAWLLDDIERLAQPRSCTLKMTENNGEGLLQSSNSREHGEVPNARLPLHVALRCVLLLRDGLIIDHQLGMYLGLWPKVLAHLLHSIDLGYVPNLRRGDPDTRGTGDEWDSQAKARALKAGEKEKGPETGLQLMFPSEITRTSRLTEQYTMWSNQPIRRDLTPSVICLSRDLTTHLLTDNNRRDETQTNNSNTQTDTHRNDNKKSNPERKPHNTHTGNDASPREKSASERRSERGKEKRQEKDRSKNTERRGRRGRQATPPQTERRTRPQTGRRRDGERRGGGEEGEEERNRRRERTRKQESANTQEPRQTRKQKRKQENQHERHTRREPRETTAETSEATDKKDGRDRASREERERGAEKRTKTTERRKERRRGRRTTTEQHRGAARAGRTERKWKERRQRGEEEEETEDEEENAQKASERKQGQSETEETEEKEEQGEQGGEEGQDRESREDERTDGERESRGGRESETKNEQDRHKHTP

SEQ ID NO: 990740 - protein, 214 aa, Homo sapiens
MTHNQDTELRLMPESTRGHSKAATVTMCTPIRRDRRTSMQRTKRSRDTYNEKQDHGHTWTKLSNGPNAQQIIPVEHSKTMDHRARHCTHDTKAARSLDGKNSSKKHSQEPHYDTEEGAHMDPNRQANESKNNSQIQSHAVNANTSWHTKKAKMGTTMNLHNASIEGSRRHEANHRCTVAEGLQTATPSSTVRIDTTRRQQENQRGGYRTDNCYL

SEQ ID NO: 990741 - protein, 162 aa, Homo sapiens
MGSGDDPFGPGPQDLCKDLSFDLGKGENLENLPQGRDGTNELKDIPGGSLKQPAGKIGRGDFADREGQAEACCGHDGLNPVLGICTLRREERGCHPREGHVMKMWDPEHMRKKSPCCFPCLVLLLPPPSLLGVKKKKTGTRKRHTQDDSKKTKNNKRRENER

SEQ ID NO: 990742 - protein, 170 aa, Homo sapiens
MCEGPHGETCDVCYCISAVRYDGKAHLLNVLHLLHFFILDVVHVMLPVMTSRSIQSRKLGTWFFTFTKTTKHKNFEGHQRQECGRKNRYIEMGPVALRNETVNPRILGAKQKKTGRDPLKEKHIKYANTQGEPAITDAESEKERASTDRQPAPGDTHVTTKGLRQAIYRE

SEQ ID NO: 990743 - protein, 138 aa, Homo sapiens
MGKAKHLVGGGQLHSHQAIAFERIGQRVISCTVRCCENVERTGVCNGYFTRPHARYPICRMRRNGQEAVIDQTFYRYKYSLIEHRMACIMDHFSVFIVTCNQHIDLVAGITVIGMIKDKKPFAKTKLHFRRIGDKSGI

SEQ ID NO: 990744 - protein, 415 aa, Homo sapiens
QRCPPPDVLPRVALIMPDEDFFSLIQRVQAKRMDEQRVDLPGGPEPGWQADRPRPQTAVPAWMQSIRPCAHRQAQPDPTSWTTGLTVHRTTSIPRANCRGQDTGACSPTDLTRTQGDQAQGQSLAQYSEEEAVLPIPQAHGDPIDPSRLPYPYMPTDKKELNGDLDGQCQGTRKLVSLVMNVTRNPFIDHKAPYTQREDRRTLKNIVENNMHRSQTEEHNTKRERTMTHKTEEKNNKGSTWEPEKLTTPPKHGIHRNTDHATDKTMANKQVPRKGQQRKKEKREENRESWEAAAGRLERDAREEGRQQRTHRRQNKHGSTRVTRTTHRDNTRREGGEGARDERKAADRRGEDGEGKEGRQEGGNGEGRRRRAGGEEGERGSGGEERRGWEEGGERAENGAEGEREERRRAGRRTG

SEQ ID NO: 990745 - protein, 488 aa, Homo sapiens
TEYGPEICGAQRFVENTPGLLPLHTSLGPWHIRPTPGGRMPGCERAVKHYRAVCGAALKWTLSKAPYLCVCPNSPEEYDPMTGRCVPPTNFCWHSSQSYADPRHLTSPDILPSQDHPTDNPMHPSRNQGTPTARDPCWQTVDSQRSGIHCDNKQATENAMLHEAFPGPQDSVDNCARDRAGMHHMLEIDRACAHSTAAMHRPFPDQETTRRPHTGTPTQTEHREVASRAVPKPGQGSQQSAMHKPQQKDSADDMKERSHTTQGDNRAGDDIQTGIPHGTHSTRRTSPNRKHTTDETAQREAEWPGTGSHANDGTHWSTRRLTHEATQDKQREQEAVKSKRRIDQAQHPLEDARHITTGARHQHSSKTGIANTSKVRATAPGGRNTHTSNPKQGRLETRSYTHTAQLINAPRNKVRRNSRRTRVKHTRGATQEPQRPQPPQTRATMSSARPIKRETTRRRRIGKEHHEPQRNADHEHRHSGPALTRRRR

SEQ ID NO: 990746 - protein, 205 aa, Homo sapiens
GSCGLVGIERDRELRQEEPGAMVEKLRRLAAALARSEAAQYDRADAACGDLEAQKRLRASTRCFYVCCLEQDLWAEIAKNLHTMAGVKGLTMLDHEQVTPEDPGAQYLAYVLRLLADIGLKPLMERAQNLNPMVAVTVDTAGYTRRHQSSSHHYNTQHDMSMLMTSCSHPRGIVTTTHTIDQDSWTTEVPPEYTDLNTARTLTNG

SEQ ID NO: 990747 - protein, 120 aa, Homo sapiens
MGPSSSSPLYPPSSCSYTDSDICRSNSMRITGPRLRNTLRYRAPGQMVTFGKEDLTHREPKAPGTRDQGTAPLTQSQNGANPERTPRNGQGKPEQTGKNRTNRKRQRRETPERTKSLRQG

SEQ ID NO: 990748 - protein, 103 aa, Homo sapiens
MVGHSVNTLAFALCFPDLVACTSMPVIPHSIWVVQLVKIAEDIPQEVKAGANCIETCTDQYRWSSYTTTMSGERYRSARNSIDNNWRDINLEQDTQAAPRGEL

SEQ ID NO: 990749 - protein, 113 aa, Homo sapiens
MESETEPETRHAPWMKSPNQRPPQTCELSGDRVFGVWATINGPPEPRLPRASASRENRGEFILGSCSWITNVSGTCFQSRKNGMYTHLDVQCEESISKMPEINAKVAESTRGA

SEQ ID NO: 990750 - protein, 163 aa, Homo sapiens
MQACRQACSQLTGQAGQLTDDDGRPMSSTKERRQTERRMTYDTHNTATKLKLQKKQGTHGDHITSLHIPSLSNLTREITYQNKRGPDQTTRETVHTQQMTTTASHTQPNPKTSEEDFANRGEGQTKEPQKYHTDPWIIDPYNKLALNKETFSHEETCYMNLNN

SEQ ID NO: 990751 - protein, 115 aa, Homo sapiens
MKQEGERWSGARRGSTEKVTGTAEQGCRTTKQRAQTERADGEERGAEGKTNETEKADDRKSSGRSNEESERASDEHREREELERCASGGGSRGWALMTVSSEGMIAEEKDGEDAR

SEQ ID NO: 990752 - protein, 241 aa, Homo sapiens
MYRSFTDVQTTVENKIELGDQTPDGLIIGKTHLAQRHFPRKGYNAFILLRIQALKSPAIMTGPLCVSYLIANQEVTAYYRHPRPALKLTACILTTINRRVSGKWIDRAPVHELLTGHGKNGFSLHVTGQQYTWIVPPNRGQLTPGTVYGEQHIKKPGDYPIDNPVQGQQGIIHYKAAVGPIKPLGNLKTSLRTESRAIVGTFPFGQQQTNPQDTGFGTTPLYGARNRVPSVTISPEHKDRV

SEQ ID NO: 990753 - protein, 456 aa, Homo sapiens
MCVGSVRRNKERYKEQAHKCGLIYTVYTPDRTPNIICVSNKGGTTSLSHGDTPYNEEGRRAQTLYTHVSPEQKRPASITPRCAHMPRTQRATQNTRAKESTRQGTDKNDTTQTRQQTRKHTPSTARPTHTRENKKRTKKETPHTHRQKEKRPQQAQTKHTDTENRKKQPNNKKTQRKTNEKTQKKERTKNKTTQRRKRTQRRRREKEQRKRRRIKKERAEGRGSGQTAKGGENGSARAGRRGREKEETETEEPRGEETRERRGENEEKKSRGEEENGREGTKEEARKEERERERRETKRKGTIRRRRSDTNRHEGEKQRSTDTTNSDARTEGREGGSERRGEQTDNNKEKREEVEDGKEAANKQGERGEKEAQEHKKRNTENGSTEEEKRKNTDETHRKEEKSERKGEDREKTERNTEKREEGEKTEKNQEEKREDDERQKRAKTKQNGRKERRHD

SEQ ID NO: 990754 - protein, 191 aa, Homo sapiens
MALEVLNLPRISSWQDVNGLTMLDHEQVTPEDPGAQFYDSYWVCLAEIEAASLFMERAPAISTPIGRMCKCGQLQDISRRHREYHIYHVKFRMHDGCLNLTSITRDVNRFTLDPDSVHHKHTAYKILNRQHDKTWSHPRGYNIVTQDLRENAMTGGPKGEESYEVATKGKPKDGSKELGPGQPKRSKKMRN

SEQ ID NO: 990755 - protein, 97 aa, Homo sapiens
MRMCPDKRPTEGATLGMKPNDPQITDIPDPYPNEAICGKGQKTDSPEKRDRDINQEEADPQNLKTHRENTHKQNQKKEYNTHGEDTKPGNKTRHNHN

SEQ ID NO: 990756 - protein, 258 aa, Homo sapiens
AVSTLIGWALPHASEQKLQHKEDFVMWTCDWTRSASDGDQGRGTGGVEEPQHEDFPRLSRAITHTHECYQTILTTNMTDAWRTNRHDIRRKVESIGTCESTTHERPGKQQHTTSRRTAQTLVLLIHIHTNGVSPTMALDQVDHASDIRPMSPLSVDTTKAMTHEWTIESRHKQQQPRQANRNNKQTFTSKQHKIASQTHSSCMRNQCVRYAANRTGHPRGGPREEQRSDKKKERQAELQRTYTTRTNLIITLQHHYHD

SEQ ID NO: 990757 - protein, 149 aa, Homo sapiens
MIACCYNAREYKRGWVQHLSTLAFRQATGKMGDGSGAVGIRTIGGRYRMLSVVSFEVTHNVGFTESTELEEVKSRTHVPSCNVGRSVVLVSGLFHHNRTVLAGAANSAGDCHFAPLRELQPFNLPRKVQKSFTPETNSGPLKKRQGFNY

SEQ ID NO: 990758 - protein, 125 aa, Homo sapiens
MNTFGWRALLVDSGLGEERNRRRILAAFIQHPWGSKRLYAILATDPCTVSKISFVAGSRFAGDIILVRTNIDPCDSGKIGLPGYGPDLRSNRILLAERYACKKRSKNRSTGCPMLKGGTHTNFIK

SEQ ID NO: 990759 - protein, 108 aa, Homo sapiens
MRTPGPIPRRRHHDALDSQAAEPRDSHQQRPQRLRRPGPATSKTRGTHHQGTYTAPTHPPEPGTLPWPRLHPTTGSRSYDNWREEHTNTKRHHQTATQKEQQDEIHPQ

SEQ ID NO: 990760 - protein, 370 aa, Homo sapiens
MCPAVKTTETERQKAQGHKNHRKAPREEKEHTWEESVTFEKICVGQNCGEPFFPPQRVTALREKPLIFQQERPVMLPEGAKRGRRQSVLIAPPSAPTLCDEGHTVGGQTPQNDQRKEQRTHPKKSVVVSPLTGAYTTVGGMSSHDPPTGGEKKVEQSDEAEKGGTNKMVATNVAEEKTTEGGTTVNIKQSRLITYGEKAAAPHRRGDYKPHTATEKMYVVIKGEGPHTSQGGATTPDRRQVAHPSTNDDSKTHTQGWGGLWQSHRRSETQHKGAGRCNVRASEYLGTPRWPPHSRREGGRVRGNIHTEQRTKGGSTLRVMSRVDKPPHHVVSEGEHKPTAVAPRVRKNMGSEAARHTTSPSKRPKAHHES

SEQ ID NO: 990761 - protein, 116 aa, Homo sapiens
MLQNKVPTPKTYRPGTPTHSIHQVRGGQPKYHGDRERTPTKHTGSTQIQGEAEATRQTATRQHTATRTGNDKRGTENPHQPARQRKRWTRNQKPQQRTRAATHKQNNPTTPRGAEH

SEQ ID NO: 990762 - protein, 126 aa, Homo sapiens
RCVVEHMPCSALMPFSDTCAGLVIPPRHFAERANGSSVEQKELPLSLYGRYASPAPGNNTLERGPCSRGPTPAPEGGASRDELETGASARDKKSWDKLAKPPPEWVPDYPRRSIQNASGDLGERTG

SEQ ID NO: 990763 - protein, 117 aa, Homo sapiens
MCGPPSQQECVAATLTQSSDTVIRKEQVPPRSLRNGERIRRGRRPSCAAEKPVYWRRGSGADPGKELLKPRCLPHGGIYKLQAGLFLQPIIFYLNTYGTYGSGFILSGFGRTGSRTA

SEQ ID NO: 990764 - protein, 447 aa, Homo sapiens
  misc_feature (447)..(447): Xaa can be any naturally occurring amino acid
AYYQRTSKKIGSDRAIGKKQLEKDFSSMKKYCQVIRVHCPHPDAPAILCASKKAHQMEHPALTRQAHVRRAQLPLAPCAPAPMTHATRYHADTHKLLQRPATADCTRTPHIPGCNPHAHQPALPKRARLHPTLASAPTHSTPHPLASAPTTLHPPPPLPPPPPAPPATLSPAPPATTPPALPLPHHSLSTPSLTPHARQSPPPNTRALTPPSHTAHPCPHLHPHTPPPTFTTTPHTHRPPPHPLPPSSSPPPPRHTTPPHPHYTPASSYPPPSSPPPPPLHHPTPPPPPTHPLPPPPHLLPSPPPLIPPPLPTHPTTHAHSPPPPTPTPTPTPSRTPTTPTHPRHQPSTSPPSPTPHPPHHTSASPHSALSHAPPPLTQLDSPPPPLPTPHSHTAPPTHTRDTHTHSHNHSPHTRTHRPTPQDTLSPHTTPTLTLTLTSRSHYHTCX

SEQ ID NO: 990765 - protein, 414 aa, Homo sapiens
MTSVTKATAYDSFSNLLHQPSFNASHHTPSMCGLLPTHSSCKLHCLLAHNWHPTLLLPYIQLPAPPSSQHTLATSPSPAFPRQALPPPRLPRLLPRNLLAPCSHPPLLHHTTPLSHSLSHTLKPPPHHGTTHLYAPLPPLTSACHYPLPLTPANSTARIFTLLSTHYPAHQTRTPSPLLFPHKPRPLAPPRIQPPRSTPPLRSPSLHQPPTFTPTCAPLSPTFQRPPALPHQPFPPNAPTFLHSPSGPYASQPRLPPAVLTQFLPFHHLTLLLVSFPHTSSLHHLTHPLALQSTPLLHSSTTHLASPGPQPTSLSLVPPPRAPRPAPPSPLSSLTLLPPLPPTQPPPSHPYPPLTPPPFTPYLPTPTPLHPHTPSTTPPSPHSSPPPPPLPPTPPTQPSPHTAHLTPPRHTHPP

SEQ ID NO: 990766 - protein, 428 aa, Homo sapiens
IDSKAWRETLTLQKQLRYLLFPELARHLTPATGFSVHATQLDFYHQLGQLCSGPETRQPPGKRSTGAYKEPARDQGIYLAYGNDLHAGGHNPGRRRVNHQTMPYGRKQHGGPGPTTMCIEGSQDCENPKAKPHRFSIGTGTKGLYDRAIHVIQRCPLHAGSTVACDNTKNDAVHWQLTHGAKHQLKGANADLPEKSRGPERARADQQMDCRRQTLNTLAGNSTQVGPPEDVWKVHETALEPTTMTLPLGCPDEEPTSKVRPDPACRTKLTVMPRHIKRTPNNKITSVTPGGTKESTKEENAPNAKHPYRGSTQTAQIPPNNKNKITEQQEHTVQNKKQGHEPRTPQEKTRAERRRRAHTRTHIETGKRGREGTTESKTRRRTQEATRNKKKSRKNTEKKQKERNKTAKAQPVETEQINKKSREHQRRE

SEQ ID NO: 990767 - protein, 113 aa, Homo sapiens
RVCRQNTGVVKTTPKSQNRCKEHTTHINIVVIVTRPFGASPPLLAICIYKIAVSAIDIRVTIDKHLTKEAAVDREQGSSKVIAMESLGHKLERRSSATVGICRFDHRTLSAHL

SEQ ID NO: 990768 - protein, 107 aa, Homo sapiens
AALEECGGGDVEWAAMPPGAWALGPGRGWGPVLAWGVSWAPHHNHGAQQTLEDQVSEGHELEHTKLPLSVPQTDEHDARRETSYDTESRQTIITAERSKKDLTERDQ

SEQ ID NO: 990769 - protein, 309 aa, Homo sapiens
MHHCGPSRNRTRPQAILCLALGPAWAQPLNDAMFGTQLLQMTGRIDVSEAINFPMSRSTKSHLFPKADIKIIILDDLQTSMTDGAQQGLRQNHGKSTLHATLASAIACHCFGIGSIEPIQSPLSQPSGNTTADRAQILTRLTDIVTRARTRDNATPDDGPETAILFNGTKSNMRPRASTHPAATPFYGTSASIHAGRNGASKGHEYADPHPMTWYTGECTQNGRQCHQLANTETNTDPPSDRYEGNNTKEFLHTLSPRSHAPHEQSGTRVSRDVTPPLDPKENPPQRTISMITHRRAHDTQQPHDTRIA

SEQ ID NO: 990770 - protein, 373 aa, Homo sapiens
MHKCGQPPRVKIEGSVMQVLDRRRQRGTSPQSPHPQKTTTSRTQVIPGGQASDQTHRTNTMGSGNPGPSALDGDGQYLAGTDVVLWNPVPITIPGHACPDGHLTDRNSGPYIYLGDPRIEGTSSTTGLVGAQKGSRGKPSGHERVWRHAFPKGAGTRHGRKAQELESMTDTGNWGHDNTRPRLKNIVHGTNGALIDRFDLWSRTMRHCNNGAERKTHGREHTRSQNDKMTQDTQTAQKELTQKNFNAPQNNNNIKNTKTYNQPTKLTYPQTIKHTKTYTNRHNNNTTHTSTQHNSPTTQHTQQPLHKYNTPHYQHHHHKFTQKRDNNIISKLYILIHTITTIPYHNHIKSYSRIYYETPIHSNRLTTQANAYN

SEQ ID NO: 990771 - protein, 169 aa, Homo sapiens
MTVLCLVLVPWYDRTREPLAVDVKCREDFAKRICTTPTVLRCIVLRDSALDRDLASCLDVDECRSEAQPCAGRSAVRTLPGSYACCPGLDPGVPQRAPRAPVTDVGMSAKEYGPEFVEPDVDENTPGILALTNQTVNLCIRPNDQGGGMHRNVKRVLKTLPGVCEAALT

SEQ ID NO: 990772 - protein, 349 aa, Homo sapiens
MHLAAPASGAHSNLPACDLRQTQKLLHFLAPYHHLAGAAKTHYTFYTHAGQIVHIQAGPVWQPRSDAHSTGQVHQCMNHGHRTPTGNLTTGHSAPCKHGTAISCCHYQMNANRMSNYDILDDQSMDEIIGHHGDQWTSDSATGSLYEPASFQTQHTLLIFGSDHGDSVTNLEPKGPHTTAGAPEHELNIMYHGLQSTGTESQSRMSTMPDRAFSSIDPHLLAREAHTDSEQWGTSILDPATIQRKKTPETASSNNLQKREPSTHKRVMTTVRRDPTSDIPSPTQQEDKKHDANIWHDTREPTYSESDSRHRELTKQNNEDQPPDTATRVETTGPEPRTSQEHTKMTHMS

SEQ ID NO: 990773 - protein, 604 aa, Homo sapiens
  misc_feature (92)..(92): Xaa can be any naturally occurring amino acid
  misc_feature (205)..(205): Xaa can be any naturally occurring amino acid
  misc_feature (465)..(465): Xaa can be any naturally occurring amino acid
GVVCLSSRTDGARLRYQDPEAELLSTELYRTAPTVVSLRRWRCEPSGDLCVSSWHLAALWVPAHAAAIISRFQASIRWRNAQRLVYASQKYXSSKVDYAHLVSGGEGPVPVPTRRWGPTIALPWQRRLTYLTITIFPPAAYLPSVGTAAGNGTRYGVTRHKGLEEHDTLIGIPGQLDYWQPVGHHKAGSERAVTRRAAPHMATHXSYNTPKGRWWQGSGLAIRFDNARRRHQSPSETRLAGGRPQDEGARLARGYKITGAEINEPRVAKTGLASDLGPPQWGTREAQTPPWGTKPQGGSPLNMGALACSTLGPPLAEISLRSAQNIRGNRPPPESITFVWKRFTPWGKGNPSQAFVPLKANMHSQKRFGTTDRLDIRTRTQRQWGWVCHPRGTAWKTPKSRVPQSQEDIGGMEGTRVNAGSIGRAKGGHGPSESHAATRQQREVSSLPSPRVNTEREHGKDTEYXWERQPPERDSYHSGHGVATPTMGTSKDKDKAKSVKLVHRRKRYDPPIPDCNKYRRNGYCLINSEILDDKQKDRLMNRTTWCAPHKAASYWTNPSTTYTNTKKQDTGATQHDRRHSGSNKRQSKDDDMQPAEGVTSYDAT

SEQ ID NO: 990774 - protein, 208 aa, Homo sapiens
  misc_feature (100)..(100): Xaa can be any naturally occurring amino acid
MNASYCTTTRLVRAGIQSMKGQQEDIQWSLGKSASRHVSVCSAFSLSDNTASHSIKVECLVSLHADKRTIGPDLVVSGYSNSEIRGLVLLRDTLAVRFSXIINCPRSMTWFILFYSMFMGTKPHWQSLGNPLHTKSSGPCVGLGGFFLPHQWEPLGVHQGFPRAPERPLLTSRFWSKSLQEARTQLPFLTFPVHFCRPWRKLFFFNLK

SEQ ID NO: 990775 - protein, 157 aa, Homo sapiens
RGVMGGLFWRSALRGAALRPAGPGPEPARCATAREGPPGPGRRTHEWRMKPRWRCKRRESMRDDDPDDYREGQGHSRWMGMTDALQRHQRSVHCTKKYRGPCRKRKPLHTHDPSSDYHAALGDLDEWHNGYMEKRYNRSIPTHLKGPKELAQQPNIG

SEQ ID NO: 990776 - protein, 76 aa, Homo sapiens
VGPASRTTLRGATSDLEVRGSDLPALLADWTENVTAVQGSDTYALQLMRAYEAGAIPWELDDLRLELMPLEDTAGH

SEQ ID NO: 990777 - protein, 442 aa, Homo sapiens
  misc_feature (434)..(434): Xaa can be any naturally occurring amino acid
MHVQSTCYVPIIKQHIGTQHARHQGPKATHNIAICMVSKGPCVCTVQSLLAIMPAHACHTCHLKQTIPQPALTAQHVTSRKHNMAMHSTFPIGTLRLYNADRQQNSCYHIESKTQMGPSTPCTLAHDYTDKNCSKELTRECDSTIGHNRIHDIMLALEAYSNLRPKPRPNKKITKYAGQATPYYIHGLQVKTQKQGGSTGPPTHIPREAHGTRHLELAGNTSPKLTDPRERQGDSAKGKHKNVEHLHWTRTGKRVGGYKTLKRNFDDHFFAKQHTHGTQMNGGNTTQGKHNLVHKQHRTALRDHDNDTINMINVRPFPFRPNGRLGFANTEIHANTITELQHTSWHHCKTYTTSHTHTSASSGEHNRAQVTKRRPITQPRRGDAPAAPHHGAIAPSGAQRETALLHREERKQGTKQHGEQPHPAHATTHREVRXITTAKPDG

SEQ ID NO: 990778 - protein, 117 aa, Homo sapiens
MSATNMHQYKLHCNSTPEGQYTQKTQGVIDRDMNHQKADTHEKYGNAGPHMIELPREQLGTMIHNTPNNKSVNPKRREQNKNGDNQCETQHHPLGSKDRKNTERKYAPHPKGIRHVR

SEQ ID NO: 990779 - protein, 116 aa, Homo sapiens
SPAHGLPRHSRLHALLGLAMPVDLSKWSGALEPCEEDGRAACSDPHDMSPYSQGACGWTRLGKVLSAHPGSRNRPTSIFVGMVLAFQWHKRLHTWVLTRSPGIASQADGNGTPKNT

SEQ ID NO: 990780 - protein, 181 aa, Homo sapiens
VSWSIIDSASQRTIEAPAYLRKAPLPSPQQIHENICSALAYNPYYIMDMDYQVQIQEEFEESSEILLKAVSLKTRWEAHSTFDLSTGKHKHEFYLFSGIWYTRAGGATPSLLIVFRHHIGCHHNKTNRGGFTTAHKCSCALLQGVRHHNIYGGAPRSTLKGSPPSGTQQRRFNQPPSPPLF

SEQ ID NO: 990781 - protein, 460 aa, Homo sapiens
  misc_feature (300)..(300): Xaa can be any naturally occurring amino acid
QGQRSRPVARVVTIDEGDGQDLQGWAAPSLAAPVDVRRVWVVPDQVRAVTLMVELQKRKEVVHTVSPGRDLTSVKLSPSAQGISWLLFIMDEHSGEIKRHDRSREARSQMPEGVIEVGREGSVPRAGEFITVEAVLIPIRAIGPTIARQHQTEAICPFPYNIRGPSGRRMNTGQLLCPVWVNSRATQSGCAISTAENCWGVTHALTKKLGVHRANPLNNEPSPRPPGPWRPLRVNPDPTRPVTNGAANTNDRKAQHSFATPPGGADGKRSECCDRHSQGCTWTRPLPPGLVLEPAYEVRXSMGKQTGQPSPPKRPSVQRPSEIDTGTCTQTTGDWLPRRQFVERADHHGKGAQGVATDPARDRADPEQSSATTVANATYTPPPAKQHHDKRHDNKRTAPYPAHNTGNPQKGRRTHVYTPIRKLGQLGATTEKPTRARYRNRKHPDTVYDTRINNAVGTHA

SEQ ID NO: 990782 - protein, 195 aa, Homo sapiens
RKRPGVGAGPDSDPRGRFEPPSMVTEAPLIHPGPDSRPHRRTTQDPDLTQQLPRARTHRRLHLRDTDVRGKGDTDEFIIGDHRENAEMQTTPCSAPRPNRTNAMTERTMREEFDKEDNIGKRDAASHRQTEMTGAGERNTSVVTPRRDGNYHIGREDVERYCTSHKQNPEVIMDNYFAVGKQAEMAPYPIPMTKL

SEQ ID NO: 990783 - protein, 179 aa, Homo sapiens
MMTRSSAKIVNAHTGEKPDEFDVRHLPGSIWSWTTDNSDLNVLSSGTLNITDSYRNIDRWWLDGKLLIIFSSRYPHTDNLSRDNTKSGYYAAIGDTKFESGQHVVVSSGSEGAIHAITPNIANQPDNKKKGKKRPSETRYIPDKTCCRRNAHILLTRAMDMTQQAHIEEAQDDIRQIKT

SEQ ID NO: 990784 - protein, 290 aa, Homo sapiens
LGGVKCLVAETVSFGVFGKRVVCGPVYRSGDTRETGGVTALPLPARVYWYCTAISYAADPYALQTRLAKRGILKHSWTPEPDGHDDSFAEELLTELTPGGPTDGHQDWTGLTTKLVQRCSTPYPAGHPHIPTGHADTDPRYPGSPPHLNPSSAGLPNIGQERSGSSNAQMLTENVRTGGHDKSGTGALTSRHRSPGATSDQRATTQVPTRGPRTSSDQGIDDRWHNTQVSHREQRKTGTATRTTDSHRLNQEHVKTHRDTHNQRRHMAPISLYDHAPYAAMIQDRPINQK

SEQ ID NO: 990785 - protein, 293 aa, Homo sapiens
MAELETLYTYPENWRAFKATHRCSDTSGAQVRVLSETSPHSILWTKPTAPHEFHPPNFLHGKGPSNMRVMTGFCSVYESNAIAYYVSKEELRGKYSRRPQPSVVQWVSFAEYRYRAPSQYLGSTPPMDIMHHNKEATANAPEDVGDYCGCRTAYSTDEDYTAWANTCHRAEINRMSCDPRAGIYKTEILRDLTNRPGPNQGTNRSGPQPAINQAPIRGSTRAASQPRSARGPHASQAQETYSPTPRHPIRTHTTAPESTPGTHGRRRPEPPRRGQRTAHHRQGPGTRRAHLRP

SEQ ID NO: 990786 - protein, 283 aa, Homo sapiens
VKGHCYDGGAQEAAECAERRMVLLALVAGARLGRRLSGPGLGRRGTVTGGRALPEPARSGRILMAGRAPVVQYVSVAALTAPIAVFVWGLKSSRGTLACLPLWCPDSGPGPPGRCPTRRKNPSPCPIAWAGPTRFHLLIAGMDYTLLYSNDCWIITKNVWEMGLNKDSQLGITQEPKDKTEGLRSMCEASPVSLALHRTLRRNGCVAGLMGRGHSLGVDLTGKESISQWETILMRNVERKVVPKFKFNLKVHIVQQMQAFHVPVGPVTMDRNRHRSPKNNGKT

SEQ ID NO: 990787 - protein, 273 aa, Homo sapiens
LGHRRRGEKRIPSEPRPQVTPPPGDAWRSPSPLSASLHSTSPHPHDLSGTTTAGRAMAGRGGARTTQWTTLLGTRSVNLSWFCWGSLAERKSKPRPPPFVQGTRFTRYQESTIGAAFLTQTVCLDDTTTSTFEIWDTAGTRKRVITELSPMYFGGPKACIVVYDNHQNTQIQFATGQEPAVKGALQRQGQTPKSSIGTPTGNPGQNLAHAKQQLVDSPSEATSTLQTTDTVCLFMRGKSSKFAMHAAPNLHATSSEARQTKPRCTGAPRTKVP

SEQ ID NO: 990788 - protein, 246 aa, Homo sapiens
SSLSAPSVALAFQQHLLKLLLGFQPCHFALFQAGFGAGLLLQAGGQLRFTALVIQFAVAEFLFRLRQLRVQLLHLFFQTGNLFTQWLGLRTQLSFPDASDLYVPGRCSHSLWRFVGLVFLLLYVAQPLLIIFQIAVERFDFTIVNQVEIVSGGTQQMTVVRNDNQRAFKLDECFGECLTHVEVKVVSGSSNKQQIRPLQTINASTRPGFFPHRRSGRVYFGYFIALKTKRREGSQRHFLFPTPDGG

SEQ ID NO: 990789 - protein, 408 aa, Homo sapiens
MRQDSLDIKKISPFEHQTLLTSCTHPGDPDPAAHSAMRMSSAIRDILRASNLEAMRDVYIVKDLMETDLYKVAEQPAAEQMTIICYFLYQILRGPQGTIHSDNVLDRDLQPPNLSIRTQPATFTIWRYQALDRIAGYLSMTTPDFLRSNVDYALIPRAQRIVAETFQGANNQVPFDHLSLDDMPYEAIEMRLLTGPILSLTRTYLGYGSPHILGILGDPQYPRKNTSDGFAHTIVMPSNNHTEISDIHDPAVFEPNIPPTTNLTNLTAVPTIYHNPNIRIIVRKLLPPPSDYIRQITQLTNPHTRRRCDTTQGEHHQKRDITEGSTTKNKEGDNTTSTDNPTARGAQSKATSDAAGRTIAHQQRVPKANTAVDHQQNQQDQIAPEHSRTTKQRKEAAKQATKNTTNRR

SEQ ID NO: 990790 - protein, 165 aa, Homo sapiens
MVTQPTRPELAATTTNSRLEPRRDHSTPPPILLPWRKDHPRPQQLTNNTTHETKTGTRPEGRSVNKPPPGGPTLNGPPHHPRATKHNTPRRVPTTTQPPPNAHPHPANAPPPQHSIHAQNPPTRRNNATHTRPTDLPPHTPPHYTTRATHTQPITKHNTRQEHTT

SEQ ID NO: 990791 - protein, 341 aa, Homo sapiens
SFLLLQQSGDAWAARAEVDQLLVAQIVRDAARWTLAQDSPVPRLCCCPRGVPLRVPLGPPWPAGLVPGVTTLPCEPARCGCLRACIAGPAIALTTGRGPWLPICGAHAACAHKRRTGREQAVQQQTHSQQDTYKAERAGEEIDPTRRHPRTDTETQKAHPEGPRAGKGKHARTHPEQRTAGTNTNTHDPDTGPANHRHPQGGSPQRRPDATHTADHQRPRRNGKTPGTLSGTSTKPKPNRQIGQDEHRRARKRDQTQVPAGGTHPPPARPPRHDNTNHECTKRQTTNRGIQSRPHTRTSHTKETKATGSNHVGNTRRDKTKRPHSKRTAATTTEHHAAQFD

SEQ ID NO: 990792 - protein, 111 aa, Homo sapiens
MGKKQQRNATKEEIAQDNRKKENTQEEDNKKQRRRRGPQKSKRPDEKEEAEDRKKKRGTQGGREQKGETHEEQRATEKSRGEEKGTRGQREGTEPRQRRDGETQPEGGQKD

SEQ ID NO: 990793 - protein, 261 aa, Homo sapiens
VTHTPRGHVFRSEGLGLGESGKRAEPRNVRHGGSCQTRCNGLAVPYGLHTDPDSRHKYPLRSRPSVSAERTTPRIAAFMPGRITAALFNTPIILNHDYLLNFGMQMKSVAGSLLAHRSDPTNVHNEYNNHFLLNGFKVRPNGGILYNKMRVWLSFILIHESIDRITPPWVRRNRGPDGIITSDPGTRRTASPALPDPTPYVPEPKAESSSITTMNSRIKRVRPDCRVQNIVSAANNRPGSHDIIISADSSGNADPYMIDRS

SEQ ID NO: 990794 - protein, 109 aa, Homo sapiens
MHESIWGRLLSPVCSSIVLVVKRWVTVSKPYYQDLGGGIRMNLIWGHWVTISRNAEIARNPGKSDDVADMVPIDMGKLVSWATAEEAPVRLEPEFQDELKSPSIFGNVM

SEQ ID NO: 990795 - protein, 480 aa, Homo sapiens
MRTSRPVALALGWCAVVHSYPKLKALARIALGEGILVQDIPFDPGNMHMSYIFLSVHSIAEARGRDTEGQYRQASSLKGLGNGNSHFSNRFRQQAGGAVDWSFSLSRVKCSQFTHHMDLGGSRTMGEALSEGPRRGAYSCPMGESLKGIPWGTPTRGLEANPYRRSGSKGPEDIAPSGAYGWHLSGDTKAFLSLPQSKKEGLAAHGVHFPCHLIPPSPPPLRHVAMQGVSHPADSLQGNHSLVCWACPPGLSVALILLRNPLTCMGSPRLVHPWSRVCLRRAPLSFRSGDTGQPGPLGTPFWDSTSSTWFPIWACACLCGPGTDLNYYGGTRVWLPHPFRKMFRAPTGGGDNMCFVPTARGLCDTHNGVPRFGWPPRRTDQVAKHHPIDCVLPQPRPTQGRRHTHVDSSGDIHPSSSDATIAANERSSDHKPETHRPRTHTVGGQTVLDQHDNEIAPQRPIIPNKQVANQSDKNHTAAEQ

SEQ ID NO: 990796 - protein, 86 aa, Homo sapiens
RRITEMANGIGGSGRCSRVSTSAEETGLVVLKIYQDINQRNEWTNGNLKVCTREVRHGDLSSRKIGVEDYQAGFPIPYSHRQEDDG

SEQ ID NO: 990797 - protein, 163 aa, Homo sapiens
  misc_feature (84)..(84): Xaa can be any naturally occurring amino acid
GKSRGTGGLWVKAEANMGFGASLGPLDLSHLCVLSCRHVSSSAYHLLLTAAFTRRAADTRPVCQHHHESSRHVVHAPLVLSLQXVPAQHTLDQATRGYQSHAASARDASSDPYPSADTHHLTQPSPWAHRPTTRPWLEEQPRPTPPASRPYNPAYMDAPKAAL

SEQ ID NO: 990798 - protein, 352 aa, Homo sapiens
MPQCKKAKGKKVAPAPACREEAWRLTKVVNPHVREKAYRILGIGHGHPAQTETSPCFVKWPRIYQVAACQSSHPSIRQDESASHAINTETPKAPWTDQNSDTSRCMYSMDHKATDQTDQQQRRTDTHDGPCRARSRQKRKAALGRTRDDPTATGRPNTDPYPEHSEVHNERSTEPWMAAHRQTKAQNMEMADTATTDRLESTSEAWIVRSLQPLSELIARTHKLGEGIPNFTMAFHVSRVTTGANAQCAQRGVGSEDAIHECMGHSARIRRLVGTPAGRHTSEQRNNKESSHSRGNDTHNAAHDRKPTRTPRSHTDINTEHHDRQIQHRDNIGRLRHSDPRHSHTSDTRQSE

SEQ ID NO: 990799 - protein, 274 aa, Homo sapiens
VDQRVPWSVASYVTFSRHRSCFSNMTPGRFNLLQHGCARSERTSRRAGPGWEVVLSALARTFAGFPASEPHALKVHSYRGACLHVITAGEIGSSDLVVARGLKCCWLLGVKLPTSAVPSSIPNNCSGARNGACASSVSGQVDQVGVPRDCSSDGPCRLTEGGRSLEAVDTSDLPAFDRPPRHPLAYPSSVLHQYTGRPIELEQMLLSKVKVPHTFLIHSYTRATVCQACKKLLKGLFRQGLNGKDCKFNCHKTLRTRVPNEGGAIGATHDAESG

SEQ ID NO: 990800 - protein, 116 aa, Homo sapiens
PDCTSPRCYATLITTEYRGLIMECELSLVFPSSLLFPKVSIRQVQLVAVWGDARCVQPWGGPCGLSVLAAVMVNVFRVSGTANGCLRVGIRLGLPGASEGVRICGVLFSMRVVMGQ

SEQ ID NO: 990801 - protein, 127 aa, Homo sapiens
  misc_feature (99)..(99): Xaa can be any naturally occurring amino acid
MRKGRRLQGRDRQRQRGTERSLGERGSTHYSRWAATGTKLPRGASTKPLLCLSPIHRTPVERSDLREKHPRRRVAAQNPEPCRSTISGSIHGGAAAQYXHHECRSQQNWPRGEDHGHMGANRGQRPY

SEQ ID NO: 990802 - protein, 279 aa, Homo sapiens
IQCLTVHNKRRLDPTFTLGAIGLDTVNLLGIQMTGGEIEVLRLVNRPPANQVIHGVTVRLSSGASLTRAACQWDDQPFAGYNHAPQLLRVTYRRYTGTFVDNVGPFKPESVVAQSVPRGDNGLLSLIVRLGTRSCPCMQRCPGSESASLGGSDQNSLGLRSSRRACWQCSKRPRDVREQTVVRPRFAWVVGLGNRGRKPVFPGVPRLSLPRVPLWGVQPDPRHGRWGLGQRAHNALPFQGGCHQYGGSAPTELIASEPALGATLRTIRAKQGEPRADPL

SEQ ID NO: 990803 - protein, 570 aa, Homo sapiens
  misc_feature (335)..(335): Xaa can be any naturally occurring amino acid
MQNIKDITRQRSTSRRTVVKRLKRGAAAPLANGVVGEGCQKPLEYVDAARVGEPRDTVQRSNSELTSADTRGRTSTEDTKKEQEHRRRESKKEQTDNTKRNTSSGITERMRHRNRTRKARKKIERHKKETTDHTKRSSEKMKNAIKLTYDKDRKQKQDTERPRTKNKTREKPKKTRQNKNKEQDIRHTGDRGTQQEKDLGTPENEQTAQKNEGARVLGKPREKAIGRKGLKRHGQERLNTTATTRPNGRDKRKEENNKYTMRTHHRDLKGGPQKSHNIRGGHHDGAPHKGGKATHTGEHRTQKGNRITTRNKDDRDEQEKGHYGTHNDKGEQANXYRDKGEAATRIDTEDRYEKRPQLRQVRRETDKGGKAIRTYQDRSISKKRRRDIPRKRMRDTGRARKESSPRQKIGDTIQQQTKATQTNQRRTQTRKATKEKRKRGNNEKKDKEKMTHEERQNESTIEREGEKKEQTKNKEDGEEKKRGGGAAREGGGSARRRGRGTRRARTKGRRRQERKERGGRPEGSEERREERSTKSARREGGGEEREGDRKRRRKQQRARQSTGGRRERRR

SEQ ID NO: 990804 - protein, 463 aa, Homo sapiens
  misc_feature (138)..(138): Xaa can be any naturally occurring amino acid
  misc_feature (438)..(438): Xaa can be any naturally occurring amino acid
GRVRDGGTCSARLYGPRRTDTSESMAVELFCAAAIRAAGPPRDPPARLARAMDLHYSDETILWASRGYLLSDCRPLQLSMRRQYGHHGLARPGPLHRGEDDWVAVQAMRPAARRTGREVDTSGCCPKGSAAFPKLISXWWRMRVSYPCLCCPYAHSMVPELAFTRGTKSISQRCYPQVGRLTSERHVEEVLFRISSESGQTQRIERQTREAMTRSCLLTLVHLEQESLRQDCHRTSNDIPLGLLSFGSFGEDPIGGISLQPTLPTRGEIFNWQEATRRGPAFQFGNNFGVPSDNRKALMRLSVFPASTVVFPRSGLRVTSCSPRRPQYTNFGMHNPIERPICVRAPVNTPETPKLTTEVGQKRENHKVLNHKGASPETPRGHHLPFQMASARFARQTQLIEPGPYAVGSPISYGEAKFDGSYDKAALWLTFRPNAVQXLCTSLRKGKAPEENAPERNGDPCGN

SEQ ID NO: 990805 - protein, 304 aa, Homo sapiens
  misc_feature (98)..(98): Xaa can be any naturally occurring amino acid
MGLHSSHRWILEVTLRVALLEIPQGGDHEGRAFKDPTRGQKTSNTSIALHRCAWGRQTKDTQVPITLEERHRALGGSTPIGASQPKYKPLVKEKVGTXGRNGLGFQTIGKGTRTTMLKHRGTFDRTSQSSMNPIAEGPTPQCKMLTLVAPLGCSIIKHPYVEQTSRYLGLLYRKNTGNLHAQGAHITPTRNNARTHQLERPKGPWPRGQWYPFPQKLSHDMTLKTTNSDRKRQQADNLRYPQVVNTDKRAHTPENLEITLDERVTTPIPQETTTPPQGRAIHVQERRAPPVDTSRTSEKEEMNM

SEQ ID NO: 990806 - protein, 99 aa, Homo sapiens
YLGTDRRAERPRKVRMRKRDLIWTIVVIGTPCIRRKSTDYFGHLIYTFAERIDLEGNPLWRDTLRAGKAERGAWKELEGKTRASISRIVGLRAPRGIPH

SEQ ID NO: 990807 - protein, 233 aa, Homo sapiens
GSTEISLVLTFSLGVWSILRSYLVLRDVDPVVYEVHPLSSTQDPMPSGRVCDSSREKSHLLVEIESSFTLERGTASRSRESDSPARVSFNIGYSIAGPLRRLPGEARMYYTTRLIIEETGCSVKGADIDATNQSIEAVVCQALAPVVVTDKVESVKSGLRLRATTDGDFDHTSIEWSRTIRSRKHTANLQPYESPYRVFSHLGRTNGHKIYLGKAALYPLDIVDRIIEQKKLA

SEQ ID NO: 990808 - protein, 446 aa, Homo sapiens
ASDCPCKLGTVLGENGKEHSRLSRKIEQSLQRGFGRFDWTILRGQLMATHWLRSWLIQALDDSCRASVFPCLRRLHDLARVQPEPGHSLLICCYSPLLAARTDHRTPRAPHSGPDQATRMLAQPAQSTGTEHAAPATHCLAHAQQTQPHKRRPIPSCERRLAAGHIPPQTHATLAPSMNSDHERRHATTILTHPIGTLTHSERAPPPATHPLDAPHILTHVEPPQQEHDPTRPERALTRWQAPHPFQQHDLTQVELDPPNSDYRSPQVCGEAHDITQGNENRNRPDPQQFSPNQISLLTLSNSHTNHLQITRPTLYPITNSYPYCTYNNDTQLKRTHRRPHLRINLQAEPHTTHSLAKHQRPHLEPQISYSTIPTLHPTSPHYTNQARRPAPKAPDPPNAVNAHATHSAHSITYTPQRKKAPDDQPLATHTDTTRHPHRPQHHRPP

SEQ ID NO: 990809 - protein, 408 aa, Homo sapiens
ATACCVRKLDGGAPRWLLVWRAPWDEQCCAVLISPNLGDRVLQQPARPASRAGALARMSAEHGAEPPGADWASRLCHSACVPQVTKPNPRVVFSSKMGREAGLDHVMCMHPPLRLAPKREPWPSKMLQPTCLVVENSHGASPRDEKKEYEELTMRGPPRDLHPRAPALTVPLAQVTLVIPAAVTKQRFDTGFPLPVDIPISWACTGHRTWDTLQVLIQGVLEARYEANGEYAVGAIQQKRTSASDTVGRTGPIHMRYTRDHAIRTLGSNGKLRPSGEMRPHATGEEPKNKVGLEAQHQAPMTVHCKSNVSQVDTPGAGFDSKENPYTGHMISRKPCDYGIGVSPGGVPFYCDPGRHERRTCPTVGMPRSAADGPTRSHIRVIPPVANCPPTDWQRIRLLHVSPQHIHS

SEQ ID NO: 990810 - protein, 171 aa, Homo sapiens
ENTKWWMTPVQRGGPGALVALGWGTAVASAEVSAVASRGQEVCWPVGTVRPVGPEDQREHRRKGNGRWISDVGCPSPSWASLCQGHEDQSPWREDRISFVPCPIRRAIQQHPLHFFPGGPSSSTGIAAVSDRTLIAQDMASKAQRPRLPEPKATTKSSKAIKSAIGDYNGT

SEQ ID NO: 990811 - protein, 113 aa, Homo sapiens
PDWWLVCRVDLRQCKCCMCSAGTTEGSRLIPAGCLTGLRLDLSGAPDRPSCLRARWWCVQLCAVHQRGHRAQGAGDQRAEIIRGTTNTPSSRTLSSSGQSPLTQTGILQRGSG

SEQ ID NO: 990812 - protein, 107 aa, Homo sapiens
MVRTKFQHHDARSTRQHSHSSSMHRACGRCLPPGEQEPADDPSVTLQRARENIQKSLAGRLRAPGDLPAATKRKTTDELVIRIASLEVENQSLRGRGYRRLQKAISK

SEQ ID NO: 990813 - protein, 303 aa, Homo sapiens
GGVRGLSGRYRRVTSAIALPGRSPALLRTPALRSTATFAHALQFVPETQVRPAGQCGLSCGLRRLVLSAHLHGGECVIDVGQPFETDRRIMGAGYFLAASGFQGNKRIGPGSALEKGRWESMGAHLTCLQAPGSTQLTTSGRCPRICRKLWSSWVTLCRTVVWARLTDCRKERDVILREMQENDASMRDVVFNYLSCHSIPGTPLTQACGGAQVRIVRKLSRARLEPSTSVHITRGPSNGAWQQLEELSTALFDLARSPRGFLTYAMTLLPLYFRPFTAWIRPGDVSFALAFGKACGHRHVLW

SEQ ID NO: 990814 - protein, 317 aa, Homo sapiens
MAHSFIVSMASRHTANTSSSHCHGEPTNSLADTNLRTATLPSPAANSTYRPSHNGPKIANGMTTQRLRMALATTTHRRRTHMPRRPAHTPSHRTAQGQATPPIMLATRQRSATTTHHEHRDQITARAYLSRHNNDPTPQPRSTNATNTPKHPPTHAPTPDIRPHPGCTTNKRHSTYTRQARPKRATRPPARPQTPGCMTQTETRHTLHAQPRATDVPPPRPHPSAPPTTGHHGTPQAPRHTHTQERTIAPPQRHKLGPAHALHTHRPPGAPPKAPGTPEPPARTTPHGHPHHNHNGTQTSRQTPATTNHHRTTSNTT

SEQ ID NO: 990815 - protein, 147 aa, Homo sapiens
MRYVASYLLAALGGKLLPQTPRTSMEDLGHAWVSRRTTTRLNKVISELNGKRQLKTSWPMGIGKLASVPAGGAVAVSAAPGSAGPDCLVLPLSEAEENDKMRTKEESEGAQMMHHGTSGAFLECKVPRSPWQSRHGLFYTSDEGQDR

SEQ ID NO: 990816 - protein, 108 aa, Homo sapiens
SQQEPWNTRQQGTSSDKGGVQRPLRYNNGNEGAAKAREGEREWSGAPGRDGRQGPWLSGPLQCGFLARVERRPYVRHSETAVELIRRKEKLAAEVSQLDLTSRLVRRS

SEQ ID NO: 990817 - protein, 95 aa, Homo sapiens
  misc_feature (86)..(86): Xaa can be any naturally occurring amino acid
MMWRKPPNSSPRCGILGGGNDHTPPRDRRTHEKRRSAIDTTASDHERANASSSTKGEDSRRPGVTKTDPRLEMSMRKHRQKVERSXNTENRPEDR

SEQ ID NO: 990818 - protein, 195 aa, Homo sapiens
MKNDRRQQHTCCTCVVIVEHANEATILKRGDEKTSVDHIMSVRQRNKHLMIFGDHDRRDRRGYMVRSGLLNNDCCGSVSPTNIWASSKCDGPAVIISVNIFIYISFYHAIKEAEILVQIYCGRHISTGVTAQQQSKSKRDPSDNELVRDPQIFATQGGKQAGGPHIGSRKIEKSQVTRLEQEHSKVSDSKHDARG

SEQ ID NO: 990819 - protein, 130 aa, Homo sapiens
RGVGQEAPDDPGRGRGGRRGLRLRRAPSRSRTRFPSHTPAARPQAKKLPAWPTSQEVGEAEGGGGGGTGRPSPADGRVALPVSERAGPPQPWCFHHAREGKEDGLTGARGGEEAEGAAQARPGRAGGRLP

SEQ ID NO: 990820 - protein, 69 aa, Homo sapiens
RRQSTSTLTRYILKKVPVINNDSVEILKCSEDDVPTFLKWCNIRFIHGMLYEADWYSNKPSRNADIIGA

SEQ ID NO: 990821 - protein, 78 aa, Homo sapiens
VSVFVLLLSLRQHSVCYVVLPVVRSSLCSPVWCVVFPYLFFIFFPLLSLPFLSFSGFASSFFLQVPSLWAPFDFLCPS

SEQ ID NO: 990822 - protein, 142 aa, Homo sapiens
MTGKKVKIGNKRMAWNEILTSGKTETDLAEDEVWKNRDELRRANKSAEPRTGQRGPHKGGKPKKQLSVHNDRRERRGRRATAAQAAEEHRRHAHQRSKAQAQTERGEAPQNRQRRRQNGTQSEKSNTEEARTRRKASDKEHR

SEQ ID NO: 990823 - protein, 200 aa, Homo sapiens
RVLNVAQSGVQWCDLGSLQPPPPSRLLWPPKVPRLQPLPSSHPVWEVRSISAWPPIVWDVRSLSAWPPSLGSEERLCPAPRRLRCGERLCPAARLGCEERLCPAGPVWELRSVSARPHPSGRSERLCPGARLRSEKPLRPEAAHRGSEEPLRRERHRRGKLRSVSARQRPIREVGGPLLAGCNPTEEVYQQPNEGGQDDR

SEQ ID NO: 990824 - protein, 216 aa, Homo sapiens
MRPDIPGAEETVGLGCRDSPVAPTLIRGLDICRRLATTGLSTYGGHDHDIIWMSYNLIASYNIDCFDSPWDLTRLNMPGVMPSETVMDFQEVACQRKTELSLEVGSDEREARESLDFTDAQENEEKASEYRASDIAQVGPCRTVLILLNCDEERKLGSPLWGLTVSRDTCYLKSVPPAYTFGPRKAGDRAFNIPKKSLRGCPRAGVAQSWDNSGLP

SEQ ID NO: 990825 - protein, 68 aa, Homo sapiens
GHAVLAVLCQLCQTVPAAAYLPVPLVFLLCCTCEWTRTVCCAVLCTQLTDELTVCGQPSDKHVTTLTL

SEQ ID NO: 990826 - protein, 406 aa, Homo sapiens
  misc_feature (96)..(96): Xaa can be any naturally occurring amino acid
MIDLTQSTLSIRHTLLTVKECAIGKGDRDSTKVCNPDETRKRAQIPSDDAGRREPEAMDDIQTDATPRRGRKTRQQGEETQADETDYTPSIHNRRXQTEKRDEGRQDILQTNTGQYPTHKHGEAPTHPSTNTLSQTLIKATTIWDLPGTIMGRYKQTDTVHYCTTIEVTIYWKVHTVHSKRAACKHATTARYPSSGKRTYRGAKILPYTEKPMRPMHVARISRRDRPHQTAIAGTARRHGKTTRQTHRQTDNKRQKKPTGNTHSTNKQRDTGRTGPNTPRNLDSAHTPIENRKPDTTAKDEKTHNMQRHNDGPYTEYRAIPDTLREPPTQERHGGTPHNAHPKSIHSREAQQEQEKADSRRPQRREQRTDTKSTHTADGETATHDNAAIGSHYEADRRDAGETPPT

SEQ ID NO: 990827 - protein, 83 aa, Homo sapiens
MSNWAWGRRKVAEEHGGPQTAGYGRNEGGPERRRDEAHTDIWGPAGGTANWPETKLATQTTTVGKHSESDTERPTGAHEEKRA

SEQ ID NO: 990828 - protein, 72 aa, Homo sapiens
RVDGCGSKWLWVLLRLVRRRSRFSSAVCDSFLICPQESCFFFFFETRSRSVTLAGVQWCNHRSRQGLIPGLK

SEQ ID NO: 990829 - protein, 164 aa, Homo sapiens
MSKPHYEWHTERGIQQKTQQPTSCMRLVETNETQGSVHQKQRREPRKHPNEGVTGATHGKRAKTQRARGGKHQGPRRKNNTGRGRKERAKRDINNRRNRGRQQTKKTQNDKERKHKKAREQTPNEQREEGDLRDNGWHSNDNDNAHNRRGDRNTEGRSQLSTET

SEQ ID NO: 990830 - protein, 87 aa, Homo sapiens
SGSAARGSGRLYVGNAGCAPEPDGCAVLCAVPAPCWALCLLFTVFVPSSVCATLAVLPVCIDAAIHCPVLLCACDATMHPCPMPCSP

SEQ ID NO: 990831 - protein, 236 aa, Homo sapiens
MSASTLDRICLVVMHVLGAIGVLMLLRLSLATRASLLAGIKPSHLSPYFDDQYFDLMSPFALKGHDLMRLGESTGADKGETGLGLWKINPIGTKRLVDLYLVPQVVHEQDFGKLGRAPEFLNTYMTTYKNKFPINHTLSISQQENPGCILSHNHQTHYQRGINIRPPVVFVSLQCKKHRRRIEGENQIEQTIRTHNNTKITRDRKHDRDTKVHVIIVLNSHRQTQHDTSANTKTII

SEQ ID NO: 990832 - protein, 111 aa, Homo sapiens
  misc_feature (57)..(57): Xaa can be any naturally occurring amino acid
AEDVFNTVGADIIQQPSKVVCSWERRSSGKSSVASKVLGVGGTCFPEVLELSPGGPXQFCNWSMFHKNDIDGNNMKDEENGVEAEEWGTFLHTKNKLYTDFDEVRHRTLKN

SEQ ID NO: 990833 - protein, 113 aa, Homo sapiens
AGCGVIQLPWLRRMRPQEEEGRARPAPVAPCVVCTDALLACDVLMAGVRGCACWWTGMCDGLAWWPPEANGWNCCYYLMTCVGGTCLLWPTVLSVKPRRTWGLMPCEQGHGKA

SEQ ID NO: 990834 - protein, 123 aa, Homo sapiens
SGGYNAGCAVLCGDLGPVTRWACAVCVVRCVLMGAAGANGMPGNGCCPWVLLMTWPSAHAPLPADTMMVKDDPCTMTPLCALNGPRMLIPCVVIDSNDIVSLIREHALASAIKMRILPSVEQM

SEQ ID NO: 990835 - protein, 124 aa, Homo sapiens
  misc_feature (48)..(48): Xaa can be any naturally occurring amino acid
MLTILKLENPPAIIWAGGGGILKRPGKLGLQAAAVLSSGIFGVRLRRXDEVEYVIWWQELPFQPISVSPGEGLVEEPSYQKESGEFAVVAEDPTQTLSKTSFKRISGFETPRRFRLKEFNNQQG

SEQ ID NO: 990836 - protein, 145 aa, Homo sapiens
RVLKLREPWRNPELTGRAGFRSARVSSDRYRLATRTIILLVRVLRLLRVLGLSVMRSELRVCERACVTARLSNDRLASCPSVPSQRSRRVPISCVLWVSSCRSLWSLVLTLCAGYLVRTQEWGSATSVVDPSNRLKATLQSGKYT

SEQ ID NO: 990837 - protein, 106 aa, Homo sapiens
MGAMLLVYLHQLDGFLLGKKEVISRLPTIMPKLTMMGENANNLELEEMERLMDDGLEDESGEDGGEDASAIQKAWINGFSLVLFITTFCYFTNSQRGLPRLRQIEP

SEQ ID NO: 990838 - protein, 46 aa, Homo sapiens
SRPSQFLKKMPQYQKELNKYSTHLHLADDCMKHFQGLGGEACVVWS

SEQ ID NO: 990839 - protein, 220 aa, Homo sapiens
MTSWRLLTDRDFELLLQGNIVAAVQGPSVEDEQDDDEIDRPSSHLRTWHPYKEEGGRYVVLLKKLVVKSLISFLRTFGIPTPRLELLDRRCLNGHAFPLCGAYQELYGVLDRLLDQDLTKGQGFLLGNSMCETGQVPTRKFCGSLHTHSFTFFTSTWEVIRSAAVKLTDAVVLNLTSQYVELLDREQLTTLTSKHFVKIHVLVVQRASLRLGFADLTCEG

SEQ ID NO: 990840 - protein, 235 aa, Homo sapiens
VCWWSWLPSSTPLPLVIRVCASWFCIRLLFGVLTGALVSFASVLLRSWLSPAWLVPVSFAVRLAVAVYGIDASGVAFVPGHGYVVVFSLSSVVLLWFNGGALLLLSASVWGSVERSGLWMVLWWGFGYVVGLVLASRLGLLVLLIFLWCEVRCASLPFAASPVLFGVECGACLGSLDGSLTLAWALHQWNLGQSGPSIASECSVSSVALPYTILYAFRLSSLVQRPAARHGGSRL

SEQ ID NO: 990841 - protein, 151 aa, Homo sapiens
MCLTLVRIGSHSSSHAVRAFSFRLYFLLVYMWVTRYLRCMSWVDFGPRVSRCHTFLGRLSIFGGPLLVSRGFLCLTVCGITLLMDVRVPIHCSSIIFRCDILSFVLDVHSPKPRLSLGVYSWAACKLVFVLSEGCERINQSYGLARPKCGA

SEQ ID NO: 990842 - protein, 138 aa, Homo sapiens
MGFICYNESIESCCRELLLFGIIYRYVFQFVDFAGFLSSAWVGLLFSLGRCSCAVVLGSVISSVCISVEYSPVLFLSCWDRYQPSSSQSAGSVSKRCVCSVVFLLMDVRGCSQVAKVDVTWVIDLMLFPKLRLGISQK

SEQ ID NO: 990843 - protein, 182 aa, Homo sapiens
MSFSSCLHICGAAHYLPLCVSLQRGVFRPLHTGGHNPCGPCASRGFIPPCSLLCIYLLLVCILRRCCMCLVLPLGGGTTLQGGPGFIRLSLSFRSSAYPIQGTSLPMDLPQQFGEAEDLSVNQASQPVVQTSRLVSVDTGVPTITGVARVLLTLLHKMAKRPRQVKHPLRTLRPPYPARGSC

SEQ ID NO: 990844 - protein, 71 aa, Homo sapiens
CPYTSRDWDPGGIEFTGNTRIILSWEKIALPTQPGLDIYRVFSPMRERLICVNRFTFPEAQRVLLPPSAAV

SEQ ID NO: 990845 - protein, 238 aa, Homo sapiens
ESCSLKSDNPQVLPGGLTTLGAVKLTGKGPCLHFRKASQNNESDGEGMNNSQISPRSEHSPVRSAASLIEVSYTQEPTWKEPITGTQGDLAHAALHETMSFLTGQEEPIPSYTSGAQLLSEHALEKHAMASSLVPMARLLVDSTGFSRYEEMSSVPRGAVLKPHQRWLPAQDRDLPGLWTTPWELMLAFGGAHSWPACAVVWSSELLLKHRDTPVVRGQQQSLSAARRSASLTLCRHC

SEQ ID NO: 990846 - protein, 72 aa, Homo sapiens
SSVTSDCVVVVLACRCLRHVLARFWSRIFIFVCVNDRRSPVWRCPPLMPYAAVPVTRVTNFDSGFRRIHGHV

SEQ ID NO: 990847 - protein, 105 aa, Homo sapiens
MNLKTLEWPHAIGREKPGIFMWYPAEAPTWRFVMQNPEVIILELSPIRCRHTVYAAFLPPVVKSFKWVPFSRKSLTTGGVRLNRLRGLDRAIYRHGGTPHLKSSK

SEQ ID NO: 990848 - protein, 124 aa, Homo sapiens
AEKWLKVSGMQSTFLGLCKMEMILLQFWEVGERAKQRADEIGNSLEKFLPAVPFSPHPSKFKPQLLGASSCKKGCEIRVWFYNRSYEEQSTNPNDAFPTGDCGEQPGLLAQELPRVLSPGSGAP

SEQ ID NO: 990849 - protein, 279 aa, Homo sapiens
  misc_feature (88)..(88): Xaa can be any naturally occurring amino acid
MAKLCALEEGGGHRRVLVEKNEEGFTEFGWNEPLWRVYPHSTLSRCTDIHVPTKLTPSHTSCGTYESTAFTWMAVKDYCFRELIWGRXWEASLKFARDLETSLRCLRQVEPTRRDEGRTRVKPINMNVSPNSSESPKTCYTSTNYNFLKISLLLLRQTFNRHRTDDAVERIEEYKNLVNCCEIGLSGLLGPNLLLDHLRTSGSQEMDENLESKKNMLSVPPLYRHVLDMWEQAGRTEEPAFYWTFHGTHPYLHQGCCEVLCELRVLQTPSSVPITGGGT

SEQ ID NO: 990850 - protein, 137 aa, Homo sapiens
MPFPGPVDIISEPPLALLSPSSAKLGHLMDLSQIVQSSNIYTVVTLNMYMRDFSTRELMSTDMVKAKCFYVFCTKNAAICKDNDPYKRTWLGAVNSRAVTRRYMVVRLVSNYCKTPVYFAKFLSSGPLQPPDLPLCR

SEQ ID NO: 990851 - protein, 87 aa, Homo sapiens
SRPNFATNHKGTLSADPIYGVGFPVQAAAGPKLDTNPSIGRPGTLPKSTPPTSPEGENNIKHDSSSPDTKKQEGQVSRSSRKHDLTK

SEQ ID NO: 990852 - protein, 102 aa, Homo sapiens
MEYTCDFLLGYIHCESKMDMHNRYRDVVPTYILPDITLMASGKDLYALPPNTLEEYQQYVSLTPSGRISLIIRVGYFVFHVRRHEEILKDKHHIIVNHQLKR

SEQ ID NO: 990853 - protein, 364 aa, Homo sapiens
SHKCRVEVARPIYLCLGPSLFCANSYACAFLIVGVHYVLVVLLTVVYVVPMWQWSGFFDVAVRGVCYWLLGYGGDNSYGAYSLLLVCPLLGFSWEGAYSVLGVVPACGVSLYSPLLNALHTHACSALLFSVYVAEVCRKTVSWIFGLFGCLPLVSSSPLVVVLVCAMDCDAGASRTFALCMTVTMDRGLSPCMGLVYMLDTSLVLVRNSIGYDTCFHHIGAHVDDVLMIFLMMHLMDMRWSVTVMGPRVQTLRHSPLSPSRSFSCWGSFRPALLGVTVVHLAALPWFYWPYGRLLCWAGTGMRGRREHREHTGFSAENIWAQEYWPLLSLALCLCTCPGGPNVSRCKKCCRYYFLRNDFYTTRQ

SEQ ID NO: 990854 - protein, 171 aa, Homo sapiens
MGQPRVPSHTPYTPGETTRDHKQTPQQKHKNALCKHTTENPTPPKSFPPEGPPRSTAIIKPQHSTPKGRTPTPGGNSENSNKPARLHPQTGGAPKNCRNPQRGTPTDKTRAKKKQPTQQRKKDNNNNMTREKIETTRHPKHRRQDHKPPIAPETPHAKKQQQHTNTTTPIK

SEQ ID NO: 990855 - protein, 365 aa, Homo sapiens
KRLQNWTEECDKSLVAMHSLTEFFEDDAMLTILLSACEDGPKRYTIGADPDPTLLPQSSLRGVLRRLYYVLKSPQGGIPQQSLYPSTVTRAVMVTQDGKPMFTQVCVDGPVDDLVVQCCDDMMRIKTWHFSHPASPRALPSRSILAMRAQDPQMLDRALQINIDSDVGCPNSTLNYLRLCVILEPMQELMSRHQDAYSLSPRDWLETWLFPKWQRMVAPCGANVSSQQRRKRTIPGADHELWWGNSTKDQSEKSPKHLALQPDFDVGKPLYGGETVSNDKGRSPGGRTPKLVDNSAVKERSIKNPSCGATLRRKRLRIEQGDLGPKRGGKRIAKHHEERNIDLTAGRTDPGHLDERTHWVTREDE

SEQ ID NO: 990856 - protein, 230 aa, Homo sapiens
MLALSAWVSIGTSRVTAGTQRAPRPSLAPHMVHSRARCACAWHVYRTCCESGRPQGRRPPAWYTWVSLALGQSPITGLGASQPQPRSSAGGAPRAYGYDNSFDDSEYCGLWLWLMIHWLLVKGASFAVGNSVVDVIYQWGSLVGERRPEPWVAFIVPSRWFLHWHGVPETLVPESPAVGSGPGPPVGDRAGGALVSCWLVGLGCRQFGLFRGLGGFASPRCVPVRREAIL

SEQ ID NO: 990857 - protein, 103 aa, Homo sapiens
  misc_feature (83)..(83): Xaa can be any naturally occurring amino acid
NKKNGIYLKAFKMVNKTAGNFCFFLGELQEWVIQVNKNNNLFRYNLVSRDNLERWKKLPSPHYFNLNCGALCGTTNKRTLVYXIFHLRPILKTPHIMWCPGQG

SEQ ID NO: 990858 - protein, 186 aa, Homo sapiens
MTHKPQRQGIKSQRHAPKMEAPVNTNSQHKRNYTPGNRSGKAGKKKNITDARENRAMNKWPTSNRTKNTPEIKQHNKDTTKTRNTHKTCSRDDTEKRLKATRKKTRETGSERSISEWQQTTSTRGHEQKTETRQKEKRDSMCRRNTEEGETKRERRLSRQRREEEHRDTKHRLKKRPPDTPATTNE

SEQ ID NO: 990859 - protein, 106 aa, Homo sapiens
MPRVAHAIPIVLPSTWRKSISHSDENSFTEAQSCTIEVLLSTRKVSSPFAQPVGKVKFSPFAFITYPSFALPISRSFSFLLTSNISPLFARLSKNGLFAVVVFAPF

SEQ ID NO: 990860 - protein, 201 aa, Homo sapiens
MSQRFCQLGRYVAAQTSILNALNDFSLCSLLTQLGRRRSYMSRQVYWRAWKGCHRAMMYRHESAWIHRAASMTGSKGETAWTSWNQYDCNHALLRPRSKHVASSMATITNMIMAMINYRRYPYRSALSIKRLQPYQSMSTLHCTSCRGEPCHRYLRIVAQTTVGTHLLEVRRDDAAYHNRRACRIILGCPGSTDCTKRAFG

SEQ ID NO: 990861 - protein, 160 aa, Homo sapiens
MQLPGEMTYSSIMSAVIPAQNPTQVVLTQYVDEEQGAQCTWGYDLRAEVSLAGRVILGPPSGGGPTRVFRDKSVIDEIRHKMEHGDYTVRPYIVSDSYIYGKTHQSLEMESLVRRVEWYLVRVFSAKGAIDVHIRENVKVGGAMDEYGADGNGATHFRQT

SEQ ID NO: 990862 - protein, 588 aa, Homo sapiens
  misc_feature (135)..(135): Xaa can be any naturally occurring amino acid
  misc_feature (587)..(587): Xaa can be any naturally occurring amino acid
GLEVRQIFQLLGVLLWLFIRCRLADLTLTHTLRIRASRSWSWRDKRVEIGPSVVYNWNKSSPLVILTSILLMRGGWLLQPFMLPVTHTVAYPSLAGGSHVRIVPSGAEGPCVPAEDLMEAKVLRQGQSYQAKAGXRYRGADMRVQVWTSPRKVDPLRRGQIELHLPCILSFCCPTYKALIVPASLALYFGDCRPLFTAWGNRRFQLIECAVVVVIAAPRTAESPVRMCDECLVVTDREFTLSHIPYSVKRSETQDVLSACGKRGNGLDPWRRFMLYILRLLSLNLCTPYIENIARKAFLRCNTRCTFPFGDWESPVRGRNARMCFYYRSLPRGAHRDVRAETLAKEVYLPLLRDPSGLPPSVHRTNTPRPIKVLGELNQRADRYTLGASTSPNVLGNAFYLAPRGLRGDLVRSTPPPRDGLESPKTLGLSLETTEPTVSIYHGHWDVENKRPASHQGSCSEQRNLVVPQEANPKRTHTMLQEKESGCAHEQFTGPSKREPNKRGRVINELPAHDMSDKGSERILHRRNAEGRHHHDTPTGNYNSSRGSDERERRKGTHTQQDEIRSECILGPDPLPTQSQQIDEESXG

SEQ ID NO: 990863 - protein, 59 aa, Homo sapiens
MGNASRVKETAAGRRLGTFTQGASPGKWSARHEVPSNNPYRRNPHTHNNGRTDTTQHTA

SEQ ID NO: 990864 - protein, 140 aa, Homo sapiens
  misc_feature (73)..(73): Xaa can be any naturally occurring amino acid
  misc_feature (108)..(108): Xaa can be any naturally occurring amino acid
  misc_feature (138)..(138): Xaa can be any naturally occurring amino acid
MYRLDVVTISRVVTVSILDSDYKLMQEMPTVYTCEYPRFLHRLVQHVISGTVLEVRTDHPVYSRLRSRKPLRXYTSMRSQMIASQYQTVKIYTAVTLSYAPYTIVKDXCPCQYGAYVSEVLPQKFVDILVRTQVISSXIA

SEQ ID NO: 990865 - protein, 167 aa, Homo sapiens
RTRGVGPEHSVLDLWRTKPPKGQAPTDRSSRDGTSNEPSHEGQKKQRTIPWRSKSPEILSSTKAGCQDEDQWDGAQAMENRTTWLDPRKPGEDQVPNGELLVIHGHVRQEAHPSLPDQLWLLLLPLVHSVTSGASEKLEQRAGMSIGKEDRDTFAILCPVAHIQICG

SEQ ID NO: 990866 - protein, 121 aa, Homo sapiens
MRRTVGHVENGSAALRTLSRLGQPSELKPFNFTLGTVTAFVRGPKYVKAQRHNCCRKKTPDRVGSTQMGDKDQRGNTCHIPLYSEVTDTRGCVCHKGRYREKAGRYKGMDVACRTPVECPR

SEQ ID NO: 990867 - protein, 414 aa, Homo sapiens
AVHPVGRGGALLASLLPPCRTPPGPSQTDLEDMIHRTHHPEYAHRNNVEQETNNQTDRPKYKNRNKYRKKQKPRRKKERTKNEQTDTAHSRETRNNKRDKRKRKQNKHNNQGTTSKTKKKKTETTTKPQAPRSTETQKHKNKEKQRKDTKTKENKRGKRRKQNKRKKKQKRSARRGKGKRKEDTDSKGEDGRTTRRNTEEERREERTNKTKREAKKEEKKKETDEKTTRQKQETQRRTKPDKRRTSEKSKKSEDKEEKTNKEEQKRRHRTERRRRQRRERERNAEKQKKYVLILIERYGEEGDEKEEAKNRKKKDNEDKREKEKEDEKECKNDEGKRKRGKMERTEKNRNTTRKHKQQKGNNQTAKSSRERGEEETAKRHEKNETERKRKGGKAKKRKERNKNKQKRQRKEEKK

SEQ ID NO: 990868 - protein, 220 aa, Homo sapiens
GFQFRLIFVPLRLLPVPSPRSATSPARLLLSRKGRGLWPWDVPNEPQCPSTHGTHYVGDLHPDVTEAMLYEKFMPGRAQSSPSGSARDMITRRSLGYAYVNFQQTADDGGGLPLDSMNLDVKEGKPVRIHVVSGVIHHYRQNVEIRANIFTQKSGQHPVDNNRHCMTQFPAKVTYLSKYTWYVMKSVSKGYCIRQVERRKHAKMKCRPSEKEWQWALYQT

SEQ ID NO: 990869 - protein, 102 aa, Homo sapiens
MVRHKDIAPVKAPRDAPSREVLGVSAISDPLSAFDEYPPSAAFGRRLGMPALIAALESEGISFLSPCVNLVKSCLTLRHLELRRFKMLANERRLSGLLPNQF

SEQ ID NO: 990870 - protein, 34 aa, Homo sapiens
MSTAFRPSPLLFVPFFCPHFGPPSKNGPGGKGGP

SEQ ID NO: 990871 - protein, 299 aa, Homo sapiens
RAPWIEQEGPEYWDRETQISKTNTQTYRENLRTALRYYNQSEAGSHTWQTMYGCDLGPDGRLLLQGITSLAYDGKDYIALNSGPELLDRGVTTAAHHHPSSSGESGRVAGAAESLPGVAECVEWLRRYLENGKETLQRADQEQKSLFPRSETRTCHMNEEIIPDPPKCTTREPPFPVSDHEGTLRCWALGFYPAEITPDWQRDGEDQTSGQLSCVEDQTAVRIEASQKVGSCGGASGESEILCLLPLEGGRALTLEGPLPGPSLVACVAVPPGARLARGVEHLRGARVPPCCPTLSRVP

SEQ ID NO: 990872 - protein, 215 aa, Homo sapiens
MQKTGHNLEILRLTQVGLFLNATRDNTPPLAIVSPKAENRYPTVLTYEKRPLRPHLFFGGSLPPIADTGADVNFLTSLLIGAKKPTGTRLSDSGFWGGLVGAISAPVGQGLSGGLRGPPFCVFHYTEREISVVGIKTPLLGAPGRALLDLRTKSTLCRCGPSEIGTSQFGSSLCSQAVRIYPLGGAVLGARLWDGPPVVSGRCPFPISTGRCPGW

SEQ ID NO: 990873 - protein, 105 aa, Homo sapiens
MLAHPWPIMHAQHNTANIKIAMEISSGEFCCVLHAILERSRANLSGWSERVTLAEHHSCLHPIVVSIRQVLEPSFHSAFPNTKRDSSPAIKQPQFRAVQREVTLF

SEQ ID NO: 990874 - protein, 323 aa, Homo sapiens
APFLDPGRLTSGGPHLAHSVAPWLCCGISADREPSMDMATTGVRPVGAVARNGAGPGYGEGSKKTSRASRLHTVIDMENYVMIPSELLAYEDMGELAISAVREEEVHGMYASMMLACLLKSEDGEVPVRIASGFKGQLSRASVGRDHECGYGLGKRDNHSKGSIQTCVIASNNRSYPINDPLIFQIVGQPCIRVLKREWVLGRSTRSPYPRMVIFPPGKIRTVKLLMDLSMLVLSLWVAIPSSIGMEGRHDTIIREGTLMGTSQLDTCFGYWLEVSSFIYFFAFLATPVPCECVQLALLLAIVAVFLCSVPPLTSVGGPACTS

SEQ ID NO: 990875 - protein, 190 aa, Homo sapiens
MHSYYVRDFKTPGHVLCAIQAVLSLYVLWAHHWHCHGTLETGSPTQVPIYEGYALPQPSCVWTWLAGTDRLPHEDLMSEVKLHHHGLSGNIVRDIKEKLCYRRPDSSRRWHRDLLSLEKVECRCRHPNEWRSESKAVSSSGWTAVRPLAPRCWAAPVPRVGTSVAEKDRPKKPKKGVLPCGGPYMVSPLL

SEQ ID NO: 990876 - protein, 38 aa, Homo sapiens
GRALYCFRYVPQSSNEKWTEPRLYTLGERDKSLFSLFL

SEQ ID NO: 990877 - protein, 246 aa, Homo sapiens
MSRLTLICCSRRALVLTVDWACSHSMKVFRHRRVPARLGTPRFISVGYVDDTQFVRFVGDPPPTSGRRLSPVRRGCEQSGCREIVVSSRVDTTRVLSAIAKCIEPKLYTVRDICHGIHSYRETKWRVSHPPLDVGCDLWPDGCLFRSYEHVRLQRVKNDHSALIGRSCAPGPVRPYTGGLTIHPRGSVGVRAVTAEGKWNDAICIGNGAGPGSALYLESVMADARGAELPSTPGDLTNPSLIMKAA

SEQ ID NO: 990878 - protein, 69 aa, Homo sapiens
MRHISSKSLPPRQASALCASCDRVPLDGHTISDLSLEQRGELIPISPSTEVGGSGIGTPPLCSSGEEER

SEQ ID NO: 990879 - protein, 107 aa, Homo sapiens
MRARGLMLILLVRSGRHWGIQTVMRKRLPSRMTTVGWKEDELLSPTVLSVKSLGAGKKRRTPGQVYMMGSGSPTGSLMTIRKWPIADQLFPHPEAVITGKEGLLTRK

SEQ ID NO: 990880 - protein, 229 aa, Homo sapiens
LRVGTHCQELPFPEAVVIVIRCPLVLNTEETCEMKISGEATVNVYSWTTDIRNFGCLQESRKRNINRSRRNCASLGERKWQSSHRAIRPRGDHASAEDVPGSRVLIDLPAHNREVAGVATHALGDIGYTDQDTHQRMYFSKMAGDYIYLVVVPSNVDIGTTEALRDGPGGGPRWETGPSGILIECLIVVDQMEHEDEGCGRWLRNLCVAPEVWVPDCLSAGVSRGSRIS

SEQ ID NO: 990881 - protein, 165 aa, Homo sapiens
MWIVRIRKMIQKQPWEKLSQTHIPPTRTRGPTSGAGDIDLEKRQRKRKLLRTGEKLSLCPRSVVADRMYLVEKHTALPVGSLHYVVPPSDCKGGVKRPRNPYYDPDPETPLKAMKGALLRVKVTVHFLAVLGMGRAQAAARPLGAACSVIASRFARRISLGPGWS

SEQ ID NO: 990882 - protein, 131 aa, Homo sapiens
MCSCVEVENRGGDDVCARGCVVRGTATEVSEESILRGVPSGVVRAAGGEKMATFTDKQRSSIHFYSARRASSVVCGANSSRRRRLFKKTKRIRASFCRGKNRSTNDAVEVASTLLLKGSAGLQWRYNRRAL

SEQ ID NO: 990883 - protein, 91 aa, Homo sapiens
GGKRGRKGLRIFGLRTLSCASCDSHRLFRFFAEDPSSAQERPRAEASGFKGYRKNPRVDPEVWQFHRISNSPLTSPTRLKSPLEKGVVCVT

SEQ ID NO: 990884 - protein, 356 aa, Homo sapiens
PCMVCLKLPGGSSLAALTVTLMVLSSRLAFAGDTQTTFLGRCIKSSVIIIFNGTERVQVPGEDTSSNQEEFVRFDSDVGEVPGRCQALGRTVAESWNRPEGPPWSRSGARWTITADTNYGVVASFTVQRRVHPQVTVYPAKNQTLQHHNLHGLFCELVSIQAALEDQSASEHGQDREDCSESPQGPESIIGELDLTEPGDARKQYLGVEEVTLAQVGAPDVKALITRGTGRGTVLTSCPEADMLTGTPKDNELGLIILGGRTCINVKEEHRPLWNYEPEGFLRVEVSQDNGRRSTLCHTIGRHTREPDRKDATHKRAHTERAGTVQRAELPGVTREAGEQPIGAEPQGRDTGGDDP

SEQ ID NO: 990885 - protein, 106 aa, Homo sapiens
MEISLSPEKPYDWNSHTGGNRSRIFQTRVKSSKSLTGNMVASNTINWANGGAAIKSPESNKLRRPHRIHTVEPSYPGRTERDDDTFRPHGSSNSQNTIHITREYNM

SEQ ID NO: 990886 - protein, 348 aa, Homo sapiens
LYAVAVGVLDGVEEACRLYQGVGVSRQASSNVERTLYALVLLKRMRYSARVGCCDSPAPCLLRAENKLRRTWPKAATLYEVVGLGRGLDSRVSVRGRMRIRLLCGARDSKASTQRRELVSGVKVSVEVVSRNDDLFGRGIHAWVLPLSLVLECSDVVRPVWKKAAHALSASVTVISRGMHGRVCLPNSGSVCLAILVRLYVDDAPQRREWHFSSLWNPRWNGRDLGWVSCQGPERCLVGTATCMGCRTFVRSCMDKAICRPQAIPGRETRRQSFRMSLSGLFLREGIKSPVLGWFFDYTRRVTLALACKQRGRPLARDVREARNGKVRGDLGDTACGKERTLRVTGDL

SEQ ID NO: 990887 - protein, 274 aa, Homo sapiens
MAPRSFEVHPRFSLPPWAATRVPSCGPSWGGAHFGRDIHDKRPLWFCCPIVGPPEAVLHPPRELSALSPTDLCPHSPYRHSLASIWFPHLAWRCSAPPQAAHDAAAAHAYFLSPSGAYNSGDTPPLNRRLASLSSSRTTSGVGARKCPSPHNGLPPARGYTGPSLTPVCGPPPCVDPAGSHTLRCREIPAPNAHSVTVLVVALCGPPPGEPPPPHSVRAGAGGSPTPTPPPSNTHERRVLLCSTHDDPTAPGDCARAQNKYPGAVQARRLAVLL

SEQ ID NO: 990888 - protein, 85 aa, Homo sapiens
VIYSTIFAGTLITGARLGLIFYLSRPTNNDATLDSSSNQENKPLVTTGSCHQGILRHGNLTASHQLLSKYLSVFNNITRPEQLNQ

SEQ ID NO: 990889 - protein, 134 aa, Homo sapiens
RGPTAPFLPLPTYWTLPCMLPSHSRRKSGGVEGDHTLDFWEHLLCVADPPAACSLLSYPLVCLKLPSQLLGRSPRLELAPTWWPGIWHTPSPWGEGQRPTLLTSACFFPSAAFTAEYLYSLGSLCQTTLSLGPH

SEQ ID NO: 990890 - protein, 120 aa, Homo sapiens
IYTKWPDYSGSEPWCLRGPLDVPIGVGDSRQLVFSSVSSRVGALVRESREVVGLGGRIARWPCSASECISRERMTCARGIACKMRNSRLVQRTGFGLRRRYVVRVGAVQTIPCISPVSMQ

SEQ ID NO: 990891 - protein, 51 aa, Homo sapiens
MADDAGAVVVPGGPCGPVNGEPLLASVVVSALASGAGFAGVDGAVAAAAEL

SEQ ID NO: 990892 - protein, 288 aa, Homo sapiens
QSAASSFASPAEPHRSRHHAGKVNGLEVKGSLGRIWAPGSPADLPFNLWLKLDSCEPSSDPFIDLNYMVYMFQKYDSILMAKFHCVTVQELSNGKLVINWKSHHHLPGETEIPPKIKLGPIAARCRYVVESTVRHSPPWTNGWRAHLHGGEPKGSSISAPSVVMPPCCVMGVNHEKYDNSLKIISQNASCTSSCLAPLGNVLHDNFGIVEGLMITVHAITVNQKTVDGPSGTLWLMARGALPDLSSLPLLASARAVGKVLPELNGNLTGIAFRVPDCHVVSGGPDWPC

SEQ ID NO: 990893 - protein, 99 aa, Homo sapiens
VGKSGRDSRCYRSEQGLGRWTLAFKVRRQAMPFKCMQLTDFILKLPQRAHQKYVGGQSLVEGRLVKITKEWAADTACGRNEDLVEPEYITRYSPPNDRL

SEQ ID NO: 990894 - protein, 162 aa, Homo sapiens
MRLRLAEQRNVNVTKNKRRVDKLTDSRVDGTDRSKSKFGCERHSGGVPVPSAKLDAVLRRGSPLYRRIADLAGSSEVILPVPACNVITGRTHAGQQSLARQECMILPVGCSKRSGTAMPHGAEVYHSRKNVIKANYGKRRHNGGDEGGLPQKVGNKKAGTVT

SEQ ID NO: 990895 - protein, 385 aa, Homo sapiens
MSYQSEGLVRSWSPAAGAMFAHNTDVKVSCRRVLLGSIYRFVIPAFCYDRDSVSIARTLTSSYLREHDDGFVPVDDDVIDDENTELPEMDDLHVTGRRSVDGSTSLLLRFRYTARTWLRRNGPSGLHRSRVEVLPSMGPMTDIATPRAPGSAPLMSVLVPAKHMHMTQSKSSIYLELTVSEVFKREEVSYQSSEVIDCRGVGAHTGGKDHSKSHNGGNDRTLGNQRNAKWPGWGTDAGKASRRRGAAEQTERREFNFHEEPELTRAESNQSSENKTQGELRRISITHDVSPGPGGHKLTRGRDTDINERDRCAGEEEKTEGELASPHREEENDAHRRHLGTTADPPTRTNGEEVESEDQRDSKDTEAHHDEPRRTGENDPLDTNT

SEQ ID NO: 990896 - protein, 330 aa, Homo sapiens
VQVFVGRERCTCRLRHLRDPRILSLSQADALSRPGRLCQRKRAGELRYHLWTVHARSLDASSIKWTLMWEDQDEELLNMLKLSLKLNRKILENKDVVVQDVDEDGLGRTEDDDRHECKYGRCLEGHIDLVEVYAGEVYTDARETTWSVYGNLSTTSGCVIDTCQGDDALTEMGLDAYPEECELEIEEINGQVSNNAWVVTTNELAFCVTWATKRSLIFRMRLVQQTMVSFSALPYGKKRKPSVVGSCHFLQQPRCREHFLNENSSVSLLLKLSGQFPGMPNLRARATYEWPQSLQLFHYEARPCKGRRNCGTGALSRGFFEERITTICHR

SEQ ID NO: 990897 - protein, 188 aa, Homo sapiens
EGSEAFCFIDDETLMHSYSFRSHHVCMANKSSCRPLAYRIGHCDTSLGSTVCVIQNMPLNACHQTRFGVLTGVIGDEKKLGYVVYQMRPSTLMFANVVYCTIYTGVFSPPLGEAQEFRYYEARKWCHRSVPGHFVLKLHVENGWDNFPFGLITHLKTRTKNIEAGTEGHMNVTKEYDDVPVGDLGGFL

SEQ ID NO: 990898 - protein, 130 aa, Homo sapiens
MAPMGRGGCRSSTLWCHFAATRRGDLPFVPPVHTCNGPLQLRKREFPPFSQFGDISQSERDLRERVLMHKTPIHRDRALTLNSAVVEHTFLRCRPWGTIFASGTKEKAIGEEHTKGPRATEKNPLTPPSK

SEQ ID NO: 990899 - protein, 202 aa, Homo sapiens
  misc_feature (130)..(130): Xaa can be any naturally occurring amino acid
  misc_feature (200)..(200): Xaa can be any naturally occurring amino acid
MAIFSFIGVAHRKRDNGAAEPCYDLGRHSQRVEIGGGAPCGGGPGMTKALVNLWGGHAGRKRKRPFGTSTAKGKPLWVENPPVFGVGGDRRECRKRIGTPETGSIPGGVWNTKGGAKRGFNQTTARFNPXEFRVCAHHYQSEKCFGPPGRVEPPTRKGRIWLPKGGVPHGILGGTIWANPHAVTDDKRPFLTMEAHTARXGA

SEQ ID NO: 990900 - protein, 72 aa, Homo sapiens
ERRGNQRKRVPGQDDAKKAKQEPEVNGGSGDAVPSGNEVSENMEEEAENQAESRAAVEGTVEAGATVESTAC

SEQ ID NO: 990901 - protein, 58 aa, Homo sapiens
QNTKWRMTPVQRGGPGVPGGPGMGNRVVASAEVSAVCIRGPGSDCAVVRGAGGPSAAV

SEQ ID NO: 990902 - protein, 302 aa, Homo sapiens
GGPDRYAPRELVLVPLLTGWLYCDSSDLPDAPAEDVSNTRARLAIRYIMLLPSNQLPAASAEPCGHWLASCEYASTVLTIVALCTNEPHLVQSQKQWWAVQGIIPANYVHESVDGAMIGGLPNSAVMPCDSIGNRSHGEQAERVLYPPEDYGLVPGAGELPTTPETTICCVGETAIGIWWSIYLQSCTIAMNLRHSTMEVYFENLMHAVGAVDLNADVTLYAPHYDPEGHGGHSWQSPGTDVATEDVFGPLTHARELKLLQTIGERGSSENVMLGHNRRETKSRKCLKRGMPKLLVNLLCQL

SEQ ID NO: 990903 - protein, 101 aa, Homo sapiens
RYRLTASVHRRSTPLLSSTERVPSESPVAFCDLQVGGRQAHQRAIFTQSFPEKRINSEASQRPLEPHHKQAFWSVNWSRRYTDRRMIFLVLTNPRSSCVIY

SEQ ID NO: 990904 - protein, 604 aa, Homo sapiens
MNVSRTSWWHERFLLAMMEFGNEGVQKHALSHAVMITVVYVYEICLCRLYTHDPVDNKQERALVQQPFMNEGTIGTSTDEMVRIFVAVRRMDLLEAQRNPCIVNRYHTGRSAKHLTHDVCATLHPPHMRDTFNRRTAIPSARTEHSYEPTLHRGTPGHVSGPKLGNVDDMDSDTSNEDWLYPLGKHSPGKGTPAGEQRQVYYLAAILHKFDYRARHTLPDASDTVGRHHKEVPAGYLRTWDHLAQTQHGIQKALPDNCDLKDFMLPAGNIFPYDPKLTRFTRSWISLLNPVGRHGLHKCPVRASGCGENIRKSTECRAIRNKHTARECRIDGIKQGPIAMRVTTYHVERWTEDYTNWDRLDRLVRPPPTSVVFNIDRVVVDKTPVNLRARVLAISDNRATIVTVRACEHNARSDCSKSRTKRPQYNDGELSSHRGGKDTVSKANKEATTHPKGKHKYKTQAQSEYSYWRNIPNCYETWANKNRARSDRSPHRTPETTSGNIAPHPWGERRTTSGKQHHSPKAETNTLHTTQTVKQAGLETQKEHVSGDHRTQLISSVNHGTRGSAQSEHNVRERTRRATVRRQIKHASHNSTRNTNPYRSNGTT

SEQ ID NO: 990905 - protein, 77 aa, Homo sapiens
GRGTYSLNLVVQPSSVYGDLSLLRRRPEMDSAGGDIGLSLQCVFTDLPNLDATLVWTGLLTPVRLPILSQVHSHVHS

SEQ ID NO: 990906 - protein, 269 aa, Homo sapiens
MRTTHRGRPRRETYRPQTGTATDTPHKPVDLPKTNAASANRAGPLSARTTRRSKPHSVVQTPNDETSKQNRAAQGSQHKDEPPRIPAGYSAVTHASSHQPELPQTTPPTLISNSKEAQATNSYTQRERQHNKQSADPTPPGDEPKYDSRLKKIDKQPHTAAYARRTKTANYERDADVEQDTQTIRSTHTGGDGHATIHVKIEQTRNIQHANNVLTTKLHSPPATQITTSRGEHKQLDNTWSLEGNRNYKAERARRDNTPAQANSKQKDN

SEQ ID NO: 990907 - protein, 278 aa, Homo sapiens
MPRKTGSTWKSNYFLKIIQLLDDYPKMFHCGEHEQYVVLHADAGRSACPFGGKAVVLMGKKHHDVSKAIRGHLVKQAQLLENTAASYPGATVGFRVASKEDLTEDTGYMFVANKVPAAVRAGAIAPRCEVSVTAPEHWSRAREDLAYSTALVSPPKISTGTNGNPEVMAADQDWRQHVGASEAPLLNMLTHSPPFSFGPGHPGRVYDLVAGILTNPEVALLSPAGNSAMLASLKGVRRCWPVSVWRLLRTWLHRSPFYQFTVQRSGPVGDGSPPSCGP

SEQ ID NO: 990908 - protein, 197 aa, Homo sapiens
PHHLCLLGLHGHGPPSARNPRAGHPGHGHSHPHPFPPGWDAPSRMSQMQLAHHGPHGLGHPHAGTPLGSGGQPSRPSTHSGNASSLELLHCGLCPPRGLSIRISHVVHSQVLCPPSMVCVELPPVMRAHAYCRPSYEPPALMDSPLRAPCSHAHAGPHLPRVVTQSTRLRGPPAVEQSREQPLVKSTHWAESATDSR

SEQ ID NO: 990909 - protein, 66 aa, Homo sapiens
SSTPEEVKEALEGGALLPDAEWTIMNIILEEGKEILVGDVGQTVDDPYATLVKMLPDKDCRSYASL

SEQ ID NO: 990910 - protein, 86 aa, Homo sapiens
EARGADRMGKCRGPVVLLGSSVVTDETISGMINSYNEKLIWAQRLKAEPFLAVCFSCKTESVLGKQSRTLKAYNSADILAHYGESS

SEQ ID NO: 990911 - protein, 110 aa, Homo sapiens
TRGLGGPMADSSPALSLREGGPGAGPRPPRRAGSRSGSESEEAELSAEPGPAHKTRSYGQHRKCARAAVGRRRTSERHGRHRGPHGGNKRLAGDIRGHQRYGGARSGKQI

SEQ ID NO: 990912 - protein, 42 aa, Homo sapiens
MPRVSDRYGPRFPGKDGNAGGTLSAWALWMILPTIGPWAAFP

SEQ ID NO: 990913 - protein, 66 aa, Homo sapiens
GHIARRTTVFTATERNRDFDYVKLRRSRIDRRSRHLPRPEVCFIGRSNVVKIISRSRLLIYHMVAL

SEQ ID NO: 990914 - protein, 102 aa, Homo sapiens
VAAEIELRLALVQTYVLLAFQEDRRCTVPPQIIYVLGHCMYGPTLIISSDVSERRPQKPKEKHHPPMCLKFHRVFMKSEWEMDQHDCLLRVIKDKSKTELRL

SEQ ID NO: 990915 - protein, 320 aa, Homo sapiens
MSGASTPQRHNTHTHKHTATIPTQIPTTLHTTRPHNATHNTPLQHYTRHRERRTPTRPPNLTHTKHAAPHKQPRHRAPYQHHHTHRTHGTPILHNAHSPLRQRKYHQPSTTTNTTTTNWPHHNITNRHHTPQNRRHTPQPSATLPPRNPPADKENKQAHHTTHTHHPPDHAPTPPPHAPTTPTYTNPTQPTPHPTPPTTTPPTAPPTPPTPTPRTTTTKPHTRPAHPTSRHHNTEPAPPTPSKPNTPNQTLAPTHNHQVPPPAPPSPTQAPTQNQATTPPAPAHDTSPEPTAHHHRHTITQTPRHTREPNPTQRHTQPPT

SEQ ID NO: 990916 - protein, 169 aa, Homo sapiens
  misc_feature (80)..(80): Xaa can be any naturally occurring amino acid
  misc_feature (106)..(106): Xaa can be any naturally occurring amino acid
CRVQSGTLTQHPLILSMARTPVSESDCGMSSPASGLTRGNRHRASGRLASDAALHRSERIGSHTCTRPCARSRSDYVVRXLLRWLHLGAATLVLTYALLPFNLYTXVHTTIVTISRAGVCYARGNLRFDYAPCVLRLVHIRTEPCVSHVHIVTFLRAHAENILRHQELA

SEQ ID NO: 990917 - protein, 164 aa, Homo sapiens
TGGLGGTMGIPRRTVPAEGGPGAGPRPLARGSARVRSRGECRERAANKRTRSYGQHRQGVRAAGGGRGDNVERAHGGQPPGPAAGTNPGWRGIRPTKVAGGPRMDPAFKGGPNKGVHPTGWRHIPGKETNLWTPPQLIYQKNALWWFKWPLTSQWDSPEKLNRG

SEQ ID NO: 990918 - protein, 273 aa, Homo sapiens
AFSLCPPLSATLLCGEWTAYPTEVKMCSPGELTQASSSTSSSFSSLLLLRPRQPDLLLRNLDPHRQDQLRCPLWAWPSCLCRSGPRVLAISGHLHHGHRPPGLCRGALKELRCLLWPVFRDAAAPVCHTESPCGILISTQCGPSLERSLRGRRKKTIRKYGTNPDETAAEESWEYVQFHAALLRRGTYPAVTWSPTSSILEEVAGVRMAAPRCPCSCLTNLVGDRSELPADPSDKVIFAPSSAGLGPWGRSTPPSRRLWAVPWRALFRRAAAG

SEQ ID NO: 990919 - protein, 102 aa, Homo sapiens
MRKRGRLIESVTPETVDHSSLSMVELHLSTGTLRRNLTAVSKKLDIFFLPTPGSLWRLLSEFGALSLAELDVERRRFSIYNNEFGKHSDDSNYIEQESSSSE

SEQ ID NO: 990920 - protein, 197 aa, Homo sapiens
GQTHLLLRRQPSHIAQTPWRKVKCRSQRIKVRIGRLVTRDCYKTLVKWICCHTMTTFIDLNYMVIHVPISFQPMANSMSTVKAENREQLVNQWKSTYTYFQDARSPYQNQVEGDARKAEIQSRKIPIGDTITNQWEKGMEAQIMQVEGDQKEDHSIIMTPYMTDETPCTVHWSVEPLRSMTTDLKIISNAYLAPPNG

SEQ ID NO: 990921 - protein, 129 aa, Homo sapiens
MRVRDPGWDCNGILDIGKCNNSQIRYANIKTRFGHNSGYFSYKGKSSPFRGSYTFRLEICDATSARRITKGKRGFVEAGCFFATVRANISLEKEDVTATIYPIVAKDFLIDTVINSLYNPQEHASKREE

SEQ ID NO: 990922 - protein, 67 aa, Homo sapiens
LVTIARYDRLKPQNIAMNIMQLITYHSPVGPFQEHSSEAAQAINAYRIYHEATTYPITCCNLIDNSV

SEQ ID NO: 990923 - protein, 323 aa, Homo sapiens
TDNAVKNHWNSTITRKVDLRYVSDQESCTTGPRHYELEHVIQGGQLECPDQTGQKEKLSHTHNTDGHSQKKQKKKEEDETKARDKKNKETKRESKKKKKEEERRKRKRKTTKRKHTKTQQKTQEKRETEKYTEHKNKEKTQKKNKKREKQTKKKRNNMIQERPQTKTQNKKDRKKKTETQQKRKKTKEDHTTKTEKEEKPKGEKRKTKKKNKRETKKTKKPDKTKKPKKNKKEKKNETQKKRTRADTHRTREEDKNERQHRTREIITGATRNRKRRKKQKEGKKKRGRKSQRNRQQKQRTTREKAKKQTRQEETRDEETKKRS

SEQ ID NO: 990924 - protein, 192 aa, Homo sapiens
MTLTEAVLNVNLPYHCACCNTAFSVCRYVDIAIPCNNKGAHSVGLMWWMLARQVLGMRGTISREHPWEVMPVICNYYRDPEKIANEEQVLLEKAVTKENFQVNGLVTAPEITGIRLNLRIVWSIQGGPEPITETPLEWRGTLAQELVATPRSAQSGEPPKRVTGAKEKHEHRRETHYEKNGNDGKTSDEDNH

SEQ ID NO: 990925 - protein, 186 aa, Homo sapiens
MAADRDPYLASPFPERMAYSDCVDFPPRGGVGPEGPGGQAPAGRPGGQSKTVTAAGQYSPGMTIERVMGRQPGPLCGPRLLPSALLQGEGLRSHLGHLGSWQSRLPAGSPRKDSYHLLKRRTQKVFLTGPSALALPEEGLGGPLPDVGVGPHMGPAGVGQHTKETRDNEGANTYWQASFRPLRDPP

SEQ ID NO: 990926 - protein, 88 aa, Homo sapiens
ATEGSSGASVYRPVYSESVDYEVLRNSCRVFAFRMYTEDEARNNRSGWLGEEYQRKGTVTGQVQGPEDKVDSMNVLAEQRLEALVSRS

SEQ ID NO: 990927 - protein, 218 aa, Homo sapiens
  misc_feature (135)..(135): Xaa can be any naturally occurring amino acid
EQRQFPGSGCSRSHDLRTPPPDVHGVITLTGWTNPLTLARSLSLRGLMAACSRTVAARCCGVRRPVPARDGPHNQLASPGPSRFSVTDYPSDPRAAEATVDRPNVRCPLGPGGGSVFIGLRRLPVFAVCSRCAEXGPGRVICDASSVGRGEKSSAVIGFPSTRRAGSRDRVGLPALAQRLPGGAPRPVPKVRLAPTRLRTLNPRGRHPMGVGPQGSPR

SEQ ID NO: 990928 - protein, 73 aa, Homo sapiens
GAHAREAAAGPDMSVLVELKASIGSLASKSKMQINTDSGTERLKNSVSISKDTQVLVIESYEKIQIAWGTHTV

SEQ ID NO: 990929 - protein, 109 aa, Homo sapiens
EKAEGSLDTGGSRVPPGREGRLLVGEADATGEDLFPAVGASPNFEYEIASLYPRIRASDQGDNVSFEKAIREGAEGLSEVVSVQVLGYGATASVISTKSAVVPLYDGFR

SEQ ID NO: 990930 - protein, 143 aa, Homo sapiens
TEAVAELWEMNARGLGSELKDGLPVTEDLSASGPFESGMIFFGDRGYVLCCGIGIDLLPQLPSRIEMYSSRNRKFPGSIIRINMIFCGTTEKDSGSIGFRASSLRGWNSRAVRAGFMRLRIGLSMLKSFIWMYGGVMIETIGV

SEQ ID NO: 990931 - protein, 159 aa, Homo sapiens
GVLRTVFFPTACCPRTRVGGWTSCVLSECANACTSHLFVWAARPLREHVGERGSVMATSGLSTDKRYAQTSDWGSTAWGLCQGQGGAHVRTVDPEYVGAVHADGREDRQCRGRGGVMCHQENVLQPKPALEALGSCPEQRKYSEGNPGKQILMGGAEVG

SEQ ID NO: 990932 - protein, 216 aa, Homo sapiens
ARPPGDAVAAEALHPQAAARPSQEAPGQRDPARETAASVAAAEGGLDRATGEAFACGTVVRGVGGSSSSDRPVALGREGQSPGERRCGLGFGPPICGPRQLQSRASPGSPGPPFPGVLLRFIGPHHKPPEWEISPTEAGNTTAQKHVGGRRHDTLAENERAGDSTKELGVPVGPGEGQGRRRTRRMSARRPKEGETRHISGAQNQWRGDPTSRAQL

SEQ ID NO: 990933 - protein, 154 aa, Homo sapiens
MRDTRDEQSARRRYPWLQHATFLPMRWVELMLPSPWSGAHRVRATFTGAHATSRGPGLVSRYVPWFTRTHGIPGGRWDECVAPLYKACLEGFLARVAVLSTAMRIGALPGVLCAVLRVRMSADTCPRSGDHMTIHDQRLNVMERNIEPMKRTHW

SEQ ID NO: 990934 - protein, 636 aa, Homo sapiens
MRERAPVDACRSSGCHRAMYPFPSLLFSFIIIAGSRGSNTCWSVALPLRARLTALIAMISFDNCGPFATAWYYRAAAHGLLRAPSPCVTLQCAIRRVYVRIVRLRTIHANDMREDRLPPSGRNLRTHVYGRRLAPPLGEPLLLDGSNERPAAHHVPPQVRSKGHAITLGKPKLHGNLRSSLHTVQGNRRRKVALSPFCRHPLGYANGNKPVQPRVAKRPEDPLTGGQPATLVLEEESAIAVVLDAPQVKNAQRVEGTSAGVCQTANRPKGHILGHNGGMMGKWRTIPYQQKKTTKAKKSYGPKFGPDPLRDKGKLLAYKDDGPMKDTDVHSDFATGAKCTTPPEQLRVGRLPLIARRQEKQGNLRIGDFALSPCAECATPPRAEEGGHCRAKERARQHTATAGRHDTGEELEKLHSVRKAKPRNIAMGFGVPGKTSVTLRQQEAETSALRVFVPGRHRRPQRNMAPGENTHLCSGHRERPGRGRVYIVGPRWPVNKPKHTSSGGPQEAQYPIATIGPRTRVGKVAIPLSKGNVAQQERPRGPKRGQSAHFLGEGAHPKPRLEQPPTPLVEHSKTSQLAQEAPHREMHHSHQECGSAGKCESPAGTESAVHSVKTPCHHLVRENPSCLLKTETVRIV

SEQ ID NO: 990935 - protein, 491 aa, Homo sapiens
  misc_feature (219)..(219): Xaa can be any naturally occurring amino acid
MNCEQDAVVHDVTKAKGTPSAHLPNEITLSVVIEFNAASYIRSEVHISLVSILPMISSGDTLCINGSCLSPLVGTPRSNPRITLIRKYNIETLSNSMLRKVSIDFGYIVSKGGLGEQGLDGQMKVDALRSLRCYSTLVSRDTPKARLRRRLYRSVLLSARSLRGVACTQKGPKVGGTIGHAFIPQAIRKEIPHTEVYEKDSTMIRGLLKRDGLQTFTRXIFRRRGGKSSQWEDITRVQGPTLSMERGETNTADRKTGRWRCSMTDRTTHYYVTPIGENAGRSGPVFPQRRTWLVVAKQRGALITKSQRGAETETPIQRRFERQFPPIGPMYQRPKGIGPVGQPLGARSIKGATRTSREGRTKHLHRRVENNPLAKTHFFGEHIVNIIKTDTNKSRLSRVLNYVFNFHAACIAGATNTAALQQRDSSGGSTKKRTLSKWVGSFTHESTTTLTYSLFIRPLVAVTSNARRTTPPPIIREDEHNSHKKLTNRPT

SEQ ID NO: 990936 - protein, 235 aa, Homo sapiens
EDSGAVVVGGGGGRAGRRPCAAAETAAVTVAAVRRWDLGLGGNECGLRLWPAAGAVYRRSSPSLLPLAEPGAARAVTARTSSRGIRENTYNIHGNPENGNHQQTRATVRTDKHTKLENENPENVYRKERTGELQRTYRGALNLTQYNYPQQRRRERDSTVRLAKNGCKTRKIRRDPTNTTSAPRQPPYVTERGKFKRQPIGKEIAQKSNRAASKETAEETPCKRKALQIETNGHK

SEQ ID NO: 990937 - protein, 278 aa, Homo sapiens
FSGVSDDRRRRYATTIPSYLLAVLSGNSSPSASDIMMILVDVGIKCVEERLRIVIGDLKWKMNMDDDFCPRVYRLKSMSSRCLACAWGHADRLWHGPRTTGSPLAVWVSCPLAENSRYLQNEHEGRRSIPLLKILDGMHLATHVVWSCPWVHAHRQWAAGRGFPTGVPMTPGSCRTLLGQIRVGEAGHPKQVMTPPKERGTVAGRMQRDCHRQYCRGLQTQYPPGRGGHFPTTYGAEEAPPPGIDGPTSWYETPMCPPMGDPPCKRESMGQCPSGLGS

SEQ ID NO: 990938 - protein, 357 aa, Homo sapiens
VVPVRTESVMRTARKSPEWQREIIISTIVVYCVQYDLLGRVEHYWRVLLYEMEVARAKEETDLIHSSENGSVVRRLAEPVSTLTSHACVPLLIDCTSLALVTRFDIYLLTISLWRALTYQLSTSVTFDCMRPGTLEDNITEAMMTADDRRERDLSLVTRISWFDRSISEDLTQAWCISPKNRRHDRRATLIASFVMYTLGRPCRETNYIRRVVEVESLGFPRRKRTPKVGIHHHCHGTLSTSKVQLPLHQGKMGYDAPDTGGRLRRRSGLASGDHLLGAYLLTCPGPRRCLAGPCSVPLPVPLRPVSGLCLCDPMLTVCRLRAFWLPLGMSTEGGVRTGLPRLQCGLERLVALARSV

SEQ ID NO: 990939 - protein, 187 aa, Homo sapiens
AWRLLSAAAAAATHAEPGWLRGGGGRPSPVAAARKGSPRLLGAAGAGLGGEPWGCTTRQRWHLRAQDLHAERSDRAALPVQPPLQLTLYQYKTCPFCSKVRAFLDFHCPALPGGWSVNPVRRGMRNQSSPPTERCPSMGGPREEEKARNEAKIDSSCHQSGALKDLPGCRGQPLEEIITYYPDHEGL

SEQ ID NO: 990940 - protein, 186 aa, Homo sapiens
GRAEVIAPVGSVVLEVWPRSCRQTISKADWDASCRRALEYGKACRPRGWWFQGLLGSNAFMLGRTARVSSNPLAPVLPYQMSDSSGRDELQPWQLRSKPSSDIANRSCRLGALNGHQGDTPEAVVPQRAPAALMPTLPAPSAKPVPVQTALLRRTLQIVTFRASDGELIYCILVLAFWSARILSKL

SEQ ID NO: 990941 - protein, 297 aa, Homo sapiens
ADTRRCDALVPRTLLLLLSGALALTQTYGGLPLHDGISPHPCPGPADGEPRFICSVATWTDTQFVRFDSDAASQRMEPAGAVVYEQERPEYWDQETRSVKAQSLTDPSGPGDPAAVYYNQSDGRISQTHPDTVWHADVGSDGRFLRGYEQHAYDGKDYIALNEDLRSWTAADMAAQITSASVEAAVWAEQLRAYWRARAWEWLRDTLENGKETLQRTGPPQDTYDHKPNSDHEEPEVLGPGANSPGEITLDLATRWGGPDQDAVVVQTSSPDAPPDGVSGLGRSNPRSIMLQATKGL

SEQ ID NO: 990942 - protein, 113 aa, Homo sapiens
MPSHTAVSWRYIAQQDRIIRQCCRSKSSSMAHMILLAGDQLHRNMQIRPCDTQTPRSDAQNELEYDLANLSEEIVAQLLRSNEKYYVARPSKRRTWIRRFRMFPIKLAASTGT

SEQ ID NO: 990943 - protein, 286 aa, Homo sapiens
MNRHPNFLVVAEGYTLSSEDRETLFRTISKAGNDHWHSSSINQVLSADDRCGRCPWTPNQESHPALSVVESRSKVAHQYRRLQGTSNPAQRPRGTVHMTERPLLHRETSLYEASESFHHRYNQGIIRQKAFAEFSPYLVTVCDALVIVSQITPGIHCPHIHLERKSDERVHRVAWDILQRRGPRAMLGPFFSLPKYPSFRCVPVYTRCSLLLFHFKRHIPCVLEKTRVGNATHIKHTHICRRAPTRITPPCERRPKKGVSTTPNTPGAERDQKKAGHACNNTAGLA

SEQ ID NO: 990944 - protein, 65 aa, Homo sapiens
MIDLLPQETRGICVLGTALDRWCGIFKFARYAGFNAGYKEVRSHKTLQGPHWKIFQKQGIDRKYQ

SEQ ID NO: 990945 - protein, 112 aa, Homo sapiens
YNPYDALLSRAPSAYNEESYKSPMVTLQSDRIARGNKSDTKPNSPDAPSVRDHCASNPPTEEVIIACYYYSCPRSNHLLRKEPTVVLQSLYHSVSTGSLLTYVLAVYIVVID

SEQ ID NO: 990946 - protein, 156 aa, Homo sapiens
GEKGGDIWARGLKPAGELWETPFSKKGKHNKQKNTKRPHQKTNQHTSKKKICGRAPRAGPEKRVSKHHWVRGRGAGDQGSVDGNQGGPHGLFPRRRTLVDNRNRGGVSSPKKKRRAGNTAAVLFDHHQGGSGSDTRGAYNKGGTNRERKINFAPRG

SEQ ID NO: 990947 - protein, 122 aa, Homo sapiens
MALKRIQKEWSDLQRDPPAHLVQLDRVGDDLFHCKATYYGGLLIAHIRVESSFSLYIFRPDYPFKPPKMVSQQKFTIQNINSNGSIGLDIREGHKWSPALSVSTTFYGPYVLYFGDPNPDDP

SEQ ID NO: 990948 - protein, 114 aa, Homo sapiens
GFGASVGAAGRLGARSDSAVGSEPGSRHRCAAPLRRAGAAPGQAAPGQERRGCVMHLKAICEGSRRKEHPPEVQQGKRQRILMNHQKGRVLDETVQRLDQYNYQGVSFLQASLR

SEQ ID NO: 990949 - protein, 252 aa, Homo sapiens
ELYKSSFRSPFILYVRLRTDFTQHPNLTNNDMGYGYVYASHLTNFFTLLSLTLYLLLTDSFLLLYSLLTFLHTTQLNPGQPHYLPLATLLTYASRRFPARHSLPLLLATPTCARDRHTTTSTNTHQLHARLLHTTPHLLPLIPSSLLITFFNSLSSSFHLSLRDPLFPPPLPLPRLPPSPTPLSNAFSLLTEPVLQLTHPCHLLFNKSLTSLDHSHYLATPLNLRATKPLNFLGAPAHGSTTCLTHPPASHA

SEQ ID NO: 990950 - protein, 114 aa, Homo sapiens
MNQLGIPAYVTINLNAGQMKAGGNILTNSIPPKRPKLGEPTSSLVQPPGHTKRLFASSYRQTGLCRTQVYQRYGVGLKFCTSGRGCIRGDTITLLGSLPGTEKGTGLPRGTALV

SEQ ID NO: 990951 - protein, 191 aa, Homo sapiens
DRRDRVRPASTEPRSCADPAALSTPGRQLTYGCMIFAALVVEQAAPGIVQGPGFRGQKIAPRGPFFPLPSVGAAPRAHRAVMRWDNVRSRTGIPINAWAERSAPGCKDRGIPFNLWKCNPQFEATGYSGHQMWGTTLRRTIVGTNNLSYTLKRALVGSPGVSNPRWLGSDPEVPPVETPYRGTTARKDWTL

SEQ ID NO: 990952 - protein, 123 aa, Homo sapiens
MNGNRSNKDAWCVGTLKRVWMVEGKAKDPFRLRGGKATKCAQERVPRIETLKRYVLKAQERPLPGLQGREKRWPRNNSFPWPETRIPGMALKIRVRYLYLEPLWALDFWATDWLVANTFDTSW

SEQ ID NO: 990953 - protein, 110 aa, Homo sapiens
GPRGLASLGLGFSGAAYDQNTGRSRRPEVRRTRCVRWSAPTRSCWVNQNPIAQTPGFSPPHAEGSTNAVLEGVGAEADSAAGVKKGSRMFWRTTGAPGTHGFAQENHTAH

SEQ ID NO: 990954 - protein, 189 aa, Homo sapiens
RPPRSRVARWWRAGGSAPRGTRRTVSPAHWATQLIPIKFSERQQASHYLYVRAHGVRQGTKSTWPQKEDSFGSSNVPPILHRGEPVPPSCPPVASSSRVELQEKGRTWLRAPKGVKVEVFSSQSQFRVSREPMLVFQKAKVGVSAALALGRGPPCLGGPPEKPPLGEGVAFTRWISDYADSVARPLKAP

SEQ ID NO: 990955 - protein, 298 aa, Homo sapiens
GFRGERWAPPAPRWVPRSDSAVGSEPGLPPTVCRHHCVGLVQPRARPRPGQERRGFVMHLKPYLEASRRKSTPRNVKQGQPLENSYEPPKGVYIDEHIAKVQPHTYHVSFPFSLSRYSIISKAIVEILSPNCLGSMSGNESCREQFELLKPKGIAHSEGIHQCERRGTTEYLGCCETVKFPRTQVGILGSHQCSTSGWDSLHHYNSSPGILSASSLYEQGHNIQGAFLKKEGTGAHGYGTVTRRVGTNLKPFGMCGFDTVLCPLYVNVGMASRSRARTYNMLPLSKHALAVSKGTPYV

SEQ ID NO: 990956 - protein, 134 aa, Homo sapiens
RGGVMERSREKQKWETCVTSCALQSDDRTLFQRCVPSCTTELWNAEEEACLHSCVGRLIHSNHRSWPLRAAHACLYRRRSEDYEAASVVPGVVWKQPWGLSNQAVCIPQTQEGGALGWTPQIERDPVWHLLGFV

SEQ ID NO: 990957 - protein, 105 aa, Homo sapiens
GDQRASPKRDRSSGCLCEVARFHPRSVYVKARNSLAMSVQRRGVFSAEPRGRTLPGFPQKRKAMEGPFYFILGADPTVWADQACSTGDVWTMAGDKVRTGEIRSN

SEQ ID NO: 990958 - protein, 81 aa, Homo sapiens
SSVSFVVVSFLLFFQKRAFGVVTPGCVGCAGGHKKEGHTEETKHNEINNRKSMRHKPQQQNRTQQKRGRNIKRRMSNTEQE

SEQ ID NO: 990959 - protein, 128 aa, Homo sapiens
MRENIRQYNRGVLTEWQLAIYTRCRRYMAPETAHGKGDEGELSDNMGAFGVTNSLIVSFVMMLPVRPAAHLSLQALFHPCPVAQPVHQPPFGMPLWALKSWHQALAFYLPYHSPSGEPLFALGSNSRV

SEQ ID NO: 990960 - protein, 62 aa, Homo sapiens
GAAGKMADSVASRGGGRGGNPAPRAPEDRSVGMRSCARAPGKSWSPSSNSMLRVLLSAQSSP

SEQ ID NO: 990961 - protein, 74 aa, Homo sapiens
IVRMSLPYGITRPELRICCLEYLSDASADGINTISVRPRCRTHLRIVTEVSLSFETIQSHDYTWQGDPSALPSG

SEQ ID NO: 990962 - protein, 70 aa, Homo sapiens
RKCLAAASRSRSAAPGPPVPRRPPSRAREGHRARRKRKLPRWQAPARNPRQWHPFKGGLHLAGQNTFGTM

SEQ ID NO: 990963 - protein, 174 aa, Homo sapiens
PQRRCYHLCVAAAILMAGRVRFWDSWNSGGDWNNFTKCKAIAELIFSSGDGQMCFVTEPDCFPISQDFCSLLKRVVIPKPFSTAGSSGSDESHVAAAPSKIYCSRNSVASTETIGDPFGPQDHEGSRLPWEHRVLGCHLRMGTAFTGTKSLVHKNFCLMFQQNPLFTVNDHDVC

SEQ ID NO: 990964 - protein, 131 aa, Homo sapiens
MNIMGDVVRKVLTKAFYLMKCPQVPTTLFEISGMARHNMSVGDKISMRALLGREGQGSGPPGLCLYTKLGHNKKQKAQSSWGTPELQLIGRYLWRKSRQEGYHSPGKTNNIDCFCVRRLYEKEAERTGADF

SEQ ID NO: 990965 - protein, 84 aa, Homo sapiens
EWNVTRVIGNASDPCCLWFVYCIRTTKVVLTLEKPWGLASFQECLHIVGVYRNVVLVEPSWDDCMLSQTRLWLEHHLVSRFIVT

SEQ ID NO: 990966 - protein, 178 aa, Homo sapiens
MVPEGGACGGNAERTESIQGGFRTALSHLEHGLHELKEIRQARVPESLGEHRVMPVQWLDPKAYNAVIPHNTRCCNSNPGPCIGDSVHENGENNQRKALLMDGLGNDVSDLRGPGRGCKLGLDSPERAWACFVEVALEPWLLERNAQGESLMEEGLKNLVGVKIQSFELEKKRFDLEN

SEQ ID NO: 990967 - protein, 140 aa, Homo sapiens
PARGGPPGQSLQPPREASVTKMKLIYPGALFSGERVGRLNYIREPHQSRFKPQGPGERYFPTLGGLPKWGEEINPNLGPGLTKGKRLHWEFTLLRRTGGEPRGSFINIFIGRKEPFQSHLELKDTGGGPSIRRTQPGGRG

SEQ ID NO: 990968 - protein, 314 aa, Homo sapiens
YQRRVPITAGGASTYVTRKPGRPPSLKQPEAMEAEETMECLQESPEHHKMILDRWIETARAGPVNCDYHPILSDGHHQFLGAHQRAGWSLLVVRVLSTNFLPGSFTPRTMWVQIEGVSKNGLSAHLKMEVHLYVHTFNLIQGEEEGTAKVIVVEKQPEFLTNMLERISKGPFESQENKRKNLSSSLGGKTTHGDQIEANNKRTMAGNFQVSHWSLAICRNQNPGGTGGIEDGRRAHLTGGRCRARTIRGKVLRTDKPERLNHNHGAPEERPGGAYTEDRRDKGEQTGSVPQKGITPGGGCKTEGGDTPLGGQQP

SEQ ID NO: 990969 - protein, 30 aa, Homo sapiens
  misc_feature (11)..(11): Xaa can be any naturally occurring amino acid
MLEEATLITQXGESRGTWRALRKKEENKLT

SEQ ID NO: 990970 - protein, 157 aa, Homo sapiens
MDKVPLCYLSFGTVSIIIPDRHRENVNVNSSVTPKRFPEPVYEDVRGSGAWYLTMDVYLLLETVFLVELIQMSENSARNPIRQRIHLANVASRQIEAANREFVQDGNIVTELLSEHKEKMTERLLSANAGTHSGVTNELAVCRYYSPLATLMLATNL

SEQ ID NO: 990971 - protein, 309 aa, Homo sapiens
ALHEGGGDGGGDSGFSQYSVDLTDPGRLTGSNYPGFSISLRLTWFLVHERRVPEEPSVKPQTTAMSPFVCRLRRNMFCDVQLNRRRCKRNAVNNGLLAEEMVECFNKISRELTVGSVVISACTDIDVVTAGIDLDGHGLSDMPAARKEMMWSGSAGDLRDIISFDTKETSPVLERCPSRDCGVMGADRGGVELVTAVQSGTVPGCSSGARGDVGWLRCPKLRACQVFGNPLSRAAHGRMMVRKLRMGGAGSQHSCVRATLGASPTRGEQQDRGPGPAGHLRAHTTHTSARNDPSVGAGAPKECLTHKAI

SEQ ID NO: 990972 - protein, 121 aa, Homo sapiens
MRKGLTEVMGAAPEALWQYSPEPNFSFKIVFPNAWLSGWITGPMKTSRKEVKKAFYGLNLLETSEKDCPCHPYYNKTSGLGLRVHGFTTEKGSSTVWNCAPIGTLEVKLTRKFLPRRRWHP

SEQ ID NO: 990973 - protein, 67 aa, Homo sapiens
GEEVGVSLGPWVLNVRGSGARTPMMLSYSPNCPDTRSFTRLSLWPEMKACRHCGEVRYRPGPNYGEL

SEQ ID NO: 990974 - protein, 110 aa, Homo sapiens
MTRTFLLLTSCSRTDYGGKNCKRMPCRFTGLTEKPLRAAVGEPGQKGTPRATHRACRFAATIDYHNQERDTTQTTRQHAKRAIQPSRVKGRHPSLHTHAAADTMPQNSAT

SEQ ID NO: 990975 - protein, 237 aa, Homo sapiens
FASLLNLSSSTAARRTPAATTCLHGPICMPLRTQSKDFIQTHDTQRKIDSRRTLHACRNTSPNDACEGEGPSHRKHHDTNINNQPRDQNPPCDNTTQLIKPSTEDDTAHKSLQRQETNKGERNNTTAQTQGTKTKKKRRKTSQTNHKTHTQPPHQRRSDHSRAKHNQGTPTKPNAPQKKNLPNKNTRDQHTKTPTKNTTPKKQRRTNPHKDNKTAPHRENNKPHHHKDKKPTHNTKP

SEQ ID NO: 990976 - protein, 178 aa, Homo sapiens
MQPTSAPHNYYTYTRNSQNIYIPTPPTNTRLTSSLNTTYYTSPHLAYHVYTHFANRRPQNAPSRTHTHNRTGAQDTLTGHPHAPARDGSASRRTARNRTSDGRAPLSPAKPCSGSLGSHKVNSPWPLLHTGTIVRRKTRHIARLIGDPTRHLQTGESHHADNVQRRNSRKHTEQTPRS

SEQ ID NO: 990977 - protein, 390 aa, Homo sapiens
GARTADEDGDRHDTMEHISGQYREPSLRTFRGTSSMMRELDLLSRKIRKQSMTSWLQRYIHHGRRQQILHKTSDVGAHQQKIPEQPNTQVQGITETTKVAARPCRPTKHRRITHITERLESQDQDAKMTRQDTAQNSIEREQRLQRHSTENRNASKKKTKEPKHQKRQNRRENTEETRQARKQHYTRRKKTNNKDNQKTHKAREKKVPKKNKTRNEETQNIQSQEQWQRRNTQQKHKKQAQITNKNTQIKANRKEDNQNRTGHKEDKTPRTAEQQETDTHKRNTRKHNNNIQNKGNHSHNQKKRRKKINTQENKSNKTEEEKSREKQKREKREECEQKTKKRNRKKKAESSNKKKDRNKQQTTTDENRQSARTDSRENDDERQSAQVLWP

SEQ ID NO: 990978 - protein, 391 aa, Homo sapiens
MGEHLLAHGYPDDFYVRVGSKRQRPLWVLDSPKQPNKINTKEHREDPIKRRGTAQGTGERPDDDINAKAYRIGPLEQPTWKITAHTDTGDSKEYLKRLLPEQNQETKQNQARDRPTQKHLHRGTETLTEKGMPKEQPKDSRGTMRLQHNPTKPGTSAASRNSVETPTESHTRDTGKGEDYHQNHDQTHGNESKHVNSRNQNRPRRRGTPNDTDEPERTTQNRQEDDRDKQDAANNRHTDEAQNDQEKQSKNTRTGDHIRTETESTQDHRRAPNSDPQNSQVTHKKKTKTKSQAQTQRQGRQANQRPKGPNENRQTDEKHRQNAKIEKKHDQTRRRQQEREDAGAHRSHRHEGKNGRRQPPTDASSATRPKAGRNDTDKTQPTGPEDAQRQT

SEQ ID NO: 990979 - protein, 363 aa, Homo sapiens
LQEMGRPESMPFWLTHMGVKTTQLSGDSQNGFHCSHPYSQQEYDVHRLRKSALHIKKHMAYNTPTPVDNMMPIIMDWNGDNNAGETKMLTHALWNITGDWKSKTIRIGNGQEETTACKKESRKMHPTQTNSIQTEQTIDAGTQPGKTYKKERKRENVTMIGPKKRKQRDTTKHKNSESHPKDTQEKQKHQETIKTEQKENQATHNDRWTPPTQERTKERKHKRQTERLRKTDIAPTGRPKDGDQHNRRNTDPTTTKRQKAQSRTNTGQTHPKKNKKKMPTGQQQANAKKKPHTEHTDGTNSDKYKTSSTGEDESKTRRPQNTREEKKTKRNNEQGETPEHTNNRREQQARHKKRRRTSKKKKR

SEQ ID NO: 990980 - protein, 397 aa, Homo sapiens
GLSISNIQTAYSFVSENPERADSVLCYLDVCIGLVLTHGCSGDNWISSPNRLQDGVPGRRYLQDRESRRESRDKRGQEEKDTEIQTTHTDDGDNRQIRDGHKEQSNEIQNIHRGESKDAAAPRRAEKSNSDSSNPIQRNESEHELTRQQEATRTPKRPELDILHQENAERKPTGTNNMEGTTIGKGRADTEQRTTEEDTTKEKETTENNTEKTKWMNRQEAQTRHRDRWDPIKTKAPEEDMGTEKREQHRYNGDAKENTNTKANKSDTIDRDNNTAEEKKTLQNEQMENRRQNPEEQQQTEQPNKTQTKSHEKTLENRKHKKKADTREADTHTCTRRGKTEGEGRQRATENEDDKPERGRADRNRKNRRTQQRKGNETNSQSYNKEEESKRTARRRA

SEQ ID NO: 990981 - protein, 251 aa, Homo sapiens
NEEILGIDWILDFANGKYDCLSRGNLIDLYGNQGLHPTRTYTISQLLSRPTFPNKKGAHRDLKHETLDKREAENGQSQTCPTQKNQEITKNDRIKEQGTKNTQEPMKPDMHKEQGKPTYKSIRGIYTETVAHENSNDDNKKLEKQTDIETWTTTNRTKEATEKQEIDTAGPKNKEKHLKPIPRDTQATPDKERNRTNKEETRNKAKQQTKNNHTNTCRHIHLTDNHPTTQQEQTPQQQSIQKMRTENNTEK

SEQ ID NO: 990982 - protein, 260 aa, Homo sapiens
MTCEPKKTQYNRQSQTATNTQKDYQASRQIKRPGRERERRTAENKKDNDCSEKPPDEKATGTSKEERRQKKAKNKNWKKRRPRKKRQGERKRTKQKSRERGEARQEKRDGRQKKQPAGQDAQHEGRGDTRNRRDEEAHKQTRRAGRHGTKPDTRNPHTAETSELQERGPRTDEGQRDARTKRDQDRREEGKTGPPGRGRRSTTAEAKKTKKPENRKDSKKEPERKQRAKTPQVTNRREKDRTGVTLRNTTAKRSKSKTQN

SEQ ID NO: 990983 - protein, 212 aa, Homo sapiens
MEDSDGTVDMTPLRPQNYLFGCELKVEKKIITYKVDNDENEHQIIFKNGQVYGLVQRMSAHMRKTEAMTLRRQSNESNTGKLEMSVTDKVSLGGSEITPPVVLRYEAPDARDRALITWKRHKHRHVDERCRVRTIDKGGSDVKHSHHEYRKSGMTPEGEQQGYNQKKQLTQRSQTERSMTTMRQKRTQKITTETNNRRRSKQEERLTKKEDQ

SEQ ID NO: 990984 - protein, 171 aa, Homo sapiens
MLIFAPSGLKRGGKTSFVHIGPTFKYYNAGCDTYTTGDIGLKKKNNYSPKHPFAGNRPEGFNPETRQHFGRHIGGQPGRKRRGSPPNRENGPEARERGTGGNITYPQAPFIGARSPDEIPRGTSGIRRNKGYTCGLKANNRRGEEMTMRRQVNREEGRGTKHDDDVIKSDN

SEQ ID NO: 990985 - protein, 71 aa, Homo sapiens
ASTAGLHTHISVLWTITYNDASRPDVTEQAQHKEVEHCDKAQPNEDEEDTWGRDYCIDKHDMSGVTAIEDC

SEQ ID NO: 990986 - protein, 92 aa, Homo sapiens
MWKGILTCVGPPLVPGPKANDDEGSLMSLQWRCFNRDVVLISPAQYNSVVAHSTVRMTDTLERRENTRPMSHNTGDKGEHTNRRHTERERDD

SEQ ID NO: 990987 - protein, 65 aa, Homo sapiens
MYDTHNAYEQEQKGQQHNRERGAAHPADSKQYTIGDTQEAKHEQGNTDDTKILKRDHYSHSNDEK

SEQ ID NO: 990988 - protein, 345 aa, Homo sapiens
MLVENTDETIAFDNEARYDICLRTLKLIIPIYGDLNHLVSATMSGCHHLPPISLASSLLTSASVAVNMVPFPACPSPYMAWLCPSHARPLEAQSVCETLTSAGNSPSEVYRCPRYMMGVPVTPVLPGDTSPWSADLSRGSRMVHERQGLMTQMLNVLIHEQASYFVEVESPNNGQLTTPSVTLTTFSGLKMACLPSLALRTAIEELFRRSRSSSLHVRRKAFLSLVHRRRLDEREFTEAESNDERTSSGVSGVRMPRKSRSSGGGAQRLERAPSTEGDRSGAEEPEAPPCPEMGCARHVQGSGGRQPAKWRQMVGPKEAANGDGPEARLKAHDTGRMHHIGAVVQ

SEQ ID NO: 990989 - protein, 189 aa, Homo sapiens
  misc_feature (185)..(185): Xaa can be any naturally occurring amino acid
MVCMRTWILYPSQSFYNPANIFVEHREGENRHLVRNADHGPIQARPWRHDYRRSQGSTRVQANAEAKEDILDSSADSEIALQKALAVKNEPKIQAKAGEGAKGQAETGSAIRKPHRDREIRCELRGMRTEYREHEVRKMTRMATGASGTRASENKGGTFKSRMQKGRQEDEELRAGHERTVMERXLLQK

SEQ ID NO: 990990 - protein, 158 aa, Homo sapiens
MFPQGPHFYPAPVFVVSHGGPPLLGRVCFFISRPAPVAALCFYKHARDERGKTRVQPCGESSWCATRTLYISLCGGEGTHYRCVDTTLYPIAEQYYIKCLSQEVDNLYNHIFSTAECHIKGVCLNTTIRAERYIICGDEAAETRSEENYYVYARAITR

SEQ ID NO: 990991 - protein, 92 aa, Homo sapiens
MSSTAGKDRSRLDHYYGTSLLYQAQTLSYRVEHRWPLVEEYFVDSTVRILCRSFLQLDSRSLIDTGDTALPIYVEGEQKFLSVMTLSGLQGK

SEQ ID NO: 990992 - protein, 173 aa, Homo sapiens
MPMRHPGTAQHISMHLFQPAQMTTQAEGASEAKARGLQKQDPQWPEPTKRDQARLGYTLTGTLQENECLNEECTTDVTRSQPRRRGEKSARCHESEDKRGPRNPRAQDTTRRPNKAGVREKQRRRTKREKRQSNKRTPRRNRHRDDPRAERHSGRHVLNEEENTGEKTRNKRR

SEQ ID NO: 990993 - protein, 364 aa, Homo sapiens
FTTKLKCCGDLIVLKTNTADSTGSQLTANKLLHTSQSLERGHWDHVTLHKKIHTNHSCLLHYLHNFTSLSNSTATNPTANTPLSMPPLYLIPATTAPAPPARHYLTLLLPARTHNAHYLPTRSAHPAHASHPTAPTPTPQPTSLRPLHPARTPRTPPTAHAHAHPPTALAPPPTRALSPQHTHYARIPPRPPTHAPALATTATPTPPRLTPAPAHRPQGLPQPGAAAPTPPLSPTACHPPPHPTPPRPSAPNPTSHLPPDGRLHTPPTRPRNPPQACIPPPGNPRNHPNPWHPQSQPPAAEPSHARPNPSPSTPPARPHQRPKPPPNLPTHPAPARAPTHLPHNTPVRHPPLMHPRPWLRAPFA

SEQ ID NO: 990994 - protein, 73 aa, Homo sapiens
GRVGRPTRRNRSGKTHLQIPAGYPANRWIPTTQGRKRGGDTLLPGEEDERPNKRKDWTPCRKVSGSRDTSICS

SEQ ID NO: 990995 - protein, 442 aa, Homo sapiens
MSESKSEPEICIRKFSRTWDAYGTNMGLTDALRTDCQYAQTKQRYRAYADKYQDIAEPGRTIIRKYHTYPEDNGIGNHTSTTTSLEWRQVLHTHKNTKEMTRHRGTSNTQKHIAAQSVETSQGTEESTIEDLRCPSHRAKDQGIIAQYRKFRSQRTSYEQKERDTNEEHNSRDPTNLTYREGANKKPIEIPDKSDNRRKGGSNGAKLHREHPTQERDQTNPSVASNKGEGTPDLIAEEPTKQGHRRSSVCDVLEHESQNINNPFDYPPGNPRTKGTMDKQSYANKVKLRTIPPRRKIRHNGTISRTTDTKGDKKNIENHKEHAPQKKHATEDDNNKKKTTRQIHKAKKQQKKPKTQNNAKYGTGSKKTIASTAGRGQHAKKRRKENEEEQVVRIEGEERNERESNRGDYTELGEATKGEQKHREAKKSEKEDTRGARQGRER

SEQ ID NO: 990996 - protein, 32 aa, Homo sapiens
MPHLPVDKSSRQPGCTSGTARRAQRAQHTAVT

SEQ ID NO: 990997 - protein, 128 aa, Homo sapiens
MHLLNLCDTIYLKFKSDIPLVDTTSTPRYAINTNEPTIWYCSSSWPTTMEPLVGPVEYWSSHLHQGTYAHRRSPKAETAPNEPFGPWKGAKLRESNDPAGLFITELILRSRETPLRPQYSSNTAHVNI

SEQ ID NO: 990998 - protein, 258 aa, Homo sapiens
THASRLTGTLTGGWRTGDSDLREDQRSESSKNHTTQSDAMSVGSGNLRGGRRVGKHKNSGALGKGEPKGEWLTVSELLKEGTQRKSSRAGAEKQPSLIKDFLKGKHERRMLFKAGPARHRCTSHTQASRRKWSRNKDHPAFAPLYFPMELDRKEALTKDMEYFCGENWEEQVQWPKAGQKYVERIHYIGHERAWSLTGGPCHTPAYVGDLSWGPGAEEVARSTETPQHREGTQFYLFENVDNARVEDKSTGRMNAWTE

SEQ ID NO: 990999 - protein, 71 aa, Homo sapiens
AAQAAAAEACGAGEQQPAVRARGAPHTPRPRASPELARHPRHWRGTMGQVPPGSGQSQKTHRVRGVLWDTV

SEQ ID NO: 991000 - protein, 414 aa, Homo sapiens
GNAEKGTGEKSRSSEMKSGKCFQSAPQTGARARYAGRIVSLSLSRTHTNTLLHAHTSFHDMEPTHADSYIVQGSTCLGTQSERRVELGANGDTKTKNIKKCDKTKTDTQHQSTDKAKTEKTRQQGSRDEKKRETERAPNAAASDEGKKAKEKKRNEKQRKQERRQQEANTNTENKADDHNQRPQSKNTHHTRKTRTTEQRPKQTRRRAAKKENTRQAGQTAESNRTETKHTKGSKEERRSDHQEQNRKRAKRTRENRGARSTEARGREQTKNKPSGARARKTKENGNSDKREQTEKRNGRDGEATTDQAHQAEQDEQETTGGAPEQRKERTKERRKQKTARRRRDKEKEKRKKKKRQRERETQQDRERRNETRARHQKDERESGGSETTRRKGEKQKKRKKQKGRQKRGEKTNK

SEQ ID NO: 991001 - protein, 136 aa, Homo sapiens
MRSVASCAPSCLGTTFTSPASTYSAQLSLMEIRGMRGHGLNAKRKSPRDIIGLSVNIHDIGRCVILDLIMLITKGCGYIDIAFSQPWLQVRCDSTDPISNSCGSEASLQLGCYSSLYNRYWGRTITYSPRDILRVP

SEQ ID NO: 991002 - protein, 390 aa, Homo sapiens
HASRTRGSNDVVRPTSCRSRDPLMGLVNGELQRLSWPGLQGHSWAHMQWLVGASWVRMCAEVRRTELMRDRETEGNMYAFVRFWARRLPYDCPDRNVPRLAPVWPATGHGWLSGHLECGWLRGWGLASNLSSIVYTRTPLFLQSPIPYATHGEPHGSPSSVVQPDQTTQNERSHPPDRYTRQRRRTSPRNLNSMHSRHHPTWQNGKQRPLTPHVNRQAPGEPHTPAQRSTTAGGPAQPARSSYPRNRTAQGPTTETGTGHGTDLNETQQNMTCLNRNTTTPDNNTQKTKKKAPEAAQRQQANKNANKNNEKKRNTQHTKPKQKGGQQRGRARDGDREDRDATREADDTRRTEPTRGKHTERDQGRERTPETGRRNKATRKEQETWSTYHT

SEQ ID NO: 991003 - protein, 187 aa, Homo sapiens
MAAGPPGYGWCGYEVWGGKRLVPGGDATGSPGARGPVTSSGGGGSVSGMPGIWSSRPEMKGLLGGLVTVNQQLLDPGQPGGIVTLHVQELIQVNLQFGDLLFRAVVKARELAPGSTPLGGGASVAPGGHTWRVTFPVGPHWGPHRPPRRGPSPAGHGGALNSRRVVLGRQCRPGAGDATPAPGCSVR

SEQ ID NO: 991004 - protein, 484 aa, Homo sapiens
GPQMAAAELRLPGEMRLGAEGLTWPPGARRAGGCSRDWCVPPLALLELGRTGVDRGGTAESTRPAPTMPAIVICEPVLLPGLHPGVQYEGGAHGRHWYCAVPMCCIVSVCITVRVPRQTLAVDSRQDDRSRSSVILQQQRITEVVAQGHPAQVVMGDQLRITRERTLMPHKSHAAAWRRARRKDARDTAQTHRNTVGKSVARRSEFLWHTRHTYNATKEHAGQSGTRRAASGYVYTPRAQLTNSEHTQRQTKRHSGAPQDARERTTQGGAETDARHSGRASTERAAERSPTHEKRAARAASAEASGPQKAQRAHTEQDAQKAHPLYTTYPSPPKHTIYNSKPSSFTTTPLTTHSTHQHNQNSYTIKLIKHNATPTAPQKRDTTATSEPRRTDEQPANERSITEHYAPNSTRRNIHSRRWRGTHNEHTASQRLANHTQVRSDITQTHDHLTTDPERGPTARSSADDAINRLIELNTRRDANRSPP

SEQ ID NO: 991005 - protein, 100 aa, Homo sapiens
  misc_feature (75)..(75): Xaa can be any naturally occurring amino acid
MCVLQGVLQRRPNVGNPEAPHGVEHLVAAQMSAYGKFPTFQEQREVAVRGVTLPLQSWVVDTCSHGYQVGDNGPXDLKRDDNSGGYHKQTNRLGYTPDKG

SEQ ID NO: 991006 - protein, 135 aa, Homo sapiens
MIRSWDPAATVPLGGVLTAVINPIRHLFPVKPRRLQQAVVNDTVRSQPEFSHCRASRNGSAPCGWCRPTEGPPHLWDTRLEIQQHPKKGGRLLADIRRARAANTVNPDWGAPTGNRPKGGGRAPQVGRRKKSTNL

SEQ ID NO: 991007 - protein, 196 aa, Homo sapiens
MEDKYKENRKKKRDQDKEEKGRKNTKRDNEQQRQEDMRHKRHRTKRHNTNKKGKTKTEKRKKKKNSTEKKKRKKRQNKEKQEGNRKETGTQRTKETKGTKKEETGKTNRKEKTRGKQIKEIAKEDKRKEDRAQKEEHKKRQGEKRHTAKKQSKKKEKRKQEYKRRGKTRERRKRRQQEEENKRKRTKDRKRRKRER

SEQ ID NO: 991008 - protein, 147 aa, Homo sapiens
  misc_feature (147)..(147): Xaa can be any naturally occurring amino acid
MSYLEAHQHEGERALKGCRDPRSEAQGSQNSHSTRRRRSPAKDGDQGTHPCKMKEQRVSATACTRGGTRRGKRSTLHEGNTFVKGDRADTRWSGGGAYQNKQGRREARTTCWGEQTKQRHNNQLMKSTRSDRDSRDKKYKQTSTPHX

SEQ ID NO: 991009 - protein, 155 aa, Homo sapiens
ERVGGRGWDQLGCFTIKSDVWSLESSYTRYVTYGKIPYPRVELMRDVMTACARATGCPGWRTGQMSSYDYYENVAGIEQAGMRGPRYDYLQSSLDDIYYEPRVRAIIQDERAVRAQGRPVHLAWCGCLIERGISEPSLVATYDFMCGDHLPVPGS

SEQ ID NO: 991010 - protein, 69 aa, Homo sapiens
ITSNVGAVRASSLTIYALEYSLSRSIRKLSKHLSVNRYIEAHVHGEIPDITLVKRLTVKRMKLRYVHHA

SEQ ID NO: 991011 - protein, 152 aa, Homo sapiens
MGHLGAHQERGKPTIQLTHFTLKFLETFGALPRALQKWAILSKNPTNPNTPGVTKSTLKGGKIFLKKFKNPPKNPFWVLLTRANVSTPFFTSYNRGRMPLGREPFTPAVKNIRAIDTPGSAKTQRREDPSTRSIHKRGGPHRGSGSTDIGPV

SEQ ID NO: 991012 - protein, 323 aa, Homo sapiens
VTRGGVPHVTVPRARPGLRVALRRCSCLHNGADGQRDCWCALAGVGRAASCGLPPKVAGAAGEVQWALARVIPGWWLLGAYHLLPVTSNGRRVPGCGREEVDGPSVAVGGQSGRKPRELPAGPALTPFATVKLQPKEGRDTVPIRWKARTSASTRVPASVHSNNNFVAREALGILNLSLTFPEFHFFLPREGPLQQVPPVKGAGNKHHSLHRLGKGTLDGGTPKVPSNKWQFHNAEAPHPRDLTLEAGICVKTPTTRGFIPNFEKYGMFQNYTTLLLRGQNRVKPPTLMPIPQSRRRVVPGDPPMSESCKEAVSGVPPVASDL

SEQ ID NO: 991013 - protein, 532 aa, Homo sapiens
TRGSTTRPKLRCNVRETTVRMWVFLAEWRGVLSIYLFPPHPPMGLYMEINYPTTNNPEQHTQARPHNTHTAQSIRQDSRRKQSNESGEQNTRYLSTRSTRSRAQRTQTTTEDNPETEHKERDKEKAPTHRGPTEDSGLQKQQKPAQPREMKRELRRQKGRTQSPKKRREQRQETEGKNTHTECKARAKPRAACWRSRATARTGREEEGAGRTAPVGRDGSRQGSRAEGRRETEARRQRGEKQSEMTGIAEPQRPRRARAAREIHKATEAERKRHDQAKPTTRRHKEAEDDQEEAERQSGKHARQGASGRRRRRRATNATSVTSTASGSGGVTHAEAEQHDASRPHVDETHGARSAMTGESTSVAGASKRPHKGTRTQGAHGNAVTHEELDRTHSERPPIQAKDMREDTRQEREEGRQTHERRRKHRLIVRTTRGSDDEKDNGRRDARQLRTTRKRTSRQDDNKHAKDQAMTDKEKRKIPPTGNNKRQRQTSETKEGQREDETIVEIRVEYGSDGILSDQIDEDRKRNSRQKR

SEQ ID NO: 991014 - protein, 438 aa, Homo sapiens
  misc_feature (57)..(57): Xaa can be any naturally occurring amino acid
  misc_feature (359)..(359): Xaa can be any naturally occurring amino acid
MVDTRQKENDGDRINDGEDEKFSTTSSAKVIDPLGAVDEVRSKQFAVERRMRREPRXTCHAPVKDTTCVGKRSLEEGSLGGELCPESPGSRLGRCVCVWGAGQFTSIEHIRYGMKDSKDGGVGLGLGEIGAPKGPQGLYTVRPYTGGEPPSKVSPRVTTKGKFQPSFGTKNRGVWKQAHQTVSHLRAHNTIELPPKEIPTANPNIRAHNMRAQRKIYTGERPKAKNPGTRHQRPLWNNLCRNDNVLVTTIGQPYPPQAKSEPRLERTPRDINETRGRDNDPHLGKHHDCDAYRANKRDAPSTTRRRTPHTQKRDKPAQASRAVPPRSAARGPTRETTCHVSLPTKRQHTGSQNKGEPLXTHRPRRVPPHTDVRTNTAQHKNRADREQNAGEDDQRRQTGQDRPKHEPEKLSKTATSATNPDKHDQTEQSEHAPTDPTT

SEQ ID NO: 991015 - protein, 137 aa, Homo sapiens
RQGLTVLPRLECIGANMAHCSLNLPGSSNLPTLASQVAGSTGACHHTWLIFFLFFERQGLTVLSGLVSNSWAQAILLPQPPRMLGLKARATEPSLDLIFFNDFMLFHHIDILYFLPIPILMDICFWLFSFLILQTKL

SEQ ID NO: 991016 - protein, 79 aa, Homo sapiens
LTRRTRESQTDLRLEETRETAQVEKGINVEEIINLDFWKPKKETKKWFYARKTEEVTALRTASKTHVRYTVAGKVQSER

SEQ ID NO: 991017 - protein, 113 aa, Homo sapiens
METNQSVGGACVIETMWLKAPWYLYRMVYGPNGCDVTVHYITSNRPTGFSRTDRLAHASHYKRHRVAGKRYYTNKLALHCSEDPYGQHDIYMPSHICPRHERVGQDSATRFIG

SEQ ID NO: 991018 - protein, 392 aa, Homo sapiens
MKRTVSPPQTTAASCEDKKEFLCAGIQAACLSSSLRMELCSMTAVGRSSDRGSDCYASAPNADTVCVQQCQHLWGRRYCCVRRPEKAGYCACRSWLANRALAARMPMTSTRCLMLSDNCYPALRTSDQGADDLCRLATYGNSHDDGDNDLPLALKALYVTGPDTSPDENDDVRTAVYHRDIPHIGVYSSRAVPRVTETCSGIDSLVGVSIDQRLGAVSILEPTLASLGRPSVTNRMQLTNHEFAPSIPSYTKRNRGEKDLDHEGGEVKFKDLKGLKIAAEGLEQGIGYDGKVILDRVGDEMREKMGQIKGKRRRRQIQGMYEETRHGVAQRGRTTGRRDHTKEKTRKAKKNKEEKRGTDKKRKREKEKKRRTTEKKNKKKEKKKKKRTKTTM

SEQ ID NO: 991019 - protein, 103 aa, Homo sapiens
MGPISAILKWILLNDPTRYSESKRAVHQYFVDETDFYKGFSTDTIAEEKAPSNNSKTIHASREVNFHSTMIYHSIQNFLPCLEIGQAKSEHFIINDNSVIYPR

SEQ ID NO: 991020 - protein, 99 aa, Homo sapiens
MTRHQEYQSPEVTHSLIENKPKNQHNSQHCLCTSVRGLYCTLLQASEYFESPFTMFRRHLRLNHLCSHRLPRIFIVIIGSASSLSASSGTNISLYIQHQ

SEQ ID NO: 991021 - protein, 181 aa, Homo sapiens
MCRARRAMGVVLAPQPRARSSSRDGDLATSCVLYWRWRALRPVGRLAGRVATFVSVARRNGRGLSCTRTRTLGRCTYVLLKWLSRLWIARAPTLWGGDPRVPPSLFPYPRVGRRRVGLRGGRLRRVGLLGVPLEGGRNSFCNPRRGKRGYWSKPQILSGQRGPQTNLVVRLLASSQGHGCS

SEQ ID NO: 991022 - protein, 109 aa, Homo sapiens
RDAWAPATQGVVNIDPNSSKWELKRLHITSLSVIGAQYDLRVKVQPHTCDRIMSLLNAECAFDQYRTIEDEFVEGGCLYIGHKGSFKICHGSLTIKLTTLSVNSRIITS

SEQ ID NO: 991023 - protein, 206 aa, Homo sapiens
GRVGRPTRPERRISSAGIVLGPLAPPPPPPRPTRACTGFSSPPSSIQGTHYREHLDQESRVAVSMAPSRRNSLIGSRARHTYQTLTETSTTKKMETQLAQSKQRKNTKNRCKRTHKQRQTNRKKKTHPTERKQNYRQNRSNKTEQQHRGDKKAQEKEGTRKENKSRENNENKRDKAEQEDKALHRTGEGGRRKTQQKEQQNKGSTT

SEQ ID NO: 991024 - protein, 300 aa, Homo sapiens
MDKFERGKAACNEDEEDEDHAVSGSTECTEQRLRTLLVIAVVMSPPECSQHQRRQHFLERLLSTTMLAKARRCSALSVVPAAADAGRKIYLCNPMEHLLSSYESRTQDYPYALKPELQASANYFAPSSLPLRNASRTHALNCMTPEISQGAKDPRDSPPLPYTQRLPQAYPLRAQQCPLTYLVAARHLNRAPREDTRGSIQLEAVNGHKPPRHKETAELQPGEDWTRVVTSTLATPNNPHHKNTSPIPIPNPPLHLPAIPQSANTPPPPPHSTHTIQPTHTYTLIPQQPPISTSPPTHLD

SEQ ID NO: 991025 - protein, 213 aa, Homo sapiens
GCYYYTISNKSTHRYIIVLWNMTLSVLSTTLSDLHSACFYYWLYQDAYWQLAHLLTFQPVHHQAHYNHFLRDCAYCFQPSINLCTHFPHTLCPLHHEPPHTPPAPTTHPPHPAPHPPFSPTTSSLPLLHLSPRDICTATPTPCAHPPLTSPYATPGHPRHAPPTPNSLHTSTALNCPARAPPTRAPRAYHHRTTSYSTKLPFALAQPTLSNTP

SEQ ID NO: 991026 - protein, 261 aa, Homo sapiens
GRVGRATRPGRTIGIVMDSGDGATHTVPIYEGYALPQAILRLDLGGRDLTDYLMKILTDEAYRLSATTAEREIVRDIKGEAVAYVALLSFLSREMALRSDPPLLCGECATMLPDGQVITIGKVRRFRLSGGQLFQPSFLGYGILYAFHDDQLPLSITEVLTVDQSAKDPCIANWRCCRGEYPPKYPGIAERGMQNGDRRLAPSSMRDSRIISDPQSASTQGESGGLHSGPHGPPFQKMLGLAKPEKYEEVGPLPSFSANDF

SEQ ID NO: 991027 - protein, 94 aa, Homo sapiens
GNIVHIHAAQCGKQIGAQVLERVISDEHGNRHPPITVPRETSDLQARYQNPLVYYNEKATWLAKYASFVPILWMRYYETCANNGHCVYDSRVTF

SEQ ID NO: 991028 - protein, 200 aa, Homo sapiens
  misc_feature (23)..(23): Xaa can be any naturally occurring amino acid
MALQNQHTNRIPHRSGRGLLDDXVEQQVNQGPTQQAIHSGNSEHIGPYQTDWGITFSLVDPASIICVCILSEKNICLEAFINNTQDHRHSRTHLPSIEEDQPDHLYLGHQRTQYQVSSIVKILSYLKTASQLYHIRNFHGDNRIGPSEDISQLGSLSYEIDKYSKCRRIQSRKLSDVDYTKFISMCAHQLFSSSYIHELP

SEQ ID NO: 991029 - protein, 277 aa, Homo sapiens
  misc_feature (89)..(89): Xaa can be any naturally occurring amino acid
MLHACMLPAACGYVVLSAWSLAGRVDYPCCQDYSTWQLCEAEAPSRPFLRTVSCPRLRARLARRASGEVPTWCRCRRCVLVPGTAAIRXRVPRGRVPTPGCPEPERQNYYAIGGHPACCMRRKPIAKSYEHCPLHEVTPQDLCIVPSHDSEDPDKRGTLKAGGGPARGNTRPLRNAQRKQREPHTESPGPPKIEQTLPAETPHDRGCVKPPKPSKGDTHGGTAKTSRTRTPAEEHRRRQTNTTTSNVRHKSKTRATQQHDQLTQHNLARGDEHTAHT

SEQ ID NO: 991030 - protein, 119 aa, Homo sapiens
MTECNVAATSTHTDDTLREHTRRQPNEEKANRQRYKQTQQTHKPVDGATHTHTDGGRKNTHALTPDTAPHSQQITQQLDRREQITHNTTSMQQHQPRQNIEYETVHTTIHHTQHRTDQY

SEQ ID NO: 991031 - protein, 365 aa, Homo sapiens
PRRPQERAGLSRWVRPVPGMTDDIISSSSLDVASPRLERALVLQPWRCGPPEAKEACVGGVTVSAEVEASWLKAWMRVKAEGSRSESGVTGYALRAYSRDDTHDRHGCMLTCGDSDYVMPLATGKFSRKNAISDERVGSRLYDIESTMAGLDILYALTLVDKTSRGDEYSSTLSEEVRGEVASMRPYGKGPPTRGNDEISSSLQNAPRKHFDHEFISTHRLFGSGKVQFVLVNEFSYIVSQWGCAIGKIGGRGNRRADAAFAVIAENRGQGAWRWRTGKQDLQWAEVPPLGVPPYGDKGSLCRGKTWWNCCKGNLSLVLSAIRAPWIQNGRGGRNKHKRNYTEERVWGTQGVSFGVAIHTPNSSQ

SEQ ID NO: 991032 - protein, 121 aa, Homo sapiens
MQSLARCQIRLVDYFERGEPIQIGACRYAGVLDHIQWCWTGHHVRMDEPLPNVRALQTIRHRGADILTAQGELTHTNPLSSGMLTWRRWDSCVLVEAHIALGVAYILPCTPQSSGTEHSSN

SEQ ID NO: 991033 - protein, 153 aa, Homo sapiens
MCLKKKMWTTSVTQKKLNQTLCSKTGYLGVQTQIGPHTVEHPENREGERQRKHNKSRRSTVENQLTTGEKTSHVQKWGCPHISRQASGAEPQRDTKYVTDNATQLGSYRGKNMPQHDPHSIFCGGPQKRVLTAGPTTLWDKTTCNTGAHSNST

SEQ ID NO: 991034 - protein, 430 aa, Homo sapiens
GRVGRPTRSQASAGNGAYMLVLLQQLKPVASLMPKKKKKGAAAHFFVLLYFVPRRRAFFFYSKLRGKLGTQSRGAPQRRAEQDLEGNPLSPKEKQRGKGGVARINAVRGVEYAGRRGAQHRGTQESKRGEKERPRTTITGGDHVGEMNADPPTDLSKMRPKPPVIPPKKRSNLRGRKANQGAQKQRGTATKEEIRTSIEADGEQTRPPYGGTLPDNQREHMGTTKITDQPLARQRREEGKNKRAKRWAKPKETLEGANRRETKAGGDTRTREHPKNTRDEKTGEPQVDTTRRETGITRGAKHRQRRGRKTPPRPPSEEAAQGAACRAQQGSKETRKYTHNDKRDTNARGDKGDGATGKKERATPTAMDRGAQHRGTSKSTVQTPRVTNARNGDPNGTSCKRGTKDKAERRRTERQKKTQRDKKGDDGAAV

SEQ ID NO: 991035 - protein, 117 aa, Homo sapiens
DILLKSGGRRSGNGNKPPSTDLKTCDKKNTNKCSLELRTLSCLPTPEAEPEGDNGRGSEQGRNSQRGLAGFKVDGQSSNAGSKTAATQGKQPATGTQKGKEQQERAERGAGNGIGEK

SEQ ID NO: 991036 - protein, 219 aa, Homo sapiens
MPLHSSLGNRVRLRLKQKTKKIQGKRRSGSLAAARDLGARSGQEPFRIGNAGPRATIPHPPDIPGQNSVKGHKSTTQGSLLGARQRDPTGPITITTPLNKRDTTGENHWHQEPHNPATLTNPITKQNTTPGRHTTQQPSEQWLTRTPPRPAAAQLQGARAPTTSATTNYTQRETAPQQPTPPPKQQQHSEEDNNKGSKDRTNTPPTRHTANTRQRRAKY

SEQ ID NO: 991037 - protein, 51 aa, Homo sapiens
MMTMVVSLNHSRGQCGDKKEKITIVTVSVSKEVDIGDSILFGTKKNSSAWD

SEQ ID NO: 991038 - protein, 485 aa, Homo sapiens
GNNREGERWDEGGLQRVVYLCIAGSFQQRTLGRKAYPREPYRYAPTRCGVAFLGVTALTYFPKEEKEVKLYLLTPTRLGIASTGSLGAPACYRLARVGDGEGRRPERKAQKKRRTMSDGKWNTRVTRTQQQTTKADRKKHNSTRNNRRTTNNDNTEGYTDDSDIEDKRSQKEQATTHRQPRKHDRKRRKQQHQYTKRGERSREEKEKGEGDTETPHQKKEQHDRKHNIKRRETDARKTTEGQRRTRIREDGRRAHEHKQDNNKRRRREKNEERTKNKKGTTNRESRKRERHSNEQKKAKAQKRTTGEEREADETGKQNTQNQGREQQAEEDGVNEENKKQHSEDRKKTKARAGEQAEEEVADSAQRTEERESRKDYNGKTNRQEKANEKTDEDAEMMNDEADKGQTKSESENNEEEREHKKTENKERRLQKGRRRDRTTGKKRVRDTTQEDEEMKETKRRKVKRSKRREEQDRGSGEIDKTGQAA

SEQ ID NO: 991039 - protein, 30 aa, Homo sapiens
DAGSTHASGPTRPHHYNLPRNYQVIKALTP

SEQ ID NO: 991040 - protein, 152 aa, Homo sapiens
GGSAAAKLARHAPRPLQRPGLPARTVQTAVPCGSRVLLSPCPTRGPAAFHWPCCSYLDAKDAGLLTVSAEMVTVAGACHRARIKPSDFSATSVAQRLTTSSSLHIYTWVSGSVTSFALLENTHSSVAHCIASDTYGIMRLRPYALPVTHRER

SEQ ID NO: 991041 - protein, 192 aa, Homo sapiens
MAYYYTFRTPLYTPRQAEPIRAHPTRYRSKKVPRRIYHHEELRSRTRQYGLSTATGLRGPSSPVPQISRPSFLYATDTAITIAQGASKRQTDQRHPDTAHQRHLNNTNLLHMIYPHRTINSGLYLPAPDTKELHHLTLCHLSTDVSGLTQIQNSAAHIGTTYHSSPPSSSLTPGLTNKSADYNTNYNHLHDP

SEQ ID NO: 991042 - protein, 312 aa, Homo sapiens
RHRPLQLTSVRDSPFPMQSPCCQAPLLIALGLLLGGPAQAHLKKPSQLSSLFRGETCDEGEGPCRVIMKPDSGACPIVVPGNVILSVVGRTSVPLSAPLKVDSRLRRRRWLGSGINDPMQTTTLGDVTFEHCFDVLDMLIPTGEPCPEPLRTYGLSLPLSLQEKEPTHCPKERIQLCLTWSWPVGLTTGSYRIESVLSRSGKRLGCIKMLLSRGHITWPLHRMNGASDGGPSLWLCRRQISTLCALNPLTVVQPTKWGHTLRGQTLQGMVQLERAGEQTRKPKRYTTGQEPKSHHGNKKAPSRTNKRAAPTA

SEQ ID NO: 991043 - protein, 211 aa, Homo sapiens
GSKSLRGVPPRQARQPEHAMLTPNKGSMFLFPGGPGAALPSVPPLPSHQTHPATELCVRDLIAVIARRALGSPQNGRGHRICVPHKDPSERLKKLGSRTTGIGAVFPPCCSARHAATLPARTTTHDTMSREDKRQGTGPPTKRGQNIGPDYVKPTGKTHETHPAYPASTVPSLTSSPRTKASSAIKGDKERTPGQKTGDKPDTQKHPSRHR

SEQ ID NO: 991044 - protein, 175 aa, Homo sapiens
MEPGPDGPAASATAAIREGWYPLKTLQPQWTRTRALISIDKCRSTNSIPANGRYALTQDIPTSFRSNDLIGNVLGSRTGVIQLQRTERPSTPYQDDDLPNLPLCQTTSQNTSERVLSHPGSGQMEVSMTRTAREKTSPYQKAVRGYTVEGSTEGTRQYQSSSTGNVHLATSNVPI

SEQ ID NO: 991045 - protein, 180 aa, Homo sapiens
MVEHKKKWEGHNKFKTKNTNNTTKKNKKNKKKEERNKREEEHQSREKEGRQEKEERKGAPERNRKSRKERGGERKKRQPTGGEETHARKEETEGKKEANKEKRKKAEERRERATDRGQGDRETEARQKETKQKNEGRDKRKDERERRRKQRKTRRKKKKQKGQHKKTTEGKRKTRKRKKQ

SEQ ID NO: 991046 - protein, 246 aa, Homo sapiens
TNLRSGTWYDDWAMEVMHNGTTILDEYCGTIWTCLKAVCHGVAWYGVEDGTLHFSCQLAMTHGPCLPGTVPTEDVLLLIRSSHLMEQDGPQGKPSVGTDSWHEWHHQFPGHTTYPLRAAQQTTGLLIPTLPTQITHFHVEAHGRGYPLNTLDGLYTNTMEEETPDNVNPGQTFTIQTLKHAGERPQDRPSTTPLQTTPTQQPGVRHNVAHDYRKDGQTCSQDPEYKLSSPIDPREAQPLDDDESRE

SEQ ID NO: 991047 - protein, 228 aa, Homo sapiens
AQRARTPPLSRRKAVDMRLRDGVGCSMKRWGRCPHLTLAPDSPALYFTHDASLVHISLQYPFGAVAAQKFMPGPTPMLCHQLVTRLAYDDHVAPGSLVGYVTTKSSIAYGLGEVPPPCLRSGQEVAGCCTEQYPVQFAAVSRDTLRCAAGELVLLLLPWLYALEQLAQLPSSWGPTAWAPLRPMGPPSEPPFAYNVPLGLLRPCVSLLSLFLCSFNVPVSRRWEFKAQ

SEQ ID NO: 991048 - protein, 202 aa, Homo sapiens
  misc_feature (164)..(164): Xaa can be any naturally occurring amino acid
  misc_feature (184)..(185): Xaa can be any naturally occurring amino acid
MESVAAAAAGPAAAAAAAAATTSLRAPRRCRTDAPTMPLIPARSHALPRPTLVRPSRRHVPGRRAVIVVLADLAARSFQRPSARARRACELPTPARPSEPTSASSSPGKYRCQATCRRRPGVRGGMLPSEATRTPGDRSNPARVRQIDSLLPKNCNLRMWPHVXRRRAAHLAKRKPCSDLTRGXXRRRLQAAKAKRPGKYAK

SEQ ID NO: 991049 - protein, 128 aa, Homo sapiens
KLINHSFIDLPTPIQASPHDDTSAHSLDALPDPPRSTTGLLPESMHYSARRLIRSFHRIGPHHSRRKLWLNHPLTFSANGASIFFICLFLHIGRGLYSRIISLLRNLKHRIILLLATIATAFIGYVLP

SEQ ID NO: 991050 - protein, 125 aa, Homo sapiens
MKYIPARICHNAYDVPRSTYLCFNRNATAEVSHNVLRIQTSPHVKQVLLSPGPDECIEPHICTAHQRYLSFNYSHKLGRIRHITPCKRIEHATVQLPELRRRIDLNGHSLYIDNAVCCLSFYEMQ

SEQ ID NO: 991051 - protein, 206 aa, Homo sapiens
MADIPTRPLGTPTNNQAKALNQNRCLGTSFRTRGITTEYHYIYTFPIGREVPRSSTLTTNKLAKLRSKKIYRLGARSEPPQGKNDNNKPYHSNTHTDKTAVTAFTNDDVGEPITVSNGARYNNNIFPPASTPPRDKLHLFYLSTARTKSLESRQSKTPNNRTYHESNTYLPDSRKNQASQLHYTFVRFYILHTLLTSSRRLFYDPI

SEQ ID NO: 991052 - protein, 156 aa, Homo sapiens
KNFPNAIDAHPAVGSGGVLNGLFTQPAENVKQYLTDPKICGAEHCVLAEHSDPMEVLEAVQPQTWCCRRPQTWDWLRDLGHMTTHMEHPVHRTTIRTSMHDTQYPIHDQLNKASRSAMYHGHGAPKRMIHTPRHHLHVNNHPCTLALMMNGMTAQP

SEQ ID NO: 991053 - protein, 273 aa, Homo sapiens
MADAGVRRVVPIDLLPLVLGFLRDETNLVIVLANKVRHSDRSYQQDANASSLLDIYRLLAQQVCHCSQSETITVLIWIHVVKEMLRTRPSSSVTAECTRSCRPAAHGQLPHGALPANTYTCLLSPCAMLTSGSSPSLCATACLALIGHSTHQTLGQLLSLDKQVTHTYQLSLHLKCNRHRYPTHTQHTHAHYAHHTNAGTFNTAPHIHPNTQATYPKQTISIPITLTTGHKNNPSHHLHLAPIHRPYIKYSPSTRQFQYPNHITPTPNKLPKT

SEQ ID NO: 991054 - protein, 63 aa, Homo sapiens
MKHTFRHGDQRTQTVHGATATETFLQQWPSRRLAHQGRKPQTLARPSARITDPDFNQRHPRRA

SEQ ID NO: 991055 - protein, 250 aa, Homo sapiens
MLSYRATYHLLGAHRSSCRFSESQGELYKLQGQMRTPIACVPHMFVTFIDITKQWVYNQQMWTRLWSPPTLQNLEGDSTRAFRLRKECLRSPGARRAPRARWPPKVAKMYRVLTSGARRRAQEHAHTRGPHVHGNRPTPNDSTSTEEQRSAGERHAQRARKTRAATPAPADQASRAARAPKKRTAGGRKKDRETPHRHDAQHERRQSTRSRTPPSAWHDIRGRGTQGGTSHSPTPHAAPPDARRPARVAD

SEQ ID NO: 991056 - protein, 262 aa, Homo sapiens
MWTGLIGPPISRVERVAVCTGATSVVIDRRLAPACGAPGKNSCVPRKGPPKPQREAGPQPLSPHSVWVFSTTVPQTQPGGEAQGEGTKGGLPTIPQGNGNNIGKAPFNHPLVEQEATRKTGGDPYPPARGNPKRIQKEMGGTTTGARYENRRKNREGDQGPRKASTTVRRPPGPKRQDRSHRGTGAPKETQRGHALPPKHSHSHHHHPPRRIARPPHERQNHYAQNHMAHEVRPPQRPRPLKTPGEKRATKKGAVPHTTTEV

SEQ ID NO: 991057 - protein, 179 aa, Homo sapiens
MDLYPLNKVDWQSPTGHSIQGETQLFTEEQVELLYYLNSSLTNVSLRFNSHAQQAETKNKSSTDICAKERHIIPQTGDTETEEGTSPRHLEAVHNNSNTEHQKRPFTEKSKDTPNNQATNIHNHNAKTYPTPIHNEDNKEIQHTNKEVKNTPTKRRTKKQNNLYEYDDNETEEKRKLRK

SEQ ID NO: 991058 - protein, 353 aa, Homo sapiens
EPEKPRRCAFCPRAHLRDSRFRIQSEGVTLVTHAGVVTQWRQEHVVLAAQPVEPTRRNGQEVLGRPHEAVIATRISKLRFKEKLGEGQFRGGAPDVRSTALKIWISLEYYHHLMCVTGHPLTGAVKILRTDATKNARNDFLKEVKIMSRLKEPKHHTDMLGECDAGRTPLCMITDIHGERRHQTVPQMPNQDWKDKDKTEEGTPGAQRARLQTRAPNIRHNQLLDALWTRHQIAIEHARTGHQHTQSNIERHRTSRESAHKGQKTNNQEREHGQTHETNKHGEKNQTQERDKGHAHSRGKATSKRDPPNGEHDGGHRPEATKGRGNGDVHGIERNAMWKNEKKIERREEEEDE

SEQ ID NO: 991059 - protein, 105 aa, Homo sapiens
HKEKVEVVEAGVAGSVRLIGVSWALCGSRCPLLISTAKGREAATVVSREPRHVRCYGVQDDLQGHIRERCFVKTMLDGWSEHIKYVSASMLPRAWQRLARSGHYV

SEQ ID NO: 991060 - protein, 133 aa, Homo sapiens
GRVGPDAWVDPRVADIEDRHMVVSSMSGLFIQDEGDDVWLKQEEHITVLHRLLVVGVYNFTPYFPEEQKPVARSMSGELAIILVGQPRPPAAVKPLCQGKSQLASADERPALPCIDRRPPGPKHPQMDRLPQT

SEQ ID NO: 991061 - protein, 460 aa, Homo sapiens
ASGRPFFFLLVPGYLCRFLYILFLIFYLREEGFLNLYYGPEACEVCKGVPLLGFQCKASCLSRGINHQFPPVPSSLPAKIAWEHTGVPRTPQQRGKYFVRIYFKHKEAGVITARCYTTEDGLLELLAENPRRTASQHSAESSPKRVAWTIVRGCVCHAHSVTTHRAPYNVCVNHLYKCGRYTVCVNSDGIEKHYSTYLPRKKEERVVIKNKKTKTTHNQRITQSGTPEEDTPRYSEKKMLYRHTDDQQTQTIAERTQPPKTQNKSMFTIQQKDVGHHDKTKLISLKTSLQLLRRQRKKRCLHTTSHIDAPPPPTQRETGAVDPTSSLNHRHSTSAPRKQQRWLPRGIPHTTNKKQPSSTYKDNTTKSMLLVEHNSGMQAERNTKQRGDNPRIIHPNSEVHQRGRHKCRTTQMQKQHRPPFSMRWGTTTQSPSIGEHKLLCSRQTTSTSTIQMQNTPPPHL

SEQ ID NO: 991062 - protein, 369 aa, Homo sapiens
PSHFINLKVDDGGLYVWALVPMQSHSQYSPHHPLHDKPKWIIQIDNPHKCARTRVYINIRNRETVAAKEMTKMQGEPTQTPPVPPVDTTATPQRRTQHNTPYNQEALGQQSDPIRDGTTDRNRNGPRTDRSTTATPHTSRPRRYRGKKTHPLSSPQTSHKITTVQTLSQTLHHNKLAKEPRHGNIEPTTTAPYSNTLNAPTPAHRYTTNRSQKSTRTETAATILKRTQCDNTHHHHLAYSCPKPTLRKPTHAPHRTQPDPHPHSAPPQRARTDCEPRQAQHSDTTTMRQPVRRRPPYAGTSAVEETTAQTTRDTQPPPRGGHGTDAATARTPRRHTAMTADDEAACPVPANPHQRDSDAHASNRHARPN

SEQ ID NO: 991063 - protein, 257 aa, Homo sapiens
GRVGRPTRPGSGIERIGPLSLYHMASSIERMGQTMVAHWLWCGAHGCRMGFGLVSAWPFPSYRVGQTIERMGSGVVAIGPRAIERMGLSMERIGARRGMGVVSLERMGPVMVSDGHRPGAAWAPTYLQRMGLELHGRQQARAAWCLERMGAITASSAWAPVHGPRTLGAGIERMGLAMGGGGRCRRLTVPVEMERGTFGGSFQVLWVELERHAPGVGHERLQIFVRNLPIRFHMEDAKGTNSRVGGTVLYADIKIEK

SEQ ID NO: 991064 - protein, 217 aa, Homo sapiens
MDNIIIELTTRVAPTIIVSSQTGYLQEGGNTTHMMFLTLPHVFNVTTGLWDLGQRRTNDVSPVIDHKRRCCSTGYSRNIVKPYTIIHDTLSSRKENNPHWLGAEVPTGDHTLGASLSQTSVAPVSYANEHCFWNTERQTTKRKSVVKQDKLGINIHVDASKRLTGQARPLEKLAYGVPRGDPPMGIALIVVATTAQGTTIISEDERVVLSNHYGWLV

SEQ ID NO: 991065 - protein, 137 aa, Homo sapiens
MRQRCTALVAAAGNQMRCSMLGWAVAWIRYRAVCHEMLAQTARALRPYTPMKWRNLVLPVAHRKWAPLKSDTRPVVQRKLCKSGQRSLSPPETRNSVTVFDFSHASIIELCVSYRLVRKSPTQMKTACSVCDGSTRV

SEQ ID NO: 991066 - protein, 104 aa, Homo sapiens
SGSMTILFLLFWGHGLALLSRLEYSGVIMAHCSLQLPGSGDLPPQPPEQLGLQAYTTKPSQFLKSFVEMGSHYVSQAGLKLLDSNSWTQVIFLPWPPKVLGLQA

SEQ ID NO: 991067 - protein, 44 aa, Homo sapiens
TAQPWHLNGRKNGQCGKAKGSSDLGPDGACSSGDGTGARKIRLS

SEQ ID NO: 991068 - protein, 253 aa, Homo sapiens
MCGARLLGSGRLWQDASRSRTRTTKEVCAGKIVPKSLLLKPHQREKMSMEKYPIHRSPRPTSDVVGFRGFFEDDDFGVVVWELCRPEVSPGAVQRWTDSPVTEPEARYYRTGNVLGCMYRAPNPSYSSRPQAGQLFLNEELEVNIGDLTVDKVELTGKRAGGGPLIPRHRGLSRRAGSGGGGARGIQGSVGGTALGIGKGHAAQRRRSGNGRPNREKTGPKRGDTQTRLQNTIKRPTRMGERKKRATVLLAQL

SEQ ID NO: 991069 - protein, 55 aa, Homo sapiens
MTSYLIIYLMLEDTLRMRYSTYTYSQQDKEARAGKQRQDLKVKERDYTEQRYKYT

SEQ ID NO: 991070 - protein, 41 aa, Homo sapiens
EDSVTRGREDTRADEYYEYKHVKAKRRLLEVLISKQDPAVS

SEQ ID NO: 991071 - protein, 145 aa, Homo sapiens
MPGSFSYQWLVFIVSTESSWGVRGPLTSRASCLCTDWGVLSVPSRLPSAIWFVIPAASASSGTLPLAKECSLPMRTSWSLSLSSLGHVFRTLVPAALMVQAWLRTAQRGSFSVADAQRTCAQYVMLAQTLVLLCQEVLPGPPGII

SEQ ID NO: 991072 - protein, 297 aa, Homo sapiens
MRATGLCSTSALRDRLLDLSLATEDLTLPTPGGRPLSQPSSHLPSPLLCLCTPGGTPLWRGDCAWENLARHIAGDSPRTRKRPLPQLHPCVRDGRGSPHIMHPGALTVCGKPRASTTTPRHNKIKESCAHTFTALHKNNKKQNQKKKKKKKKEKKDDSAERKKGSETTAARRSEEEEHTAGEGRAAESRQRDKSEHTEHEDDKQKRERSEQRRGRGRRSESSAGRGPPQRQSERAGGGAAGRGGGARGGRARRSQPGGRVAGRSRGGADSRARGGGRNERAGSAGGREGRGTGGAGG

SEQ ID NO: 991073 - protein, 39 aa, Homo sapiens
LGPYSAMRREALIGEVVRGRGSLSAWTQHKTQHGQPRSQ

SEQ ID NO: 991074 - protein, 136 aa, Homo sapiens
MAPTTTKQTQGTLRQTAVLRHKQTGNKQTRNRNNRRQKKEQSRRLGTATRTKQQTKRQATEERAQTTEAAERIRQRIRTGEQNTEQDTTKSKQTTAARTARRSDNAKHKKKSKRETEEPMKREKRKRTKKNSGTVT

SEQ ID NO: 991075 - protein, 226 aa, Homo sapiens
MRFSGESCNITGAFDAWRLQLASAIHCNSLHTCCREHGQTRRFVSTDEAIYGETLVTFFHDSPRNDVSTTLHLNVALKLQRLVVPNDTISDLKRKHDLQSARVLIEVHRLHCQDPDARSTFVTSDSHWTMRKLMTLTIRVAPIDENLRLCEDASHDYGTMKGDPSVSSSHRGRQTIRTVRAPDKAVKFLFYQTGVIISSSQRPQERGGVVTTPPINLFEQNLLTTN

SEQ ID NO: 991076 - protein, 45 aa, Homo sapiens
DLTTRLQAKWGYRVGLFTVNVSKGREAEVDLLVVRRIIRVLQPRS

SEQ ID NO: 991077 - protein, 134 aa, Homo sapiens
MSQPTETAGSLILHGHSLANRACAPNTRTRRTPLVHPGFPVHLRHPGGQERSKQTRKQQEPEQPHQPPASNHNQHNEATDTQHTNRRDENTEQQQQRTGEHTPRDRHDSATSITTDQGGGDTGHTPVRKGPQTR

SEQ ID NO: 991078 - protein, 134 aa, Homo sapiens
MPSSCLNCKEAFLPLLLILLSTDPLRVSGWGTVRSFPSHEAIFQTITWGETLDNTWLSKAEVPAVFRSVCVPGYLRLGSGDDSQGSMLPSSICLTKHILHRLNPFNPELTQHMSQEARGKVTDLTASQGQKNFS

SEQ ID NO: 991079 - protein, 44 aa, Homo sapiens
HLTTRLDLTTRLKHPYVFSINFCSFWNGKHAQSVHSSAIASSRV

SEQ ID NO: 991080 - protein, 121 aa, Homo sapiens
MISCLVPYPHRSRHWRNWCPIAVFSHISSFASSLFLCLPRSHHSHTLTVLTTVSCRGPPNLLSIFHTHPMVHPFPHGVPRCPFSTYCTAYLSPISCFFTSPFLRHGGWPLPPFDSLPRGSL

SEQ ID NO: 991081 - protein, 80 aa, Homo sapiens
MAAMAENGLSSADILETGDFCAICNEDDGLMIRLFQAAVILRVHPSLWHSCSSLQILLMSSEPDSSAISPPTDPCALSDR

SEQ ID NO: 991082 - protein, 355 aa, Homo sapiens
  misc_feature (346)..(346): Xaa can be any naturally occurring amino acid
PQSRQRGVIRPPQKGGGGGAPKHRGGGGPPGGDPENRGGRPRGGAETEEGGVCPPHKWGADKWRKHGVSETPAGRMKRPRHTRPQSHHNATVGREEPDYAATRSIVAATRDRSEKKRHATGFGGAHEHKATKTGGARKNTHCAPREINRAGATHRVAQHPTGRGRDSQKNKPRLERGEARRTMRLYTNQRTTLAGYGQNKSKRISPRPRADTTTAHAGLAQKDIIGPHSEPRVGDRSRPRQERDQHQNLVIYREPRYETHKRSSAGDNNNKLTRPEQDIYTLRRKLDDPGLPELVEVTQYTEGRDLTDKGIAESLHRLLDSTDMKVVDMRRRSESTSCTATCNWTXTSEHNSEQR

SEQ ID NO: 991083 - protein, 276 aa, Homo sapiens
  misc_feature (79)..(79): Xaa can be any naturally occurring amino acid
MPIHDVNIILEQLWAEDSFDESNFLEIDNSDVLFRNNSVFIFFHIEQLSQIGLSLKAERVHVNYRWHIFFFLNQAQRVXIDGSITVAVHWSSLKRDAGLKELTYIFSSKYIPNKCMASRDGTLNLNMSGNWVTPHHRFLHELGCKGHIAESSTATPASTRNPNTGTPVRTDFGTTSRVRRRPRHVQPRQTGPHAALRIAPAGPLVTTNLWAIRHQRERATPTTRPDRHTRAHTSAPHTTPPLSRPQLSRIRRTPLRSAPAPDHPPHHHHAVIEVVL

SEQ ID NO: 991084 - protein, 106 aa, Homo sapiens
MPDTMRTHYHDDSRQWHEGSDPMMKYAPPGTQPPSLEDYNWIKRFGAGTNNPAPYEELTTLGYVLCESKSRDASLSRAHGIVHRAKLAGLSLSSCCARDADFVLEN

SEQ ID NO: 991085 - protein, 116 aa, Homo sapiens
MPWLIFGIFKVRRRGFHRGYAGMVSISLTWVIRPASASQSIGDYPGGATGPGLQINLSFFSFFSETESRSGGPGLELQGHGSRLTGTLRPPGVQAILRPQFPGVAGDYGGPPPGPG

SEQ ID NO: 991086 - protein, 211 aa, Homo sapiens
MRDRQNIGSQVLVIRGPKRGNFQLSTVGHSPMAEHIVLHRDPQNASGQPPHHLGNGLTRGEPRDRTTGQRAVPTGTNAPNTESVSRQGQTMPLSGPPREINDHEDTPNKTPRRGETMLPQRRPKHLHTTPTTKVGGTKERYIRSARHTHRTENRTRRREKTGRAENSKRGTHHVKRRRVNNQRNRRGAEKSSGRHKLTNDCNKIRAATANA

SEQ ID NO: 991087 - protein, 122 aa, Homo sapiens
DYLFCVTVIHTLCLQARMAQSCPSTEFTESLSGEGVSENSDTLQWSIQRILISEKLVVMTNTIQPTSITIACPIAIACALVAICPFRISQSTNSFSYNAVGMRSQPVAVILKLHSTAVMADF

SEQ ID NO: 991088 - protein, 121 aa, Homo sapiens
MRYNLRSITSCALLDRDTTKTTTPPHHPKQQPPAHHTQPTARHTPPHPHTRHAEHRRSRPPERSARENGGNAARAEPAGGNDRTRGENYDREEEKTRRKAGTRRRRRPHDRGRGREDRGRG

SEQ ID NO: 991089 - protein, 86 aa, Homo sapiens
SSSVPLDASVENLPLHEMALLHDTVICCSEYRRWGIRRSLLEFRYQVYLTDNRGTPEMDLTVSPRLLLRDMVEMDRGVCRGQTSLL

SEQ ID NO: 991090 - protein, 277 aa, Homo sapiens
MRTHAFGASRRDLSASVQDAPTVPIIRPGTGVRLVRASPCDGRGDRAGLDGEMGGHDDAAHRGAPVVTFGADEAVTRAPGLVHHRRRALGSPRVGMLRLSTGPMSAVLAAQDPGDTARGDLVPGAAHGVARHSLVTRLDLEDSAIATDFFAGTPERVRHGCQNRGGRRRNGTRGRVEAPEAVAAYPQVVARGFPNNLSITYGDMGNCGVTINCTMAQNKALHPTTPDLSMVSIGSRLGHNTLVDGPGESKSTCLVLPLSMWGTPTPVVSVPDRTQLE

SEQ ID NO: 991091 - protein, 135 aa, Homo sapiens
MFRRQLRQSLSPLIWDVVKQHVDPRNSVIMNSAYLFIGSYAVITNRVDIGLETRLSTLYSQRGEQTPHALLPGIYVPWGNEYGVEFSQQLARDRPESRLPTLPAGRVRESVFRLRKFDSTAVGPVTVLMAGISRN

SEQ ID NO: 991092 - protein, 154 aa, Homo sapiens
MEGGSGRSAVVGERGGGAESSGNVSREVGGEKGGFMLTVAPLAAFRVPLGVVVLLPPSLAHSCGVSSGLFGVAPSAKFPSWEKWQGVRFSPGPSLRGCRLCSGCCLTTVGLLERHGPCPQGTCHRRELLCTGLMPVALSPGAGSVGIADSLVSV

SEQ ID NO: 991093 - protein, 124 aa, Homo sapiens
MHVSVLPRTHCGDGVGEYNKDHFPLVTYCLNGKGVHLRRTGPPILTPQTIHKSCFYRQCETEVHYHFQDSSDPSGTAHCVCTFPLFSIHKTYASLTNTLLWHGTVLSKWNTQANPTILVLHPQV

SEQ ID NO: 991094 - protein, 120 aa, Homo sapiens
  misc_feature (50)..(50): Xaa can be any naturally occurring amino acid
MWIQKKLNPKKCVLFQKKHSFEGKSGVLHTVYLRVKDAVYIKAPLCTPWXGRKYHMCLAFYTLTRMCEHPGEAQGAHRAHTTGAPRENSPASILLSTALETPGVGTPADTQVSPVNTVGI

SEQ ID NO: 991095 - protein, 82 aa, Homo sapiens
RSDARRSLAEDRQDGTGRETALVTHYQMKYSLILSPYPITPIASHKKDNFYLDKMNNNTYYYRKRVLQKKDTDSYNGRTTES

SEQ ID NO: 991096 - protein, 250 aa, Homo sapiens
LDRLEEFPNTCKMSAQELGELSRPVLQTMQLQLGLKLSDYVLSLAACYTLMTSPPHSSSKGKLIPRHLDINIYSDTTQPTRANSSILACCASLQERLTMTIPLPCQHTLCQHGPEHCFPPPPQTNPTPTTTDSPRLLRHTTPPIRAHITTHYSSPTLSKQLHTSTTYPPPPTSHIAYSQQTTPTHNTTLPHPHTPGHPTPASCLTNTINQYLHHTFDTLNARNISLYQTLSRTSYCIHSLFSLTYTILIT

SEQ ID NO: 991097 - protein, 130 aa, Homo sapiens
HKRITARTLSLTPLTPYTRIGPARQTHSGALTEHMKQWNEEMTDAKPSLETEFACRILGGSSHTCTLVLQRLTPTYSSPHYLLTQSNPTSCNSEALRPPEGSQGSLVLDCGTGGTLVPGVSEVSVALTAH

SEQ ID NO: 991098 - protein, 210 aa, Homo sapiens
MSFNRFEGYSCVITSGTLYPLDIYPKILDFHPVTMATFTMSWHGSCLCPMIICDVAMTRCAISSKFETREAIAVILDYGNLLLEMSAVVPDGIDGTIFTSYQYMDEHTWHSWYEQGILEKHPRVNKLLFIRDPGWWLTQCRPVAQYQEACEQWPWCHPAVSGPGGHSVRRESTFVHPLRAGPPSWMASLRYTQSASQARWNTCGPVQIGH

SEQ ID NO: 991099 - protein, 109 aa, Homo sapiens
GPYLSRRWLDTFQLSDASHVCAARSCSMKNGQQPTLDAGCPGVFETLPKISALCLLDVPSFPTLADIAWIAAGDEETYCPVSGVITRPHEAHLINPVALCIVIAEANAV

SEQ ID NO: 991100 - protein, 88 aa, Homo sapiens
MARWGWRGPGSGQAECEGPPRLGHLVAEPGRGDAAREGAGLVGCSEQPVCLHYVSALLAPGHSCLHPQNSSAANQSARADNLIPGSRA

SEQ ID NO: 991101 - protein, 35 aa, Homo sapiens
  misc_feature (32)..(32): Xaa can be any naturally occurring amino acid
TRYLSVFGVGAGCWAGGSIYRHGSQGDLSQRXMPE

SEQ ID NO: 991102 - protein, 58 aa, Homo sapiens
DKDRWQSTDSRRASTWSYPPCKKIESALEEVEHGENQGLKVSRREMEGACGVTPIRTS

SEQ ID NO: 991103 - protein, 101 aa, Homo sapiens
GVEEGPESEEGLKTHRPYAMMGPVGAECLCCVLLTFGFGQSYDELKVDGTVEEDLGNKREGSRTDDEVVQREEEAIQLDGLNASQIRELREKSEKFAFQAA

SEQ ID NO: 991104 - protein, 40 aa, Homo sapiens
RYSYHIAARRRRLSRLVVCGPFFLTLTSSIHYGSLSVYPS

SEQ ID NO: 991105 - protein, 45 aa, Homo sapiens
RLSENKQVSASPSCPEACKLACNPYSISRVVRSSRVVRSEPRMSD

SEQ ID NO: 991106 - protein, 42 aa, Homo sapiens
MRALWVLVPLLLSLLDLSGFVLQTLTMRFDVDGTVEEDLGKS

SEQ ID NO: 991107 - protein, 59 aa, Homo sapiens
YFLLEDRPCPVVTGIYVHRMFLPGQWVVACCHLCCEFMKLYVNGAQVATSGEQVGGIFS

SEQ ID NO: 991108 - protein, 67 aa, Homo sapiens
PSVSGLRREPPHPGPSFVLVNPSHLFFRQSPHPDGPNIFIIQPSSWRGYPDGAPLEDSVSFLSVRVD

SEQ ID NO: 991109 - protein, 32 aa, Homo sapiens
MTRRVLLVCQPNVKKDGSYDSLLCVLLKLLKL

SEQ ID NO: 991110 - protein, 92 aa, Homo sapiens
YVRSFNSIYRYANGNVVTKKSISDLAELQEEYENYRKAAIEREQKVRRQLQDEIKNTVKPMRIDIISVVPELMESPFAYSIMKRAIETSKTR

SEQ ID NO: 991111 - protein, 105 aa, Homo sapiens
MRELMRRNYHPVRELRFHSCVYCLAPLEMDGSRRRPQSDESSRFSLTALSLQGEGRSVLAAVAHMACLHCNHRLGCSQDYGLLGQTGLMFGQSSPSDPAIENSKT

SEQ ID NO: 991112 - protein, 178 aa, Homo sapiens
LTLEYPPCQPSSTRTLYLQIDVTLDIDAHGTTQCLLLLDQSTGNENKITITNDKGRMSQEHIVRMVQEAREVTKLKIKKQRDRLSPRIHLSPSASDMKATVCRDEKLQGLITDEDYQKILDKCIEIINWLDKNHTAEKEEFDHQQKELEKVCKPIITKLHPEVFLQIEVTFDIDAHGT

SEQ ID NO: 991113 - protein, 53 aa, Homo sapiens
MTSNIAPDEWAWLSFGIKQKDIDKDLVIRIHSFHSTGVLSLTPPLRVSPEYSD

SEQ ID NO: 991114 - protein, 61 aa, Homo sapiens
MRIFSDSACAKRICFTFITLGNLLHAVGLNGNLYLALHNLYLKSHSCRIFVLFHGPPIQRS

SEQ ID NO: 991115 - protein, 51 aa, Homo sapiens
IPFHSTNYFFLIGPPLQSSPLYFQYQIIMTMIFHENLVDLAWAVCYYVRSF

SEQ ID NO: 991116 - protein, 40 aa, Homo sapiens
VPINVGCLPLSPLGCDSSSLSEVSYTKLLANILLRHRTDS

SEQ ID NO: 991117 - protein, 31 aa, Homo sapiens
MKDHNNSTPILLSIQRGRGILKTLSRETVHQ

SEQ ID NO: 991118 - protein, 83 aa, Homo sapiens
VILCELGLSVGGSSSIGIELSSRPAGLWAFSAGPGACGHTSLGCSLTELAIMNLKGRESRGKLGLPWPQERIPVLQASLLSVY

SEQ ID NO: 991119 - protein, 33 aa, Homo sapiens
  misc_feature (8)..(8): Xaa can be any naturally occurring amino acid
WIPPVNVXYCGKCLYFTIKTLDRLVHIIQYWWS

SEQ ID NO: 991120 - protein, 92 aa, Homo sapiens
GPRTPKNPPANFIEIRRQVATNIRIVVAMAVVVQSGFRIEILPLKPQWIVDFAHVEPGDLAVGAVVGGPDDFAFGVGQFLRGAEVVELVDFE

SEQ ID NO: 991121 - protein, 147 aa, Homo sapiens
ELARLVGLALMKTASVAMGPPGKGERAMAPNRGDMAQWVDEWCGSTESVLGSQHDVGGTAIRFGEDADALAIGCDIERFELGLGLDSRDVRFPLVSGNIAPIAAGVTPQKLERFFGAGTNQAIDAFADDQRPDGELQLVDVGVNPDR

SEQ ID NO: 991122 - protein, 70 aa, Homo sapiens
MKAGSDNSSVAYVVDRGNLRRQLPQHQGFLIVSDVNVLDSGDENTIAEVMAYDLHLIKEVIKKKEPSLLV

SEQ ID NO: 991123 - protein, 134 aa, Homo sapiens
MRPRVRTLPGPTTPVTSINRYRRAAAKFLYGGCEGKRKQFLHLDTLAKCLLKDRTEFPKYAGCKVSVDDQCEGSTEKYNYKSKFHDMEKFFTGRCHRNRIGNRLPDKATRMGFCAPKKIPSIRYRPKDEGLCSA

SEQ ID NO: 991124 - protein, 93 aa, Homo sapiens
EKLKVTILTGGAARHVRHTAQHRVLWSPRTPYSLTSLRACGKAFRVDQDAHTSPGHLPAGNSEPPCLSRPGHLRRTGQDCGEHPSVWVQHFLM

SEQ ID NO: 991125 - protein, 61 aa, Homo sapiens
SREGRTIFSSQLDGYSSMYETHITNFCSNNYHKNIPGKPRKSTDPLKELDCCCRLCGTAKE

SEQ ID NO: 991126 - protein, 155 aa, Homo sapiens
SYYAGDKLSLQCDLLMLNEVTFDQKISHILYTHKPFSSVNKLMANKAALLTKRFPAFSTLVRPFSSVNTLMVINAEFLTIRLPTFPTVIGSLSSVTLLMLNEGTLLTKRFPTFSTLIRPFSSVNKLMANKAALLTKRFPAFSTLVRPFSSVNTLG

SEQ ID NO: 991127 - protein, 98 aa, Homo sapiens
MGYAARSDYAARSHYAAQAGLELLTSSDPPASASQNAGITVVSHSSLAMFLKEGGNTHDNYSPRFCNWSHGSELVLMTAFFYYPFCIPLAFSKPRSQI

SEQ ID NO: 991128 - protein, 87 aa, Homo sapiens
PACFLPSVVPYMGSTEYIFSRVATVWGWCCVVVKIITKTFEVKKGRFIRESMKIHCKKAIGKSAKEELNASSKGLLGILKDGACAVG

SEQ ID NO: 991129 - protein, 45 aa, Homo sapiens
  misc_feature (19)..(19): Xaa can be any naturally occurring amino acid
SARYRFFMQCHQKQAPPTXSKIAVVKEKKMRKLADVTNTLELSKQ

SEQ ID NO: 991130 - protein, 100 aa, Homo sapiens
DLSVFGLTHNAQALSAGARGRRYVQAGEPPNGAYVWEGSGFFTQEGIPGQASGFRQQLLLTQQCTAAAEVLLLVEWGYPIGSVPRVVAQRQCCSHIYMHF

SEQ ID NO: 991131 - protein, 73 aa, Homo sapiens
SSVIMHLREFIISTCCLPATVTCCTMACRPSGLLAECVTQLLCSNVLQHPLESPHGQDHLGSTSELLVSIDQG

SEQ ID NO: 991132 - protein, 154 aa, Homo sapiens
ARYPLDASVQGSSAYENCPGLAGQEAVHKNGDSVALQGVSHLSWTHIVLFLLMSFPAFLPSLTLRLPSAPLSVHGLSLPYSCSTEPSYQSSLLCSVSPSFLSLSLSLFLSLFLFVCVCVCVCVSVCIRYNLKWRGTTQNYDADHNFVFCPMGAH

SEQ ID NO: 991133 - protein, 108 aa, Homo sapiens
IELGPLDDKCPELFIPSAGFVVSLASGVKLQTFAVHVTAHKGNTDPKGEQQQGLSVKMKEQSFHSMEGDSNMVAGGGLGGLVLFPYFGPNQIGGGWSLLQKTDWSHLK

SEQ ID NO: 991134 - protein, 57 aa, Homo sapiens
IVQILKQTYSKFDTELCTTMTALIKNYCGCSTCFSEGHGQGQRHSMRMVHMPALVEC

SEQ ID NO: 991135 - protein, 34 aa, Homo sapiens
EDMQQKSNLELHRIYPAAHLISVAGAQCGSYSEY

SEQ ID NO: 991136 - protein, 34 aa, Homo sapiens
MGCAQHDWVDRPFVVNRTGFQERVPINSEVPMNS

SEQ ID NO: 991137 - protein, 34 aa, Homo sapiens
MPGPSPQFQSPPAKQTSHSRSRHPVKPLQVLQTT

SEQ ID NO: 991138 - protein, 93 aa, Homo sapiens
RYSSAPAGPLELVCPRRRGEPGPPVTCWLMTGSPGADGKPGALVESGDAGANWRWWSPWTLSDPLVPLDPIDNVGAPRAKGARGSARPPGADK

SEQ ID NO: 991139 - protein, 49 aa, Homo sapiens
MSSNLYHVLPEAVEQPVVLEQCVMVVRVCVKLAVGLLEDLPRPAACPVF

SEQ ID NO: 991140 - protein, 80 aa, Homo sapiens
MTSTDTGTLTIAAPTRGRSLYAAPTLGHRYGDCYTIPAPTRGHSLLQQRHGDAHNSSTDGDAHLVPDAIAEGIPLDVDPA

SEQ ID NO: 991141 - protein, 71 aa, Homo sapiens
EEGTVPVEAWTWTPDINEPLSDSESEDVRGPEPSSTRRSSGVPSTWPSEADEEELARRREARKQEQAIQRL

SEQ ID NO: 991142 - protein, 40 aa, Homo sapiens
DGTGLLKDGVFTTSSDMWSFGVAFGELTSLAEQPYQGLSN

SEQ ID NO: 991143 - protein, 64 aa, Homo sapiens
IDQNDTHAVPCVALTPRPPSHSGPLSDTRQVPLLRKHGFLNLVQIFGDYYHFVASSSDEAVPVA

SEQ ID NO: 991144 - protein, 38 aa, Homo sapiens
GVQLTYDAHLFLNTLYDSSLSHLRATGSGNECVCTNLV

SEQ ID NO: 991145 - protein, 45 aa, Homo sapiens
TTPICDTSMQTKPEFDQVLHGTDASIKNKLPGPHHLSYGDHRCLI

SEQ ID NO: 991146 - protein, 34 aa, Homo sapiens
SLVIAQVECSGVILAQCNLHLQECSGVILAIQRL

SEQ ID NO: 991147 - protein, 36 aa, Homo sapiens
MESSYYAQAECSGVILAQCNLHLQECSGVILAIQRL

SEQ ID NO: 991148 - protein, 48 aa, Homo sapiens
VCWMIRFNTAVFGWMIHFRYSKVCNHDVCRLALSMPDKQYLKWIIQPD

SEQ ID NO: 991149 - protein, 71 aa, Homo sapiens
MLVHPPGTKGKEQNNGKQNRNKVSGNYSTAEVSDIALVIPLLSIQAPMRCLFQAVRVYLLFTNVHCPAVMM

SEQ ID NO: 991150 - protein, 56 aa, Homo sapiens
DLTFTILGPVTFLTMFSSLVIISSFIKNFSFKPHMTLITQCMVHGHLVIPRYSVTL

SEQ ID NO: 991151 - protein, 119 aa, Homo sapiens
VLIVGIIHEESAGSIYRYEKRRIFPMEGERAQRKKDGSLDYSDEDNESLQVIQTISVRGASSSMSSDDSLVDYGEGGEGQFNEDGSFIGQYTVKKDKEETEGNESSEATSPVNAIYSLA

SEQ ID NO: 991152 - protein, 130 aa, Homo sapiens
RRRWLRFVVFVLQILSVYASKSVGLLLVMASTPQPVCLLSSPQSIPGWSATIGQAILFTEDLVGRHVLLFWVFSSLSLLVLLFFLLLFFTMPICVEARKWQGRCCGSSVWDAGRRARCHGDLSHGHGRMS

SEQ ID NO: 991153 - protein, 37 aa, Homo sapiens
CYAAWHVSSGIDVFITSSTVVDTVGRYLFPQIHSLRL

SEQ ID NO: 991154 - protein, 45 aa, Homo sapiens
LSAGIPIQAQALWQVHACTAQQAPNHFPPGPGRSRRRRGPRFNSP

SEQ ID NO: 991155 - protein, 33 aa, Homo sapiens
LGEDCGAYLLTLRLSPVSERSLHSLPLIHSLRL

SEQ ID NO: 991156 - protein, 65 aa, Homo sapiens
LLLVLSRAPLTAPQCVCLALVLVFAGGNLFLVLVSSAWPFTRTASPAAYTSSGGPEPQSSPAGYR

SEQ ID NO: 991157 - protein, 76 aa, Homo sapiens
EDCGGTGRDSFCLRKGREEYGNFVFACLGISLTTVRQSNKRVLEVPDSRPWLLDGISAPELGHSLRLIHSLRLMGT

SEQ ID NO: 991158 - protein, 63 aa, Homo sapiens
MRRRGGEGAEKLPVEYHAHNLSNRINRTPNLSIMQYTPFKKPAHVHPYSKIKGYGTVAHSLRL

SEQ ID NO: 991159 - protein, 64 aa, Homo sapiens
MGTTSGDRTSRPLMRPLIELHTTNHLWSLRIRCILSIALHIRTSRQPIVRIRKALRSIRSPELN

SEQ ID NO: 991160 - protein, 164 aa, Homo sapiens
  misc_feature (150)..(150): Xaa can be any naturally occurring amino acid
THLLLLLRGAQRKKGKRIKLMKAVKKRRAFLEKVIAPPKAAGEGSKAGLSPANCQSDRVNLEKSLLMKKAALPTFGSGHCTAEEVFASEDESEESSSLSAEEEDSENEEAIRKKLSKPSQVSSVQKLGPQNFIDETSDIENLLKEEEDHXEENNDSKETSGALK

SEQ ID NO: 991161 - protein, 170 aa, Homo sapiens
  misc_feature (1)..(1): Xaa can be any naturally occurring amino acid
  misc_feature (29)..(29): Xaa can be any naturally occurring amino acid
XPRAFLLLLRGAQRKKGKLIKLMKAVKKXQAAVGEKGISPSKAAGEGSKAGLSPANCQSDRVNLEKSLLMKKAALPTFGSGHCTAEEVFASEDESEESSSLSAEEEDSENEEAIRKKLSKPSQVSSGQKLVPQNFIDETSDIENLLKEEEDHKEENNDSKETSGALKWKE

SEQ ID NO: 991162 - protein, 103 aa, Homo sapiens
MHVNGLVLVPMCLPSRPACTSSLPNLYMIESTAIHLAHYDMLLPCSLPECYLQASCLLPGSPVAHIHGHDVASHSPPHACAICQLRAPVLAAGVFEWAEHQGG

SEQ ID NO: 991163 - protein, 112 aa, Homo sapiens
SSSGFRLRPFLFFSRCNESLARLSVLSFWCPRVSLKPSLILIACGTSYLAGVATRQALEELTELPVMVELASDFLDRNTPVFRDDLCFFLRQSGETADTLMGLRYCKEEEEL

SEQ ID NO: 991164 - protein, 62 aa, Homo sapiens
IPPIQRQSKATFDAISNDLQLPDPRYSDHPRYSEAAKATFDAISNTYSYLDPRYSDHPRYSE

SEQ ID NO: 991165 - protein, 66 aa, Homo sapiens
LCDDGSEIVKMRAFVDAMTNVDVIVEVTHDVLVLRLLIYTDQSFGFLREQPTAILECFMNRQCRVS

SEQ ID NO: 991166 - protein, 61 aa, Homo sapiens
PGQFLLLCETPTSASRVAGITGLSHYAQLLYAESYREKREVRCNNTGKSQENISSNFSCIK

SEQ ID NO: 991167 - protein, 138 aa, Homo sapiens
HTLSRFRYSTELGTWPEADMHHIDRDNTHGRYVCVIDEILLKYVKLDAWIRDGKTGYGVEYGVGIIGFFRAHEHSLLSAQLKGFPLFLHSNLGLRDYQVNPSAPLLHLTRPSRLEPGPLPGDDWTIFQSNHSTYEQQC

SEQ ID NO: 991168 - protein, 67 aa, Homo sapiens
HSSSSFSSAPSAPPASFFSPTLHPDLHPDSLKPEAREPPPQKMSEEVRAEPQEEEEEEFAQEEEKSA

SEQ ID NO: 991169 - protein, 38 aa, Homo sapiens
SGAGFNEESGERVVAAQPTGSIQYPTPIKMAAAGSVAT

SEQ ID NO: 991170 - protein, 56 aa, Homo sapiens
MLLPFLFGLKRNDQKIFVYRLCFWKLALGLSADHMMWRIARPGMGQTCSGPMGVCC

SEQ ID NO: 991171 - protein, 93 aa, Homo sapiens
  misc_feature (21)..(21): Xaa can be any naturally occurring amino acid
DLKDPGSLMVWSYCSSKYELXQLAEYTHTYTSWSYSAILLPSDVVIEVESIKLSALHWWLCVVYWDDPCVSDLQAGLECHREAARPYMPPIQR

SEQ ID NO: 991172 - protein, 38 aa, Homo sapiens
MISEIDKEGTGKMNFGDLLTVMTQKLSETDTKEDIRDS

SEQ ID NO: 991173 - protein, 83 aa, Homo sapiens
TKVQSLDSCVGGVVIARVIVIIFVMLKKKQYMSIHHGVVEVDAAVTREERHLSQMQQNGYDNATYKFFEAGVRNQSPATGLRL

SEQ ID NO: 991174 - protein, 69 aa, Homo sapiens
SRCLHRDEYKPLDLSCFHTVLHLETEATNSLITAPGEFSDASMSPDATKPSHWCSVAYWEHRTRVGRLY

SEQ ID NO: 991175 - protein, 58 aa, Homo sapiens
MYAWMKHYHVRPRICMADQDSYNELTCPVNSSCIYVSRPACRRPRCVLARVPWPRLSF

SEQ ID NO: 991176 - protein, 41 aa, Homo sapiens
KYFWLISSCMYLCKKSSCEFVFSCMGHTSLTKSFPTGPTVF

SEQ ID NO: 991177 - protein, 49 aa, Homo sapiens
GEFVGDGHRYNFLSDVYVTCLKFSTDVLSLPHARYSECSLPGDRYGKTA

SEQ ID NO: 991178 - protein, 33 aa, Homo sapiens
GTPKVWYRSLFQDMKRGFPDVRQGGGDDESHRL

SEQ ID NO: 991179 - protein, 66 aa, Homo sapiens
IEDPIRRIMWNRELSKPSSRRLHSLISPILEATPQHESYAKIHITIIFIWVNLTNFPQSRRMGTEA

SEQ ID NO: 991180 - protein, 50 aa, Homo sapiens
VHAETFALISSTEENAVMMGVLERRNFVYRKNYTGMRETQHQDPQSSPGV

SEQ ID NO: 991181 - protein, 94 aa, Homo sapiens
MLSEKVCNHMDYHGWAGVVIARVIVITYGDAEARNSTDPFIMVWGEVDAAVTREERHLSTDAVEGILNMEGYKFFAGRSGELEHAVSTVSTPDG

SEQ ID NO: 991182 - protein, 77 aa, Homo sapiens
QADYCRKRKTIENNGRNNMELYMRSGMRVVVAHTCNSSTLKDVKQCGSLECLGYESSLANMVKAVSAYKYKNIGKHG

SEQ ID NO: 991183 - protein, 54 aa, Homo sapiens
DLWLLEVKQSSMTISPHRTSSWIQWNKALTSHLGRLGDTGDVPGTYPQVFVLMC

SEQ ID NO: 991184 - protein, 50 aa, Homo sapiens
REDCVSVGSVACAGFVVCVLEVGELPEGLITVGCSGSGLTAHGGCCIVLG

SEQ ID NO: 991185 - protein, 52 aa, Homo sapiens
DYDGDGLSLHCESKPNLGVADGLGGYRGGGAVSVFRRVSREDPTCLLSDGYR

SEQ ID NO: 991186 - protein, 72 aa, Homo sapiens
AAAVLSLEDPIRRLLWVHAGVALVAVALPVLAGDFFRAPDILDIYQVLVHKGVHWLAPPLCRIPSASPESSP

SEQ ID NO: 991187 - protein, 47 aa, Homo sapiens
QANDWCVCIERYHVVYSSLSPGMRRHRGIFGWYSCFRPQSSPDGYRA

SEQ ID NO: 991188 - protein, 37 aa, Homo sapiens
MTLTLFSAELLGEPENYTLANGLHTPPHSLRLMGTEL

SEQ ID NO: 991189 - protein, 44 aa, Homo sapiens
MAFADARSIALGCLSLVFCAPVACGPSIHCLEFRNKVLTGPEWA

SEQ ID NO: 991190 - protein, 44 aa, Homo sapiens
DGARGSEHTMSSHGLRLIQGSSPDSHSLRLIAESLRLISHSLRL

SEQ ID NO: 991191 - protein, 54 aa, Homo sapiens
QAKMWPTLGLALLGSQMPLPSLVSVFCKAVYVAMAFPKLEPFHHSQSLRLMGTE

SEQ ID NO: 991192 - protein, 64 aa, Homo sapiens
MVPWIRGCCHSLRLISGEDCVHDDEDATGNVSSLLSMSSTARFLCIVKWFFVFTCICHPIIPKQ

SEQ ID NO: 991193 - protein, 34 aa, Homo sapiens
TFCTDVRGRYAVHEEGGSLRVSHYDSAMRRWARV

SEQ ID NO: 991194 - protein, 35 aa, Homo sapiens
VAVELETSKYLQVHAIFSSKEFMCYSYNFLLDVFL

SEQ ID NO: 991195 - protein, 58 aa, Homo sapiens
IRRRYVGIVRHTTDDYFANFSPIYWDESASFLIQANHTHDEPTSLQVQGLTGTWLCLG

SEQ ID NO: 991196 - protein, 39 aa, Homo sapiens
MVCSFTFVGISISHLVGTLLRWGTVDCDRPFPGACMRAM

SEQ ID NO: 991197 - protein, 107 aa, Homo sapiens
  misc_feature (46)..(46): Xaa can be any naturally occurring amino acid
QLLLCVGLEDPIGEDCGSILWHQARSVGRHPRSPTQIWAVPDLVLXGEEPIPSPYSKEQSHSPKTAAPKLRSLPQSCLSTPHPRKQNLVGPETAQRGGGPQPQSSPD

SEQ ID NO: 991198 - protein, 36 aa, Homo sapiens
TRRFTVTAPMEQHTHRMEWHTRPMEQHTLPRNSTLS

SEQ ID NO: 991199 - protein, 66 aa, Homo sapiens
SGDDCADGVPKVIWRQVASWLRSLEHSLSNSPWTYPHMGAESARICWVGGAYPGRGEGELGHSLRL

SEQ ID NO: 991200 - protein, 37 aa, Homo sapiens
MIPSGEYVCYEDHTGKPWGRTDYPHLPGASTLSDGIV

SEQ ID NO: 991201 - protein, 35 aa, Homo sapiens
VGPTVFPVVDANGRVGGLDVAGRVWLCRWLVDLGV

SEQ ID NO: 991202 - protein, 95 aa, Homo sapiens
PSCSAGMQCTTLSSWEDKQYIVVREALMLFKSILEQQMAAHHLCDPVAQQARSARCESPCLGNLKICRTTFREFCSAKCTSMQDWYVPEPLVEDP

SEQ ID NO: 991203 - protein, 100 aa, Homo sapiens
ALISVCPHPVACPLSVAYPHLMPSSSVMPSSSGMPSSSGMPSSSGMPSSSGMPSSSGMPSSSGMPSSSADALFACPSHSGMHSSHALIQWLRAWDEGMLL

SEQ ID NO: 991204 - protein, 70 aa, Homo sapiens
YVVDPSSRPTWKSDTNSYNHDAVIKNYGLLYCFLKEMVQVETFLRILQCRSVEGELCLLGALLVDLVSDP

SEQ ID NO: 991205 - protein, 132 aa, Homo sapiens
MSARSLFMMEQTVPCMYNESRGMYEQVRWMTDRRYMQKNWENNSLSKLRMLFVGGVQLNFKPSPVRNIPPLEGCIWNLVINSVPMDFARPVSFKDADIGRCAHQNLGEDDEEHAPAEIVIQPEPSSPPARGT

SEQ ID NO: 991206 - protein, 38 aa, Homo sapiens
PPGAEAKHASLLEDVLNTDGGLGGLAGGISGKWKHVKR

SEQ ID NO: 991207 - protein, 45 aa, Homo sapiens
KQKLTASSKAIANIGNIAIKIKVSNTQIYAKSIISKTIDDSLTTL

SEQ ID NO: 991208 - protein, 56 aa, Homo sapiens
PHPVEMESQISMNCCVCMEQWPCVLQRLYCMAILDEFLVGSRARLPLCYGPLDEGM

SEQ ID NO: 991209 - protein, 41 aa, Homo sapiens
MVSESLNLTGLVKIHIQILEVILIDPFHKAIRAPARIQDSQ

SEQ ID NO: 991210 - protein, 66 aa, Homo sapiens
  misc_feature (47)..(47): Xaa can be any naturally occurring amino acid
LSQWAVLLKGRPGSESLGPACPVGNRCRVSPWLWRDFKPGDGAVGPXILRSRSHCSASSVMCFLRQ

SEQ ID NO: 991211 - protein, 42 aa, Homo sapiens
LVPVLRAGARARGCATQGNDLGSPRCSVDKDGSRTTLRHQHE

SEQ ID NO: 991212 - protein, 98 aa, Homo sapiens
IIGYQDALFETIEAELNELGAGSVKSLLAGVLCLGDVTAESESMRGSERDFMLNALVLLDCWETGRNVAREGCHETKVGPGKALVRHELGLKRPLDEG

SEQ ID NO: 991213 - protein, 50 aa, Homo sapiens
QLHVPVRLSYFSDTVNEDPCCLPKRVHLGGLLLGQQSPPLDEGMGPLDEG

SEQ ID NO: 991214 - protein, 46 aa, Homo sapiens
AYSPPGYQKHQTNSLSTSTIPLAPARIPEHSTNTLSTSTKHQHEYP

SEQ ID NO: 991215 - protein, 36 aa, Homo sapiens
IELLPNSIPAYYALPEEGMQEEELISEEKNYLDGIV

SEQ ID NO: 991216 - protein, 131 aa, Homo sapiens
GDSRGPPCLIHVLHSATGRESSKSMRVEVSELDSSLNSTSTSNSIFSHGITKSKTHSVPEALEAGGGQLNVNFMGKPLYVKHEPLRTHQNIRHHNNRCSNCKPGQQVDDFTLWTVFPKMSEQDSPLDEGMG

SEQ ID NO: 991217 - protein, 44 aa, Homo sapiens
YFLIMRLGIPVNSVRLQPVQIQSLETLGVLARAVGGAHEYAGME

SEQ ID NO: 991218 - protein, 107 aa, Homo sapiens
MSEMQIHSNVAHRCAKPHKCPHCSKSFAIASYLCQHLRIHLCVKPYHCSYCDRSFRQLLPPPSSTPESTQATDPTSGHILAVKKAYTQLSKLQSHTSQHHKEQALEV

SEQ ID NO: 991219 - protein, 45 aa, Homo sapiens
TLSRHPPMLSSRGSPVHRLSTVASIPTFTSGPRTQQSVSLFIFLS

SEQ ID NO: 991220 - protein, 68 aa, Homo sapiens
IELGTCYRCTMNVFDRHILDIEAHIVPRKSFTQSFMVYIDAIFLIAPIIMEVVDSVNPEFWKNTTKRD

SEQ ID NO: 991221 - protein, 48 aa, Homo sapiens
HLSQSGYDLSGSHEVSPVSWVLFRGQKVLSSESPARVPITPRSQKAVG

SEQ ID NO: 991222 - protein, 113 aa, Homo sapiens
DEGELQGALTRVVARPEPEDSGVGDSRNTVHGGSSHLLEVASAVSAAEEVVHVASDGWEDLLGLGCFLEWSTYCRAGCTVKKWKRTHRKQGKPRKCGSLPWQPIQFAPSEGYR

SEQ ID NO: 991223 - protein, 41 aa, Homo sapiens
KFQNIYITPKKKSITHQQSHSHNPKPKTATNLLCVYLDSPV

SEQ ID NO: 991224 - protein, 92 aa, Homo sapiens
SLGAELGRSQCRAIARFDTNVAQAVRHWSRTTGLLYCFSEGHGQGRDIPAHGAVPLCGGQLWHLGARGSIRVMPRYSALLLALKVAVQFAPS

SEQ ID NO: 991225 - protein, 60 aa, Homo sapiens
MLYLHLDLNLLRLLNLDLLFLLGLWLNTGGDWTGKFKQRPSHFSAVCVYAVLPAARGTEL

SEQ ID NO: 991226 - protein, 69 aa, Homo sapiens
AVAMLTGELKKALIEVLQPWICSSLWSVLGNKVRYMKDTVDITGSPPCEGYASSQFCNSMVYSVFRSIE

SEQ ID NO: 991227 - protein, 120 aa, Homo sapiens
ALMPCHNGLFHVALNSLQHGAISDLAEGSHGRAPVVVFSPSHVFVRLQGRRHCQHAESLGLFTPLQLPTPPLPRLLHEPPNQCSPSIPAPPSLTPHSCWREFHKTQNQTGHPPAFAKKFP

SEQ ID NO: 991228 - protein, 42 aa, Homo sapiens
RWWLHCLGVTETAGVDGWLLGLDLSTLVMGVLHACYHTMHSC

SEQ ID NO: 991229 - protein, 57 aa, Homo sapiens
LDGLPLAGGDTEQVQSYLNGGTGWAGISKASGLILQAHFQPQAREARRWGRNCWRGT

SEQ ID NO: 991230 - protein, 33 aa, Homo sapiens
  misc_feature (1)..(1): Xaa can be any naturally occurring amino acid
XLIITFFSVTIILSSFVLVSINFFINSFCSDSR

SEQ ID NO: 991231 - protein, 85 aa, Homo sapiens
MVQGEDVATRPIPRLVPQVAHLMALSWERSVIVECVRIAGRLIIISNFIAPDKWVTHEFCLSSHAQQSLGRDAIQDMNIQTACRW

SEQ ID NO: 991232 - protein, 39 aa, Homo sapiens
MHCSYLSRCYHDPICLLLGVAAQSFILNKRFSQSLDVTF

SEQ ID NO: 991233 - protein, 40 aa, Homo sapiens
MQIESLNVELAVHDEGIMKKDIMEFMQTRVVGQVNVEIDA

SEQ ID NO: 991234 - protein, 36 aa, Homo sapiens
  misc_feature (5)..(5): Xaa can be any naturally occurring amino acid
NRARXPIALITRNQYKGSLDENSDQQVDFQEYAVFL

SEQ ID NO: 991235 - protein, 54 aa, Homo sapiens
ARPYWILLKMQTLPVGGGAHLYSQTTRKAEEGEWREPGEAEVCSEPEVAVSRDL

SEQ ID NO: 991236 - protein, 66 aa, Homo sapiens
NTGKHMSDDRYNLHIAQPIHSSIIEAKAVTSTYDCTGQSGHNNHKYRECSPITVGQHLYCHGSQGA

SEQ ID NO: 991237 - protein, 96 aa, Homo sapiens
  misc_feature (1)..(1): Xaa can be any naturally occurring amino acid
XTTDVEWSCSCDIERATAEGLEVFEGSTMQFVRDDEDGAIAAACEEAVRQIDNIIANPLVRLASAPAFPANLQPAPAGCFFMRAPAVPPGGSLLCF

SEQ ID NO: 991238 - protein, 43 aa, Homo sapiens
MPVRPSDQALGSRDTMDGRLYWVLSRGAPRLIPTDPVGLHGEC

SEQ ID NO: 991239 - protein, 55 aa, Homo sapiens
RSSGSHRRRLWTQGCCGSAMSRRMETEIEAADNLADLEKHLRETALRSMRKAQVS

SEQ ID NO: 991240 - protein, 66 aa, Homo sapiens
ELLTGVYLMHLSCERLPLVNQDSEGEALTQQVENVEASQLRRLNIKKDDEFFHIRPTCAYAIWGLA

SEQ ID NO: 991241 - protein, 34 aa, Homo sapiens
MAEDGWEPALGAFQRKAHLQQSSALIEGLWRSTF

SEQ ID NO: 991242 - protein, 49 aa, Homo sapiens
LEDPHHGEDCGYRFWDVSGLAISVTCVSMCLACTCDRICWGVRVALMSV

SEQ ID NO: 991243 - protein, 42 aa, Homo sapiens
LEERGSILHRDTNSFKEMASIGGNTPVSQSPLCGPELRWNGI

SEQ ID NO: 991244 - protein, 69 aa, Homo sapiens
TVETMEEDKSQSDVDIQSCESCSNSDRAEYENGSRYFSEDDNETTMLIQDDENHSEMSKDWQKEKMCHK

SEQ ID NO: 991245 - protein, 96 aa, Homo sapiens
IIHQRFTYARKKGSSMVLDDGGIKLSSSMSTPIVSVYCVVTMARYSSKHFIKTQSSQLLCEVGTLTTKHILCKSKFKPRKIQLFAHSHEASTVPAV

SEQ ID NO: 991246 - protein, 109 aa, Homo sapiens
LDICNEDGRLGARLRVVMANKHAAAGIEATQVYQLDFGGRVTQESALNFPIELEGRQARPQTRSRCWAREGEGSSASAFKEHFSKGPIGNVEDNEHLLGRAHGVMVASV

SEQ ID NO: 991247 - protein, 68 aa, Homo sapiens
ASVALRIPPDINTVGWVTGDDVRFLTLVRGFGHVEQEVAREKGGYARMKKPEYLGISDHFSHSSLRIR

SEQ ID NO: 991248 - protein, 79 aa, Homo sapiens
PIPLRQTCPLSILFDHAMLQAHRAHQLAIDSYQEFVDSYFPLVLLFSFLLVSLSFFCFSVSFPSPSFLFVSLLFSFLVL

SEQ ID NO: 991249 - protein, 76 aa, Homo sapiens
TPSRLPDKITADTMEHWMEPVKDQSIESTDRRIWLPVPVFDLCFLTCVPFLAVGSRVSFFYRTFCLFVGGICCSSS

SEQ ID NO: 991250 - protein, 86 aa, Homo sapiens
DPVAGYLRNITADTLEHWMEPVKVQSIESSDRRLWLPVPDFVLCFLSCVPFLAVGGCVSFFFRAFCLFVGGVCCSSSLSSLLVFPF

SEQ ID NO: 991251 - protein, 57 aa, Homo sapiens
QLSEEEGLELCLVTPAHALNNRYSVPTVFVSLYENSQRVWRMIEATCLALIQQSSQM

SEQ ID NO: 991252 - protein, 143 aa, Homo sapiens
WWMHSDPCRPECPLWSRPPQYLPFMQPIGGQEKTSTCPAARNLAHRQSMGGQLMGCFGNQDESSLSPKLLQSVEGSILALVRSSATGKEGSGSVTCRWLWSFRNEDVFLSLIHYSSRGVITCISGQTGRTVAIDSSSNYLQSE

SEQ ID NO: 991253 - protein, 45 aa, Homo sapiens
RGSHQVKIVDGQKIMELSMLSGEHTDSPPIPWPPMTTSLRIVPKV

SEQ ID NO: 991254 - protein, 47 aa, Homo sapiens
MHLTHMQDIKKYLTNERLVWQLRISALQVHMAKLYTHRTTVHLPVCL

SEQ ID NO: 991255 - protein, 64 aa, Homo sapiens
FVIGEDPEIDYLTHWNQHEPLYIGQVYHVQRVIANHFVTISIEVIRGYCELHKCTSCTLPRCAE

SEQ ID NO: 991256 - protein, 30 aa, Homo sapiens
SRGSTAIYNYLCKIKMPFPTPLRKVIVNAG

SEQ ID NO: 991257 - protein, 46 aa, Homo sapiens
WVCDRDNDCVYGSDEPANCTQMTCGVYKLRYKDSIRCSHAVESATD

SEQ ID NO: 991258 - protein, 72 aa, Homo sapiens
RILEEYVELQIRSVLKELDAYLLYILLTGALQFGNVSSMGTFPFNSLLSGYISLCGEIIVAVRLRIEFVPSE

SEQ ID NO: 991259 - protein, 83 aa, Homo sapiens
TQEDHLLMLAISFLIAQKTQARHTSPQCTVEVGPDFTETSYFDWSGSLQAPSSVYPVHYTQGSHSNSDWLNSYLFTMSCSWTP

SEQ ID NO: 991260 - protein, 34 aa, Homo sapiens
VLCTASVVVAVCMGPLLSCRSILSELRQISHTEM

SEQ ID NO: 991261 - protein, 121 aa, Homo sapiens
RASPLVLSLSEYLTRSSSSFSGYTPRPRTSLANSKRQGSAARRSCPSARATLQTSNVKTDTETPKASAMTRRTLLPYSAAVLFSSSEGLYTGRNSDFHLSVKLTQCEPQDFQRSRSLPRRE

SEQ ID NO: 991262 - protein, 38 aa, Homo sapiens
MNLMLGVSLHAVVEQCEFFALVLVVVLSGLACSSEMDV

SEQ ID NO: 991263 - protein, 75 aa, Homo sapiens
LLLLVEQLDKSQRLSLFQRWLQHATMDTEHTSSEAEQKAGVCHCVTMDVDLCQCQCNASCSCHVTLEMGHMNGAT

SEQ ID NO: 991264 - protein, 58 aa, Homo sapiens
RLYAVNLNSDNDVEEGQEQPLRMAPQLPEEVPLESAKQSEAEVVTEIQLEEDQPKVNG

SEQ ID NO: 991265 - protein, 77 aa, Homo sapiens
EKLLPHIRWNAGFVFTKEDPTEIRDMLLSNKEPTAEPALLPLPYVKSLVPAHNTDLGPHKTSFIHTLGITTKISMDT

SEQ ID NO: 991266 - protein, 48 aa, Homo sapiens
GSSRASTRCGPCEATSFILRAERPQARYYVQVAAHDLTNYGELRDCSL

SEQ ID NO: 991267 - protein, 32 aa, Homo sapiens
MTITSYRTRGRHQTLMGRLEDWQPRDWADPQA

SEQ ID NO: 991268 - protein, 38 aa, Homo sapiens
MYVCVGSVVRVIVAPYGASSDAIQLNTSDEIPFEHQTQ

SEQ ID NO: 991269 - protein, 101 aa, Homo sapiens
MRYTWPDAGRKPVKSQFHGALSGQATACSGPLTRSVRCGWDCLLAIVCNRLLYRADYHFQGWYSLPERTLDVRHLITGVIQKRLVLGILIGQMTSGRVLVA

SEQ ID NO: 991270 - protein, 51 aa, Homo sapiens
MSKPCCKVKHNRVMAKQTSPPYIITIIITINTTTISSIITIIIITTTIINI

SEQ ID NO: 991271 - protein, 54 aa, Homo sapiens
NLGRIFITSCKVEHNRLWQAASPPLIITIIITINTTTISSIITIIIITTTIINI

SEQ ID NO: 991272 - protein, 71 aa, Homo sapiens
TRYGVMMFEITKQWTFNYILRELPEVPPTCQCACLGNYRDMGEHRVILPNDVRDFIDNLGQDLQGPSYYPT

SEQ ID NO: 991273 - protein, 33 aa, Homo sapiens
SSRYGWAVEMMTERLEVKGGGFEVPVSKGVLMV

SEQ ID NO: 991274 - protein, 45 aa, Homo sapiens
VHPPACSTPYKPPYGKLLLPPGTDGGIEGPRVLNGNPQQELKGDG

SEQ ID NO: 991275 - protein, 67 aa, Homo sapiens
APDRCTLPGKADNGIMDACSLSSSLHLIIPSCDTAVTDIDADGCIKEDSVLGHNCNVRPQRGLTHLR

SEQ ID NO: 991276 - protein, 119 aa, Homo sapiens
MRAPLQVCSCTSLKLEHQLLPRVFSCMTLNLNISSSPGLQLQEPKTRTLPSLQGSSSMTLILEHQLLPESPTEETLNANNISSSPSLQLQDPQTRTSAPLQVFSCTTLKLEHQLLPGSA

SEQ ID NO: 991277 - protein, 84 aa, Homo sapiens
RTEELGRYSRSAMNSRKDIYKRKYSAAKTKDEKKKKEKVLANVTKPVGGDTNGGPRVVKIRKMPSYNPTARYASNAVVTGAVYL

SEQ ID NO: 991278 - protein, 64 aa, Homo sapiens
RSCYNSTDRKYHSAIKKKHLYGKEKYPPDIQQPSYNRHSIDHSLDQSYFQYPCIEMMDELPSTC

SEQ ID NO: 991279 - protein, 101 aa, Homo sapiens
PYQDTLMDVEAKNKLKSECIYDFIPERSSVLMNSYASYLDYRKSIVQKLVFPLCYSYTSAKDNRQQIPTLVYSIVGLLSNAAFTTDYSQPTVPSPVTSTLQ

SEQ ID NO: 991280 - protein, 30 aa, Homo sapiens
MPGSTRAEICIAFYFLHQRRIIYRDLKLDN

SEQ ID NO: 991281 - protein, 34 aa, Homo sapiens
CRVCHSLQSVGSLQRQRKLPEEHARFYAVEICIA

SEQ ID NO: 991282 - protein, 69 aa, Homo sapiens
WFLAEPAHPGPPPPIAMHLHIPPRDLRTITPCPLPPSQGYTYTTQSGRDQPAWLLHHQNSLATGSARNP

SEQ ID NO: 991283 - protein, 82 aa, Homo sapiens
DYGGKVCELDENNTPMCVCQDPTSCPAPIGESEKVAGNDNKTFDSDCHFFATKCTLKGTKTDHKLHLDYIEPCKYMPPCLDS

SEQ ID NO: 991284 - protein, 108 aa, Homo sapiens
TRLITAEGSTFRAPSHSFSAGFDEDKPIAITGTYNLDFDNIELVHTLQTLEPRASDAKNQEGKVHTRRKSTDSVPISKCTLSRSLSLQARDSDGASSSGNPEAVALPP

SEQ ID NO: 991285 - protein, 61 aa, Homo sapiens
DYGGRERLTDREALELIMKNKSIPSGGNITHSSEAGRHSEALRNEETNVARLEDRGRAKRV

SEQ ID NO: 991286 - protein, 80 aa, Homo sapiens
DPNGGGRAAGTGSGTTNVATGKTLCAKGYLGRHGAQPRQVSGEQGPSARHHTCKGPEAGVSQEHNVSCQGGRVEPRLSQH

SEQ ID NO: 991287 - protein, 39 aa, Homo sapiens
RTHSSSSSKKVIPFAADCDLDDVHLPGPNGRRKSVTVGT

SEQ ID NO: 991288 - protein, 32 aa, Homo sapiens
EEEEYAQEEEEYAQEEEEIAQEEEEYARTRGT

SEQ ID NO: 991289 - protein, 66 aa, Homo sapiens
RDPMSSEPVFSQTKVAGGMSQTSLFYLGTEKTKVKMVGKSPMGRGAAFFYGERVSPSCPPGYIAWG

SEQ ID NO: 991290 - protein, 38 aa, Homo sapiens
MPLGKNSQGSRQDCPRTSEASGPEQLADPGAVLGETPT

SEQ ID NO: 991291 - protein, 45 aa, Homo sapiens
VVWIRKNEVRVSGVNKINEELYCSVRTAREELPWQRVVPPASLVG

SEQ ID NO: 991292 - protein, 73 aa, Homo sapiens
LDAKLSRRPEETVPSHWGLIPNVRSRAPNHRARPDLSSDRKDLSESIGECGMRLPKLTDVIRAGPGAPFSSQQ

SEQ ID NO: 991293 - protein, 68 aa, Homo sapiens
LLTTTTVLGIIVAVNRVLGERSSDMIGHAAVLGQRPHQCVRITKEYFVFSCQFVWTYPIVHSPVTHCY

SEQ ID NO: 991294 - protein, 44 aa, Homo sapiens
MQSVKTLGHCVCECESDSHVVRHQDTVSCDTLMISVSLCDEDYW

SEQ ID NO: 991295 - protein, 84 aa, Homo sapiens
GCKVSGYNNQCAKITSISVHQVIDKQRAKIMSELPFTIATKRIKYLGIQLTRDVKDLFKENYNVSHFNRCVVVTHLGFTLGVPK

SEQ ID NO: 991296 - protein, 75 aa, Homo sapiens
RGSLQNYERAPTVRLDTWWRQRRLEPRTVQLFWKPVPLEEDSGRDAKGYVCFLGDTSGQAGAILPLCKNPRVTEL

SEQ ID NO: 991297 - protein, 56 aa, Homo sapiens
  misc_feature (3)..(3): Xaa can be any naturally occurring amino acid
TLXCNNSRWQMPTTDTLEDMNSQLNSFHGQMENITTISQANEQNLKDLQGTHAGTE

SEQ ID NO: 991298 - protein, 66 aa, Homo sapiens
  misc_feature (15)..(15): Xaa can be any naturally occurring amino acid
QETQVDRMFRVDFGXLRATASAGNEGLVAIDFSSSSDKKSDKTGTRPEDSKALKDENLPPVICKER

SEQ ID NO: 991299 - protein, 37 aa, Homo sapiens
ALVAVTDKRPATARRSVYTECTQWMRKSFAPVCNEPT

SEQ ID NO: 991300 - protein, 41 aa, Homo sapiens
WVLGRCQENWKSPSLIIIKGKSWESDEEKSYHQRSPPLWFL

SEQ ID NO: 991301 - protein, 121 aa, Homo sapiens
GHHTHILTGTHTDEHSHARIAYVQHTLNYSLLGVVPVHLQTLCALPFVQKSVPSLHALTPQSVYHRLRVLHIENPPLSVSEVPDMCAYIAPSLPRASLISMCEYVKITCFLLRDYCSLPAE

SEQ ID NO: 991302 - protein, 68 aa, Homo sapiens
FRAYTHMSLGTALLSLLSPALRSRKWVFIEDKAELQDKSEFSDVDQLAIRDYEEFESSFESAGNMPRQ

SEQ ID NO: 991303 - protein, 39 aa, Homo sapiens
RNQKPGRPRQESRLKSLARLQSWLRRFLSSAQEYTLEWN

SEQ ID NO: 991304 - protein, 36 aa, Homo sapiens
DPVVINRVFKDCEAWEVSSDCRNCVGGLGVCRMIYK

SEQ ID NO: 991305 - protein, 95 aa, Homo sapiens
VQLVRKVFGGGSDSANGRKNSPKLTLIQCPVVQSCLCLKYCSAVTTVVVYVALRVHTPSSLHIVSAIPAHVLPSRRPRKTCILVLITQCPFLPNC

SEQ ID NO: 991306 - protein, 79 aa, Homo sapiens
PGAPVCMTPRLRELTINSKGPSRTGIQMLMGVRVAPEVPISWQDPLASSGWWDEKHMLPYFSANHGADPMRTHHYSSLS

SEQ ID NO: 991307 - protein, 91 aa, Homo sapiens
LHASPGPIALEYQELVCMSPCQSLFINLLEQKAIGDCELMVNTLRKNDSNCLTVFLKYRNDITACYNGLRPGRCPVPEGAETWTVSDVQLS

SEQ ID NO: 991308 - protein, 78 aa, Homo sapiens
MRRNYNKLESAYDKQTYSRSLDTLQSGNSRVVYSHSHPNPLKLHRRSHSHNRPRTPMLITMVPSKLKLPKRTHRVPRS

SEQ ID NO: 991309 - protein, 100 aa, Homo sapiens
MSRTVTCIAQDDGLAVVVQARGDTLRPYGIAIRALEFEVAVELVWNRALALHLLADMDGAVPGAIFPAWNDIAPKSLGGIMVFTLDPTITATWMMGMGYR

SEQ ID NO: 991310 - protein, 90 aa, Homo sapiens
TCVAFSILRSTRSHNSYDRDQPGEPSIPAIIEYPLPSSRASTSNVLRVHRSHNLNKEQDIRKIGGLLKTIPLSSTSLTIGSLAKAGVPFL

SEQ ID NO: 991311 - protein, 34 aa, Homo sapiens
RVRTYPASPPNHRPAVRSHVNAGTVVQNPAWLQM

SEQ ID NO: 991312 - protein, 50 aa, Homo sapiens
SPELVHVKACPCNAEYTCDQAPSKRSVDVNTVLTCRRNLSQEGITDSGEY

SEQ ID NO: 991313 - protein, 78 aa, Homo sapiens
TVLHHTTVRRSDGADTQGGTGSAWAVEGQESAHTLSVTKEGTAGPAELTGTYAQVQMVWVTHLPPLGGARGWRALEKD

SEQ ID NO: 991314 - protein, 37 aa, Homo sapiens
CAGSEPHSGAFACSLWVLFQFLTVQAAQENVDHSQDA

SEQ ID NO: 991315 - protein, 136 aa, Homo sapiens
FGLIRWTGVHAVRGPEGFGVEETAVGKKIGEEEIQKPEEKGELRWSLIAAWPVTQELAQVNITLQEQIEAIHEGEGLVPEDDTKEKSGPRKPNEIAQEPPPPSSVTNIASSAPPITSVPRPARRVPPPGSPPREGY

SEQ ID NO: 991316 - protein, 61 aa, Homo sapiens
VDTNNLLCSAYCRNMLEAEDGPEMNFLVGIHSGCSVVSVCQTAPGMITIELYVKFSHFLAL

SEQ ID NO: 991317 - protein, 58 aa, Homo sapiens
RVHARDEVGLRKAVNGISHSRMQRGTLFSEKGSRLRLSRYLDATLGPQDPIVADGALA

SEQ ID NO: 991318 - protein, 60 aa, Homo sapiens
SDSADSTKMQPTDHMSTAVRVFLRRQERCSGRPCAREAVERLHAGTGRGTQYAQVLTVGT

SEQ ID NO: 991319 - protein, 52 aa, Homo sapiens
CPAPAWLTTLTVVWSLSPEMLVLLLLSGATGLPCCPPPPAGRLRRTCALAPR

SEQ ID NO: 991320 - protein, 30 aa, Homo sapiens
MMEVPIFQYLMNTSTNIEQAVLGQCWIRTH

SEQ ID NO: 991321 - protein, 59 aa, Homo sapiens
MSHLGTLTAIQCMACLWPLTDVQVVGSMNSNPWDGMRLAIPDPLWRTTGHQYVCSWPNW

SEQ ID NO: 991322 - protein, 142 aa, Homo sapiens
MTDGTYHGDHNAGDHHACSQLDTKRSEPRSSASMSCSCRNNPLHYPKWSMTSAQPFYHRPGGYDVSFTFAPGSPSRGVALRFLQTTFDPITLEQSARRGETYSPDRDRAAMHFAMMRKLDCPEVGCERMLISIAPDTTATTV

SEQ ID NO: 991323 - protein, 42 aa, Homo sapiens
HEDPVTSSSYATACVETLAAHAPRRVHRVRCTPSLDKFLASV

SEQ ID NO: 991324 - protein, 67 aa, Homo sapiens
QTLVDPPCAQGDLTTDQHGSFDLLRFRPGPVHPVLRQPEGPPLPEGHHIDAELSADTRMNRPLQPRT

SEQ ID NO: 991325 - protein, 88 aa, Homo sapiens
MEQSPERKRRRQCRGVSVGASVHARFTVIERLERHTRGYTGKFRLDEVWLQFGYNILSGGASLLAKIVNDNAGAWFTAAHTAFSRASS

SEQ ID NO: 991326 - protein, 78 aa, Homo sapiens
YYHPKEVYTVILSLQTKAKGGQTSWQGVHAYHKWHGLDSGPSLLTYKVRAPRNTHIKNEQISNTVLDDEMRMQMTILP

SEQ ID NO: 991327 - protein, 61 aa, Homo sapiens
MVTWSIRAFMGWQSYRGWSGDEVRGQRDHEVLGTVWPMLQFGKAKVGPVKKVWNGVPRLAV

SEQ ID NO: 991328 - protein, 67 aa, Homo sapiens
LNAYSTGIPRRSPIQCTNQALTLLCFLEIMASCAWPGFMCLTMASCAVTSASCAWWYLSSEFCNQWS

SEQ ID NO: 991329 - protein, 57 aa, Homo sapiens
MSTVPLTPIPQQSTIVKHKPCSARVVQNEGVQPSPGAQGPDSSRGHPVHGCACSTLV

SEQ ID NO: 991330 - protein, 110 aa, Homo sapiens
LKPGKYNAGVLVDPILFRMIQAKEASLMSPRASEQLPLPLPLQVHHATYRQVGPKYVERSPGPLDEEPSALRVNVELHKLGVSHARPDKRNTIIKVCQALSNRGLSKECY

SEQ ID NO: 991331 - protein, 37 aa, Homo sapiens
CDQLLTDSAKNLIIFLGDGMGVSTVTAARILKGQKKD

SEQ ID NO: 991332 - protein, 75 aa, Homo sapiens
AYQLRFTVWREVRLRGCCTRVVVTTPTDFPAFLARFVTETTSVAGVSVLHVVKRGRLHSMPMVWKLPLTPQLVRR

SEQ ID NO: 991333 - protein, 64 aa, Homo sapiens
  misc_feature (55)..(55): Xaa can be any naturally occurring amino acid
GPVPGQPRSVIAFGVPWGHARAVRVHGQEWDTGIRGHAVRGLYTQASRSTRLDSXVSEHEASGA

SEQ ID NO: 991334 - protein, 45 aa, Homo sapiens
MRIPPPYHVAATASDSELDAAEGAGVSDTADVQLVAVWTEEILAL

SEQ ID NO: 991335 - protein, 43 aa, Homo sapiens
VLLWIPARTTLRYDVVRLCWCCPVGLLLQVLVGGTWKRRMPPR

SEQ ID NO: 991336 - protein, 96 aa, Homo sapiens
ITVLMRRITCGSYAQIQAVLILAELNHSEQPSSVTNTSITSSSQSHASVTNLLHRNTHHNRRVRRVTNSPNNRCPRYGVSPHKQHKLLTLTCPLCY

SEQ ID NO: 991337 - protein, 34 aa, Homo sapiens
AGDLAARAVAPGGATRLTDKAVKDYSAYRSSLLF

SEQ ID NO: 991338 - protein, 88 aa, Homo sapiens
PVTVGYPFLCGTGRACVWPVLRYQICCHHGPFRVLGNSWLLLNQGELGLQDQVWSRPKYSPGSAWIRCQLSESGFQINSRPQAGSGPI

SEQ ID NO: 991339 - protein, 44 aa, Homo sapiens
AGSIAKRYLEVSTAAHVSTELVHGRHAPEVVEYTYDQCSSLNWY

SEQ ID NO: 991340 - protein, 70 aa, Homo sapiens
GLTTGFAPMKGGEESPTAIRGALDTLHQLDIDGGILNAHVVGLYSIMGNKDLWPMMLSSILIPGLMQCIE

SEQ ID NO: 991341 - protein, 51 aa, Homo sapiens
YRPYFRMMSRRAPPSPLFVAQLEMYEGFGSPWEWVEAMQGLPVHCTATYGD

SEQ ID NO: 991342 - protein, 39 aa, Homo sapiens
VGRKSRLQLAETVTAFQSGQLTPVIPEFGEAEAGELLEP

SEQ ID NO: 991343 - protein, 39 aa, Homo sapiens
MSTMCVFSAAGTWLRAVGGLAAAGRKGLLAPVVAAARRG

SEQ ID NO: 991344 - protein, 34 aa, Homo sapiens
RPFHNLQMSFVLLAPSLPSTMILSASPAIVDMER

SEQ ID NO: 991345 - protein, 57 aa, Homo sapiens
PRTVAAPAPDVPAPGFCLFCLPGFKRLVRSKPVPAIQAFDHAYVPMPNRAHLVGLLT

SEQ ID NO: 991346 - protein, 36 aa, Homo sapiens
MGTADVAYQVNSARPKLNGSPNSFGSVKELPSDPPG

SEQ ID NO: 991347 - protein, 43 aa, Homo sapiens
LLYDDPPAVPVAMGAREDGVLEESYVVSQWSTYGQSVRLAGRD

SEQ ID NO: 991348 - protein, 38 aa, Homo sapiens
SEDPPLYSCACGSPGSVAFLHCLPRAPISCIWIRGSEP

SEQ ID NO: 991349 - protein, 61 aa, Homo sapiens
  misc_feature (41)..(41): Xaa can be any naturally occurring amino acid
MQPARFNQCNTDTRQRGHLRDESGPMKCSGSHVGRGNHHTXCSTPRQAGTYAHTVNRNWYG

SEQ ID NO: 991350 - protein, 33 aa, Homo sapiens
LEDPPMKKIKKIKEHETRSAATSTRYRRNWYGG

SEQ ID NO: 991351 - protein, 33 aa, Homo sapiens
SGTECLVSAQAWSCWSALHGSYQQQSLMGEAKK

SEQ ID NO: 991352 - protein, 47 aa, Homo sapiens
MLDKGSLAVSWAILTEYGHTQDNFSSGIWISSYTDLLTNGCFLYTED

SEQ ID NO: 991353 - protein, 60 aa, Homo sapiens
DLTGSRSRHCTASQAPAVLLLAFALLCLPWLPSRLVPSQHRFLFTQASSACRVTQLAHSV

SEQ ID NO: 991354 - protein, 47 aa, Homo sapiens
VGTEARYSRLKRFSYFSLPSSWDYRSAQDAIFPGDPRAEAVAIKTAM

SEQ ID NO: 991355 - protein, 81 aa, Homo sapiens
  misc_feature (3)..(3): Xaa can be any naturally occurring amino acid
TQXVFMMQHPTEPYESHSVLLAVPSDYRHTHASRLIRTFPMEPMWPLTWLGSTYEYKGASLKSQLAGGKVLVCLSNYVLVL

SEQ ID NO: 991356 - protein, 63 aa, Homo sapiens
CHIVSFTDDLVFTGVIMATGYRSPSQVGAPSYSVLHEQLGSGSYYEGISQMRPFAPRDVGTER

SEQ ID NO: 991357 - protein, 59 aa, Homo sapiens
MSHGAGETGPGRRRDGTGGDGSLPGVRLPQLFSENQVATQEVLQGPVSFLPPVGGGFSG

SEQ ID NO: 991358 - protein, 105 aa, Homo sapiens
GGQRNLQWGRAQTGHGLGGILGDNATSSGGAQQTGHGLGGFLVDNATYSGGAHRQGTAEEESWGTMQPPAEARTDRARLRRNPGGQCNLRWGRAQTGHGLGGIPA

SEQ ID NO: 991359 - protein, 38 aa, Homo sapiens
MDRYLITVPLHHLSPCTIYAEDRYRDTEVVSVFVRIPQ

SEQ ID NO: 991360 - protein, 34 aa, Homo sapiens
TECLSLTCRAALPQRGGVEEPETEDGLRNGMRLQ

SEQ ID NO: 991361 - protein, 42 aa, Homo sapiens
GPVLCLREMLLLAICIIGCQGPRIHPDERGLRLTRSQAGFMT

SEQ ID NO: 991362 - protein, 79 aa, Homo sapiens
MRIPALYQLLQVAWQPKSSNNRYDGLVTPFAITKNHYSSQTGPSYDQEEEEDRRMKSTYPWNEDVIWDEPSARKSYSLK

SEQ ID NO: 991363 - protein, 94 aa, Homo sapiens
AYSRGLRQFSPISVDGKYNRVLYRDIPLPRDRQETDAFFLSQLQRRHSFLLYYILLSTDPLRVSGWGMVRSFPSREAIFQTITWGESLDNTWLS

SEQ ID NO: 991364 - protein, 61 aa, Homo sapiens
FSSSCTDLFLIRSRCQAKRGQQGQGSEADWSIQSPHILIKNITLKGDRYVGDANNELDTYA

SEQ ID NO: 991365 - protein, 34 aa, Homo sapiens
LILTPTNTVIGQSKIFFLYWLLLAHLEEERDLND

SEQ ID NO: 991366 - protein, 46 aa, Homo sapiens
NLSLSQLIITSTIKCFNEAPAFLVPPVDGYVMVYSPEEPNDQPDVA

SEQ ID NO: 991367 - protein, 51 aa, Homo sapiens
MSNSALVAWVALEEGRSPRRLTDRGDLNETLGPGAVVSGIMQRNPSLVELA

SEQ ID NO: 991368 - protein, 111 aa, Homo sapiens
SPPPVSKLRLYGSWNPFSDPISTPLPQSPKPYSMSSEAQSVISKSVIFYLLSLCTLHLCPKTFTIFWNISQTILLEILEIPAFWNRGQPEENIKEEEEHEAAEALRPGERR

SEQ ID NO: 991369 - protein, 60 aa, Homo sapiens
ANPALVVRHAYSDEQVDGCFAGQHVGLGQLSALAGYDLEWREDSQVRAVSPRQDETLLEI

SEQ ID NO: 991370 - protein, 52 aa, Homo sapiens
NQLGPDMQRTHHFSYYGAHGIIVVYDVTDQESYANVKQWLQEIDRYASENVN

SEQ ID NO: 991371 - protein, 55 aa, Homo sapiens
RIPGVKVNLHLLRSLDRMYADLSAVGAANYTVWEKIPSMSNNLVPNSCCINVTLT

SEQ ID NO: 991372 - protein, 82 aa, Homo sapiens
QPARITPRTSEAELALRDRAVPSSLGDSSEAPSQKQTTPKEHKKQKYNKNIFKGYKSYVELNKFLQSEHTHIISIRSNRIEN

SEQ ID NO: 991373 - protein, 101 aa, Homo sapiens
RIPTRSEYLLPSEFSKTPTINNVLLFYCVLSLYILFGFSMVVPKIRVFCYCPKGKSLADNNYGCVPLLEDSETRKNNLTLDQLQDKVITGIAREKLPKVDI

SEQ ID NO: 991374 - protein, 35 aa, Homo sapiens
LGTGVSTVQLPRLDIQRRRFLSGNTLTAPKAKVCR

SEQ ID NO: 991375 - protein, 41 aa, Homo sapiens
MTRTSRDYSTHATTLTHLPSHLRFSRTYCILTPHYSHTDND

SEQ ID NO: 991376 - protein, 80 aa, Homo sapiens
SVPCEPCVRYRYAMEAHTTYGVIGVKVWIFKGEVIGGRQEELKPVAPAPRKKAAAKKGVRNMLQPKRTKFRKQMTGHNRG

SEQ ID NO: 991377 - protein, 132 aa, Homo sapiens
MGIINLAFKVYNTREEAARQQHISELQLLASAVRQNPAASPAYKNFKTPELQRPGIPPGPPAPGSCFKCWKSGHWAKYCLQPGIPPKPCPICAGPHWKLDCPTHPAATPRAPGTQAQGYLTDSFPDLLRLAA

SEQ ID NO: 991378 - protein, 39 aa, Homo sapiens
LEDPIIKFLFTLILLLALYLKYAVSSLSLTFYPLRVENI

SEQ ID NO: 991379 - protein, 111 aa, Homo sapiens
MSFLEDPQALTFPLGFLHLKKKSTSRARWLTPVIPTPWEAEAGGSRGQEIQTILANTVKPSLYKKYQKFCQVWWHMPVITATWEAKAGESLEPSRRRLQSAEIVPLHSGLG

SEQ ID NO: 991380 - protein, 59 aa, Homo sapiens
PPYSCDNIGLSAAAALTSANCHAATEVISVMNRAKKAGKSVGVVTTKRVQHASPGVNLT

SEQ ID NO: 991381 - protein, 36 aa, Homo sapiens
RVQLRNNKIERGLSIIPSCGWAVPGPGFLEAFANCG

SEQ ID NO: 991382 - protein, 87 aa, Homo sapiens
QVPEVEHSTAYLCGVKGNFQTIGLRAAACVAVATLTRGNEFISVMHRAKKAGKSVGVVTTTRVQHASPGGELYAHTVNRNWYGVGYL

SEQ ID NO: 991383 - protein, 39 aa, Homo sapiens
MSIQSIPRSLTSHLFLSDIMTLYVLISEENDAIEWISVD

SEQ ID NO: 991384 - protein, 72 aa, Homo sapiens
MSNGINNHDENARHGGVIGFQYAKVKPHMLIHDYSLQAWDHSATDFVTHAGVSSRMCLPAGQLAGNPKSPRI

SEQ ID NO: 991385 - protein, 35 aa, Homo sapiens
RAQFDVRFYLVAILFIIFDLEAAFLYPWAVSVFKL

SEQ ID NO: 991386 - protein, 52 aa, Homo sapiens
DTTYKRQIHNRLIQPIYIVVKEMHMHITKVTVHQSWQKYKSSENNRMVTSTL

SEQ ID NO: 991387 - protein, 72 aa, Homo sapiens
EHTANNYSNNNHSNTQTSKLSRYSFLRFEDILDNLRLEACKYGLGPDGTGRVEIYVDEQKYDTYKDTYGHWV

SEQ ID NO: 991388 - protein, 67 aa, Homo sapiens
RITSTAQCAGIRYGSTLQQKLVYDSILKYDYLKTKVVKERHTDWYHVGHVQHGSRNPSYTNKLDIST

SEQ ID NO: 991389 - protein, 72 aa, Homo sapiens
RVQLRDVEGSKEFYTWEAWMILLEDRKGSQSSAGCEWSVDDQCEGSTQKYFFNLSSSAIVMNSFPAGGIGYG

SEQ ID NO: 991390 - protein, 40 aa, Homo sapiens
MIPLQGVRPGLALIVVAAQCRQVHSGKSVRCPWGSVSSRV

SEQ ID NO: 991391 - protein, 34 aa, Homo sapiens
TLSTHPESRLYVTRLLIYCSVETTCGVSVDQSSA

SEQ ID NO: 991392 - protein, 55 aa, Homo sapiens
  misc_feature (27)..(27): Xaa can be any naturally occurring amino acid
ASHTRQCNTSAIIEGREQSQWALISQXKGRRKLRTRDEDEKKRGSGGTASSAGEL

SEQ ID NO: 991393 - protein, 45 aa, Homo sapiens
STFTNNLVYDTSDSDDYHLLKDLEEGIQMLMGRLEDGSHLTGQTL

SEQ ID NO: 991394 - protein, 36 aa, Homo sapiens
LRSSGQLVEHSSYDWMCECPSRTGLREQWIPLRDSA

SEQ ID NO: 991395 - protein, 36 aa, Homo sapiens
MESRRARSTLFQKPYKLEVDNSDVNFMGQPLYLTRV

SEQ ID NO: 991396 - protein, 58 aa, Homo sapiens
KNGNTNQKGAHPTADGSAEERGATEAGGFSAKEKMEKPVGPTATICPSLSYPFCLGAC

SEQ ID NO: 991397 - protein, 52 aa, Homo sapiens
MSSRRPERRRPPMSLKQKDKKLSEILLQCGGRAQDVPSSTRSSAEKGNARVK

SEQ ID NO: 991398 - protein, 30 aa, Homo sapiens
MPYVGGTVPGKAAMWRSCLAFRSRKFSDSE

SEQ ID NO: 991399 - protein, 41 aa, Homo sapiens
AARLVYASNSVTVLVFTSFRRCSQLRGSRSSTLACTIQFPE

SEQ ID NO: 991400 - protein, 64 aa, Homo sapiens
QARYPASLALPHPCFSELKSHYKNSVTLPDAVTHTCNPSIVEAKEDGSRGQEFKISLGNMVKPH

SEQ ID NO: 991401 - protein, 66 aa, Homo sapiens
RLMVSITPSTIHSPTPVHTTHISLTPFPCHSSPHAGHQFIQQASHHDLTHPTSTSTHPRPFAITPS

SEQ ID NO: 991402 - protein, 40 aa, Homo sapiens
SARTHLHVGSGDTEGMQSFPVQLSDDLPTALLQRQLRLRG

SEQ ID NO: 991403 - protein, 36 aa, Homo sapiens
RHHAIMSPNHPTGQCISHCKASGHGASLSQSHLPGH

SEQ ID NO: 991404 - protein, 92 aa, Homo sapiens
REFIILLREFIILLREFIILLREFIILLREFIILLPGSDDAGLKTQLLGRLRLEHRLSPGDLGCSALCRSGSRTKFGINMVTSRERWTTRLP

SEQ ID NO: 991405 - protein, 64 aa, Homo sapiens
REFIILLREFIILLREYIILLREFIILLNSSSAARNQHPAIMCEQTLLLPGCQPLTVCCAFCQP

SEQ ID NO: 991406 - protein, 102 aa, Homo sapiens
REFIILLREFIILLREFIILLREYIILLSRSSVVQTHHPPIMCGQTRLLPGCQPVTDCCAFGEARYCLTRDLACLEAWSHGPSETSFLQGDDLSAAKETLFS

SEQ ID NO: 991407 - protein, 35 aa, Homo sapiens
GTAYVLYITSSPRHHHITTTIITITSVTVITTAII

SEQ ID NO: 991408 - protein, 121 aa, Homo sapiens
  misc_feature (82)..(82): Xaa can be any naturally occurring amino acid
LILLYGRTPMYVSHTPMYGSGWEQGMYGSQTPLQDGSRTPHYGSQTPLHDGSRTPAQSGAWDPNNPNTPSRAEEEYEDAFHXEPTPAPQAYGGTPNPQTPGYPDPLSPQVNPTIQPADARD

SEQ ID NO: 991409 - protein, 134 aa, Homo sapiens
MIGNPDSSVHEFKASGSSRSVHFHAVCGCSRTTAAGLMSCQRPPGPQGLSHCLSWSEACQPFPGHRLAWLLYAASWGPTVAESVASWRLSDGHRVLAGACCVPALLCICPRFLPGHLLPTLTPSPLLLAFCLKD

SEQ ID NO: 991410 - protein, 89 aa, Homo sapiens
  misc_feature (85)..(85): Xaa can be any naturally occurring amino acid
VRSHAQFSAPLQTDPRVWVCDRDNDCVDGSDEPANCTQMTCGVDEFRCKDSGRCIPARWKCDGEDDCGDGSDEPKEKSVMNAPVXAIPV

SEQ ID NO: 991411 - protein, 44 aa, Homo sapiens
VWNRCLVALRSRRRQEQRENHSSGGRLGIWGARECGTGGTTEKR

SEQ ID NO: 991412 - protein, 106 aa, Homo sapiens
MHSWKGDMLGVSLFSAAWYFRFLVVPSESLTPPLFLTWGCDELGGGALSSFTWMMAEPVGDAWKHGASRTLFLFADFSDLSRQVVSGPSVGSGAPHINVFGTCLLK

SEQ ID NO: 991413 - protein, 53 aa, Homo sapiens
ARYQSLYEGRWASLMLGEQVDADLIAQDVRLYHRRRADLRRGDDPQAGEWNGD

SEQ ID NO: 991414 - protein, 33 aa, Homo sapiens
PNDLTEEEGREKLIQELVTLIEQRNAIINCVIG

SEQ ID NO: 991415 - protein, 46 aa, Homo sapiens
  misc_feature (37)..(37): Xaa can be any naturally occurring amino acid
LTTSCEMLSHCRYTSVSVTNVYAGVRNGYLARLCVDXIHGSLSASF

SEQ ID NO: 991416 - protein, 52 aa, Homo sapiens
  misc_feature (27)..(27): Xaa can be any naturally occurring amino acid
STTSQNGSPVYEEPPFPAHSQEGTEEXLPGLSSSPDQSESSSGENHGVFGER

SEQ ID NO: 991417 - protein, 139 aa, Homo sapiens
  misc_feature (19)..(19): Xaa can be any naturally occurring amino acid
QLKEEHIAEDSDRKYEEVXRKLVILERELERSEERAEGGREPSPDSVEEELLNLDQALKCPDWLRGGVFHQMKINMKRRSNLLEEKLKEAETRAEFAERSVAKLEKTIDDLEETFGSAKEENVEIHQSLDQTLLELNNL

SEQ ID NO: 991418 - protein, 64 aa, Homo sapiens
  misc_feature (1)..(1): Xaa can be any naturally occurring amino acid
XVLWVSCDPKYTLQIFLGPAKESLRAGTCGTVAYGVQALEETQVYGERDWTSKYRPGAGVGGER

SEQ ID NO: 991419 - protein, 71 aa, Homo sapiens
VEATEGLGDDALGQGQEEGGAGMKKKIGAPPELDISPGAAGWGLKMVSLGPQPREQVQLRSGVITLSFQLI

SEQ ID NO: 991420 - protein, 40 aa, Homo sapiens
ELGLRNLVFASFSNGHGTIQESIQSSESLLSSLHARPLGL

SEQ ID NO: 991421 - protein, 36 aa, Homo sapiens
MGEQQKHIGYGDFVACELRSWDWVPILIGGYYKLRY

SEQ ID NO: 991422 - protein, 61 aa, Homo sapiens
NLLHELRFCSTLTLRCYDIAVARYTFYSTGPQFCADYLGRPRWSDHCGARVCRCPDCTRYG

SEQ ID NO: 991423 - protein, 75 aa, Homo sapiens
PSNRARYQICREPKCLRFSKDALAKAAVHSSAKKPWGTQWAANPCEPNDQCYMTHMNNCDNCDSVYPTSQHTQGE

SEQ ID NO: 991424 - protein, 50 aa, Homo sapiens
DQMMRSVDEYADLYWVGATQKEVRSTVTGTDVEADAAVAKGDCTVRSLHH

SEQ ID NO: 991425 - protein, 36 aa, Homo sapiens
MRLMHRCTLANSFLYACLCGMLRAQDTSNNHQLWIP

SEQ ID NO: 991426 - protein, 73 aa, Homo sapiens
MTMALKVLEKSDGELKLPIPASSMPQQIGIPTRSLTQVVHSARRRIIVSPVPESRLRQSNVFRSDITDAAAAK

SEQ ID NO: 991427 - protein, 57 aa, Homo sapiens
RILKNPGLHSGEEQPRWQLFRPQRKKGAEGLRFGYINFSFHGGLLIFLLHLHYYQTL

SEQ ID NO: 991428 - protein, 133 aa, Homo sapiens
VTLRSLPLRDCPRGFPFGGSGPREATPSRNLAGWYVLWFKPELRAHPRANSNSRHLTDLDSCLLAGMDLMIYCTPGKRHGQRNRISNSKIPPNSHTAASSCLTTLRKESYTKVSSKPPPRPNLPSGPCRPGLA

SEQ ID NO: 991429 - protein, 44 aa, Homo sapiens
KPGCQLFTPHRRKAAEGLCSAYINFPFHVGFLIFLLHLHYDDTI

SEQ ID NO: 991430 - protein, 97 aa, Homo sapiens
YRNSESEGVSRYGQGGNTGLNTLLLSPVQLIRVWACFSFCQLRTWTLVLLRWDMATGLGLGSPGACCHHHSRRCTMALFHGIAAGLQLSGVVHPASP

SEQ ID NO: 991431 - protein, 79 aa, Homo sapiens
MASRPKCKKLIKGWSAGYTCNPSIWEVEASRSPGQEIETILANMVKPHLYYKIQKLAGHCRRTPNRPSYSSGTRAPSFK

SEQ ID NO: 991432 - protein, 39 aa, Homo sapiens
SVYLVSRLYCLSHTHDALLTNYGLLYCFSEGHRQGGTDA

SEQ ID NO: 991433 - protein, 41 aa, Homo sapiens
SAGPFMGTEMSSSWDEAVVCGSGWQSLKPSRTSPGETEEPW

SEQ ID NO: 991434 - protein, 70 aa, Homo sapiens
DELDPMQECSDASQFSSLRLRAQVISHLSPPSSWDYEHMPPPSPNFCIFCRDGVLPCWPGWSRTPELKRS

SEQ ID NO: 991435 - protein, 48 aa, Homo sapiens
IVTMDLGDDVSCRLINYNKHTTLVGDADDEGGCACVGEIHGKFLCPFQ

SEQ ID NO: 991436 - protein, 113 aa, Homo sapiens
AQAHKKAFSEEPTYGAEIKPSSRAGRISLTFSSDPGSSPSETVTSGHRAMKDELNLLQVQSTECGEMAFCIMDSKPFHSGPWIARSETFALPPVVDGDKQLPDSQECKPNKED

SEQ ID NO: 991437 - protein, 85 aa, Homo sapiens
DYSKKLPWLQGLEMLEEQQLDLHSAVFFAKHYRRLPSLDSLEARWTATLQSSCEAATTQTTQTDVRPEVLAKYGGLPKIGTVLLM

SEQ ID NO: 991438 - protein, 79 aa, Homo sapiens
SGRPLPMAQPAHRTYNLQERRRIASMTGAEQTLMPRIPTDEIEAHTLATADLDLMNSHRLEDVPGVRRHWWRKNAKGST

SEQ ID NO: 991439 - protein, 124 aa, Homo sapiens
VTAHLELWVWASTTTTTTYSLYTTLPSDDTAVHINLFTTFFIDCIVALCLAYDRKKVSKAAILARIRRTGDGNSYVADLRCPSGSFFINQSGRGFKCLLYYLTAYCYQDANDDHFISFQYSILL

SEQ ID NO: 991440 - protein, 72 aa, Homo sapiens
MGNGGDEDENQSLKERWALSEHAEHLYILTTKQEASSLHRTEEEVVRKERHAVDPGVSQLLAYMKLRCSTQH

SEQ ID NO: 991441 - protein, 108 aa, Homo sapiens
LGGRFSINAAQAMTPARAALIENLPPPSSKSEILSFPGLAGFFRIWISNFALLAHPLYEVAKGPPNEPLNPSHNILPSFHKLQTALVTASAPSLPDISQPFTLYTAES

SEQ ID NO: 991442 - protein, 36 aa, Homo sapiens
MLIRESSYLEQPLSRAHTVLPELGPLQLLVVRVAGI

SEQ ID NO: 991443 - protein, 54 aa, Homo sapiens
GRSGCDICHPIDRQELIRLIWLARRVSPSSLTAPCASLPKLRARSKRTTIPDRG

SEQ ID NO: 991444 - protein, 36 aa, Homo sapiens
RESPLYTRSLLSYTRDHSRHNISASPQYTQCNQTLS

SEQ ID NO: 991445 - protein, 101 aa, Homo sapiens
MSAPLLAGVAGTSGSEYQLRFTCVGLGPAGEACCTRVVVTFPLTSLLSWPWFITADDLVAACRVALVKAGGCTQANGLEVALNPAQVGRACGSTVLAPGTA

SEQ ID NO: 991446 - protein, 36 aa, Homo sapiens
GEWKANDQQILPTSDGWLSLVPACYNRACHELYALT

SEQ ID NO: 991447 - protein, 40 aa, Homo sapiens
PASYHSSRSLILKNNQKYTPYYPTIYYSHSCSAVYLIGLQ

SEQ ID NO: 991448 - protein, 37 aa, Homo sapiens
MHNMLHAIASYPWMTAYDLYNDLPDSSLDSYSQPEWS

SEQ ID NO: 991449 - protein, 83 aa, Homo sapiens
LEYASDCACCWRRNMPPMPINYSWSIHSPAIVNNPVPLEVYLSMRKFIAPSIYRCADLSMMIIACLDPSIEPRFIITSGLYPM

SEQ ID NO: 991450 - protein, 40 aa, Homo sapiens
MIPSGSRSCALAQSCLKYSMRSSVCATAMLAPRMFHRPQC

SEQ ID NO: 991451 - protein, 39 aa, Homo sapiens
ILEDPPRYRSERSSESAAAVDLAARIIGIGHFGHQRAVL

SEQ ID NO: 991452 - protein, 37 aa, Homo sapiens
SSQELHQIEIAIFHARSGCNSVDQLVYAMRFHLNIVQ

SEQ ID NO: 991453 - protein, 34 aa, Homo sapiens
CCFLLLCYVFAILDRINIGLRPAADAARHRTSRD

SEQ ID NO: 991454 - protein, 96 aa, Homo sapiens
VKRRCTLIRDVVLEFPCGSVTPYSAELPARHRSGRPAAASEGKVLVFMTVSPVGPGYRVAFAAVSGVRVGGMRLSHTFPDPGTTAHRDEWVTGCRG

SEQ ID NO: 991455 - protein, 34 aa, Homo sapiens
AAVKEFHASILHMQLQSAQDDQVAAAFGSLARLR

SEQ ID NO: 991456 - protein, 33 aa, Homo sapiens
MKYSDLTYLFLSDTSSGLRLETNRYRCSNPANR

SEQ ID NO: 991457 - protein, 54 aa, Homo sapiens
MLRGRGLALLLLAVQCLGTAGALHGSLRKSKQAGSAKWFSPMSPDGVSSQRYLR

SEQ ID NO: 991458 - protein, 81 aa, Homo sapiens
VARRRRVTLTDVMETIAGYLPEAGEEVDARHDIQQNEDGSWIANGYMPLEDLVLYLPMPLEEKREYHTLAGLLMEHSQRVP

SEQ ID NO: 991459 - protein, 43 aa, Homo sapiens
VTLRGSLLQRNLVVPRLPGRSPLLMPNLVLDTRSGIAALQPRT

SEQ ID NO: 991460 - protein, 43 aa, Homo sapiens
LSSRNRSRIIFSSSYSDYNCLISRFCWSFMVSSILLNSRTSVL

SEQ ID NO: 991461 - protein, 39 aa, Homo sapiens
SLGEWAVPNLGPITGRPQEQFDLRLFFSHGCDWRDRYEL

SEQ ID NO: 991462 - protein, 63 aa, Homo sapiens
VSSRNLAGPPSPGQVSILMPNLCADTPSALRTTSRTTPGLIVDPPISASHNADITGVVLPTVA

SEQ ID NO: 991463 - protein, 38 aa, Homo sapiens
MMLHVGGDTSERIPVPLILPDLRRERGRPADGRMPMQY

SEQ ID NO: 991464 - protein, 47 aa, Homo sapiens
YPLEPGGDDYLESHTRVRSKCISGKCSNWSQDAVFREEKRHSQPCSW

SEQ ID NO: 991465 - protein, 33 aa, Homo sapiens
STFSFEMPPTHCQAIFHPHYTTKNTLTKITNLP

SEQ ID NO: 991466 - protein, 59 aa, Homo sapiens
MTPGGHGNCDLTCDPETPDTSYQCWMIGQSLPMTHRFQLSESNRTLFLFGVTQYSAGPY

SEQ ID NO: 991467 - protein, 66 aa, Homo sapiens
MGDETDLVLIADTIPFLVPEYCAGWFEFAKHDRVEVISCSVIGVCWVNSGEVWAMEEIQGVWVTAA

SEQ ID NO: 991468 - protein, 121 aa, Homo sapiens
LFLRFPVCRCCGQTGCLTVAWWFVHSSVICGDSTEVLGDMLGRLTQLILELLSATGGVREPEWFLVAGGVSLSVNDQNYFQMHNACGWLEEILLRTVYPELFVEYGIWSGGGEQVVSDFEN

SEQ ID NO: 991469 - protein, 70 aa, Homo sapiens
  misc_feature (63)..(63): Xaa can be any naturally occurring amino acid
YFSSCTFRGRDVASRLCLLLACAICILGLLIFLEYTYPAIVNNPFTSMNYSLALRKLSIVAEXSIRCGTI

SEQ ID NO: 991470 - protein, 155 aa, Homo sapiens
EPNDDLHLTVIITEAFLTVFEQPKTILTLVDLMTEKKKHETKRSINDEIHTQLLAHILTGIEDICGHYCHHHWRDQHNQLKKKHVKKRPIAVERSKKPQLIAFYHKTEMNQAIELMESVCSDKIPSAVSTVSMQNIHPKSLPSERILPALSKDKE

SEQ ID NO: 991471 - protein, 69 aa, Homo sapiens
LTTKLAPTICLDHMTYKGKGMPIVARERARRLYYMCDLKTLLGSELRLCELVKQYQWLFIISFFPLSFT

SEQ ID NO: 991472 - protein, 105 aa, Homo sapiens
LEQLLVWVCSQLKWNKYLIVVTDVAPPVMWLQWNPVGVLEDAVKLMAKRVVLSKSSRVAITPDQLEPRLSIICHGPHVTGATSRLADWGQSRDAEEAISQAIQRL

SEQ ID NO: 991473 - protein, 47 aa, Homo sapiens
DCPGLTGTVCMRHVTTRVASELQERGTSVKFPCTDRDACGSFNRLRG

SEQ ID NO: 991474 - protein, 33 aa, Homo sapiens
MRARGGGDGGRSEEQLQSPHEPPAARSQDGLDS

SEQ ID NO: 991475 - protein, 41 aa, Homo sapiens
MLRLQCASILPLCSSLGDSKPVSQKRREGWDIIDDRPFNAS

SEQ ID NO: 991476 - protein, 60 aa, Homo sapiens
PLYQLLGQGNFQTIGLSAAACFNQCTLTRGNKVISVDDIGPSKAGKSVGQLVTTHTECMH

SEQ ID NO: 991477 - protein, 44 aa, Homo sapiens
LSVSVGVATTPALEGCACVHGAVTDAVEARSLGLKPKHIHIYCA

SEQ ID NO: 991478 - protein, 44 aa, Homo sapiens
GQFYDGSPRCTPFAAILVLCPGAEHIHHSTPWIFNGPADELHLD

SEQ ID NO: 991479 - protein, 148 aa, Homo sapiens
  misc_feature (16)..(16): Xaa can be any naturally occurring amino acid
  misc_feature (79)..(79): Xaa can be any naturally occurring amino acid
  misc_feature (125)..(125): Xaa can be any naturally occurring amino acid
ALRQDLCQPSQFETLXLFSKRKSLAKIIPISGTEKGSKKKEKERPEIYPPSDFEHTIHVGFDAVTGEFTGMPQQWARLXQTSHITQLEQKKNPEAVLDVPKFYALHTVKPKYLSFTPPEKDGFSXWNNSTEYPGNRSPPVVTEEEDHD

SEQ ID NO: 991480 - protein, 57 aa, Homo sapiens
  misc_feature (41)..(41): Xaa can be any naturally occurring amino acid
VTVAPACLILNYFKIVKEELFRGDDDTDENQVQLGSPTHLXLSLSLCGMVGPRNWYG

SEQ ID NO: 991481 - protein, 158 aa, Homo sapiens
  misc_feature (133)..(133): Xaa can be any naturally occurring amino acid
GRLQDPRRTVGVSTCLELTGAGVWPCSYVALGQSASASACQTPAVRTESGVHTRAAAGHEAHCYGHHLSQPLTSSLELPGTGKTVTLVAAIKQVVKHLAQAHILSCAPSNSGARLLCQRLRVHLPSSIKRLLXPQQDIRMVPEDIKPCRNWYGGGYRA

SEQ ID NO: 991482 - protein, 57 aa, Homo sapiens
MRLDGPRADLQGVELRDIAERELGTTCYPRLWNPGKELPYGPCLVDWRTILAQLVRR

SEQ ID NO: 991483 - protein, 149 aa, Homo sapiens
RVMRFELVHERDRLIAEVNKQLEFGKRTQAVVLDQEDALVRLLHEGQPSFTAVGITSYCDYPCPPAHWPEHIKSCTQSATAPQQEADAEVNTETLNKSSQGSSSSTQSAPSETASASKGKETSAEKSKESGSTLDLSGSRETPSSILLG

SEQ ID NO: 991484 - protein, 80 aa, Homo sapiens
LAGCDDWNELDKGLIPNNEHDLNYMPVFKMPTEDYAGDRADFWRMRVQRSGVKKNLRKSREDLTAVVSVSTKFPAYERVL

SEQ ID NO: 991485 - protein, 37 aa, Homo sapiens
TLLSLLLLMVYHQSWQHDHVVPKPFRPILGLLLDLRE

SEQ ID NO: 991486 - protein, 80 aa, Homo sapiens
LICSDLRSRRYVWSSHDTVKGSPCVHSGLSVYFYTWKTPAHLKHEDSQRPPVHAEPVLLSPQDFGGDVIRGSAESARCVT

SEQ ID NO: 991487 - protein, 43 aa, Homo sapiens
DHDPSMIVAAGRRVSPVRCMPPCYRFRRDVSTVLSSKYRYAGA

SEQ ID NO: 991488 - protein, 95 aa, Homo sapiens
RCTSCADISWLRSYKQYNISWELDVREVRNSSLRRRLILAKCDISKIGDENCDPECKHTLRGHDVCELSPYCASLRFVKKQHNGVCDMDRNWYGG

SEQ ID NO: 991489 - protein, 53 aa, Homo sapiens
KLEDPLGLPCYSALPCLDREDQEALTQMPRWMGVDEEEEDEDRRRQGRADETR

SEQ ID NO: 991490 - protein, 115 aa, Homo sapiens
  misc_feature (110)..(110): Xaa can be any naturally occurring amino acid
SGIRGCMEVPGCLGRSLLQWWSPYGKHLLGHCGREMWGWTHPMQSPHCAWPNRAVRRGLLSSSPQNGRSNSLHHVPRKATDTQCKPMCQPGGELYPAKAQGWSCPRPWEXTSCIK

SEQ ID NO: 991491 - protein, 33 aa, Homo sapiens
PVRRPLLLRQAAGDRTYILPNAADFILCPALIA

SEQ ID NO: 991492 - protein, 39 aa, Homo sapiens
MALAILNGQLSTLLGICHVGLEGLPSRPFEAPEILTPVS

SEQ ID NO: 991493 - protein, 36 aa, Homo sapiens
EPCCSAPCRPPRCSWTPPLERNRNGADRFSPCVDCQ

SEQ ID NO: 991494 - protein, 47 aa, Homo sapiens
CWSEEYRIGGVKIASNSATAFRVGSVQELSELSEQVWKLCMMPCVDC

SEQ ID NO: 991495 - protein, 40 aa, Homo sapiens
LRALGNGGDSYTVPRPGSLYPQLAGRLAAPAEQRPPCVDC

SEQ ID NO: 991496 - protein, 34 aa, Homo sapiens
  misc_feature (27)..(27): Xaa can be any naturally occurring amino acid
PAVPVAEIKNLFTKTIRSGTPPQVLRXDPKGKSL

SEQ ID NO: 991497 - protein, 75 aa, Homo sapiens
VCLRCFTRLLLSNTHRYPGFLTMLCSKLIALHHLAIDSYQEFAETYSPKDQKYSFLHDSQNSFCYSDSIPQTSKM

SEQ ID NO: 991498 - protein, 70 aa, Homo sapiens
PLYSCVTTGGHRQSHPGRSMREDVLLTHLEFENRLRSLRAEELYSFALADKTVRGECVGSVRAALILREN

SEQ ID NO: 991499 - protein, 38 aa, Homo sapiens
DPRVQLAASRSRQLTQLRASYRSRIGLRFPYYIVSMQR

SEQ ID NO: 991500 - protein, 40 aa, Homo sapiens
  misc_feature (33)..(33): Xaa can be any naturally occurring amino acid
MLSMMPHTGEREINGKPANAPPNMRMFANVPVXLPVECGL

SEQ ID NO: 991501 - protein, 69 aa, Homo sapiens
VNIQSGHTYCKLTPQRVAHTLNADAGSQRHILMHAHTRTYQTQSCTHRHMLTLTYKHSSNMHTHHACIA

SEQ ID NO: 991502 - protein, 43 aa, Homo sapiens
CGVTAIFFWSSWNDRFLPATCEESWGPAVFLASFLSSVAEAMR

SEQ ID NO: 991503 - protein, 47 aa, Homo sapiens
  misc_feature (24)..(24): Xaa can be any naturally occurring amino acid
SCNTTLEELDSVSFSGKPPWTHAXHSGGHKATLLALDLRNSAMRGLP

SEQ ID NO: 991504 - protein, 35 aa, Homo sapiens
TRQRDSLELINYGKYKIRNKDLVGTICLTYEQRLE

SEQ ID NO: 991505 - protein, 161 aa, Homo sapiens
RADSRGYTAVLYPTEIKTTIRKDSKYLYANKIENLEVGSFLNTYTLPRLNQEEVEPLNRPKTSSKIEAVLNSLPTQTSPGPDRFTAEFYINILLMWGVEELVAFLLKLFQTIEKEGLLPNSFYEASIALIPKPDRKQNFRPISLMNIDAKILNKILAGYRA

SEQ ID NO: 991506 - protein, 118 aa, Homo sapiens
LGTHMLVSALQHPLADAMAMRDIYSVFNSNGAYKTGAHAHDEFMLMVPEHGLLRYKDEERGRTTSVIDRQFVLVPPQSSHSSSSLTASQGHVAFYVDPDYMHYALRDLSGDANRLLRV

SEQ ID NO: 991507 - protein, 34 aa, Homo sapiens
AGVASNDDYDAMMIITIRMVDIYGVLANCQIALE

SEQ ID NO: 991508 - protein, 148 aa, Homo sapiens
RQRLDLGVNNVFYCTGRASDRLSRARGSIALSGSCRNTSVGRQRKAWSLACSEFFQKNTYELGVDFTSKKRRGADNKSWVKATGRNGDTVYEIDLKAAAISVVPASELTTKRERLANKTFKTEHFNPKAVNEAALGPKNQAGLSTPPI

SEQ ID NO: 991509 - protein, 36 aa, Homo sapiens
MMPGSSLPNEHELYSVSSGSLSVSPLGAALRSRTCG

SEQ ID NO: 991510 - protein, 128 aa, Homo sapiens
HHSKYVDDLLLSSPSLKDSQTHTATALLNFLAIKGYRVSPSKAQLSISMMTYLGIQLSPGAQAMTPARAALIENLPPPSSKSEILSFPGLAGFFRIWISNFALLAHPLYEVAKGPPNEPLNPSHNILP

SEQ ID NO: 991511 - protein, 38 aa, Homo sapiens
DPIYAAQTLPTAAQDALYAEFPVVSNVHATAIKGHITW

SEQ ID NO: 991512 - protein, 40 aa, Homo sapiens
LFSQEYVAFLSPIHRSGGLIKQMFRKTGRLISLSEQNLVD

SEQ ID NO: 991513 - protein, 57 aa, Homo sapiens
AGTVYYFLGGLISHVGHYEGLLKVLIEIIIYVGSTKYISKALHDIVSSLCKSFLESC

SEQ ID NO: 991514 - protein, 123 aa, Homo sapiens
LAPILGPARITGWSCSAGFLQVAAAVVAQVDDHAVDFFLLQFCQDFLNVAGGALVVRITGAERFEVQVERRDHHHAQLVVLAILLEVEDLLLDGLIFELHRFTGDGHDLAGLVVRCVGVRNHF

SEQ ID NO: 991515 - protein, 43 aa, Homo sapiens
IVLCVCAERPCAGARVVVLCVRVCCASVCAVRLRVCCVLVCVL

SEQ ID NO: 991516 - protein, 61 aa, Homo sapiens
VGREATSPSNLNLSSDAAKSDAQRQSDELALVRQQLSEMRSHVEDGVLSVAPVSSPEAPPA

SEQ ID NO: 991517 - protein, 58 aa, Homo sapiens
PDRLKSQAPAYRYLEVSTVLTCRRNYVQGGIAPAVVEYTSDHGSIFNDIYGGHARVAH

SEQ ID NO: 991518 - protein, 57 aa, Homo sapiens
  misc_feature (47)..(47): Xaa can be any naturally occurring amino acid
QLLSSPEREDAGLEVSLDVGTSVFYLLLSSVVVSCTGLALENLRALXAQIERASQAV

SEQ ID NO: 991519 - protein, 140 aa, Homo sapiens
  misc_feature (12)..(12): Xaa can be any naturally occurring amino acid
MSAAQYVYALKXVAGLEDLCLSGFMEHGHPCHPAGHSGILCDVFIGRYYTVFDRDNHRVGFADAVRLKFPMLYCAASTEYRGESQMQEAPGPSWTLPDITHITPPAPLVLGAALESTAGPMPQTCLFLFLLVFPPPLWFM

SEQ ID NO: 991520 - protein, 96 aa, Homo sapiens
LICLWSFFLPMVVSSLLSSLVIPLEEENSQGMMGGYTLDSFARLEDRDLVLTLIEIRFSRWVEAISLTLQKRPQKSPKIPCNKKVNPLDFWSPLVS

SEQ ID NO: 991521 - protein, 58 aa, Homo sapiens
  misc_feature (55)..(55): Xaa can be any naturally occurring amino acid
RRYSRSIFTSGSGVPSGRDRDVNSLKRRRVNFIKLFGALVVFDIQFHQYLWQYAXSAT

SEQ ID NO: 991522 - protein, 55 aa, Homo sapiens
VPCAIQSRVAGRRSADRSIALHLLLGHPYFDIVDHRLIDLLGALIIGGATGKNGI

SEQ ID NO: 991523 - protein, 44 aa, Homo sapiens
DSTADRHAREYLGILELISTEENTQSSRDHEEPILQPLPSTQPR

SEQ ID NO: 991524 - protein, 148 aa, Homo sapiens
FSTCRCIGGHSVGRGKPPRSASPAAALGAAVVAAMCITRPRVLRGPSNLVDGQSWQLSCSVGSDPSDLPSPRVSTSPCPPKKVPQRLRTSWRQGRCAEGLCNDCHPRAAGRVPQVLAGRRAACPSLIEPSVYTTLLWPLSLFRASPPG

SEQ ID NO: 991525 - protein, 51 aa, Homo sapiens
RIRPGRCMEEGQLLTLSQCDISLQGLWVWQAECELGPSPSSGTWWVPLFTG

SEQ ID NO: 991526 - protein, 180 aa, Homo sapiens
VHRTVVGGKSASPETGGGGMATASGGSDLSGSGAPPAGVGAQAAAAAEEEEREVVRVRVKKCESFLLSEFRSFAVDPQITSLEVQQHILIRAFDLSGKKNFGISYLGRDRLGQEVYLSLLSDWDLSTAFATASQTYLQLRVDIRPSEDSPLLEDWDIISPKDVIGSDVELAGKGSSRDEC

SEQ ID NO: 991527 - protein, 105 aa, Homo sapiens
MGRPGSSPVLWAQTRLISLVPGLIPPCPREVPQSFAISWIPGRVLRVRGNISRGRCEGSSSVQKACSLAQSDVTLFLHSCCAFPLGILSASQEPPPVASEHPPDT

SEQ ID NO: 991528 - protein, 43 aa, Homo sapiens
DGILACCLKELINFLLNFWGYIRYLVEQREAWVPPFFNHVEMC

SEQ ID NO: 991529 - protein, 52 aa, Homo sapiens
MGWSDVRHYKQWTFNYILPGACKSAHHVPVCVLGNYRDMGEHRVILPDDVRD

SEQ ID NO: 991530 - protein, 48 aa, Homo sapiens
CKNGLSSKEKEGSRGEEDTGQEEGGSRREPQVNQQEVQQLMDMGFTRD

SEQ ID NO: 991531 - protein, 68 aa, Homo sapiens
KNKRLRCVVCELDVPGPASRDVVQLQVPGEMIPLSVQEVEGDADLGRVQNLCVLLQGSFLLPLQVNPR

SEQ ID NO: 991532 - protein, 33 aa, Homo sapiens
MDGTIKEALSVVADDQSLFDSAYGAAAHLPEGL

SEQ ID NO: 991533 - protein, 39 aa, Homo sapiens
RGELQERAALNCWLYSSVGTGERKSSEAVGSTPVASSAY

SEQ ID NO: 991534 - protein, 44 aa, Homo sapiens
  misc_feature (12)..(12): Xaa can be any naturally occurring amino acid
  misc_feature (15)..(15): Xaa can be any naturally occurring amino acid
MRQITSARLLRXLQXRQVVWVRCGAPQVQGLQGRHRWELPELCM

SEQ ID NO: 991535 - protein, 55 aa, Homo sapiens
PLQLGTEVTEKFVKGHEPSGMAPRHGVELTTAAACEDIIIDTSSVVMTIDEETDS

SEQ ID NO: 991536 - protein, 53 aa, Homo sapiens
DLRIRVGRWVCTGRLHVLGSRCGLSTPGLEARPGRWRQVLDSSSVLVSLQVNP

SEQ ID NO: 991537 - protein, 40 aa, Homo sapiens
PQWHREERQDIRSEKRKAGVLIMQALVEICECPCSRSIMI

SEQ ID NO: 991538 - protein, 79 aa, Homo sapiens
LVHCRALQKADIGELQMLLPDRSSGGFVSEEYPAVWGASLPLLGGASQLGYSGVRDPLEEAVCLFSDLQLSARNPRVPS

SEQ ID NO: 991539 - protein, 79 aa, Homo sapiens
LLKAQDYNGYTQEIDNARATTRTEGFFVLINNRKKNFGTNTWRRHLSDLEQRLDKSQNDQEASRYNLQTLLDILDVKDL

SEQ ID NO: 991540 - protein, 102 aa, Homo sapiens
RSRRRPAEDVEERHQVFLVGALDEDVALGRQRGARPAGGLVAVVDGPVRVAAEGLHALDEDDAVRLDGDDGAHLLQDGDEVHDLGLDRRVAELGHPVVWSGY

SEQ ID NO: 991541 - protein, 38 aa, Homo sapiens
  misc_feature (3)..(3): Xaa can be any naturally occurring amino acid
QIXIIDIVRELARRVIRYAVRYPRVYNAIITFDIGGSG

SEQ ID NO: 991542 - protein, 170 aa, Homo sapiens
GVTALIVSADQFEVTSSVLRLYADIEVEQQVSCSVDTAGQEDYIDCGSPPPDTDVILMCFSIDSPDKPGKHSCEVDPKRVKHFCPNVPIILVGNKKDLRQDEHTRRELVKMKQEPVRSEEGRDMANRISAFGYLECSAKNKEGVREVFEMATRAALQVRKNKRRRGCPIL

SEQ ID NO: 991543 - protein, 33 aa, Homo sapiens
MSRPHEVLLPPPEYTLLPAPDTECSPDDLVVIE

SEQ ID NO: 991544 - protein, 139 aa, Homo sapiens
MEPAHVSGPYGPPPRVSSGFALCKEPTRVGSLHTWGCMGLLQVSLLTGLEELCGWAPTCSPLGQGVVVPFPLLRLHVGPTLPWLCWEVIFPPFMSHLQPHFGGISSLHLQEKIQSSLCECDDPESLHTVIILEQQDVKR

SEQ ID NO: 991545 - protein, 31 aa, Homo sapiens
MSHAESLRISVEVLLTTRTAYPSSTAYPSST

SEQ ID NO: 991546 - protein, 49 aa, Homo sapiens
MGRREVGPEVGDPVTFHRSYLKSSPDLFFKWVQEVYRATDKQGYSALEG

SEQ ID NO: 991547 - protein, 45 aa, Homo sapiens
LAEFLRDARSVKLLNMGSPVCEDVTDTLKRFFRELDDPVTSGWNP

SEQ ID NO: 991548 - protein, 107 aa, Homo sapiens
LEDAKETGRVFSDHYKRKELGVGGQRELTQLLLLLRYIYWIQVSDLHAQHTYLACPHGHIHIHTPTMHTEAHTDMHTYTQLYTTPVHNRCAGMCKETYTDVHTQQNP

SEQ ID NO: 991549 - protein, 88 aa, Homo sapiens
GHTKFYNAKTQALLTPKKGYREHHIPCMLTRLTRQGTELSFRVMQRYGNGQALEPCKGEPTVAPPTAQGLPQCLCTSTMAVAEGPGSH

SEQ ID NO: 991550 - protein, 38 aa, Homo sapiens
VVPEVVVVGHVGGRSVGASDPAQKRMNSSPDTKVRKSV

SEQ ID NO: 991551 - protein, 53 aa, Homo sapiens
RGREQVSSRTEVVFGSASVTPPRRADTAPPSPGEAYPITPARYLQGTHLQGTH

SEQ ID NO: 991552 - protein, 40 aa, Homo sapiens
GIVLVLKPDVQCDLLGLACCACHGEVCSALNLCVVSPVST

SEQ ID NO: 991553 - protein, 34 aa, Homo sapiens
MPLNRSLAEPKAQIWSQCIDGGHLPGSVCLQGSH

SEQ ID NO: 991554 - protein, 108 aa, Homo sapiens
MRLVNRRGKICTSSVIRLYKLSAYMIMPVVGSDSEGNNDYDWLIVDIGAVNCQYRVINWMQALCRRIHVIMLRNTNIRAANTGDYIGPSGCEEFTIICCDFLSRACRA

SEQ ID NO: 991555 - protein, 46 aa, Homo sapiens
LVLLESFFILESTTLEMTSDSSWPAHLCEPHLIIGYNVVYMAFLLA

SEQ ID NO: 991556 - protein, 36 aa, Homo sapiens
IYSKVFILLNNCLPYGFFSDLLGFFIFFLYIKVFKV

SEQ ID NO: 991557 - protein, 37 aa, Homo sapiens
RPSSAIIQHLQKTNHAAAVLGLTDTPYRLGKGWIYQY

SEQ ID NO: 991558 - protein, 70 aa, Homo sapiens
LSASAAAQETCCEITCTLRNPLRQQNAPCSEQGLTARLRGRRRVSANALLPLHCPSGRNLSRAPMDATTL

SEQ ID NO: 991559 - protein, 40 aa, Homo sapiens
RSRGYLTAVQQDCVTRTAVIECQCRSGFVLHDNKHSTSTN

SEQ ID NO: 991560 - protein, 154 aa, Homo sapiens
TSIVPAEPRWMTAMTVVMEPVRLVRWSAFFREGYPGRGGLGSIFVWASGNGGREHDSCNCDGYTNSIYTLSISSATQFGNVPWYSEACSSTLATTYSSGNQNEKQIVTTDLRQKCTESHTGTSASAPLAAGIIALTLEANKNLTWRDMQHLVVQ

SEQ ID NO: 991561 - protein, 69 aa, Homo sapiens
ARQATLLGCLFLWLGAGGGAAVSWPEGWQFFLCSACPVLCLEHSHLRVPCFFPAAVPWALIPPSGEVLG

SEQ ID NO: 991562 - protein, 69 aa, Homo sapiens
MRLMKPGVGEGVIVLLVEATCRALVHPGCDVVSTSMSTSLLNVSTVGTTFWLGMEEPDHPDCRWALTPY

SEQ ID NO: 991563 - protein, 150 aa, Homo sapiens
ATEYAVCLLVWGSGADERLPGQTVIRVYRDCVLQCEEQNRSGGALNHFRSRHPIYTHVKQAAPFVTTVTLTCMWVTVGLYLQEGHKVPQFHGKWPFSRFLFFQEPASAVASFLNGLASLVMLCRYRTFVPASSPMFHTCVAFAWVSLNAW

SEQ ID NO: 991564 - protein, 34 aa, Homo sapiens
EHDTIVLADTMRSPIECSEVVQRSVTYNLIQQIL

SEQ ID NO: 991565 - protein, 40 aa, Homo sapiens
MRIPYAALYNTALHDSGIGSTNVKREETRPHQPNIKDHHR

SEQ ID NO: 991566 - protein, 65 aa, Homo sapiens
PSLSSVLASPCVLASAVVLPSPVWLPSLSLPATFITEFALAHSWNPFAYLQHQIVSAPSFVPRFL

SEQ ID NO: 991567 - protein, 65 aa, Homo sapiens
MYALTQGRVPIIGVGGVSSGQDALEKIRAGASLVQLYTDLTFWGPPVVGPVKRELEALLSEQGFG

SEQ ID NO: 991568 - protein, 42 aa, Homo sapiens
RGSCRECRFYRLPVEKIETAKYFSRKVRVASDICKEPTRYRA

SEQ ID NO: 991569 - protein, 38 aa, Homo sapiens
SESLAGGRASGTIQVSRKVLGPLGQELCGPLQLLQAGA

SEQ ID NO: 991570 - protein, 132 aa, Homo sapiens
DSRGSTLPTVSYLLNHVLENSPLVDVINVLEREGTRGCGSGNEQRSHSFFSSCWHSCCSQDQFSEPAGRQPQIQIQPSVFQGRRTECRKPPGEQSHCQDHHHRECSEHHDEQDLMRSGMGEAMMQRQEPIEG

SEQ ID NO: 991571 - protein, 160 aa, Homo sapiens
MPNLSTACNEQVHCTRQRGPPHMYMLNPHACGKGAATRLCRRQRGPPRMYTLNPHTCGKGAATRLCRPQHGRPRMCTLNPHACGKGGSYTALQTTAWEATYVDVKFTCVWYRCGYTALQTTAWEATYVHVKLTRVWYRCSYTALQTTAWEATYVPVKPTR

SEQ ID NO: 991572 - protein, 35 aa, Homo sapiens
FFFVRVVRHPRRALEAKGEKLAHLFMVAAEGGRHK

SEQ ID NO: 991573 - protein, 31 aa, Homo sapiens
MGYPSESVMTIYSVYGKSEKRLLDRYALIAR

SEQ ID NO: 991574 - protein, 53 aa, Homo sapiens
RDFYYLIRLAGFFQVLFQVPGHYPPFFGSKTSRTRRPIWRPCSYGALEDIISV

SEQ ID NO: 991575 - protein, 40 aa, Homo sapiens
DWQFGQLGQHPMDGYLSHTERAPRRAPLIPDGALHHRAFS

SEQ ID NO: 991576 - protein, 107 aa, Homo sapiens
MPHKKNRAGIRNPWVTDWYQTMACEEPGHKAGDEWWASEHYCLSSTLSDQLVALDSHSSVNPIMNCAREGARLHTPYENLMSDDLSLSPINPRWDLPVAEKQAQGSH

SEQ ID NO: 991577 - protein, 50 aa, Homo sapiens
  misc_feature (38)..(38): Xaa can be any naturally occurring amino acid
RKRLSIVVLPGAYSTAVSINDQYTTIHEQYNSPQAESXSAVRIFKYTGQC

SEQ ID NO: 991578 - protein, 73 aa, Homo sapiens
SRRIPPVSRSGTSGLFGSIFLFKFQVYMQEVQLYNIDKGVSGGLAAPINPLPKYYTRCALAICPDTLPKSART

SEQ ID NO: 991579 - protein, 37 aa, Homo sapiens
RTYTIELIPLVQAALPGMQERKFGRIVMMSRAARWAC

SEQ ID NO: 991580 - protein, 164 aa, Homo sapiens
  misc_feature (164)..(164): Xaa can be any naturally occurring amino acid
DYYTLYKYTPLSMYTPLYNEHTTLHTMYTPLSMYIPLTMQHTTLHTMYTPLCKQCTHHSTMNTPLYTQGTHHSTMNTPLYTPCTCHSTIYPPLYTQCIHHSTMNTPLYTPLYNVHTMLQMNTPLYTEHTTLHTMYTPLYNVHTTLYTMYTPLYNVHTTLRWNGX

SEQ ID NO: 991581 - protein, 126 aa, Homo sapiens
  misc_feature (14)..(14): Xaa can be any naturally occurring amino acid
VELVPVEEGAGCGXVTSPIAVFNIGNNGEEVLEIASNIRKVARVPVQTWEGWDPANLLGGWFSNLGGFKMLVGTVIFITGVLLFLPCGITIKTLVETTVNLLTIQMMLLLQRHDGYQPVSQEYPKN

SEQ ID NO: 991582 - protein, 35 aa, Homo sapiens
  misc_feature (20)..(20): Xaa can be any naturally occurring amino acid
SSKLFCDHDSHGGPPGQALXAHAVTMTHVEGTCKA

SEQ ID NO: 991583 - protein, 64 aa, Homo sapiens
WLSRGSRYASQDYSMLIFRISRSRLSESVTVISITVRCSFPIAKVKSPIFCNKLFGMRPSHKCL

SEQ ID NO: 991584 - protein, 89 aa, Homo sapiens
HRKKGLVELPQFRVCLSSVLSSGGSPFMSKQWVVTGSEVGPAEPKEIEQIRKPTPTPKVSLLSEKLKLLGAVAHTCNPSTLGGRGARIT

SEQ ID NO: 991585 - protein, 192 aa, Homo sapiens
FIDATSAASSEGGALFVQGPYEGGHCWQNPLAPVAREPSVLYTFCKLLEESCIFGCLSISDLELVIAVCSLGTVAGWKTYTAGAWSAQSSGRAGLRPHLREATVPLSALSPTVEILKLACQQAGHFFDCLLPQGPLAVKAVGITIGKLSKVDCQLQLGCGGCKFPVGGPSWGQLENDLLNMTFHGGIDNHGD

SEQ ID NO: 991586 - protein, 90 aa, Homo sapiens
IELGTYAAQDMWVLVQEGSTSRQDADAAGGSVPLTIVSLVLIVSTKMPTSPMAPHCTVRPGRPSCRLFLTYTLHGGIGKAVVALSRLPHS

SEQ ID NO: 991587 - protein, 101 aa, Homo sapiens
  misc_feature (83)..(83): Xaa can be any naturally occurring amino acid
MGMMDVANEHIMDFVVSSINLNYLQGVYRCHIPLKEECDGDVACFFRALPLKPLGEHTDGQAVGLRTPRQCLGVNVYELMPQXVYVTGYFFSLAIHGGINK

SEQ ID NO: 991588 - protein, 40 aa, Homo sapiens
YSSRIPSPSCATLPGDGDCNGRFRLTRHFAGATRCDLGRA

SEQ ID NO: 991589 - protein, 117 aa, Homo sapiens
MRCHLYVNLPSSLGQGSPKASPEKTLGNRLPFLRGGTSKYHGCVFLSTMVKISIFGFFFLHPNFAFGISNSCSVFLFLFPCLFWLIFFYGFSVFNFVDLCSYFFPSAYFGFNWLFFF

SEQ ID NO: 991590 - protein, 53 aa, Homo sapiens
SKDPVFIDATFAVAFNLGRAVAQVEVREVGLGGGCLESQLLRRLRQENGVNPG

SEQ ID NO: 991591 - protein, 34 aa, Homo sapiens
GYVITQQRPPVCGTWLACARTDVPACCRIWAFDL

SEQ ID NO: 991592 - protein, 146 aa, Homo sapiens
SLTDRNTFSTVGSVEKEVFFMVSWTADPWVALVVWNDIVDKEKQGVLSSEMNSLPDHEVELTNCETEGTRYFFRSRSPIRALGAFSTITGTRPGYFFRIFSPSERRYSNGCSSVYTNFILPGTVVYRAGLREPRVAGTLLDSHLLF

SEQ ID NO: 991593 - protein, 43 aa, Homo sapiens
LPSISTGQKAAPCSKAQKGQKAPAQKAPASKGIWQESISCIDK

SEQ ID NO: 991594 - protein, 39 aa, Homo sapiens
KSSACTPDEKRACLTAWIQRWHVDDEPSCGTGCVDALLS

SEQ ID NO: 991595 - protein, 175 aa, Homo sapiens
YYQELEEMRIYAESQTISTILSYVPEVLLLLILYSETLQYVVEQQQKSNLELLRMSLLPIESWLEPVRFLRQYIRQQDRCMTPRDSDDYHLLKELEEGIQNAYEEAGIQKAGDLGKILKQTYRRSLTQTRNNHYALVKNYGLLYCFRKDMDQVETFLRMVQCRFCVGQPVELINT

SEQ ID NO: 991596 - protein, 38 aa, Homo sapiens
MISGRKYVAARPSHVRIRHQAHHSTGTEWCIYPTYDWA

SEQ ID NO: 991597 - protein, 36 aa, Homo sapiens
YIAGTHDGSSHGWLYVHGCGDGRAVAASFLQANRGL

SEQ ID NO: 991598 - protein, 45 aa, Homo sapiens
DRELPDMMELPDHPWFCRRPVPPGRFTVHPCVTAIRCSPCYILRR

SEQ ID NO: 991599 - protein, 43 aa, Homo sapiens
LRARIDMQAENMWLRDPVMYRIRHQAQQSTGTEWCIYPKYDWA

SEQ ID NO: 991600 - protein, 171 aa, Homo sapiens
YVPIVDPFLSLFVVPVLAISVSSSPVLVSLSSVSLFSFSFPFFVPVSFPLSFPFSFVVSVSIPFTDSLSLCVFLSCRALTRSLSSSLSFSLSRSARSGPLVSHRAPRLVLGSRSLSLPFHLSYNPVCRLNVPLFFHHAQARHSFPDVELVSLVFDLSLFQDIYLFQDSYFE

SEQ ID NO: 991601 - protein, 47 aa, Homo sapiens
MFHSLLLMMFGKGSGLGSTFEFGTGGTSGGMATIPNLDSHSSLVNNS

SEQ ID NO: 991602 - protein, 39 aa, Homo sapiens
YVSRYPSWCILTNNQDDAHSSYKYGFCSCELQSYKFVSG

SEQ ID NO: 991603 - protein, 35 aa, Homo sapiens
IRNIRRMSDDSSVSSYVNDVFYLYSTGISHNAIAR

SEQ ID NO: 991604 - protein, 73 aa, Homo sapiens
MFSSRYKAIGVHINMHECRIISRFSGRNKKEICSKTVSLEFCQELEWMVLTIAESCLCSTCVSQAMGLVRLCQ

SEQ ID NO: 991605 - protein, 81 aa, Homo sapiens
RSRGSSALTHPNQCNYLVQLKFRRDGEHRVVESFESLSKQDQDRKAQKQRDKKDATEDEGGGGDGVIPLDGAQLWDDVVAG

SEQ ID NO: 991606 - protein, 107 aa, Homo sapiens
SRGSPALHPPRGCSFQLGECYAGPRRGLLSVRPATSWALLREGPSACCHPLCSQAQALPPARTGETDGKLGPGEYLEWTRVTVGDKDPSPSVTVLNLQGWVGLDQLA

SEQ ID NO: 991607 - protein, 104 aa, Homo sapiens
MTGPVRNGGSLDEPGAFQELNEDSVHKCVLAESLHQHHSLLPQHVQHSRDVQHLIVFQAGDHDLRQNHHASPSYPSTAVDQQRRVGALGITCAICMASNRLDLF

SEQ ID NO: 991608 - protein, 102 aa, Homo sapiens
MCAKQSSHFLLYLPKKLEIQVYTITLIENCNFDPTSEITYETHEGQEIILKKVLTVCLKQTSTLLNFTSSILYGKSQGSFGTHEFTSRDTVLGFSRRGGSSL

SEQ ID NO: 991609 - protein, 70 aa, Homo sapiens
GTLEDPPYVCQCDDMAAAAEYKEHASTGLMLQQHGYTEVEVAKDVFSYVLRTQEQEKMQKTNCHQINVNS

SEQ ID NO: 991610 - protein, 107 aa, Homo sapiens
SSIMCASARGVLRYAVCVCVCVCVCVCVCVCVCVWVHMCVCACVCACVWRVHMCVCVLLCVGAHMCVCVCLCVWAHNVCVCVPMCVGTLIGGHRAQTAHHVDIAIPC

SEQ ID NO: 991611 - protein, 34 aa, Homo sapiens
ELQAPANYACGIIFWYFKKKAGFGLCWAKAVINE

SEQ ID NO: 991612 - protein, 102 aa, Homo sapiens
MPVMENIEPTFVITVRCVSRGHYLRVSFDSFISVSPGQFAELTFSSLSLSLSLSFSFILFYLALVYPNIKAIIHYLINGSVLFLFKQFFMLAMKSSWGCVVS

SEQ ID NO: 991613 - protein, 69 aa, Homo sapiens
NSRRLYNRYTEFSTVLTVVDGTCTAQACTVMVNTRRPGSIFTILREVITVLTCRRNLSREGMHRSGEYT

SEQ ID NO: 991614 - protein, 81 aa, Homo sapiens
MGLKPIWLPTGLTLTPSSHNNSHGLSSLSDFRYSPHFFGQALARNLTSLNLSPSHLQYVDDLLLCSPSLKDSQTHTAIQRL

SEQ ID NO: 991615 - protein, 140 aa, Homo sapiens
GGNSDCKRDRSPDTVHCALHTHRHTHMTHPPQHTHTHTHDEHTRTAGNTLPQAAPEAAGFCSPRLIATGERAAHGHAGGPMLCHHKGSTFGETRPHTCPRTPECWDPALSRRRSVLRFLPSWGFFLLLDPPRIPASGERP

SEQ ID NO: 991616 - protein, 69 aa, Homo sapiens
  misc_feature (1)..(1): Xaa can be any naturally occurring amino acid
XEDPGPVNVRKCALYVVQDISGRMSRKGMRIRVSKDAWVEGKHFWNTEFGIFYKEGIELLDSGKERRGA

SEQ ID NO: 991617 - protein, 45 aa, Homo sapiens
LGVNHSSVTESVVLARTCGGEGHRRWFPVRAGRPVETQVQDNTWI

SEQ ID NO: 991618 - protein, 47 aa, Homo sapiens
GCLLLLRMDTPDVTRFTCLARGHSPRKNALQHLEPEPCRGVRAASKE

SEQ ID NO: 991619 - protein, 124 aa, Homo sapiens
MGEPLFLHSAEGSEFWSALLEKGIAKINGCYEALSGGAPLRASKTSPETLLEWYELRKPPPNLFKIIQKALKNGSLLGLLHQTSPAPGTSRAITFQRLVKGHAYSVTGAEEVESKRKALQKLIR

SEQ ID NO: 991620 - protein, 68 aa, Homo sapiens
ATLLYLYVVAKLYGQALSDAVESGRLHLPSKDTGLYEEVLMPVVARPCFTSECPWDMKSLTPHFGDCC

SEQ ID NO: 991621 - protein, 43 aa, Homo sapiens
  misc_feature (4)..(4): Xaa can be any naturally occurring amino acid
  misc_feature (11)..(11): Xaa can be any naturally occurring amino acid
SFPXVCAIRTXIISGLVVNVTHVGEHGIKSSFWPYTLKQRGSS

SEQ ID NO: 991622 - protein, 77 aa, Homo sapiens
ESVPDDERTQESPNRELCYTARSLLSRGLDSQKSKARPPLRADQRNSDISSPILPYQCAPPYLLLHPISPPPIYSPH

SEQ ID NO: 991623 - protein, 81 aa, Homo sapiens
ILLTGTCGPVHRMHGQWAREHARLDNCSGQGRSNKGLLARIFGSPSASESMEGPSLVRDSSGPGLPLTLPGPVLLPVYLIL

SEQ ID NO: 991624 - protein, 66 aa, Homo sapiens
SVKDPSDLGLDLSEVYYPIQAHRNKSYNFKKVLWKRILFLYFPCGAVGDEGPVYDYWERLPLIYIL

SEQ ID NO: 991625 - protein, 35 aa, Homo sapiens
YLAISLSKLQVLLYSLIAVPLTDSKSYDSTIMGGN

SEQ ID NO: 991626 - protein, 47 aa, Homo sapiens
PGLNLVPDEGDRMHSFSPLACRKRNCRMTFALPVSICVDTDDAREHR

SEQ ID NO: 991627 - protein, 45 aa, Homo sapiens
MLHPECSILMLHPDAPPCCSTLMLHPDAPPCCSTLMLQAGYLCSE

SEQ ID NO: 991628 - protein, 46 aa, Homo sapiens
MNRASIEPGMISSNVGDKELFVLIAETVPVKLSTNTLPVGSDSVKQ

SEQ ID NO: 991629 - protein, 56 aa, Homo sapiens
SAFVMELSHHSCPHCEMSIQQKELDLLEPQVVEALAGGWVLSRRHVFLALESEGSL

SEQ ID NO: 991630 - protein, 159 aa, Homo sapiens
QLLPAVALPDDPSTLTPSSVPHTLDSRGIPPCAGAHQLSGASLRGTGLMEDYGNPRAPQAPLHSVVQQLHGKNLVFSDGYVVQETIGVGSYSECKRCVHKATNMEYAVKVIDKSKRDPSEEIEILLRYGQHPNIITLKDVFYDANTCPGDRADAGWELL

SEQ ID NO: 991631 - protein, 118 aa, Homo sapiens
ECMIYTVKGIAYYIISKGYEDQLEAWRSHLNDRVIQLFFLWHQSHKIRRDVPAGCVSAQCCNLLLQTLDEQSTEQGGAPNHQRLLWVHEQGGPQVMVSLQQYQRLETHEHQSWIIKPC

SEQ ID NO: 991632 - protein, 72 aa, Homo sapiens
QNSGGSNINHPFLEALDGWWGDRRGREMPWYLTIYGLDLQTQKLWLHCYICPYMSLWVPPTQCGNCHSFTQA

SEQ ID NO: 991633 - protein, 48 aa, Homo sapiens
RVYLTLMLQQGCIMPGSDREALTIEPPNVGVVLTLRFTGEARTLARLG

SEQ ID NO: 991634 - protein, 39 aa, Homo sapiens
DSSSLFLPTVSHCSKEEGNFKQEWVALHTPISISELLVT

SEQ ID NO: 991635 - protein, 46 aa, Homo sapiens
CGHGDKERGQSGQWKRRIQRTLSLEQRLKEQMGESEGSLESLKAVW

SEQ ID NO: 991636 - protein, 41 aa, Homo sapiens
MFSSTLSAPCGLYSLADAIWGSSFGEDRLSPADSSRRDGPQ

SEQ ID NO: 991637 - protein, 45 aa, Homo sapiens
TGVEVKIQLHTGETLVLPGVLQCSGSALCYSELPIRTLQAEARTS

SEQ ID NO: 991638 - protein, 85 aa, Homo sapiens
TAIYNYVVFLYAFQPSPICNGPVYCLVKIVNMRPCGFSVFLGEKVLGESQAFEPNSHDYPDPILGNLLLLPANDNTLSNGDSCKW

SEQ ID NO: 991639 - protein, 78 aa, Homo sapiens
GEGRQAERTQSQKWVGWREWGRGVEPEQGHTVEDHDALVEDHDAVEEGENPRGQRTAGSHRLGLVGGSDGSMSQVLSW

SEQ ID NO: 991640 - protein, 37 aa, Homo sapiens
TVTLICLYGPDLLQTFTLHSPITVQEKSSTVCGFVRI

SEQ ID NO: 991641 - protein, 61 aa, Homo sapiens
TVQEKTRVVCFADSNPPAEYSWTINGKFQLSGQKLFIPQELLQIIGGSMLALCVTQPVARL

SEQ ID NO: 991642 - protein, 65 aa, Homo sapiens
DLVREWSWKGIMLLVFISHMGTSSMCGQYVCHINERRQMGDLQGPEGVCLRRSLSMDLGYIYFYQ

SEQ ID NO: 991643 - protein, 42 aa, Homo sapiens
CCCYDLEDPFLPAIEEVISSMQLSSLEWSLLILQSSLICTVV

SEQ ID NO: 991644 - protein, 39 aa, Homo sapiens
VCRPVMATTAPGAVLPQVVLIAAAAPDAPGLSYNFAKPG

SEQ ID NO: 991645 - protein, 95 aa, Homo sapiens
MGMMCSGLLCTGLTEPAPERYSARVAVWLSRSNREAQAEAVGEDEPPQRLKPQRQTPPGLLLPASWASLAYSYLPGPLHSCLGGPYEGSPAPRTH

SEQ ID NO: 991646 - protein, 32 aa, Homo sapiens
MGLWFLEHKHPMGVDSAIRRRFEKRIYIPFSR

SEQ ID NO: 991647 - protein, 64 aa, Homo sapiens
MRSMQNVEHVYTEIRMYKKKLCLKPGILQKLLPLTVIAIPFKHTSLPPTGNHQVPYTQRKALGE

SEQ ID NO: 991648 - protein, 35 aa, Homo sapiens
TPGIPVRASLGATSADCDWLDMCTTSARSFDVHCH

SEQ ID NO: 991649 - protein, 173 aa, Homo sapiens
VTSRDVVGEILVLKCFSYMSQEKKFSEVASLSDETNSIDVLSQPWNEPPVILSMVIHMLSYGRGIARAMVLMQWGAVLHMHRTVKTMWYLHLSVADLLCCLILALLAGSLGSPGKQCPYVRFLCNLIPSIIVLNIVCQCLPALLSLAWYRCLVLYKANLVSDIIASVGMDCSI

SEQ ID NO: 991650 - protein, 37 aa, Homo sapiens
MQTGDLKGHAQEQKVAVYRRPRHEDGVMGTSNQQLDN

SEQ ID NO: 991651 - protein, 56 aa, Homo sapiens
TQPLSWTLYAMSPPICMAHRSTPADTLIDTRGTPTVANHSPVSGFLTKHSFKSTIP

SEQ ID NO: 991652 - protein, 43 aa, Homo sapiens
ESTHNSCNLIGYPGANALGSPEVKCESIHQIVEYLRWAMRGLP

SEQ ID NO: 991653 - protein, 43 aa, Homo sapiens
CYHSILTLKKTQVQRRKEAAEEDRESVWKASSTCNVAVMPLAG

SEQ ID NO: 991654 - protein, 61 aa, Homo sapiens
FLALYTSLDFVGSGKVDHTVGQKHLTFRHAYHMTAFVGSNRFVNADRSARPMSSLADLSKP

SEQ ID NO: 991655 - protein, 55 aa, Homo sapiens
MRALTVQRVKFAMDLPLLKRAGQDLAEKTKNFVSRSLVIGEVLSMADIATEVRLG

SEQ ID NO: 991656 - protein, 45 aa, Homo sapiens
MSCSASRGIVTDLPSRALVVGRQVSKGARGVQVPGGILARWKYQA

SEQ ID NO: 991657 - protein, 54 aa, Homo sapiens
  misc_feature (51)..(51): Xaa can be any naturally occurring amino acid
MLLGFSSADLIVVLCLAPPENMMGNGTPSYHSPGSFPQQQFGALEWWPDLXHSQ

SEQ ID NO: 991658 - protein, 34 aa, Homo sapiens
SRMATPAGERRPLPGSGHRTSRLAAGKGLRSCGK

SEQ ID NO: 991659 - protein, 39 aa, Homo sapiens
VAIGFRVLRRTGTCEQVPHQVPWIEKAPAHLSLPDLSKP

SEQ ID NO: 991660 - protein, 49 aa, Homo sapiens
MPVSVPHVYVLRTRCYFRRGYQLSDVDGVTLLKTIDRSGALSHRVATSA

SEQ ID NO: 991661 - protein, 47 aa, Homo sapiens
TPISSWYRRRRSCVATRSPLSCLIIMCEQIPSIPSSLEDLPLCPTDI

SEQ ID NO: 991662 - protein, 40 aa, Homo sapiens
GLSRLMIVLHIVHHDVDLVHVAAHHNLSNGDDVGMLGLED

SEQ ID NO: 991663 - protein, 34 aa, Homo sapiens
VHLGDGKAGGLGRSDERDTRGFISMTIMRAFSGL

SEQ ID NO: 991664 - protein, 81 aa, Homo sapiens
TWCPADGWEPSADTGEDKDGTVYQRTSGGPRGVYNKGGPFGSAKGDIFGIPTQWIWFHVFASCRHHELMPQTTTMSNPCAC

SEQ ID NO: 991665 - protein, 120 aa, Homo sapiens
GLYPTKRRRKQEHKAQAGLAASSCSAPIYSVGDCQARQAPLHQAQGSFDRGSDLQRLSRGLKKFLPGLHPTLALPKKDPTCRRPWLCLALGNWALASFCHGLSFGLGPLSWKIVGSRPLS

SEQ ID NO: 991666 - protein, 76 aa, Homo sapiens
PVDQRLQELTASLFVYLSGRSSSVPVGLLDLVLHTYITPVIPLTATVIPITYRPGDLSLSSLKIPQLVLFSSHLHP

SEQ ID NO: 991667 - protein, 74 aa, Homo sapiens
MPNCGDDRWTMRSGVRLLALSLCRNDAPFSWASVAMGREPPLSEYQFLSCPVTQRWFNLESDLMELHAVYQRYW

SEQ ID NO: 991668 - protein, 98 aa, Homo sapiens
HASTSHNPDDHYSYDGVLFQAHQPTPQHAGICSLFPLHQANMKPGIRPPKQAEAQEVSPGALESFQEANEVNIYSRLQDMAVSAFPRAPRLATLRTHA

SEQ ID NO: 991669 - protein, 52 aa, Homo sapiens
CHSERIPLVSLLLCSLSVVLVTVTDKFHATMDNMLFILPYYYKAELGSMFGS

SEQ ID NO: 991670 - protein, 33 aa, Homo sapiens
HVSLSGHLCPATASGQHSIITCRQAIPDAFPAA

SEQ ID NO: 991671 - protein, 82 aa, Homo sapiens
LADYGARTTLVPLDVSLSGPSAQSCRSVAGSPSWGWQHVSRRSIQAARTRVVMGSRPSQQAPPCHHTAQAAHSHRVPDARHF

SEQ ID NO: 991672 - protein, 57 aa, Homo sapiens
LLCTLCAILLHVHACASAGLGPAACVGLGFLVCVSPCVSSPKQRITWGPGSSHFCPP

SEQ ID NO: 991673 - protein, 62 aa, Homo sapiens
VASQQAPPSRRIAVWQQIKGFGQFMACIPNSCSQALHDMGPINPLMVPHLPSNFMFPCNGLL

SEQ ID NO: 991674 - protein, 43 aa, Homo sapiens
MGLWGQLRKVAAPPVVWNDACAGALLLVWMRGEELQVVSCVLI

SEQ ID NO: 991675 - protein, 40 aa, Homo sapiens
SVAEHRKRKGLKEGILPWTTSWTNCRHALPAAPAAPGTRS

SEQ ID NO: 991676 - protein, 43 aa, Homo sapiens
LWIKIPCTDYMGSCTFEHFCDVLDMLFLRGGPAQSPCVPMGFL

SEQ ID NO: 991677 - protein, 52 aa, Homo sapiens
MPVLYALRLALPTPLGVCLPTAPRPPGPTPTRLYTVPTGVHALRLQIILDHS

SEQ ID NO: 991678 - protein, 66 aa, Homo sapiens
GAWAVTGPGAQLGLFVKRVLEWWCGPSGCPAPGACSPGGGGWNKSGGSDPALRGVCAPAHPPGRVR

SEQ ID NO: 991679 - protein, 49 aa, Homo sapiens
MEGDAELRGYSTGPHPTPAPMQHRIGVSLSHDQPPPALKKRPYQGKKGR

SEQ ID NO: 991680 - protein, 71 aa, Homo sapiens
GGDISNRQFLSINKPQFLQGLGEIGSGSFFSRGNQRVSKVFYFYPLGGLWGLEISWAEKHYWLDNPKSPVV

SEQ ID NO: 991681 - protein, 38 aa, Homo sapiens
TSYDETWTIGDDQATDLLQVAAHEFGHVLGLQHTTAAK

SEQ ID NO: 991682 - protein, 47 aa, Homo sapiens
IPIQAQAVWAASGSQGVGAGCKHGAWVASILPHNVSNHSSSFNASLV

SEQ ID NO: 991683 - protein, 50 aa, Homo sapiens
RYLYQRELKSSLQEAYRLGMKGDFGGWKGEQLLVIGYGMNGLDVTKLVSN

SEQ ID NO: 991684 - protein, 60 aa, Homo sapiens
DSPKAVNECSVCVTHSECDLSRKLGVLMLVGSLSMLLVVIILTLDVDIGEPGTFTSHHFN

SEQ ID NO: 991685 - protein, 126 aa, Homo sapiens
IRRRIRHCDLKAYLGGYQNGVRERRKGSNEAMALCDSLTGKKPGVGFENAQALKRIREQFSKMVPARGQGGPGVQLRLIEGGKKGAKMIMAKNADIRDTKVLREALALADLVLDSANPIGEIVGPA

SEQ ID NO: 991686 - protein, 80 aa, Homo sapiens
LVRYTRHSAIIKSMRLTNLSWTFTGLRSQTSWMRYNHVKPMNPMHSAQNMPIYIYPQFLIPLHTHTQYIYIHISQLKYFQ

SEQ ID NO: 991687 - protein, 35 aa, Homo sapiens
MHTGAHAVAVFWKALIALSPPSTFGNCSGLLQCAS

SEQ ID NO: 991688 - protein, 41 aa, Homo sapiens
HRLTWLVDAEKWPTSSFRLKVGDAVQERVTGQERVTGGTEL

SEQ ID NO: 991689 - protein, 43 aa, Homo sapiens
SVLYGSPVVALGCAVVYTCCRSVEDLPSPAAAVFQPPASGWGC

SEQ ID NO: 991690 - protein, 91 aa, Homo sapiens
ALEDPLWHTGLETMSVGTVYIFNGESILCSQAHSSLSVTKSVASSSFLNAENCDENGIVVVRWTRKEVCRSVYVKIFAILQERLRGGMELE

SEQ ID NO: 991691 - protein, 82 aa, Homo sapiens
MDYSAMKRKEILQPGAVAHACNPSICEEAEAGRSRGQEIKTILANMVKPHLYYKYKKLAGRVAGTCSPSYSGELRQENGVNP

SEQ ID NO: 991692 - protein, 68 aa, Homo sapiens
ACRHGRGIKNGVVEYGKIESKIQANRMRGWKFCHGNITSSFISHIGGTPQPPSCRYPVGNSDRYLCYV

SEQ ID NO: 991693 - protein, 47 aa, Homo sapiens
MNINKHNLYADFDDCKKTFKNHQQLKIHQCQHTNDPLFKCTQEGCGK

SEQ ID NO: 991694 - protein, 102 aa, Homo sapiens
RGSATVALLQSRGAARPIVPLTASWGQPHRSGVAVPQFSHAQQSRIVHRHIKPARQVAPSHTQAHGPCHHPAHGTSQHKQLIQSCLIHVLCTGPGVQVRAGS

SEQ ID NO: 991695 - protein, 43 aa, Homo sapiens
LPVKRKAERKSGVPPENIPTYVQHARSQVKYAAKVGVNIRTCD

SEQ ID NO: 991696 - protein, 188 aa, Homo sapiens
MGVASRRQRQVSSIAREKRGGVLPTNARPTVKILTDLQAVTRRHFTQFKGTALARFAQDLQGLLEDRRLRAFGLFKEFEQALQRSRFTRGQEKGLQQRGQFAGFSQIHRFSSLFGSRPHVDSRKRLILHQLDQGLLHQLKVRHKGHHHAQSALFGSKQLDKGHKPTSLETFQHIAHALAGGQRFTADL

SEQ ID NO: 991697 - protein, 75 aa, Homo sapiens
GRYSQAGDLRDTGIFLDLMHLKKPGRALTYPCSTEISSAEESDDVDLMGSLMMESKQCYEAPDCVKCSAPSETSE

SEQ ID NO: 991698 - protein, 68 aa, Homo sapiens
MRSEAEQSPCENLAIVGARLLPNLTAYSRLRQSSRGVDFNRSSCIGTYPTPGLSPHRFSNVSYPTMDR

SEQ ID NO: 991699 - protein, 31 aa, Homo sapiens
MVAGFSGRGLKLFNKGSTSVRAYIWGTQGNG

SEQ ID NO: 991700 - protein, 53 aa, Homo sapiens
RALPSAVCPQPYLAEDKGYALSRLRLGPTTLPGQPEAAEEGRTRFLLSVPINS

SEQ ID NO: 991701 - protein, 61 aa, Homo sapiens
VTRYHRHGAGELLAKNCRESWTSRMAPGLSTASADSRRCLFLRARRCRACSCHFFLVPMNS

SEQ ID NO: 991702 - protein, 89 aa, Homo sapiens
DIDRAGTSGASSTYSRFKSQHPASSFSSITRVCITDSGSREVLFFLELLLQPSPCSPGTSAPPLGTHLSPHQISVFRVIRGPAWVPMNS

SEQ ID NO: 991703 - protein, 69 aa, Homo sapiens
VHVCHDSSRKLWLFIWHQPKPICPSSWDHLWTGGHLCCLVLTCAENRDAAACCTMNGACMTAYAVSADA

SEQ ID NO: 991704 - protein, 59 aa, Homo sapiens
MDTCSTGRRIGQVFGGILLNTLTTDSDRREWSSKLVLSEALERYVALMYGLSPLSHVNT

SEQ ID NO: 991705 - protein, 32 aa, Homo sapiens
MDAILYDLLRGDSHRMSEVSYTRLLANILHEE

SEQ ID NO: 991706 - protein, 47 aa, Homo sapiens
MTSALRYSRAPRYTSSTSHIIGTIAEQNVSTIHCSSEENVGVGADNS

SEQ ID NO: 991707 - protein, 39 aa, Homo sapiens
MAKCRMVLSSRYYCSQFVMSACISSRITTVLQVRGCRSI

SEQ ID NO: 991708 - protein, 39 aa, Homo sapiens
VTIHRHLAIHRHLANSSAHRYSSAPDLPSNGYSLNGFNS

SEQ ID NO: 991709 - protein, 73 aa, Homo sapiens
SLCSQSLATLCTLEDILLDWDRLESHCGSEWADHWVTDGGTAHREVCPVTPFRRDPGETDPGHVRKSRQQVAV

SEQ ID NO: 991710 - protein, 102 aa, Homo sapiens
RKTRCQLQTPKRVPSNTGMWLTDKYKSRESDRVSLCRPDWSAVKQSQLTAVSASQAHTILQSDSQVATITGTRHHARIILSIYSKDRLTPCCPGWPQTPDLR

SEQ ID NO: 991711 - protein, 42 aa, Homo sapiens
DALSVGAVVGFIEQPTPFVSLFFQRLLRLHYPTERASPTERA

SEQ ID NO: 991712 - protein, 67 aa, Homo sapiens
YNHAHPAHGFSSTSMNSGDPSGPPTRITVLNLIQTHFRHSGGPAVQAQEPDQTSLHTTPQIPHEPLQ

SEQ ID NO: 991713 - protein, 88 aa, Homo sapiens
MHFAEVCDLLKTVRVSSSTSSILMTEARNMVQEVTLALSESRSSSQASVERDRLHPVDPQSPENQSLVTDQYLVIRAYALKNRATYYC

SEQ ID NO: 991714 - protein, 120 aa, Homo sapiens
MTLGDKDKHLNLNKMTIDRLIGVHPWIMSTTHSQNTSKVVHSVQYTFYFILEMESRSVVQAGVQWHDVGSMQSPTPRFKQFSGLRLPCSWDYRCLPPCPANFVFLVEMDFTMLARLVLNS

SEQ ID NO: 991715 - protein, 92 aa, Homo sapiens
MYSSLGNSSKHLVSKTFKTAMLTGNQSCILIVAGFGQSYCQGQIPSNITLLDQMAYAFSLFTRHHGHFMPHANSKQARFPRVIRLMVKFIKE

SEQ ID NO: 991716 - protein, 46 aa, Homo sapiens
VTKKHRHEEHFQKQIPRESSIIPAMMEMMGNQDSEWTCMKPYAVPS

SEQ ID NO: 991717 - protein, 68 aa, Homo sapiens
PLEDPDALSVGRRVVRGLPHLGLRHQTCGHHLLVGHVASEPFMKPPLQSWRVAVEEGKERKTTQHRES

SEQ ID NO: 991718 - protein, 94 aa, Homo sapiens
AGLSSTPELGGPEWPNQTGITRTLIQTHNGTREGRCTGPGTRSNKSAHNSSNSPRVPLALKARSSIRTSVCAMWSVSGTEDGYEPISRHAAVGP

SEQ ID NO: 991719 - protein, 48 aa, Homo sapiens
MPLLDCNPEIAGPSAPRKHIIHSRNYWQTQQLLNTNSSFAYAGCIHQH

SEQ ID NO: 991720 - protein, 94 aa, Homo sapiens
MSYITGFCLSIHTTPGLKTNGTDVTLELFIYFDCDFFGVAALFLQKNMSFYGCTPTTMTRKYKLCIQQRSNIQTLEGISFNNQKTTPLKMGHRT

SEQ ID NO: 991721 - protein, 33 aa, Homo sapiens
MLSSYPSNPFSKNKIARKLGKGEGVTVTDHLRV

SEQ ID NO: 991722 - protein, 66 aa, Homo sapiens
GKEHMTWGLRYDVWATDTDQVEATQSSGFCLCLCLLSLCDLMSRECFQTMLQQLESYERIRGLYHS

SEQ ID NO: 991723 - protein, 61 aa, Homo sapiens
ILSGRGIIGILIYMRRHTFHADLLLTYSISTVLKEVATGELMFLGKGGVGLVNAWLTFYGS

SEQ ID NO: 991724 - protein, 44 aa, Homo sapiens
GEIGRNPCVYCQPPHRAGAGPGGGLALAVLSRGHRGVCAHARRD

SEQ ID NO: 991725 - protein, 106 aa, Homo sapiens
LTDSRVGSPLVPLSEPCLLVFSSVAAIRYRNTYKLSKGSTRLMMKSSPGEPLSDSGYEFPCDCFGVLYGLSNIRNFVSWQHFKGNRYEHIALTAARPFNSVSKNGL

SEQ ID NO: 991726 - protein, 71 aa, Homo sapiens
MKTSHHRVLLLFILIRILVLSYSGSKGFLYVPQWVPDPFVAMSWMGKMLLPNMCVGKSFTSFKSVLKCHYE

SEQ ID NO: 991727 - protein, 69 aa, Homo sapiens
MASARWTLTSTSSRNKTILYGTEVYISVCVSDLDLLLILYFYTVHLEDEAKETQTYSYIRDPACCSWII

SEQ ID NO: 991728 - protein, 65 aa, Homo sapiens
  misc_feature (58)..(58): Xaa can be any naturally occurring amino acid
PLQFQGSSKCIVPSALSKCMVQVHGPSAWFQVHGSKCICSKCIVPSALFQVHGWSLQXRNSVTSM

SEQ ID NO: 991729 - protein, 35 aa, Homo sapiens
IGDRSSVIITGLLLVIHTTPGLKKSGTDVILRLFI

SEQ ID NO: 991730 - protein, 54 aa, Homo sapiens
QERVLNLDSSYTCETVFMRLAHLLSYSSPAVYIPNAGSSEHVIWATRNKIVVNG

SEQ ID NO: 991731 - protein, 44 aa, Homo sapiens
VTLEDPSGEHSLWQQPSKSEQIGLHEVKQLMYSKGNNQQSDCSP

SEQ ID NO: 991732 - protein, 37 aa, Homo sapiens
TTVPEDNYTSFLCFKEALECACICQTPIATRMSGLQK

SEQ ID NO: 991733 - protein, 35 aa, Homo sapiens
MPFAVRFGDPAWNSQGGSWTPEMLSNSTNRHPNPS

SEQ ID NO: 991734 - protein, 98 aa, Homo sapiens
PGITACELGIATDGGQTAHQEEEITLENPADVPVYVQWIPLAIYTNPSGGVDKLVVKGLTRGKGAKHEWRTLEVSSLQKAGLIHCRGATGYMEGLSRH

SEQ ID NO: 991735 - protein, 126 aa, Homo sapiens
SQRGTFTCSQAVKHQLGLHGTTLSPQNIQKLAGRGGLYLSSQLPVRVRSEDGLSLGGTGCSAPELMLLHASPGNKVRLCLKIHTYTHTPRFISEMESRSCCPRDGVHEDMIYGSMQTLTIWVQSDS

SEQ ID NO: 991736 - protein, 37 aa, Homo sapiens
RGTVTLASTSKSEQIGLHEVKKLMYSKGNNQQSDCSP

SEQ ID NO: 991737 - protein, 78 aa, Homo sapiens
MADNQSETTFIWDLIFSNARSRSENLFQVSFKESHVLKRKNDHPINTVFMWFYKRLASAISNYYLPKQTIICRPVLRL

SEQ ID NO: 991738 - protein, 78 aa, Homo sapiens
EDPLIAFSGATGNNAEICVLHLDYGPCRALNFSVYYYDRYTQSCRQFLYGGGEGYANYFDTWKASEDACWRIEKVRKV

SEQ ID NO: 991739 - protein, 71 aa, Homo sapiens
NETGPYNVKYGTDMVAIALTHITLNVLYGSRASPEFTSSFTVLPVQDEVLIRCLCSSVTSNPIRTLVFFGT

SEQ ID NO: 991740 - protein, 118 aa, Homo sapiens
CRSRHQVRTGCGGDTSVTCHTGLSIGQLASAGPSDPRESRREQERPTRWKPYIGRSLCYFSRGRGSHSVAQVGGYGRNSSAHVKPRSRGDSRRVSVPQFSELAGNYEAPTTRPGIIRD

SEQ ID NO: 991741 - protein, 97 aa, Homo sapiens
MAGTLCKRGKMNVMACIFLTGRQSFTLSPRLPCNSMISAHSNLQRPGFKRFSAPQPPEEYDYRHPPSCPANFSIIVQTGFHHVGQVGLDLLTSGDLP

SEQ ID NO: 991742 - protein, 100 aa, Homo sapiens
NMLSHAEAGVKCTGAIPRTDPAREFELLRFRTGTGSPLLRQPGGPPLTGATILMPNLVRTPIGIAHYSPELLGSRDPPTSASRVAGITGMNHHTQPFLYS

SEQ ID NO: 991743 - protein, 107 aa, Homo sapiens
YRQVRCASISDDRSPMKNGTWSQGEFAQGKRASTYNGKQPSDRNSLYCSALSESRGSIVMRCTLNIRGSETAGIRLPPRVFSRVETAVIRPNICILTSTQPLSLELR

SEQ ID NO: 991744 - protein, 111 aa, Homo sapiens
MTSLTDDLVLPSARCVILSKSLSSLGLSLPPVYKRGFRRQMYVQELGPSCCLSLGQVLPQAEPQFPSLGHEVIEVLVEAPACYIEEDTVCVCVCVCTYHEVIEVLVEAPDC

SEQ ID NO: 991745 - protein, 109 aa, Homo sapiens
RTTSPYKVVIKLSAGISVSYEACGLLPTSHGCWQNLFPCNCGSHVAGFFKTSRAWWLTTVVPALSEAEAGGSPEVRSSRRAWQYGETPSPLKIQYLPGMMAHACNPSYL

SEQ ID NO: 991746 - protein, 130 aa, Homo sapiens
MTHVTRVLGPEEWLASVPASQQSLAQASTSKCNQANEELTVITDADYSQRSHYEDYANVPTQKQSQSTLPNQHHYTCIGIKTFPMKVNDRMGRSNTKCAAITIRTPENMERKGNITLPKEYNNSLATDPK

SEQ ID NO: 991747 - protein, 76 aa, Homo sapiens
GSPDNHGCASLIRAQSTNSMEDDDLKQQFGTDVFVGAVNLIVVYEDWKVERHKPVKGRVPVYTHLFILPYLNVYLP

SEQ ID NO: 991748 - protein, 64 aa, Homo sapiens
GSSYPDSDRLEDMPNILTQADKLLTQHENIKNEIDHPYVVRTTREMRDLVRDCHPMGQTCIAHV

SEQ ID NO: 991749 - protein, 110 aa, Homo sapiens
LKASTATQSFFFLFFWRRNLALVAQAGSPLTATSTSQVQAIFLSPAPTSSWDYMCLPPHLPKLVLLVEMGFHHVGQTGLELLTSSDPPASASHNAGITGVSHRARPATQS

SEQ ID NO: 991750 - protein, 51 aa, Homo sapiens
MVGYDGGEIDEAMVFGESFDNGPLGQKSGLGGAGLLGKRRVDGIKGCKSCQ

SEQ ID NO: 991751 - protein, 118 aa, Homo sapiens
MLRENLTFYLHCPSQESAQDHTFPPTDGYYNTGKSKIKVDNQLPYHLGFAGRRSIPASTDRKHQEHPKGEISLRTARNKGSREGLPSPVLETLLHKLDKGDAISEWQFSSTMLWRLVP

SEQ ID NO: 991752 - protein, 101 aa, Homo sapiens
YRVHRMWPACKKFLCQSENQDVSWTLPREEISNKDATRTLAKDFEPWELTELSQQSGRIGRCEDKEVAALVRKKKKNPEDKGRRETSRTAGPRKTTNRTTM

SEQ ID NO: 991753 - protein, 134 aa, Homo sapiens
MCQSLHESVLMDIKRTIEARILILSRVTRNETGPYQREIRDRYGGIRSSPVTLNVRYGPGAPQNLALIHLLPDRRDPSILCWFAGILAHRESMLGQLVGSFGYQDKSSVSPRLLQIIAGSMLAAVRNSATGEAR

SEQ ID NO: 991754 - protein, 102 aa, Homo sapiens
ITINELIPEGDIGMSETPTCASEGDRARPTYGGYLLIASGSDPGYIEPYENRILDSTRVSLINEDRTLSSVKYGTDRVASEVIAVTLNVLYVPRSPQNLSYI

SEQ ID NO: 991755 - protein, 75 aa, Homo sapiens
HDSEPLVIASGLCSLRWVVELVRNRVHCAWISWLTWKVDVPGVIFPGDECTLFPKCLGGDRVVVRLDPTTSTCRT

SEQ ID NO: 991756 - protein, 73 aa, Homo sapiens
TTDKILLGHCNETVVCTQLPWDAQLEGFEQARAGSNAFQLLCGGEAERVEAVCDQLRSYGQSQMGTHGRLYQH

SEQ ID NO: 991757 - protein, 42 aa, Homo sapiens
AGSERRDVADRSMWECVSIHSQLTVQLHSEQETQWTHRSHGC

SEQ ID NO: 991758 - protein, 47 aa, Homo sapiens
SIKLTFSQVANNPNCIESGIQQQWDANEEHWRSSALKVHRPDIVVHG

SEQ ID NO: 991759 - protein, 74 aa, Homo sapiens
DALSVGATATLVVGFFRVHRPHRSWAPVHILKGQVFASRSYFLDRAGHCKDEGCSWEQSRGESTRCQDQAATPE

SEQ ID NO: 991760 - protein, 51 aa, Homo sapiens
GGVPEPNLHFHSGKQEISVRAGSFVVSSLCNGLIAAQLLLYWNAKPPHKES

SEQ ID NO: 991761 - protein, 42 aa, Homo sapiens
MSVQFGIPGSFDLVLKVTKDNAAHCSLNLLASSDSQTSASQI

SEQ ID NO: 991762 - protein, 157 aa, Homo sapiens
MGGHFRAGSKGWVGTVPRGLVRVLLSSILDGDMMSPRPSPELRCVCWAFELGEACSMVSLRTLLFVGLEPSSGGLPDGVGPLEGACFSGGGARPCRQLCSELALPRLPSLGRRPGVALQGLYSQPPWLCGDGYAACLRVPCSPPLSFGGVSRPHRES

SEQ ID NO: 991763 - protein, 51 aa, Homo sapiens
ALSHALPMGHFFGNHCDHDIFITLRTTMFSVLSLLMTSLTSLAGDHGLSID

SEQ ID NO: 991764 - protein, 74 aa, Homo sapiens
TFDLEDPTLVSVGEVNDRSNMFLKFGVGLTDVVQCINDDDGYDLKQVRACTYWRDGKRSGVGLECKTNSTYEYD

SEQ ID NO: 991765 - protein, 82 aa, Homo sapiens
SLATLFPRFFSQFPVPGHGKHHRVSVLVISACQQGSFTTRRWGRAIPSSHTGQRISAGASSGISAGGQGSLQRRTFGQSMGP

SEQ ID NO: 991766 - protein, 49 aa, Homo sapiens
MAMQQENRALRGIVTLGSPHCGCRWHLRRWNERPSDALGQPMADVTCAE

SEQ ID NO: 991767 - protein, 104 aa, Homo sapiens
MPLCMGAGVFLRDTERRRVFQALARIHEICYNSTILWDVTVRDLLPSSAMIKDLSQGAWDAPFQEELTDEKRFALSPQPAPNLEDYQSRNSTLSLEIHAPQRER

SEQ ID NO: 991768 - protein, 44 aa, Homo sapiens
DWETLVEGLWVTGDEAFAVSSQCVRTEHQTCAKPSEEELVIGEC

SEQ ID NO: 991769 - protein, 70 aa, Homo sapiens
LLPNDHTSFGSAAMYSIRCWSWNYRGGWQPDLPSDGSSCADLQWSHCQLQGLERVLYSHLTSVPRGAIYR

SEQ ID NO: 991770 - protein, 32 aa, Homo sapiens
MTRSLLELLELCVGHWGKECRHSTLYLPLTSG

SEQ ID NO: 991771 - protein, 76 aa, Homo sapiens
RSRGSATLSLWGLSDEPKEECDERTCSHTSSAARTTCCVPVRWQCDYDNDCGDNSDEESCTPRPSVGRPGRLWFEG

SEQ ID NO: 991772 - protein, 65 aa, Homo sapiens
LCSGSARAWLLGLVQQQVAVRQAGQLVVERQLADAGAGLFAFQRQRAQVHADVHQAVVEVVRQAA

SEQ ID NO: 991773 - protein, 34 aa, Homo sapiens
MRLCRAGILLLLVLDIRIPGSLTMGAPGLTALPP

SEQ ID NO: 991774 - protein, 100 aa, Homo sapiens
MKAATYTNAVVLNIVHYVSGACFVNFCSVINGNWLAACGAVSTASDSIHSDGIINSRFKAADGSCRLAPRHSELLDRAISSCFSVSDPVISHCDSRSIPA

SEQ ID NO: 991775 - protein, 43 aa, Homo sapiens
KVEYSGAITAHCELQTQTPRLKRASGLSLQISWDMRCAPQRER

SEQ ID NO: 991776 - protein, 32 aa, Homo sapiens
  misc_feature (27)..(27): Xaa can be any naturally occurring amino acid
MVPPYITVIYFETLINGVCLDDVEVMXLLGFG

SEQ ID NO: 991777 - protein, 43 aa, Homo sapiens
CTLNGRSRRIPKWVTSLPGSYLDIHTGSNILIISAKHYTIRPF

SEQ ID NO: 991778 - protein, 62 aa, Homo sapiens
SGEHSLDVWQSQALLESLGTSGTLASQEPVYIQHWKTAFPAQCACMQLSGPRSLRAAHVTVP

SEQ ID NO: 991779 - protein, 74 aa, Homo sapiens
QYPSMIECLAGSTCIHYCAACLPGLSIRRHVSNRADLQISYKLEPGRRVFTTAVHASLYKFRRHVSTVLTSKYR

SEQ ID NO: 991780 - protein, 38 aa, Homo sapiens
AGNNHFGWQPSKSEQIGLHEVKKLMYSKGNNQQSDGSR

SEQ ID NO: 991781 - protein, 106 aa, Homo sapiens
MPGPYVCVSDHASSATPGACVSHKCEHTLGSYLCSCTVGYRLSVDGRSCDDINECSSSPCSQECANVYGSYQMFTAGEAHSSVMWMESPVQTSDECALPTGVHICS

SEQ ID NO: 991782 - protein, 84 aa, Homo sapiens
LRQCLCLQWGHPGSIRKAECVPRLRWPQTIAACPGHAGDGGPTPTHKGCCVERWLVHPGQWTHSSQPNPEPGQLPGLLKQPSSP

SEQ ID NO: 991783 - protein, 92 aa, Homo sapiens
TSLSILFSSVNWDGIFPQFQKLEKLVFGPLLQGHQGTRFLLQILIYGKNDLGSLLCFLVSRVSEEPFYDSGSVFPKMWPTVFLREAVSEVVA

SEQ ID NO: 991784 - protein, 51 aa, Homo sapiens
SELTFRVTGRDGGGNPKIPSKTYIIFSLVLFSKQHGNNTITIKGAGGGLSL

SEQ ID NO: 991785 - protein, 103 aa, Homo sapiens
QSSNTGGSLDTWLDSNFSKADCSSSQGLSNAVSWREERQAKNKVMKHCPRKALTLRKRLAEKQGSTAGVEGGSPDNGDFRWVWSFSFAVIVYIDNNDYKGPTI

SEQ ID NO: 991786 - protein, 35 aa, Homo sapiens
MRIPFSSVGGVSDESEKQKEVGESCKKGRLCKKGR

SEQ ID NO: 991787 - protein, 88 aa, Homo sapiens
WEMVDDILASIFGTEKDKVNCSFYFKNREHVVMESGALGCTIKRRLARALPSMNMYRNPQNSSQCCGWFALCRDAMWRVRNTNDECGE

SEQ ID NO: 991788 - protein, 38 aa, Homo sapiens
VLGDKVNTRVVKTGGGIREVVSVIFLDSVKESLMYPFS

SEQ ID NO: 991789 - protein, 32 aa, Homo sapiens
MPGHTVGFEFNAFDMLSTSDTAAKNKNMVTAV

SEQ ID NO: 991790 - protein, 61 aa, Homo sapiens
GTSNILANMRSRKSLSLTRLFITVFSFSSFSLSVAEYLRKTFCSYPAFSSAIRLRLFACSA

SEQ ID NO: 991791 - protein, 38 aa, Homo sapiens
RFSITDESSAMAIWVTWKPKRRMEATVDSTMDRQVAKP

SEQ ID NO: 991792 - protein, 97 aa, Homo sapiens
MDPMWDMGSACITVKTGISTVESPGASSSSALHEKYSSEMRSSTRCYTVIIAMDCTHQLIYNSIRMIRIRFSGVLSIVFITSWSVSVSPFSSSVAKG

SEQ ID NO: 991793 - protein, 44 aa, Homo sapiens
AWFLPAVEWLIRQISLPSYKKKVTYSYLDNVTMWRLKGGRLGGL

SEQ ID NO: 991794 - protein, 87 aa, Homo sapiens
MRGWITVVMLLTVSYSSYPEILPSETPTATQVDGADLASPMSPRTSNSRMSMKLVVPLAQPINPKETSSPAVISSSHLSTNIGLTLS

SEQ ID NO: 991795 - protein, 82 aa, Homo sapiens
MNALLFHGCPFTMTWRAQQEDSVGAQRILAALPQRIEGDVQMACMGPVEKRLGCTGRRKPLRQVRPLARVGGPSLARWRLRI

SEQ ID NO: 991796 - protein, 52 aa, Homo sapiens
GLDSGDSTDSRGYLLNGNWCMKGEFWGGLDHGGDSGLNWSELETVSSGYLSS

SEQ ID NO: 991797 - protein, 84 aa, Homo sapiens
ASQCLLARSTGQHLRIHLVAYHCSYCDKSFLAALPPPAAHQNPHMATDPTSAHILAARSVSLSSPTSSLTSASTRMDNALQVVP

SEQ ID NO: 991798 - protein, 86 aa, Homo sapiens
LCWSRQTPCDLSSEAYMLSIAVMCCLPVFMDIAVRVGECQGFQPRAVSGLLTVVCCVLPCLVTFYSPRLKTGNGENHNVVFKTPQP

SEQ ID NO: 991799 - protein, 60 aa, Homo sapiens
TYRGEAGVQWWTHTLAAASTSSNPPTSRFPTQHGHYTVQCHHAQPTFSLFHWLDDTGFLP

SEQ ID NO: 991800 - protein, 50 aa, Homo sapiens
LICKLQMEPPEYTASCTHGLRTQNIGRTSSLLEPLANSICSASLRGGALS

SEQ ID NO: 991801 - protein, 64 aa, Homo sapiens
LLRGGLCLRSNTKSSLVPRLALLERPSPALAMRTICCCCCCCRTLHLYSNDCCHVIALNENAGC

SEQ ID NO: 991802 - protein, 85 aa, Homo sapiens
PRASKDSDIPSFSKSIWLAFTASIDIGMHFFPQIGSQGGFRCMKTRMLNIDYIGVQMNELQYFSRTLNNKIREGKNTYCGHYFES

SEQ ID NO: 991803 - protein, 67 aa, Homo sapiens
RDSYLILMLFTGPLNTSSHLILTLTLLASWLPFSHLTRQGNQGPARQGLTFCGAMGPWYQYRVSDFC

SEQ ID NO: 991804 - protein, 77 aa, Homo sapiens
VADELVSVSFRPCPDLCPADLAEAVWGCCLQASESGETGTVHVAVWELWVWVLSVFVGVHMTLRQSSAGPMDSMSVL

SEQ ID NO: 991805 - protein, 51 aa, Homo sapiens
RSLWVHHSYCLFPCLESVTTGSGVLAFSIGGHGYETKGESCEADLDPTERA

SEQ ID NO: 991806 - protein, 132 aa, Homo sapiens
RSLCGDTLPCGRGLSLLGHLTLLRRTWGCSLLLVSRSTDVGTIHLLLNSLEVCSEMKKCLWNLHGLTASKWAHQRQGDGEHILGEGQMAVRAEDPCTPWATSVGKLEFNACLPSSCRLAFALCQSNSPTAES

SEQ ID NO: 991807 - protein, 36 aa, Homo sapiens
MCCGDSRGSRRLSVGSGSAELNPNSEWFENYSLCHR

SEQ ID NO: 991808 - protein, 82 aa, Homo sapiens
LAAVCGLFFQWGPPWWHRVFCFSCGQCIPFVLSQAAFLHTLGFGTCLVVRATIGFALHLQLQWHSSHFVPITGCIGHILVGQ

SEQ ID NO: 991809 - protein, 43 aa, Homo sapiens
MKKIETDLDYSGLLSPVPSCISRVYSQHLSTFLPGITVGPVRK

SEQ ID NO: 991810 - protein, 45 aa, Homo sapiens
TLSLWGKGDEVYLTTGKGCTIGRQGGSRGIYILVGYLVGGYNEDG

SEQ ID NO: 991811 - protein, 39 aa, Homo sapiens
MPLGLFTSVRPCCVILGTCPGCDDLTRLLTPVHFPWCHA

SEQ ID NO: 991812 - protein, 166 aa, Homo sapiens
DWVEDRSVNFCFHITCVSVNFRVFMPTCVSVNFRVFTPTCVSVNFRVFTPTCACPRISVFTHPPVLSVNFRVFTPTCVCEYPCVHAHLRVSVNFRVFTPTCDVSVNLRVFTPICVSMNFRVFMPTCGSVNFRVYMPTCVSVNFRVYTPTCKSMNIRVFMPTCGSRG

SEQ ID NO: 991813 - protein, 34 aa, Homo sapiens
PSVGKLEVPRSREDTILMPIVRRYHITRYSALQP

SEQ ID NO: 991814 - protein, 102 aa, Homo sapiens
MPYKALASKVLNYNVVITWWERQVKCGVCAGAWEESAYPEALTDVTQSYGSGCGEKQPPEFSGLCGADHEQKGLYGWHYVDATCGGGGQSLVRSGPGFRARL

SEQ ID NO: 991815 - protein, 45 aa, Homo sapiens
MVVALDSTSRIFTSVLSGSPKLIKCFSPGFGLRVGCGWSFSTSVR

SEQ ID NO: 991816 - protein, 44 aa, Homo sapiens
VVGGSQRGTIIFGYGLSKSEQIGLHEVKKLMYSKGNNQQSDGSP

SEQ ID NO: 991817 - protein, 89 aa, Homo sapiens
MCDSLGKLTLLSLGVLNVPFTGSDATIDVYLLNGLYLIISVTERWNDVYACTGLEASSLNSPPLSLLPRSARRRAHDLPSQLPTLKTLH

SEQ ID NO: 991818 - protein, 167 aa, Homo sapiens
MGKGLQPRGCTVDGAPHELELLSVSNSTGILGCTAWIVDGAAPNMWLALSPGTPQPRPHEGSFGFSSDVFIMDTIGGGEVSLVDLADLTVTNDNDLSCDLSDRTDAFKKTCNPKFSLRSANDGIRSLAFPPTARSGLVTCLRGRDAQSSGSLHELRVTAHEECGARL

SEQ ID NO: 991819 - protein, 35 aa, Homo sapiens
MLTRTGESHGWYSWSLAGGKRIQKKRSLKEVMVPR

SEQ ID NO: 991820 - protein, 95 aa, Homo sapiens
SGQQMSWVLLPVACWSQAHYMLKPWEQTVFNSMLISIVEMALYTGYVFMPQHILAIWHYFENRTMNKMRSGSEVPWGRPSLRSRNETIRCDKKLF

SEQ ID NO: 991821 - protein, 38 aa, Homo sapiens
YNRRARVSYRSFTRMAGEAKAGEAPTENPAPAQSVRAV

SEQ ID NO: 991822 - protein, 131 aa, Homo sapiens
MSELRGETCHLASRNHLHSANEHEVKTCGVGMGQVENSEPYAPSGGAVAVREPSDWPFPLASGVCKPKAALRYEKGIVPQIFVTCRIRNHKMLVAGPHGPGGSDNLSPWNAPRGPKAQQVDYFSPGDVFPA

SEQ ID NO: 991823 - protein, 99 aa, Homo sapiens
GLATTKLFLAKALTSPPRSYTFFIDILLDTIRDADRWVHRARPTQKILFTAGHPRSSIFNYTHKQMTALRQRSDGWVLVPLPTYYTFCQHSSSKPERHH

SEQ ID NO: 991824 - protein, 34 aa, Homo sapiens
RSLGGGIYLNKPVDDIIRENGKVVGVKSEGEVAR

SEQ ID NO: 991825 - protein, 60 aa, Homo sapiens
TLSLWGLVASAHMSGAVSPGSLLKGVLGPFTVFCATIGHPLIVPTPEPPWLSSLVHSLEQ

SEQ ID NO: 991826 - protein, 77 aa, Homo sapiens
TAAVLTDGGVTRKERATVRDYSVVVCRTWLTGVTLGFRYQMKSVYAHFPINVVIQEKVLYVGDPPFLEVANTSARFG

SEQ ID NO: 991827 - protein, 89 aa, Homo sapiens
  misc_feature (5)..(5): Xaa can be any naturally occurring amino acid
RSLCXGTALRSLGGGAAHVLMPHESTVEHTHVDINEMESPLCHPETAHQVDFKQHCTTQRHQRDTVNYVNYNLPTFFPLGPTRESVGYR

SEQ ID NO: 991828 - protein, 91 aa, Homo sapiens
MLPSLLLHSCAQAILLPRHSYRLEIIGVSHWAGQGIQIYHRVIALSPPGGSAGYHTILCTTGSMANLAASRQFRCRGIPHGGTCMAQGNSS

SEQ ID NO: 991829 - protein, 112 aa, Homo sapiens
  misc_feature (87)..(87): Xaa can be any naturally occurring amino acid
MLVVEDHDAVEEGENATGSKEEESSAGSVGGVTGDESGLELLSRMRMVDQEWGKGGVVRENADGLAHGESVGEGGRILKIVVKMYHXSDSSSHFSKEVIFKSTWEVPPPPHR

SEQ ID NO: 991830 - protein, 88 aa, Homo sapiens
MTLTFIRKKTHKGYTNSISHPIKCPSKNNNLKSNKLDSTGPTSKQTCHQCCNTNQPTHHNHTSIIRSSHHSSSSQSSAISIIAPIIVI

SEQ ID NO: 991831 - protein, 78 aa, Homo sapiens
SSLCGGQYSHLKEKNFQPRISYPAKLSFISDGEIKYFTDKQMLRDLVTTRPALIELLKEALNMERNNRYQPLQNHAKR

SEQ ID NO: 991832 - protein, 40 aa, Homo sapiens
LSVWLTESKCWRSSCHALWVDRPPFLWGRPAVVWTSEHSL

SEQ ID NO: 991833 - protein, 33 aa, Homo sapiens
GVYATISGLKPGVDYTITVYAVTGRGDSPTERA

SEQ ID NO: 991834 - protein, 110 aa, Homo sapiens
MHSFLNDVTHTHDPTGRHLSTDTPELTLILTTLECTSGSLYVIIIGRGAGTSGGSIDFDGSQTGQPDEFTISSIYTSSPIPPPCSSLSYHCVYINQNNTKKPPGPTSLPF

SEQ ID NO: 991835 - protein, 72 aa, Homo sapiens
PRGSPLSLWGRWPGRGVVGRLKSWLAESDLSPPIPDYPGVGFNTQICDSTPEPGSRGMQPLNWRFLMTLPLI

SEQ ID NO: 991836 - protein, 100 aa, Homo sapiens
LSLWGHAFGGLTAVFPLNSDTHTHRYTQTHAQIHTHTLTDTDITQRHTHSHIHTIPGTLPKLQPQTDMPLRPPFSGAPHLPCARGVGTPHQLQDTPTERA

SEQ ID NO: 991837 - protein, 35 aa, Homo sapiens
QENWCEPPEMELAVTPRPAPLHSSLHEMSNDPISK

SEQ ID NO: 991838 - protein, 88 aa, Homo sapiens
MMRPEHVIPFPADRSGQGEEGDNARAMAAEQHSCCEWQCSVKHTEYQIPYVLVRSRTVTKKCLSLGEFKKNRGLIGSWFCKLYKKHDS

SEQ ID NO: 991839 - protein, 170 aa, Homo sapiens
PPIGRCTQVLHSFTAVCQDDGTWHRAMPRCKIKDCGQPRNLPNGDFRYTTTMGVNTYKAHDCQITKVEMKEKMLRAAREKSQVTLKGKPIRLTADLSAETLQARREWGPIFNILKEKNFQPRISYPAKLSFISEGEIKYFTDKQMLRDFVTTRPALKELLKEALNMERNN

SEQ ID NO: 991840 - protein, 83 aa, Homo sapiens
GSTDVVLFICLIKGQDEDLEVMLIKGAHGRGEEEGYLMDGEILIQNDLEMSEMNNAINNRIESSSTLHYDIKNHAPIKENKVL

SEQ ID NO: 991841 - protein, 227 aa, Homo sapiens
MDVEVTEVLRTPKYEASGKITIEYGTWKSGKNVISIIVDGMSWEIVASLKANGKLASQKSPVLRMARKSPRKPLENMVKDGETRMTPWFLKRCLGIEVRLTRLHTVPFRRADTHEIINHGSLAGRQTQSWRRRPQTRWAERRQHRDLREALGRNRERWGLDSPGERKLLGGDQGLAFGPKTRTRDQLVPGNSGAQHHITGAGALTTQERAVGTGTSCGGLRLCQHNV

SEQ ID NO: 991842 - protein, 78 aa, Homo sapiens
CSTDVRALDQGWQTFSIKGQTIDFFFLESESRSVTHAGSAVAQSQLTATSASRVQAILRPQPPESWGLQAPTTTSVRA

SEQ ID NO: 991843 - protein, 141 aa, Homo sapiens
  misc_feature (91)..(91): Xaa can be any naturally occurring amino acid
LRQVYWKTGSVGGGFLLSQNLRGPHSSLSLLIGALLFNYLAIPESYGLEKKKVLVSGTSKKIYLFGTTRYINGILQESKYPPGQEQRTHSXGLLLQPLFSLEKRNLGSGHPRAGVAGGASVGLSGNLSPSEVQGDPRGFSN

SEQ ID NO: 991844 - protein, 216 aa, Homo sapiens
GQYGCATDAPDPAQAQTWRRLEITGTRKFAPNAKCGHSRNANVAGDSSVGELSRGWLHNDTQGFPRMALAQHSGKVKETESTVSHGFAKPILPCGLENRTTLFSSQPNLSNLERSCRDEQSKHPFTSPRFPGGVLCHNRFTTLSVMCRYTHMHSHASVHAHRHTGTYASVHTHRHSHASVHAHRRTDTHPCMHTHRHSYAFVHADTEALKASVAAQ

SEQ ID NO: 991845 - protein, 34 aa, Homo sapiens
WQYGCGVKNEVAITLPRKQQVSSFEQWFHYMKNT

SEQ ID NO: 991846 - protein, 33 aa, Homo sapiens
QYGGENYQKPANLHNQTQGTPQQAQSNGPGVPS

SEQ ID NO: 991847 - protein, 34 aa, Homo sapiens
TDSPGQYGCGEDLKGGGGAGSGLSCFLTMQWRMT

SEQ ID NO: 991848 - protein, 83 aa, Homo sapiens
MMRRHSSLGDRARLHLKKKKKAAEFGQGFENPGPRGFGNSGAPWLVPFLGRAITLVPQFSIGPVSLTFSLPSFYGGRCKSLSP

SEQ ID NO: 991849 - protein, 45 aa, Homo sapiens
MTLSRFLDNGLRTGACKENFGGPSISEILYKGLIFLMRKKFTFFI

SEQ ID NO: 991850 - protein, 44 aa, Homo sapiens
TAGVLIPCDITTVLVGDHQLHHRKGIEDSKGGNVPEVDLVLFPA

SEQ ID NO: 991851 - protein, 48 aa, Homo sapiens
EDPGQYGLDSMTAVEEEGSGGSVLEAQSRRDQCVGDGTWGDRVLGLGC

SEQ ID NO: 991852 - protein, 90 aa, Homo sapiens
GPALRFSESRTQPTPISCPLQEIKRMLALCKSSRVEVGLHPHGLKSHRATALISPHCPLHLPPSHLLTNRPEGVRPVSVLLALSSKPGTW

SEQ ID NO: 991853 - protein, 37 aa, Homo sapiens
EIEAAVSCDCTTALQPEQQSQTLSLKREINKLSSHPY

SEQ ID NO: 991854 - protein, 33 aa, Homo sapiens
MQCCGKAEKRKLDPAELAIVAAAQKKDFPHRES

SEQ ID NO: 991855 - protein, 43 aa, Homo sapiens
GQYVIAVCSLALIAACASWVQVTLVSQPLKYLGITLHTTHECP

SEQ ID NO: 991856 - protein, 77 aa, Homo sapiens
MYHSPTHPWMADPASQGPSWKCKVWDHTPSPEPDLVAFLECGSRGDCSFTSCTSSSLTLRIIILLGENLAEAGKDFE

SEQ ID NO: 991857 - protein, 173 aa, Homo sapiens
MWQIRRVGYTTTTFEGGGRFLLAIPFVLLSLGVAVSPCEGREARLKYISTVVQRVQVSSSGWFNSKVRVDGGVPRRPREVLVLTIGDVLVGACIPVLLGQPEVDDVHQVALLPQDHEEVVWLHNPGGSSSLNECIRCELINLVSKQQDGFEAEFPGAEVEEGPPGLAPAVPSP

SEQ ID NO: 991858 - protein, 59 aa, Homo sapiens
MKWSGSRTSLLLALCPALPALASRGWRLSKPVPVIQCFFDHAMLHSPSARTTLAIQLPP

SEQ ID NO: 991859 - protein, 51 aa, Homo sapiens
PESDRMDSWCARWAWSITWSKSLDNENGYGQAPDHLEAMGRAEQGQNASEQ

SEQ ID NO: 991860 - protein, 32 aa, Homo sapiens
MRGGNGGCNGPCSVGLCVCGQKLAVLGTGEER

SEQ ID NO: 991861 - protein, 68 aa, Homo sapiens
NATREALLGVEIETGSGTTLRSPGRSAPVSFTVVRQGFLPCCWELTAEGRDCPSRATFETCVSHQAIQ

SEQ ID NO: 991862 - protein, 121 aa, Homo sapiens
DLEDPHSDDYCSDVAVLGRWTCSNTVISSAIILSSRTFSPACSEIVGGLRAVDLRPNDVPDDQNASPQGSRAPMILFLEPDLCEGPLVLRLRSRLQLRLRCQLRAVVLRLLRLLRIRLQLL

SEQ ID NO: 991863 - protein, 52 aa, Homo sapiens
GGQRGTGAVQRQIKRDPQELLHNQQAIDHQSSIDEDTASVAIQRHPRPFNCL

SEQ ID NO: 991864 - protein, 69 aa, Homo sapiens
TCDDVPYFVNSLSRNMPVGAGSNIESPSTVDWEVATDHSDLPAGGDIGPPPGASAGTYQTLASKQTKIP

SEQ ID NO: 991865 - protein, 69 aa, Homo sapiens
TSDEFTQYLMGTPLHMYCHDLVTLTDYSDDSGREEPTSCRTSRGSIPPPEELRVGNTMTVMLATQPGSH

SEQ ID NO: 991866 - protein, 67 aa, Homo sapiens
DDGQRTVLGQRTVLGQRTVYWKEYLLLATLVLVEPWAQSSVMYSWEARGLEVSLSAPPSSIDGALAQ

SEQ ID NO: 991867 - protein, 112 aa, Homo sapiens
MSEFPTASYTLLPVRMRDGGLSGVLLCVLHLGIAHGTNAQDQFLLKQIVSNVLIFSCTNIAGVCTHYAAEVSQRQAFQETRECIQARLHSQWENQQQERLLLSVLPRHVAME

SEQ ID NO: 991868 - protein, 80 aa, Homo sapiens
MLRRTKWQAVIVEASGGGAFLVLPRKTSTGRIDKAYPTCVCAHGYLSWTSTGVLTTTNSEPCASEDCTVTVRWPNTVRWP

SEQ ID NO: 991869 - protein, 35 aa, Homo sapiens
MRLPASTSALWMPSSRSVRWRWTLLSEAPYGALAQ

SEQ ID NO: 991870 - protein, 79 aa, Homo sapiens
MPIQVVPSVLCPVHKNSTGPCCRGGWCNQSSYIAEGWGQLMPAQRGGFFIPEKPGPVGGVRRLSEEAKLAKIRGCVESG

SEQ ID NO: 991871 - protein, 48 aa, Homo sapiens
EETSLNAYNSLDKVGAEAYGALKPDVPPKPSFAPTFHIAIECPIDAVY

SEQ ID NO: 991872 - protein, 58 aa, Homo sapiens
HTGNNARSVYLPLDYGPCRAYFSVNYYDRYTQSWRQFLYGGCESNANNFLHLEGLRRM

SEQ ID NO: 991873 - protein, 52 aa, Homo sapiens
LYIIQPNNAWFISISSDTCIDDLAILTVGDVCSTQPIDLDQLQTTATRQTQQ

SEQ ID NO: 991874 - protein, 86 aa, Homo sapiens
MPYSSARYEQLMEAWEKKVWSCIENNPRVVGQWRARCCEYYEQAVPKRSCKQREMQDAACRAWWASGAEGLIMSAARRDARRVSEI

SEQ ID NO: 991875 - protein, 46 aa, Homo sapiens
MPIWVSALRFGINMSDLPESGKTTSVAMKERVNLAQCLETGAIEPK

SEQ ID NO: 991876 - protein, 68 aa, Homo sapiens
KQRDMEGLVKRCQNFFGLLIGEDELMIWDYPVPLKGGSLLYRQSFLEWESSWVEIAWDNREGDGALAQ

SEQ ID NO: 991877 - protein, 114 aa, Homo sapiens
ITLSDTVMLQVDLPMAAVEAINIDQLGVNDVMLEKPRVEGQALVCELCYDRKVEKRCQTCKANLCHFCCQAHRRQKKTTYHTMVGPNKDLKGYSRNGKGQSCVLFTLQRELRLY

SEQ ID NO: 991878 - protein, 35 aa, Homo sapiens
MTMRGMSRLVHVLSCSSRAAVVLEQCVMVCATFVS

SEQ ID NO: 991879 - protein, 46 aa, Homo sapiens
  misc_feature (13)..(13): Xaa can be any naturally occurring amino acid
  misc_feature (22)..(22): Xaa can be any naturally occurring amino acid
SDTVRKQWSRTEXSVWEAMLVXSMSESCIPVEDSQGTQWRGDYFSD

SEQ ID NO: 991880 - protein, 99 aa, Homo sapiens
APFIEDPVFIDSIHCSSSIQTGPYLLRNHHRVPHFNALFYIYKYLYIYFFNYCHPRLNMQWQGSHTPPSQAPRDFSLPTASAMYLETTRHVPDTPMLII

SEQ ID NO: 991881 - protein, 79 aa, Homo sapiens
DLEDPYGRCTKHSENRYNTNSFSKLKKGLIFSSFFFFVGRSRSVAQAAVQGRDLDSLQPRPPRFKQFWCLSLPSSGDNQ

SEQ ID NO: 991882 - protein, 38 aa, Homo sapiens
VVGVLEDPNGVFSGSPEYSEEKELEEITGEQEEYNLPV

SEQ ID NO: 991883 - protein, 144 aa, Homo sapiens
PRGSPTLSLWGGDLGVTLAPGFLTDDPVNHNLNRHIFYSQSHWPPHPGKVCINGPFIGIELKVDTNTTAELASERLRGAHSRRAARLGKEQRLCGCCAQPGASIKVANTTGWPWSSFRGKAKNPPGLGFNLRARRSGITGIISQ

SEQ ID NO: 991884 - protein, 39 aa, Homo sapiens
DSRGLPSLCGGHVRRDAVSHGTHSLLHRAVPQGLRQGGQ

SEQ ID NO: 991885 - protein, 66 aa, Homo sapiens
RSRGSDALSVGNALAPPDGDEGLLVFLQEMDNPCGCPQGVCDHGTGDWRNPWISTVGPAPPVRAMS

SEQ ID NO: 991886 - protein, 115 aa, Homo sapiens
AGCTVPWVNGSNTACKNWVRRCKRHGPSAKWRKRVMAGPRKGSSQAAQELRNHLGRESEKRCLISAAFFFFFLEMGVWLWSPRGGVRGHSFSAQCKARTSGVTPTHAISLCLSPP

SEQ ID NO: 991887 - protein, 67 aa, Homo sapiens
DALSVGALRTGPSNLSPAVSETRPASLTILLSCVVCEPSRTPWNTVQRVDKCAMDVPCTRGPCSCGI

SEQ ID NO: 991888 - protein, 66 aa, Homo sapiens
RINEKKDGIDSTVEMQYRGPERKQSLACGDLNLQKAVIQVGVRMGSFVTLKEQMGTPEGRTLQKGP

SEQ ID NO: 991889 - protein, 44 aa, Homo sapiens
LSQAPLALTPSLPHLQHRSGLPSFWLAAATSKSLAGQCGGCGQP

SEQ ID NO: 991890 - protein, 63 aa, Homo sapiens
MGPPGPPFNIKARKARKYYLGVIIWNNKDVILEEKMLTGEEMSDIYVKGWIPGNEEEKQKTDV

SEQ ID NO: 991891 - protein, 54 aa, Homo sapiens
GPTYVNVKTSASSALICLRIGHGDGPAAPELVPCGTFFHVSSLMLHELLATCDL

SEQ ID NO: 991892 - protein, 101 aa, Homo sapiens
RAVRMWRDLKIQLGILPGGSRLIAFDVWKTQRAFSKYEKSAGWVSNSQFLVKPLDMMVGKSGNMLASKAYIHQYTKLGIEEEDFLDSFTSLEQVVASYGNL

SEQ ID NO: 991893 - protein, 44 aa, Homo sapiens
MIPYTGSTCLCCSGGIGFTRFRAYDTQRVRGNRKHTISPEDHIT

SEQ ID NO: 991894 - protein, 41 aa, Homo sapiens
  misc_feature (2)..(2): Xaa can be any naturally occurring amino acid
SXGTYHFYDHDLIQGKYIVDGNPGGIVGKFKRRIHKYCYLQ

SEQ ID NO: 991895 - protein, 80 aa, Homo sapiens
GCCGRLSQAPPFPNPFKAHMYSHFFPGGSQSLHHGGPFWSSGPVGASCVHFHGSTHSPAMQPGATAHPQHMGCTHVHPHL

SEQ ID NO: 991896 - protein, 60 aa, Homo sapiens
  misc_feature (55)..(55): Xaa can be any naturally occurring amino acid
VLRCSRRLPSGAQSIGGFSLAVTSSFFHSRSILIGSTLASGGLSQHSALVPPAGXTGSSH

SEQ ID NO: 991897 - protein, 144 aa, Homo sapiens
  misc_feature (52)..(52): Xaa can be any naturally occurring amino acid
MITAHGSLNLRGSRDPPNSASGVAGTTGGRHHAGIIKKRLGIDGSHYVAQAXLELRGSSHPPTSASRSARIIGVSHQVFFTFKNGNLRRYSLHTRGTHFTGTVLNSSTHTYTGVRTSHNQYKEYPSPQKVSSYICAISNTPFRL

SEQ ID NO: 991898 - protein, 91 aa, Homo sapiens
  misc_feature (55)..(55): Xaa can be any naturally occurring amino acid
  misc_feature (68)..(68): Xaa can be any naturally occurring amino acid
RSLCGEGTSFPRDSRPFKFIMAALSMSTPGGVACSTSDPVLNGPDDLCSAGEKFXFPLGMNHQLLSPXLTRVIYVGNAFPALQPIPPTERA

SEQ ID NO: 991899 - protein, 71 aa, Homo sapiens
VCSTLVESESGLDQWSLADLALVPVLDICHCFETGPHGQEHEGSTGRLDQMYNFNAGQAKVGHIMAGYELE

SEQ ID NO: 991900 - protein, 109 aa, Homo sapiens
PELSLVGTRLGDLYEKRFNGSQFCRLYGKHGGICFWGHLRSFTHGRRQSKGRHFTQKKQERERGATLKQPDLMRSHSLLQGQHQRDGAKPFMMNSPPQRERQRPPTERA

SEQ ID NO: 991901 - protein, 65 aa, Homo sapiens
DALFCGGRGGGLVRPLDSFKGPRVGPGSKPHSWFGWSGCCMGMPAVLHMCSVSVTPTVATCGAPA

SEQ ID NO: 991902 - protein, 34 aa, Homo sapiens
MYGQCYVSNSHILINVILPASELPEVLGITACRA

SEQ ID NO: 991903 - protein, 73 aa, Homo sapiens
KYCRGVELSWDACSSSYQRLGRYLWGTEHEFDFWGSPCNRKTTLFFQMRKTDPLITGSTEHPRPPHRESVGYR

SEQ ID NO: 991904 - protein, 55 aa, Homo sapiens
LSEDPQSVFLEGLVSRPVCWEIKFTASELSSVTSCFRDEDDINDVTSMAGVNLYE

SEQ ID NO: 991905 - protein, 81 aa, Homo sapiens
YGCGRTSGTRKRISGRALECLIWEKEKTLTALSSNKSSGNNKAVQWYPGNPLKSGVGKLQYHQRERLGMPNSGYGPGVPSS

SEQ ID NO: 991906 - protein, 40 aa, Homo sapiens
GQYGCEGQYGCSLSSRLRLRSRGNSDVTKQDPLLKCHIRT

SEQ ID NO: 991907 - protein, 73 aa, Homo sapiens
TALSVGAGPSSLSSLSGGGGQDSSLGPLATGTSSLVPGLAAIFSHSFLIDAVMAPPPFSLQHSPISTVPTERA

SEQ ID NO: 991908 - protein, 57 aa, Homo sapiens
MDRESGAFNDPSDPFGFLARRCQTSLPQGIIWLVAAKRSELRRVSDPSTVGVFLVIV

SEQ ID NO: 991909 - protein, 126 aa, Homo sapiens
MSTQEAHCRGEGVSMDLQKRHRSGIPCGLELYRSSRVRVGLDGAQGHGRGSPACVDECTRRSHLSAAPSPAGCPALPLHSSLIRYGSLGISNDSCPKHNSSFSFQIGFISLLVSLKDSPTERASGT

SEQ ID NO: 991910 - protein, 112 aa, Homo sapiens
MFVHMLLVYHDYSPALSIRYELKEVYLDIWFRVVAETLTIMASTGNGQVGHCSITVDGIRYGERVHENAPYIIYHQICMRVTIHDDRMGTTCPHGFNHARHWVPPTIHGNSR

SEQ ID NO: 991911 - protein, 174 aa, Homo sapiens
MLQGGMRTADVARAINCNVHTVRRLRQRYRKTRWTADHPRSGRPRVTTPAQDPNIRTSHLWDRYRMATTTARITPGTHKPSITAKTVCNRLRGAGLRACRPVVRQVLTRYTGNNVTYEHKLTIAAPDRPSKKCCSLTSRGFVSLGVMVGFAFIVEGMSVTPRPVLRSGIDLEVE

SEQ ID NO: 991912 - protein, 126 aa, Homo sapiens
TAQLLRVLVRAAASICSRVLQAEGWWAALYVQQQECWCWMRPPHPRAVQCMRLVLRCVVCCCVTVRGIHLHAHWCWCLLWRGVRVVPPSACTPTDRRMGVPLACLFPLGCLLQLALTTKVHFDLTW

SEQ ID NO: 991913 - protein, 103 aa, Homo sapiens
TTSDESSDVRCVFVPSGGFVVSDFRREAADLRGECYLLLKTWQTQSVSRSKIYSTLWKRTQADRGGKLGSLFIPLSDPTHILLIGTFYRELIGPFYRQLIGPF

SEQ ID NO: 991914 - protein, 32 aa, Homo sapiens
MDVDTAAKRLRGAGQWVLESPRDPVCWGRGVL

SEQ ID NO: 991915 - protein, 45 aa, Homo sapiens
MASSVRLVLPRDTRLRVPSLQSGLGVKGQVSNHPSPHLLRAGGTE

SEQ ID NO: 991916 - protein, 93 aa, Homo sapiens
MRTKQRVTQYSTISRNNVENKSDCKVIIKSTDFIKFLSVPTQSRDPESIRNPCLRLLQLALFRALPRPHLRGTLTAPRSRGWQAPETRRFNYY

SEQ ID NO: 991917 - protein, 53 aa, Homo sapiens
MEATCSMPGPATALHGASCLCLELPAPPQSACPAVHSGRMTLNSLTNSSPHPY

SEQ ID NO: 991918 - protein, 84 aa, Homo sapiens
MYGEVNGQAHRCLVLMPYDLLGGPGVSSFYLAGSDAIWSSLMVRIPKVAYSDVLELPERALSPVVSVAARGHWCRVRRLALTYV

SEQ ID NO: 991919 - protein, 87 aa, Homo sapiens
VLKVCIGTVSGARHMSSHRASGEDHSPSSMQVREAVVAFQYVQGDWHWNVNIDCQSVVPSVAGRRRQHENLDGDTGMLQIDCAHSAT

SEQ ID NO: 991920 - protein, 67 aa, Homo sapiens
WQHYSVGAMGVHAHIYPLSAAVPDATYLHEWQASEDVSPNPGPQQCPIYIPTNGWAPLQHTVRCAQR

SEQ ID NO: 991921 - protein, 89 aa, Homo sapiens
MLSIAAVGLGRGHRDVIEFPSSSLGDGSDEEKLSAIRGEHRFFILSVAPGLTFILVFLRADPRGGVAEGEDGHVLRPVQPGHGDHGALA

SEQ ID NO: 991922 - protein, 111 aa, Homo sapiens
RGDLEDPSGEQSLGQSLGTITWNNHLEQSLGTITGNNHWEQSLGTITGNNHWEQSLGTITWNNHLEQSLGTITWNNHWEQSLGTITGNNHWEQSLGTITGNNHFPLSDGSP

SEQ ID NO: 991923 - protein, 43 aa, Homo sapiens
ETRQPIQLKWDLECARVWQQDTMLKLNLVDPYTTVVSSVTYYM

SEQ ID NO: 991924 - protein, 92 aa, Homo sapiens
ERFKQRRSLDRKNPREKYTSHCKVTEVVSDVTAVHRQGGERVPSERPEWKRGPGLHAGTFQTVQIYSKSCKRQLERLKANRWYWLGTVRWPN

SEQ ID NO: 991925 - protein, 141 aa, Homo sapiens
MTRSFTSRFTVWDGGNDAVVLWTSALKEESVLTLGAYCFHRMVPKLLSMPSCLPEAFTIIIIFLVVEFISGQGVNVVPILNLTPGLPSIIKHFPEVGSRCLQQDKLRREAFQEHPQQAICLFAKFSFQLGLCPSQGEVHHL

SEQ ID NO: 991926 - protein, 113 aa, Homo sapiens
TDDESWRESHKLSSGDEVCLARRSRDNGSYALRSGERGILTEGWGKVCLTEFCREVRLAEVYREGCMAEVWRKGCMAEVWRNGHLTEGWVKVSLNEFWRESRVGEEPREGLSG

SEQ ID NO: 991927 - protein, 119 aa, Homo sapiens
GLVLVRPCGVRDGFWRKAPLRGPNTGQDDNLVWEPGVLASLVPDSCITHLLETSGRFCGSKLPEPIVSTDSRLWVEFRNSSNWVGKGFFAVYEAICGGDVKKDYGHIQSPNYPARQEPH

SEQ ID NO: 991928 - protein, 52 aa, Homo sapiens
MFSDAIQEVKWRAQDQIYILRTRMDSGSQVGADFQGATGCEAIDYAILDRQK

SEQ ID NO: 991929 - protein, 47 aa, Homo sapiens
CDKAAETQDLMKVLPNQVLKPLPGGFQVPKSAALFVGHNMLLVSEEP

SEQ ID NO: 991930 - protein, 90 aa, Homo sapiens
MCVGKPECVVPQWCSNRSPILPWLTKLQIIYCYSSVKPEVHNQGVMYESLSLRPAEDDAPGLSPASGVPSRPWDSLALVDGKLRSPPLSS

SEQ ID NO: 991931 - protein, 86 aa, Homo sapiens
KTPSTGSLNYGHSCCLAEKRPHYDAQAVMQWAIIANCSLDLFGSTEPPASASSVAGTKGTHHHIWLICVLICRDRVFPCCPGWALT

SEQ ID NO: 991932 - protein, 39 aa, Homo sapiens
PQPRVTEAAEVVVEVEVSDSTNYGKASDVVAIHGPFNAS

SEQ ID NO: 991933 - protein, 54 aa, Homo sapiens
MGLEHSVVKKPGSRNGLDGTSLLKPVQAAQGKSQEQCTSSEPGSHMPLSVSLSY

SEQ ID NO: 991934 - protein, 31 aa, Homo sapiens
MNSIFLHREPCGGGFLEGIVDNLHAVIHYST

SEQ ID NO: 991935 - protein, 70 aa, Homo sapiens
MSRRNNTITVHDMLLSSNPLITQRTLLPNIVPIAILVFAACEAAVGLALLVSISNTYGLDYVHHLNLLWK

SEQ ID NO: 991936 - protein, 60 aa, Homo sapiens
DLSVNRRASFTRIVYYYTRTESILRYRTDNALNTHLLVDLETLHKQKVKAGQDDDLHIVP

SEQ ID NO: 991937 - protein, 66 aa, Homo sapiens
QLSSSCVIHPGEIYDRHTLNNRETCSTRQPEKTIPIPDEKLDMIYHIQRDQKSPRRTPNNLEAQMC

SEQ ID NO: 991938 - protein, 67 aa, Homo sapiens
GGVSLGGREHAEGRSPAGVVNAEASGGDTERNSMAARRTEQSSPSSPAHARTDTLRAPWSTDRSHPT

SEQ ID NO: 991939 - protein, 71 aa, Homo sapiens
MYPDEDVYERAHLTYRVNNSDRGGTQTVASPPLGVHAGEETEAEVAGAAPGSRGRGRQGRESLTSGSSPPE

SEQ ID NO: 991940 - protein, 132 aa, Homo sapiens
MLRLSPITSQTSNMRGRQSWSHREVKNPEADNKRIGLSISFILRENLTFYLQCPSQKSAQDHTYPPTYGFYYTGKSKIKVDNQLPYHLGLTGRRSIPASTDRKHQEHPKGDISLRTGRHKGAENDYHPQSWK

SEQ ID NO: 991941 - protein, 64 aa, Homo sapiens
MFVSTHILHTITLCICKRLYLILTVHFELTKKNNGNYRNCGRTFNLLGLVLVVPIFGQSHNYSG

SEQ ID NO: 991942 - protein, 39 aa, Homo sapiens
MERHRCCTRYTAHVGQAPVHGRGKMCLVVAVSSPAGVSQ

SEQ ID NO: 991943 - protein, 46 aa, Homo sapiens
FTTLYFLNALYSLYAYTSYKNIQAGKRGEVYSVEKYKAWRKYKGVE

SEQ ID NO: 991944 - protein, 67 aa, Homo sapiens
VQFGTWLGTEQRSPVPPPLACWYLWEARGLASRPEHRTQAGEGSTTRGALSVPVGSSPHWSHQLSWI

SEQ ID NO: 991945 - protein, 57 aa, Homo sapiens
MGVSSHPLTISLVSARMNCSFSGVRIHRANFWPVRPSPSTTIRHWPGVTQLGGVNHG

SEQ ID NO: 991946 - protein, 105 aa, Homo sapiens
  misc_feature (66)..(66): Xaa can be any naturally occurring amino acid
ENPEECALVRCASHGLPWKNDDALSVGSSLYRCRGLVVMCGEALQPLVLPPIPSVTYLNTFGAQPXSVGCHVGDVGASLFSRAPSPSVRSPPPLLVDELRCLWWT

SEQ ID NO: 991947 - protein, 69 aa, Homo sapiens
MPAALSVGFLPWPFISPLPSGQFCQALLGGKLHAALAGPRLSLVVYSQGARPAVGFADPRFRHAPQAEQ

SEQ ID NO: 991948 - protein, 84 aa, Homo sapiens
MPGEVMGAPKSLGTELAQEVLASCVDHQVASHILPGVEASFTVVALVLLFLGSARGLLFRMGFEVVQSTSVLPSSRAQTPQRER

SEQ ID NO: 991949 - protein, 89 aa, Homo sapiens
MPTPLYGVTARQVHVHVMLTSMFMYGVLAPWVGPLPQPRLPHGRAQCRPGLHQTPCTWECLQALTHSHLPGQHGGIPLVGAACIILLHL

SEQ ID NO: 991950 - protein, 41 aa, Homo sapiens
ARSNTFQQCRTINRCCSPGCTVKGSFVAPFNHIHHRLKCHS

SEQ ID NO: 991951 - protein, 96 aa, Homo sapiens
MGACRQWTLKKSALIVHAYGALLMHQTLRFLFYPLTNSPTKYCQPHFKDEETGPGTVAHACGCNTLGCQSRRLRQENHLNLGAEVQGDEDGALHPA

SEQ ID NO: 991952 - protein, 35 aa, Homo sapiens
WRDDLLCEEKAAVGKKPKPEQGEGWIATRRDGEVF

SEQ ID NO: 991953 - protein, 88 aa, Homo sapiens
GSPGQYGMWVGRYGNKSQATEPSSGNLPGHLPTPWNVCVSLFAINFVAAHCLGLRHLYELLHSTHQQVCQLHSCKPSAARGNPHRAAA

SEQ ID NO: 991954 - protein, 128 aa, Homo sapiens
  misc_feature (28)..(28): Xaa can be any naturally occurring amino acid
STLRTRRSLCGAITGLMLCLSAAGVVLXAWCGDCPIDTGPFTTQPWDLWLWLELEKRAEKLVPTKDPQQHLLPLSDLGNSGHNPCTHPHSQLGHWPRSPQENVSGTHGPPQRELSTLLWGRHQWTQRE

SEQ ID NO: 991955 - protein, 92 aa, Homo sapiens
SSEDGVPPRDWVSVAWEDVIHVGSHSGRILIPINSISHDRNTGVDLLSVLTCTASRTDANYIGGTIRNKARPRPLPLRDATAHGLPRGIHHG

SEQ ID NO: 991956 - protein, 45 aa, Homo sapiens
GYKSLGSVTAGPLNGSQDLLLVLLGEVGVLRQAMGGRRGYACFII

SEQ ID NO: 991957 - protein, 59 aa, Homo sapiens
SSPRRLASPASPLGPRWSITALAEPSRRRLPFCPGDPFSPLKPRSSHIATVKPQATVNP

SEQ ID NO: 991958 - protein, 87 aa, Homo sapiens
AGFLMADELELAWSITPGVMAGLTAHSKFCGSLDRAACSRTAVGSVGAIFGLSLSVSCLMPTSWHSQEPVKLSPGQWLRPCLLNSES

SEQ ID NO: 991959 - protein, 78 aa, Homo sapiens
MRLPLGDRARPCLKNKKKLDRGPGISSESEWQKSESKSDDISLVEIIKVMALVVSQQPRFSSLALDTLFSTYDMNLGI

SEQ ID NO: 991960 - protein, 37 aa, Homo sapiens
MARSRLTQPPSYPGSSDSTCLQAPKLARTNRRYPPRP

SEQ ID NO: 991961 - protein, 78 aa, Homo sapiens
CVRILFVHPLSFSPIHFSLSSLPTPPSTLLIDLKDAFFTICLHPDSQNLFAFTWTDPYTLQATVNPQATVNPQATVNP

SEQ ID NO: 991962 - protein, 124 aa, Homo sapiens
  misc_feature (74)..(74): Xaa can be any naturally occurring amino acid
  misc_feature (102)..(102): Xaa can be any naturally occurring amino acid
  misc_feature (111)..(111): Xaa can be any naturally occurring amino acid
MWVRPCFLIPRRAEGDTKVYQAVLKAKIQKLAESLESCTAGSGRYSATQLAVSRFTLLPPSSTSLGHDLKNLPXLGLPKKCRALQGMSPPAPGHGCLILKPXVKGDPPRSXNLQGYAKSWATGP

SEQ ID NO: 991963 - protein, 30 aa, Homo sapiens
MTFSCGLLGGITVSLSFDSWKAGASGDVIL

SEQ ID NO: 991964 - protein, 44 aa, Homo sapiens
ILPPRLYHFSKAFIILHFHFPGHAINSVAGSHTQRFAGVTGSSH

SEQ ID NO: 991965 - protein, 59 aa, Homo sapiens
GLTVLEKALTLSSTSTTSYSLIKGISIAVYRGYLNEIARRPSCPQLYQGGSLKSSTLQR

SEQ ID NO: 991966 - protein, 90 aa, Homo sapiens
MSLLVMYSTLVLVICSASRVGLQVAYDHAKGEGGSDMSRGEKQEQEGGRRRCHTILNDRILQEFTIKKTAPSQATVNPQATVRPQATVNP

SEQ ID NO: 991967 - protein, 39 aa, Homo sapiens
MALWRDPRGLNRRPLAQQRSSGLCKPRVNPIKPRFNRTS

SEQ ID NO: 991968 - protein, 38 aa, Homo sapiens
PHDLWLEPYSPLLTTYTLLPMTPVWNPTVPYSQPRTLD

SEQ ID NO: 991969 - protein, 82 aa, Homo sapiens
AAAACTTEGDGSLGAQMADAWFVVASVKCVCSIACGSPWLGPHTPVFLCLEPGSAGIGHYSVSGDRVQFSYPTHAHKKVTIL

SEQ ID NO: 991970 - protein, 53 aa, Homo sapiens
VVVELGEAWVDCEHFWDKGKRCEYSLVRLDGQKLQLWYGQYLHYLKSCWRSLE

SEQ ID NO: 991971 - protein, 108 aa, Homo sapiens
MQVSFPPSSCTHRTLSARASAAVAIGVNGMSVCSQLDLTEHLLFILTGSGLADTRAVHSMSPEMSAHMIMVRLPLTCRLLHVPSRTHGILFCATTDTIKRFADYVTGT

SEQ ID NO: 991972 - protein, 51 aa, Homo sapiens
PEDLGLLGKRGFSGPLGGYWKTLDFSGPTLDFSGTPWTLQEDTHLSWNTLD

SEQ ID NO: 991973 - protein, 47 aa, Homo sapiens
MQVSNSIYRRSFMVQESIGVGGKKKDKVKGYMIETLSFGLQTPAKYY

SEQ ID NO: 991974 - protein, 32 aa, Homo sapiens
MIYEDPDFLDIFSSIRYRQYFLCFSHSDTCIQ

SEQ ID NO: 991975 - protein, 147 aa, Homo sapiens
CGVPLWETDCLLLDTLFILLILHLSPYLILPGRRTRTQDLSNGGARRAVAQTGLDMPPARHTVGEEKERTAVALQGAQTWELPELACDSIFGTLWFLVSPNFQELTMFLSVNHGSCLQCVWSGRSLTESPPMLAPGAAHPAAAPSVP

SEQ ID NO: 991976 - protein, 34 aa, Homo sapiens
SETGTGDKGQDRPRRNKKSESSPKEDKPSASREN

SEQ ID NO: 991977 - protein, 52 aa, Homo sapiens
LHLLVSAYGTNQCRGQEALTLNLGGGAHCLTLFSAARPMYHHAGSKWVNNRS

SEQ ID NO: 991978 - protein, 50 aa, Homo sapiens
DGAEEAQTLGGRPRLLILDDIAGNPGKWRLPGYQTGIGCGVQDTQSDWCI

SEQ ID NO: 991979 - protein, 61 aa, Homo sapiens
YILTFWVSEVYSTQSAQIRATRAGSTRWFIHLDHHTKRYTERRHLFKIDNTTIQLISVDIK

SEQ ID NO: 991980 - protein, 47 aa, Homo sapiens
ADVIYEDPDALSVGLPGSKGPVGEGSQRGEACGTPKGINVGAGGSVN

SEQ ID NO: 991981 - protein, 66 aa, Homo sapiens
CRHCVTGGGGEAQKRQAQEEASACGRQVQDGRQRKRQAEVDAGLRVKAEAEAAREKQLAPELAARP

SEQ ID NO: 991982 - protein, 58 aa, Homo sapiens
  misc_feature (19)..(19): Xaa can be any naturally occurring amino acid
AAVISQAPRGAPSIGGCSXGCPSSFSTSRSILIGSTLAQVASANTVHGSPAWVTAART

SEQ ID NO: 991983 - protein, 56 aa, Homo sapiens
AVIDEAAAISVEGGIKPQAHHIAVEEICEKLKKKDSQICELKYDKQLAPELAAAPE

SEQ ID NO: 991984 - protein, 159 aa, Homo sapiens
  misc_feature (60)..(60): Xaa can be any naturally occurring amino acid
RLDVQQVVLEGKMSHEQEKERFTHSSSDLTCGGFQAKNDEGGGVILSRNIRHISGLCEPXQFWEQELESLHFVIEMRNERIHELTGVILMEPVEEKNLILGEKITTLQQENEDLHVRSRNQVVLSRQLSEDLVLTREAWRRRCVGRQLSRRRRACVRVL

SEQ ID NO: 991985 - protein, 88 aa, Homo sapiens
GNKSFGERSRGHTGPGKTGDLCYYYRDSSPPPYLTTDSNRLQYNESNDSGKYGKIQTLLEKEFFFGGIKFILCFKFSVEMGISLCGPG

SEQ ID NO: 991986 - protein, 74 aa, Homo sapiens
GLYAVWLVDLFEDAGRVALGPPVLEGQSSSTDDASQCCCLLIRSCREVSRVKTLSANGGVVRDTISAPDSSSPL

SEQ ID NO: 991987 - protein, 113 aa, Homo sapiens
TSVMLWKVSAIDIEESELEDKVFELTQSNKDKEKRIENMNKASKKSGIMLNDHILRIISVPEEEENTKSLENISAGDNLRKTFPWPCLENVDIQNTESIKDHLGKFIFKKIFA

SEQ ID NO: 991988 - protein, 48 aa, Homo sapiens
GGTITGSQEYETGRANRWNPGGRGGREPRSVAWHSSLGERARLHLQKK

SEQ ID NO: 991989 - protein, 105 aa, Homo sapiens
LCCGALTVPRSLGGGGLRRRSMVCQNFLLAEDAPHGHYHRPRGTRVAAALPVQIHPPIIAVVMIRRVWVSINRHQGPRPGGIRGSKYQQQQLSPIAASVPTAAAS

SEQ ID NO: 991990 - protein, 39 aa, Homo sapiens
MSSAEKAGRWRSPAFTGRPVAGMPALHLRSPPHRESVGY

SEQ ID NO: 991991 - protein, 59 aa, Homo sapiens
DLSRSRSSLCWGLAGGSLGGRQVVPGSILGMAKVQAGMAQPAWPAIHISSKFRHTPQHF

SEQ ID NO: 991992 - protein, 75 aa, Homo sapiens
LSRLGDALRYRSLGGDLSLWGTALSGDLLSRVGDLSRVGDRSLGLTLSRVGDLSRVGDLTVPGPSDGDQDGYVTV

SEQ ID NO: 991993 - protein, 115 aa, Homo sapiens
MVTFRDGSKVTTDEVTDLTEKVREQISRAFYTHGAPLCILSHPHTSSSQGSASYACCYPLLKLPLPGTGAVRLHHPIMKDYSPPPVDSDRKQGEPTEQPEWVGTRHVPEASTERR

SEQ ID NO: 991994 - protein, 86 aa, Homo sapiens
TRCCDKISRSMQLDGYSIFAIGVADADYSEWDYIGSQPSARNVFLGDDFDAYTKIEDELITFVCANSHQQPVQWSHKAWPLHLAGI

SEQ ID NO: 991995 - protein, 46 aa, Homo sapiens
LTGAASPNAKRRPVLALIVCNSTFRHFFLIRAQPAFPMFKDLAGVK

SEQ ID NO: 991996 - protein, 37 aa, Homo sapiens
LCLSAVDSSPSGCGSRLVDVLILAFGLLCRALAVVWL

SEQ ID NO: 991997 - protein, 56 aa, Homo sapiens
MRLTEHVAASAPSNRSVDSLAFLVVVLGAKVHSVILCARSVRPSGSCKLVLPPICH

SEQ ID NO: 991998 - protein, 65 aa, Homo sapiens
NLVLGVEDFLVLGSNVSLSSRWTPGSSCGQNRALGGLHDFLGSINRSLPFEMFSLEIFPGLLFRD

SEQ ID NO: 991999 - protein, 101 aa, Homo sapiens
RQVVLHRQVSTPPDRLYSTGRLVLHRQIVLHRQFVYHRQIVLQRQVVLQRQVVLHRKVVLHREVSTPPAGCTLLGLVLSAAKKATGTGAMSPPMSCRKALA

SEQ ID NO: 992000 - protein, 40 aa, Homo sapiens
PCRGWRHWVPRSLALLCTAAIGEVHPCMAETQCIYGFSRI

SEQ ID NO: 992001 - protein, 80 aa, Homo sapiens
MLTRMVIDSPDLVIRLPRPPHSAELTGFYVVDTEHLLWLILIMNRAFSTTTSSLAASSGHSHTTDPPSCDDADRTLKAEP

SEQ ID NO: 992002 - protein, 102 aa, Homo sapiens
MCAVRPLIRVEILPVPYVTEASRLTVLLPLAAAERDLAPGFLEAFATAALEPGDAAAALTLLLLYEPRQAQRVAHADVFAPVKAHVAELERRFPGARVPWLS

SEQ ID NO: 992003 - protein, 59 aa, Homo sapiens
MAQGAESDPHVTEPLMGGVPETRLEEERERELPPPAPPAGITRSKCKHELKLLEKIPEN

SEQ ID NO: 992004 - protein, 38 aa, Homo sapiens
RAEAHEAVRWQAGPGEHSADPVTGLVRHANMWALGCSA

SEQ ID NO: 992005 - protein, 102 aa, Homo sapiens
MDALHFWSRRVLASPPLLILLRRPPPPGAVGTLRAGVLLFLQELSLSPSRVAGGAVVPSPPPRGETVVPAAGAPRPSAAFSCCSGNGGLGRKLLDGPSRSFP

SEQ ID NO: 992006 - protein, 33 aa, Homo sapiens
YFSALQAPINQRPHISFFSIPYVINTRPEIGYR

SEQ ID NO: 992007 - protein, 103 aa, Homo sapiens
RRVGSVIVGEVLRGESQTQEVAGHSHSEGLLGSGHLLDDLHPGLRHQKHLDGCAIDRDDANCYTEGEPTHRVLVQCKRGCPLDAGPRRHWLEVQHVDQADGAD

SEQ ID NO: 992008 - protein, 58 aa, Homo sapiens
MGSVDQILRPRGAVRAPQSLRSHGRSGPLPHLPPCVSSEEDSMGIDRPDSHREGHRMS

SEQ ID NO: 992009 - protein, 56 aa, Homo sapiens
MDPDTEALNLIDGTVRDELSTTDEDDATGGGNRPPRCSGWRKMTVRPVSASSPIDC

SEQ ID NO: 992010 - protein, 97 aa, Homo sapiens
MGSVLKLPFLALRSALPGLLQKVGLSLLLMLLDFLLTDLHQQLKEGWGCSFPSPGKPQLPSDGPAADAHGNDLLQARMIHIIIINGSILYHLLEQRL

SEQ ID NO: 992011 - protein, 62 aa, Homo sapiens
MGSEGPATRKAEEEHGVNGGCLSSQRAENVLLHFSLGSRARLHLKKKRGLSTGRGGSRVASQ

SEQ ID NO: 992012 - protein, 44 aa, Homo sapiens
CLRYELQRGTFSSKVGRLEGVTNWYHMSTILMLNALRGNWLRGW

SEQ ID NO: 992013 - protein, 104 aa, Homo sapiens
MGNLLTTRRRKTLITVNSHFFLKIVTLELRPGPDGKLKGWTLCQDSLGLQTLELSEIIAGNNLEADVALLDLGQLDHPSYAGYRDFRSRQRLGSASRVTSTKNH

SEQ ID NO: 992014 - protein, 34 aa, Homo sapiens
ILSLTGVIMKIDSCVSRKFIAELVLTMVDIGWLV

SEQ ID NO: 992015 - protein, 61 aa, Homo sapiens
ELTAGGQWLIALAKLSEIDVALEGVKGGKNFFEAKVQALSSGSKFEAELKAEHDITETGGG

SEQ ID NO: 992016 - protein, 35 aa, Homo sapiens
MFFKLPQFTNIVIRLLCCGNNKYRHKCVVTPINDD

SEQ ID NO: 992017 - protein, 72 aa, Homo sapiens
MVKKASFKVNCSVEGGVGSDEREKWIGVMDYGMNREDSLTDGLEVVNERYEPSDFLTGRIGVLYGECVGLRR

SEQ ID NO: 992018 - protein, 39 aa, Homo sapiens
MVLRVNDTERKRFVPAEDSCRPVQCSMLHTSEWQLCCVP

SEQ ID NO: 992019 - protein, 44 aa, Homo sapiens
MRTELCIFMVPFHLHQSLLRNSKRFSIDNAQQNFLVSTFLVFPS

SEQ ID NO: 992020 - protein, 131 aa, Homo sapiens
MDYTSCAYYWVKYATFCKTERTVPPGPRCLPPEGRHREGLWQASLNRWAGECPTPRIDPGHENSATECCAIIDLDPDFEPQSRTRSCTWPLPRPEIANQTSEPAEVEPDLGEKVHTEGRSEPILIASRITE

SEQ ID NO: 992021 - protein, 35 aa, Homo sapiens
LNDSEAGTSLEGTVSAPFGKFQETVTIWEIINSEY

SEQ ID NO: 992022 - protein, 46 aa, Homo sapiens
IIINSWYDGLNCTTQREVGVSADKVYMLYLNSLQVKARVGRAISGF

SEQ ID NO: 992023 - protein, 41 aa, Homo sapiens
MRYTSLPIRVGIPSSRSFRMCIVIACRGVLHQCCRRKILLR

SEQ ID NO: 992024 - protein, 112 aa, Homo sapiens
YLLRSFKASCRPSNCMEAQYHGFAMPYFIQVMQEYLTKVDKLDSSESLRNEEEPATETQPIVYGQPQLMLTAGTSVAVPPQATLGYGNNRHTVWTATDWHRVQHVTLQRLIL

SEQ ID NO: 992025 - protein, 75 aa, Homo sapiens
VCAGGPVAGTLSSHGSPGNRFTSESLICSDEKTEAIAEKELLIFTQPKNSSDKRASHTTHQNQHKKIIREQKNHT

SEQ ID NO: 992026 - protein, 46 aa, Homo sapiens
YVGYSGPKLPAIFKPGHQVIILNQLNMRPRQTDASSTHAACVHAPL

SEQ ID NO: 992027 - protein, 38 aa, Homo sapiens
TSDEFQFIHPESMPKKQKPKTNQKKPTSGLAILIWFLW

SEQ ID NO: 992028 - protein, 32 aa, Homo sapiens
LGICHCQLTRGAAEARGAGAAEAIDSVLADPT

SEQ ID NO: 992029 - protein, 35 aa, Homo sapiens
DCEPPAEEQLCNDSRTSLAEAIAMNLAAGPALMRT

SEQ ID NO: 992030 - protein, 36 aa, Homo sapiens
CASLPCAFTSVSYLLVSFSKSVFSFLVPTALTGDPL

SEQ ID NO: 992031 - protein, 102 aa, Homo sapiens
ERGRRAEDISVAGSSCRATQEWPAAPIWEVMTNTRNTPLCLTKFSFSKVEQKYQKYHTRTSPLFFFFFFFSEREFWRVPGGEEQGGRIWVHYNLGLGASALQ

SEQ ID NO: 992032 - protein, 174 aa, Homo sapiens
  misc_feature (112)..(112): Xaa can be any naturally occurring amino acid
  misc_feature (160)..(160): Xaa can be any naturally occurring amino acid
EFSNAHGYLLDTSLEPTLCGQTLWDNTEVIASYNQLSSLRQPKAVRYRVVNLYEDDHKNPTATREQVDFQHHQLAEAFKQYNIYCELDVLEVSNSSVRRRLILANCDISKIXDENCDPEVQHTLTGHDGGDVPHPRHPAFVKKQHNGVCVMDCNYERFNXDGGECCDPEITNVT

SEQ ID NO: 992033 - protein, 155 aa, Homo sapiens
TLWVSYVGEGTVEGGDVQSWVSTWVASPARTGWWKGSPWRHWGSPGPQECFPTALIRKGHSRGLGAGWDGKRCKSTYTHRNRGVIRAPIAHNRQNEEQQDPAGLLFRSLQRLNLIHGQLIGGLLCRHLQLLVDYQKPLPFLLSFLSMSLLVLNAG

SEQ ID NO: 992034 - protein, 72 aa, Homo sapiens
RAVQQVERIILSHAAGGTQPLVSKTVCACDAAGFLGLTEMQDGKVCAEPRNLARCKKSPAFSVIKPWAFNSA

SEQ ID NO: 992035 - protein, 55 aa, Homo sapiens
  misc_feature (24)..(24): Xaa can be any naturally occurring amino acid
RGRMCLVMGLSLACALFNTLLAPXLYAALGAICFTLFLAHDNCAAVSYDSATALQ

SEQ ID NO: 992036 - protein, 82 aa, Homo sapiens
LISIKYGGPYHIGGSPFKAKVTGPRLVRNHRLHGTSSVLVGSLTKDNCAHQHGAPGPAPADASKVVATGLWLSKAYVGQKSS

SEQ ID NO: 992037 - protein, 89 aa, Homo sapiens
FREQSQPTVGLWAMETCWLGQTACCPRWGLLPALEARLSGDSSTRVGQWDVLSSCSRRRSTRTLTLLLGAGHSRPCFSNSPCGWLQSCL

SEQ ID NO: 992038 - protein, 89 aa, Homo sapiens
DENAVCEGCFFTIALHPDSQNLFAFTWTDPDTLQSQQLTWTVLPQGFRDSPHFFGQALARNLTSLNLSPSHLQYVDDLLLCSPSLKDSQ

SEQ ID NO: 992039 - protein, 47 aa, Homo sapiens
RRQCTLILQVTLRTPARKNRPGEFECLIKNKAFVEGPGDGVFDSLML

SEQ ID NO: 992040 - protein, 118 aa, Homo sapiens
RVKRARWRRRTEIGASAVRAGHESTSPDWSATCPPAADGHDARSGARDKQDMTWSGVTAMDRGCASGLPEHLRLVRLRQEAGLSLYFLHGVGTLWLPSETPRSHKMTEMVLPSSSLGL

SEQ ID NO: 992041 - protein, 40 aa, Homo sapiens
WTGGLRRLGRKKRVAALVQRQSREQVKSGWTWLAPPPPPG

SEQ ID NO: 992042 - protein, 33 aa, Homo sapiens
RRKTRAGGMRAFIRSKPPAPAPQAGGRRRVLTV

SEQ ID NO: 992043 - protein, 67 aa, Homo sapiens
RIFWRQDTDYLHSRLGGSRAGHKERARCLLHVPATRVLLGACFTYPATRVLPDETREIMKQPTHIAL

SEQ ID NO: 992044 - protein, 52 aa, Homo sapiens
MVQWLIYLWAEANFFFDRKILTNPMVSKDKNITYFRNLGLWLGVCGSVLALP

SEQ ID NO: 992045 - protein, 83 aa, Homo sapiens
SQSVGDLKRLKGPSRSFQRRCKELHPKCQEVNKVRPLPFLPPPQHRQSVNRKKQWSGGKENKKIKTARPWAMRLPGTRDLGSF

SEQ ID NO: 992046 - protein, 33 aa, Homo sapiens
MTVENSAHVSASVESSCGFQVPSSICEPSPVLS

SEQ ID NO: 992047 - protein, 56 aa, Homo sapiens
HDELQDVKPPELYPLETIQLWDYNITQMLYLSTPTLRRVVPKMQYTILYSLPVLNI

SEQ ID NO: 992048 - protein, 101 aa, Homo sapiens
ARTTTLTLPHHLQKVGEWLPGREKGGAEALSVGGSGVVLEHGAAWELWLKCGLPGCGEMQSALELVLEEIGEPSKVLRGEVIRKTLLLAMGRMSGKGVVAE

SEQ ID NO: 992049 - protein, 64 aa, Homo sapiens
QPTLSCCSAIQDQKRLLDFREGQRPDRAILALALHGSVLDAQTGVRTFEYRGKATPEKWNPAVT

SEQ ID NO: 992050 - protein, 153 aa, Homo sapiens
GSPALQLLTAARKRRRLQVVAENGLCVGIAAVELEEEQPELKMCGYMALSLLWNLLHQEVSVLVPEPTVSCLDDPSHLPDQLEDTPILSEDSLEPFNSLAPEPVSGGLDGIDDTALMGAADKLALEDRPVISGLDWPSLHNGTGFNYWPMKIK

SEQ ID NO: 992051 - protein, 54 aa, Homo sapiens
LPDLQLLRELVILTPHRLEGGTCGCVDLHDDMQTLTGEHVGAGLLHVAGSSPSE

SEQ ID NO: 992052 - protein, 42 aa, Homo sapiens
AICEDENEHNLRLHTVTKIITLLLSASIVVLASKHQREFGVH

SEQ ID NO: 992053 - protein, 70 aa, Homo sapiens
PPSYDANMVGPPRIPGGRHIDCEVCADTRVGHKRDYMSKTPGVKRSSQLGLPKWWDYRCEPTPAAYRVRL

SEQ ID NO: 992054 - protein, 102 aa, Homo sapiens
GCDMMTSRRKRMVSGKSLRFQGNLVTDCAMDEMVQIQLRYYAFPTLFATHRSGDSLRCLCYQGPGLQAQNLVAVWADTEKLQFLFIPQWRLEHQRDRTVDSP

SEQ ID NO: 992055 - protein, 74 aa, Homo sapiens
MWVCKSLCNSLLKPNFVMTDATYYEDMYDYATITVSMQPTELMVNTVTLQLFVITNEPVKTIEVRNQEDGLKKT

SEQ ID NO: 992056 - protein, 87 aa, Homo sapiens
VWLQPLAWVPAAGRAVRAMRRPSVVWYGPAASPVVLGPGPGGPPVVPGPLAVAWRAPETPDQLTSGETRPPGYGGADAGARGLAGPP

SEQ ID NO: 992057 - protein, 66 aa, Homo sapiens
CKVAVIENTQIWESLSGPLLMEEQHLEMEGFGELINRDSSKWRIPVGQVQIKYAMRNPDRRSSVYV

SEQ ID NO: 992058 - protein, 128 aa, Homo sapiens
PLAPPQYSVFHIKLGHVLTPHTCRVLPKPPSHAGWRACLRPAQHPTDPEVGKKGTREGDLRFLFFLLFLLSVPSFSPRISLNTLTLNVKSEKVYTRHGVPISVTGIAQVKLSEPFPHSPLPHHPLSQT

SEQ ID NO: 992059 - protein, 41 aa, Homo sapiens
TSNEMSFHYGLVETELQLTFSQVAYRFICTGAGVRPGPGPP

SEQ ID NO: 992060 - protein, 86 aa, Homo sapiens
DTANISPLTKKLHSNVRFPGRNWYTEKLPAENRINSARCSHSTHYGWHEWVRVDINYTLPAEKGLFREISGSCKARKIFDVRDAAD

SEQ ID NO: 992061 - protein, 118 aa, Homo sapiens
MQVILPVSASQVVGITVACHHAWLIFVFLVERGLSPCGQAGLEVLTSDHLPVSASQSAGITGVSHCAQLRSDGFKKRSSPCMRSHFWPATIYVRCDLFLLAFHHDCEASPAIWNCKFN

SEQ ID NO: 992062 - protein, 56 aa, Homo sapiens
MDTEGLHRIGAGGFLVGSPTGHVPYMPWGPYLVLSGPGPGSSRFSSCACPREWLTC

SEQ ID NO: 992063 - protein, 136 aa, Homo sapiens
MPTSRTGTYQKRDVSLGTYAAGLLEPQEQEFGKSAWIRDYSSGGSSRNLDAQDRSFGTRPLSSGFSPEEAQKQDEDFEKKIPSVEDSLGEGSRDAGRTGERGSGGLFSPSTAHVPDGALGQRDQSSWQNSDASHTL

SEQ ID NO: 992064 - protein, 50 aa, Homo sapiens
ALPHNSLSKRPLAAPVSWQTAGAWLVTHGAPGLQAGDVVYRTDYKYTEWI

SEQ ID NO: 992065 - protein, 57 aa, Homo sapiens
GFVCAETYLLAIDITLHGISSADASGTRYVMYFHKGPLDDRDTFTFVRSWVCRGHLA

SEQ ID NO: 992066 - protein, 70 aa, Homo sapiens
MARKLGFHSLPLEAEEVITDLRQHFRTDHPELHLEKWTDGRTKTRETILHCVHAVWSKTKVVDLDLDVAI

SEQ ID NO: 992067 - protein, 38 aa, Homo sapiens
MPLHAARWSTERQSLPSVRSPMSQFNVCLAQYVVLLNW

SEQ ID NO: 992068 - protein, 86 aa, Homo sapiens
QPTIAMQHNHSFQAICKSCIFPLPSVFPSMYCNHQGRQKHNMVNTYNTHKPAPNNPAWTGLWQVINSVAVYVRRSGRHAPSSHSDG

SEQ ID NO: 992069 - protein, 144 aa, Homo sapiens
AGRNVSHTGFSALECIKQSHVSVYFKTLLLAALKSRIFIPMFLSFRSYLIREVILSIVMHRNYPPSKCASSSASQPDPVFGREVLAHSSSTATQSRKSTGCFVSDISDFLRANTSSDKPKELEPSLFLTETPALAHRLRHLASR

SEQ ID NO: 992070 - protein, 182 aa, Homo sapiens
LDAKCLEKGIAGPYQCEIRDRYGGIQSDDPVTLNVLYGRDLPRIWPSFIYYRAGEVLYLSLFCGLYPTGTVFLDNGMNSISSQDNSVFIRHITTKHSGLYVRSVRNSATGKDSSKSMTVRSLCLDSSLNSTSISNSIFSHGITMSEIHSVPEALSAGGGQLNVNFMGKAVYVTHEPLRSQQC

SEQ ID NO: 992071 - protein, 110 aa, Homo sapiens
MFTLAISKSRTWCSSLSVTRRSKGYLSSRRVWLVHVFVSERGPDDELLRPEDRPTVLVTVLFNQASLALGADQSVNWIGSDPDKHQALTNTQYMNPSETAHDTARTLCIQ

SEQ ID NO: 992072 - protein, 106 aa, Homo sapiens
MQVTLDGLPLLMQVSMATCRNYHGVSTSIDGCNVVMETGYCCVAHAGVQWCNHGSLQPPVPGAHVILLSRLVLNSWVQAILLLQPPKVLGLQHLSAQAHSHFLTTE

SEQ ID NO: 992073 - protein, 55 aa, Homo sapiens
VDSCLLLVPCQHPDLDARFVKSFYRFRDSLLQTVFNASSTKKCKLFSKLMADSSS

SEQ ID NO: 992074 - protein, 74 aa, Homo sapiens
  misc_feature (74)..(74): Xaa can be any naturally occurring amino acid
GLQLLRFLEPAELSHTHSGVGAQLPVYLCFRLLHACGALPSCTYRLVGSDSGCSTLCCSYDVLSPSVEPVPVNX

SEQ ID NO: 992075 - protein, 49 aa, Homo sapiens
GTLPDKDEWTPDMHHQEATHLILTPEKEPRGVLIISIQKTSGFAAKCGY

SEQ ID NO: 992076 - protein, 84 aa, Homo sapiens
MQCTRWLVQVGLAIVWLHRPPNFPSNAMWGTSSVVNTSKCSASFRQPIFSLQTAAWSTASKPPSGASRFRDTLCFRTSSLKLST

SEQ ID NO: 992077 - protein, 55 aa, Homo sapiens
VQERVFNLMADYKIEPKLTDPLTAARFQEVKKAFVSDAKAKVEAKNKETPSETVN

SEQ ID NO: 992078 - protein, 151 aa, Homo sapiens
MKPYIPKDQKYSFLDDSQTSLLLLRLYSDPLHHGGNATDLQSRAAPIYSLLLHRVVCWRPCGPSGVCSPNKLVYDTSDSDDDTPPNGPRGRHPTRCWGGWKTDAAVTGQILKQTSSPSDTTSHNHDALLKNYVAALLVQRGADSSKGRSRC

SEQ ID NO: 992079 - protein, 84 aa, Homo sapiens
WDTYPGGRDLDMAVRNLNDETSLNGVLWRDIIVVEWDGCMENNKIISAKSSHYKHWPTGFLVSDVTLNPRRAHKKMSLGREHAL

SEQ ID NO: 992080 - protein, 85 aa, Homo sapiens
MCGRKPAQLAPRPWIVGGHCTFWVPHSPWEAPAPEEGPKPFGGENREGDNTSGMANAFSPKAATGNPGPTKVATHPFLEEGKAAR

SEQ ID NO: 992081 - protein, 109 aa, Homo sapiens
MMLDPLCNEILLLSHFTILPIYKASALRVGSHLTWQTLWPFLSWLPLYLSLAMPAARRREAINQGGNAAELIVLLFSSAIAKISSLNPELLVEAVDHNGSALGVLLDVD

SEQ ID NO: 992082 - protein, 83 aa, Homo sapiens
GQNISCLLVTQEVQDPREQPTPKEPANTTLAKDWGLRQNKREQPSPSHAYLQRRKCSEVMESTTEGESKLTETSFETQAQKKG

SEQ ID NO: 992083 - protein, 106 aa, Homo sapiens
DDKSGVVIYVTRVSYRRPADLAGLPMGDQIMPVTGGDMPMVTHEQARKRLTKRSEEVVRLLVTRQSLQNGVQQSMLSSSHHHLRLLTAASLIQKRHFHTLSPSGFC

SEQ ID NO: 992084 - protein, 42 aa, Homo sapiens
TIVVVTNCDNAAAMMWGKMILLELARRKVVGILLENRFFSES

SEQ ID NO: 992085 - protein, 33 aa, Homo sapiens
MRPLPHLSTPTLATGKNPVAEQGDVAAACQMFL

SEQ ID NO: 992086 - protein, 119 aa, Homo sapiens
RREVTILGGSTEGPKALDPQGKTNSKSREQLYAQGCPSSLTNLSGVAYLLTLKMSFWVGVSMHKWSMASLVTSKQSSSKLLIWVGQPGEGSTLRKVPLEPLVLNGSFANLIEDVEVPLT

SEQ ID NO: 992087 - protein, 49 aa, Homo sapiens
LPVLTHGPPPCFQTWLLPEPPAMSRPGRFPRGPGSAVHDGARGEGDDKR

SEQ ID NO: 992088 - protein, 76 aa, Homo sapiens
MGHKPRRVIIAQEEQSMDVKVRVTTSDETRQRAWMGDDNYLARLSPCVVREPRTPSRMSFQPVWEGVPYDAVRKLF

SEQ ID NO: 992089 - protein, 42 aa, Homo sapiens
MNMAQTCCGQCISRGSPREAEAVGVYRKRFIIQELAHAIHVA

SEQ ID NO: 992090 - protein, 41 aa, Homo sapiens
MPVADSASSSYISILFLTITFFSLLLFLPTFFLFFVYLSVL

SEQ ID NO: 992091 - protein, 63 aa, Homo sapiens
MEAMSLSSSGPVCVLESIGRIMMLTVTHRGDCQEAATHMVCDVAGISPCSRLGKLSKSDEHVV

SEQ ID NO: 992092 - protein, 41 aa, Homo sapiens
LAGYGKPGSMEPGVEGGLTVSMAVSDAHDCAESEELVLSCG

SEQ ID NO: 992093 - protein, 232 aa, Homo sapiens
RLSLMGQGKRVIVCSAVCVHYPSLVSWGPIRFSIFFCPRPEAEDGGAHSLTMVPLMKQLVHRVGRKIGDTFRDLRDHVHWSQNSLLAQRRDVGCKSSFSTSGARSRHISAEPMVLKVHKARPVSCLNPLAQVILDAVGNEQVGIVPLIQEKHGPQVAHPLVCDSGGGDQFQALHLSKVGGVAQHVGVQQFGSCLVLCRGPVPLAAGLGPLLLPPAWPGLPAILERPDYQATL

SEQ ID NO: 992094 - protein, 63 aa, Homo sapiens
CCSLFSCSSYSWMFCCIFFFSACRCWQCSYFYLNLALWSLADLFLIPGFYGGSGGPRSSFKPR

SEQ ID NO: 992095 - protein, 85 aa, Homo sapiens
CSLFTSSSDLGPKLGLHTLFGSSRWAWEAPAHLGGPPVWNVCHKALVDGTSRSLCGQPRWVAGTETRTRVGYGQARNVLQLETVP

SEQ ID NO: 992096 - protein, 39 aa, Homo sapiens
  misc_feature (14)..(14): Xaa can be any naturally occurring amino acid
LCCSLFIRWDVRLXPKEASLYASSLCAGEPTSLGASCCS

SEQ ID NO: 992097 - protein, 86 aa, Homo sapiens
  misc_feature (4)..(4): Xaa can be any naturally occurring amino acid
GSLXGGSRKKLEHWVQFLEPEDTVTPRCSENGCSVEREARHFIWVRDTELRDNPGTRFQVRPSAFLGSLHISIQGYTPTKASSQMA

SEQ ID NO: 992098 - protein, 72 aa, Homo sapiens
MTLVEDIEQVQMKSRGNRKGDEAEKKPPFLLALALSFPVVPAILPKKFSTEKALVYSKEAPFKGTGWSEICR

SEQ ID NO: 992099 - protein, 44 aa, Homo sapiens
CGALTGSRSSLCGAQAPGPMAFSSHSTTHPGGQAIAAQPCAGKA

SEQ ID NO: 992100 - protein, 38 aa, Homo sapiens
LVIHPPGPPRGLGFTGVTSTTPWPSVRFLLFYPSCSPH

SEQ ID NO: 992101 - protein, 152 aa, Homo sapiens
GIGNWTLTRYGYALVCTAFTRQSFSDSVPSQGMNCTNILLLRQAVSSSVSSTNSSSSCPVNSPIMPPGSQESHIHCPQLPQPALHQNSPSPVPSRTPTPHHTPPSIGAQQPPATTIPAPVPTPPAMPPGPQSQALHPPPRQTPTPPTTQHVK

SEQ ID NO: 992102 - protein, 44 aa, Homo sapiens
TRTPPGLGPALVLSGPYKPSLMIPPNPPDPSAISQATSSVPPPK

SEQ ID NO: 992103 - protein, 123 aa, Homo sapiens
KDLSAPLQWGLYYLGEEELLHIPMGQDQAAEEANAVLGLDTRGDHIVMLSVIPGEKLRTKLSSEPSGVTCGCLEELEDSRCHVREKPFLSGIGLEHTFLTEKRSITQSQKLGNLTQPRTEDSQ

SEQ ID NO: 992104 - protein, 34 aa, Homo sapiens
  misc_feature (3)..(3): Xaa can be any naturally occurring amino acid
LWXASVCMKVLRLYEALLLLAIIDLSFCGVRFRK

SEQ ID NO: 992105 - protein, 132 aa, Homo sapiens
WALRSIFGVIQLLCLLRAPSWANHGTGGGKECEDASEEPEENDANHGEQQKKTRDRQIQKITNAMRAFSFTNLLLVGFGVPASFPPVPLQILSFILHTNLCEHSSTLLVGGLYAACVPLQPSPGSLTRLPSL

SEQ ID NO: 992106 - protein, 140 aa, Homo sapiens
MTEQCIPAQIPCFSHGLHNLQSRRFPRVPTPPGPWVSSTKRGGHMGRHQASCRSFFPYPSGTWNASKTEPFTLLERGLKKGAKWSSSVDPTPMEPFKLRSTGLKFSLQHSSLKSDRGRFSLASCITEACIGGFPPTERAR

SEQ ID NO: 992107 - protein, 80 aa, Homo sapiens
AGDLPYWGGLLSICAGCGCLRVWGDHLGKERLAEEDASSAESSPSLTKTWHERVGRSHIPKLRRWQAAALFKQLWGSTDR

SEQ ID NO: 992108 - protein, 171 aa, Homo sapiens
SRGSSAAPSSLPEAAELNAKVDTLTLAGESKSTNLENSKELHKSEIIYPANLPSHSIPKVSYPRRNESTCPYEDLHVNVHSTSICKSQELENNSINIHPQDKNTVVNPYNGTLLSNEKEKAMDICNNLNDPKNHHAELNEASQRRGPLLQWSLTFLASGTGFVKDNFPTEE

SEQ ID NO: 992109 - protein, 139 aa, Homo sapiens
  misc_feature (80)..(80): Xaa can be any naturally occurring amino acid
RGSFLLLFTRLLVESWTGQCHITSSGLSVLASLVNCLSVGYSELSSRILCSLALISLSAAGEQSDLCQSSVLPDKLSLQXRDLLYQAGDAAWIHPGKAQAFLSYPDANASHVHLYRWRGWNLADIELDFFQEELILRDG

SEQ ID NO: 992110 - protein, 35 aa, Homo sapiens
MLCCSLYTNYRGGSEHRVRVHGHPSSVSEALIQDL

SEQ ID NO: 992111 - protein, 82 aa, Homo sapiens
GHPKYTLSISRERFSSGPRVQASSASSGGFKCSYSAIWAPPPYTESFILEPGLEADNPSILLNYPQTGHQRLSPAYTRYHGD

SEQ ID NO: 992112 - protein, 55 aa, Homo sapiens
MDWSEFSYYHGLLVGGNINLVAIGDPFFLCKRRCRVLAVEGVGKVSSIWRSSDSV

SEQ ID NO: 992113 - protein, 33 aa, Homo sapiens
GFTVACGLTVACGLTGFRRFRRHQKKAVTKQQI

SEQ ID NO: 992114 - protein, 78 aa, Homo sapiens
MDASTAVLRCTCVSGPKSLGMLRPALAQVSSSSPNGALACQSIVGKILDIQDRSKTCLRALGANSLELRCWGPNGKSC

SEQ ID NO: 992115 - protein, 131 aa, Homo sapiens
MGSEGLGAARLLLSAVQVDKEDVLICAIAGSGLLKVTDAGAADSVGMGWVVVEDAASGPVVARQHDEVGLVVKELRQKQWWPLRVKQQYLTGAGAQVTVQQPRVQQHDGQMALSQVRPGMSFTLTVHFSTK

SEQ ID NO: 992116 - protein, 34 aa, Homo sapiens
WCRHHFKCDKHRISDYLNLYGFLRDIYQMPGITE

SEQ ID NO: 992117 - protein, 105 aa, Homo sapiens
  misc_feature (11)..(11): Xaa can be any naturally occurring amino acid
PSPTHKEENRXLWKIYLPSTDRNCTKRRFVLKLSMSFLKQYQQPVGLEQCVMFARACDKLAAGLLEDLPSPAAADFQPPHQRLDAFLYAPLGGDSHRCPSCYTPV

SEQ ID NO: 992118 - protein, 61 aa, Homo sapiens
VYRCHMSSSLSLLTSMVDDMWHYAGDQSTDFNWYTRRAMLVEVNDIKDLESITKRLVGLIN

SEQ ID NO: 992119 - protein, 35 aa, Homo sapiens
VYRCHDSRSSREKRSSSRWCLCRDSYMQEAPVKEY

SEQ ID NO: 992120 - protein, 57 aa, Homo sapiens
MMPLHSSLGDRARLHLKKKKKKAAEIWAAPLKSRAQGDFGNSGGTRGYGRLPRARAI

SEQ ID NO: 992121 - protein, 98 aa, Homo sapiens
MMPLHSSLGDRARLHLKKKKKKLLKSGSAFQIPGPGDSETPGAPWLRPFLGPAITLFLHISTGAIVSYISLPSLYRRRVKSLTHGNSTTCRGGDPQES

SEQ ID NO: 992122 - protein, 135 aa, Homo sapiens
LSRGSRNAGGTVFLIGSVQGAWKASRRGQKVISEHKNGRFYQFVKWSGSPPMTFYEVNLDDGSFSDNLYPEDIVSQDCLQLGPPAEGEVVQVRWTDGQVYGAKLVASHPIQMYQVELEDGSQLVVKRDDVYTLDE

SEQ ID NO: 992123 - protein, 54 aa, Homo sapiens
MGKSLYLMSEPLRTHQNVQHHNNSCSNCKQGKQVDDFITVDSFSQDVRIRLPIM

SEQ ID NO: 992124 - protein, 91 aa, Homo sapiens
TFDQEYQAEATYTSPGMRAATRAISPTSTEAQIEQGWKTEESAFGLRETQSVFTRCSPISGKDQGKWEDFRAGSSVHGRQISKLPLVPAGI

SEQ ID NO: 992125 - protein, 89 aa, Homo sapiens
PGNRTEADTPLMVADTRWLRTPSAGWGSLRVLLQMSKIASCAMQDLSSVSYTSWSTDGATVDRSTTVHDTVREISTLKAYMMQAGSSSR

SEQ ID NO: 992126 - protein, 67 aa, Homo sapiens
LEDPGQAELNYYQVPLARVVEDLGRYYPGRIVLLNEELGQRKVSGSFPLAEPLLALDSLGKVMGFSR

SEQ ID NO: 992127 - protein, 38 aa, Homo sapiens
YTDPPEVRLAHVKQIELIEKEDEYLSLVGSLVDYSHAA

SEQ ID NO: 992128 - protein, 75 aa, Homo sapiens
ARGRDCGKGVPGATLRSKDRFRIYSPEHATYSKAPNPGAGVARICNQQSDQQGAGHQHTSHCVGHLTFKITNHLQ

SEQ ID NO: 992129 - protein, 39 aa, Homo sapiens
SSYRKASNADGEAGRRSRRTGQYPQADLQHSLTQTRTTM

SEQ ID NO: 992130 - protein, 31 aa, Homo sapiens
MAGLYAKELMLRGDLSRMLVIAPGSLVEQWQ

SEQ ID NO: 992131 - protein, 82 aa, Homo sapiens
TGTESHLLQTQGEFLPKWIAKTVTSTSPRSLKFSVIHMQLVTVQFLSVGKGALGDHPGCFMSISTEEVSTLLAHVALLLWGC

SEQ ID NO: 992132 - protein, 106 aa, Homo sapiens
GIEGMGLSNKVFYANPNLASRKFIKPEVANDPAVFPPEAEMKKMAQPEALNNDIRRQMTRIYTSFKTVPVKNTMNSRTGEGYLVIDRVVKDFVSPDGGSFRAVDNV

SEQ ID NO: 992133 - protein, 48 aa, Homo sapiens
LYLFEDLVCFSADVRGPRRVSCFGERVGAGTGSGEAPGGRGTERFSGW

SEQ ID NO: 992134 - protein, 34 aa, Homo sapiens
MSWSIYSILILLRTSSVLCLLFNIKGMIALKDSG

SEQ ID NO: 992135 - protein, 88 aa, Homo sapiens
SEDPLLLLFEDEDDEDDEDDEDYDDDEEDYSERKKLWRLHQGKERKLAKFVPVKAQKLLRDKKEEDDEDEDYDDDEDDEDDDEDFKEE

SEQ ID NO: 992136 - protein, 62 aa, Homo sapiens
  misc_feature (18)..(18): Xaa can be any naturally occurring amino acid
MRSRRTFTGVQVELRVMXKKERVDYFGAMRLCLAVKDYIRTQSSARKLTPNFSREENTDEIK

SEQ ID NO: 992137 - protein, 56 aa, Homo sapiens
MWLIQEVNTKRLEETEGCTLVRPQTDEPGAVRVQRAQISERITDTPAQVSNANEQP

SEQ ID NO: 992138 - protein, 88 aa, Homo sapiens
ASRRPSSSVVHGRASKICMISDGGCRQRFPAVAHMICTMPKAAPTCHMAPYPSSSKTQFRDQPLQETFQGVELLVFSMCTCQTLCILL

SEQ ID NO: 992139 - protein, 78 aa, Homo sapiens
LFGVVRTVLTCRRTLVPGGLPRSGHYTSTRLQLSDLRRSARCSRVDGTCPRDGMPRRGDLPMSTLPACRAAAPGNLED

SEQ ID NO: 992140 - protein, 60 aa, Homo sapiens
VPHTDMEGLVKRCQNFLGLLLGEDELLICDYPVPVERRLLGCIAKLSRMGEFLEWIARDN

SEQ ID NO: 992141 - protein, 128 aa, Homo sapiens
  misc_feature (65)..(65): Xaa can be any naturally occurring amino acid
ILCSSMQSVYNVSTVCIMSVIYCPCLSVLASQKVLTCKNVPNVAWLHLTRKDALVDVDECAPLLXPVGRDIGSLNFSRQFPLRMQDGLLILTASAGCVFVVNECQRYPRRLCGHQCEKTLGLLPLELF

SEQ ID NO: 992142 - protein, 44 aa, Homo sapiens
RIPCCSLFTLQTRSIPEEQELEAYVDDIDIDSDFRKDDFYLLGL

SEQ ID NO: 992143 - protein, 86 aa, Homo sapiens
SWVLYMMYTPGAEFLCILADPTTMTCISMQQLLWLINGKREPTHATVWRKNFSAVGHLVLIGGPDDGVITPWQSSFFGFYDANETV

SEQ ID NO: 992144 - protein, 37 aa, Homo sapiens
LLKNAPDDGYKLSDLGEKKRLNKRAGAFQEVYEREAT

SEQ ID NO: 992145 - protein, 89 aa, Homo sapiens
MAKRGYLKYMKAYHVRADAHIDPVTPSKDVLMMLTDYIQGARDTPPLRAAEKPTQAVTARLVFPRAQEEACTLRPVTHTSLLDFYLHVG

SEQ ID NO: 992146 - protein, 112 aa, Homo sapiens
CCSLYSSRSSNCSDECTSEIKIQKKRRWSGGSRCGCLPWLPVNLSQKNPQLTIRILNLDQKKKEHLRIEERKVKGDCQEMDLEKTRNERGDGSGFKRRRTHLILSIKREAAG

SEQ ID NO: 992147 - protein, 167 aa, Homo sapiens
VEGILGLQSLAGSVEQNFGATPPEAEAKLANIIIMVTLLSTGILAVTLLQQVIWWSVEGQALVLFLKAIPGAFCQGAAGLTSNVRCCGPNLTVRSRGLPGSRLPPGGRGYYADLHPQGLHQARAGGRARALAGAVGTAGAVPRRLKPYCLAQGPLVQRSQNHGTGPQ

SEQ ID NO: 992148 - protein, 44 aa, Homo sapiens
KRIWVISRIFVLLSALSVPHNLSHRLVTGEKPRAGTKEEAAQLF

SEQ ID NO: 992149 - protein, 34 aa, Homo sapiens
TRGSKRALKRTAEETHRRDSLKRASEEPPKSLRR

SEQ ID NO: 992150 - protein, 33 aa, Homo sapiens
MMPPIIMSISKHQKITKCGKDLESSFIAGGIDN

SEQ ID NO: 992151 - protein, 74 aa, Homo sapiens
GMRSEGINPIGQDNAYADKLAKEATSDPTSVPQGQFVFFALCTPTYSRTETATYQSVPTQGRWLLDQGKSVLPA

SEQ ID NO: 992152 - protein, 54 aa, Homo sapiens
MEELLQQYAGAYAPGSGSSEDEDEDEVDANSSGCEPEGPVEAEEPPQEDSSSQS

SEQ ID NO: 992153 - protein, 84 aa, Homo sapiens
  misc_feature (11)..(11): Xaa can be any naturally occurring amino acid
LLPLQPLDLNXPSEVKEQQDGFGNVKPNINNITSIVPEAKPAATMPVLLLTGLFLLVWNYEGTSSIPGPGYCMGIGPLISHGRF

SEQ ID NO: 992154 - protein, 35 aa, Homo sapiens
LEILSHPQVRITGAVNHRPGCTIKQRVAETMCYAY

SEQ ID NO: 992155 - protein, 71 aa, Homo sapiens
AETPLMAADTRWRRSPRAGVGSLRERKQMSYFASLPMHEASYRILHQLEHRQRVVTWLHHRVYTLCESTTL

SEQ ID NO: 992156 - protein, 44 aa, Homo sapiens
TRIWEWRLRKNCAAQACLYVNHVSARACLHGIIISALAECCQVG

SEQ ID NO: 992157 - protein, 58 aa, Homo sapiens
GKRTEAETPLMAADTRWVRTPKAGGVSSRARKQMSHFASLPTQQALSVVSTSCSTHSA

SEQ ID NO: 992158 - protein, 84 aa, Homo sapiens
PGKRTEAETPHRAADARWRRTPRAGGGKLRERKREADKDRGPMQEAEHGCYTSWSTDSEAWQGATSGRDTGGESATRRADMMRA

SEQ ID NO: 992159 - protein, 203 aa, Homo sapiens
  misc_feature (172)..(172): Xaa can be any naturally occurring amino acid
APSSSCVNQYRQPSHMDIPLDNKSFLRPHSMDMKFTYCDDRITEVIGYHPEELLGRSAYEFYHALDSENMTKSHQNLCTKGQVVSGQYRMLAKHGGYVWLETQGTVIYNPRNLQPQCIMCVNYVLSEIEKNDVVFSMDQTESLFKPHLMAMNSIFDSSGKGAVSEKSNFLFXKLKEEPEELGQAGSNPGEAIISLDFANQNFQ

SEQ ID NO: 992160 - protein, 35 aa, Homo sapiens
MADDLHVFVAPHSHNDPCWIKTFDKCYTQQTKHIL

SEQ ID NO: 992161 - protein, 81 aa, Homo sapiens
SGSLFNNFDDNSLFVGWERWLMPVIPALWEAEAGGSRGQEIETILANTMKPCLYYKYKKLAERGGGRLQSQLHGRLRQENG

SEQ ID NO: 992162 - protein, 79 aa, Homo sapiens
MEGVLQEADRANRRIRIPVSEANNVIGATSMMGRRDVLVVMFSITVFPRLRCESCSLSTVTAVGERLRCCPRPRISYSR

SEQ ID NO: 992163 - protein, 67 aa, Homo sapiens
LEAEPGAELCASQVGSVVGKAHGDKHLAFDSWEDSTVDGSTHSGNHWFPHMLSCLMDSLTKLAESCN

SEQ ID NO: 992164 - protein, 106 aa, Homo sapiens
LQDPYAAPSSLLPGRLKHENRLNPGGGGCSEPRLHHCTPAWRQGKTLSQKQKQGQAQWLMPVIPALWEAKAVDHLRSEVQDQPGQHGETPSLLKIQKLAGHGGTHL

SEQ ID NO: 992165 - protein, 51 aa, Homo sapiens
VSVLVRLTFKELDLGGEKSVSSLALLKPAQCHGDGLPNLQLLEHFLGKEHK

SEQ ID NO: 992166 - protein, 80 aa, Homo sapiens
VVDELRYRRRPLASTWAGALNTLGSFLVPAAVVAGMHPRVCDRMSIEVLLSAALAEDPGPQVPFRTPRYVCQYHPADLAT

SEQ ID NO: 992167 - protein, 116 aa, Homo sapiens
IVDVYIFPWAQSPLSVVQRVPGRCGEYPFMPAYWESGLPPVPHVGYSSTAIIRHVVHNSDQGPSPLAGRPMVIDPGLPWDSSEWTSLFKQAMAFPGHFPVPMFAGMLHPWSGRVHH

SEQ ID NO: 992168 - protein, 115 aa, Homo sapiens
MKGELHVEFWEEHPVRVNQRQREPKRERERGEQGPDKENSHEKVPGGLEQDVHVSFNSDLLTAVPRLQCRALNGNEESHGESSATVQEGEGGVHTLSTDSTKTTSKETQGTEVGF

SEQ ID NO: 992169 - protein, 143 aa, Homo sapiens
TTCDGGSLQEVRQGQRRSRNSCVCGTNVQRGHIDDRQAEESWCLGIQITVLIHAPVMTRAPVCTSDRCCVQSACSPRARISHLGCCPGSNIAFLKLPVCCSLSARLFLAGLGHVLGGLGRHQAREGQLDGLIGQCRIPGRLTR

SEQ ID NO: 992170 - protein, 102 aa, Homo sapiens
MTLKEPAAFKHLFNKAHLAPPLIHLTLSGHSTCFREHRVGGKVIDQQDPKAEEFFLVQNKMKSLPCLLLSTQTRQPSDFSIFSPPCPLFYSRQEPHASKEPQ

SEQ ID NO: 992171 - protein, 44 aa, Homo sapiens
MCLREDLLEMNFPGDLNASVYWDVYVSSKASEVFLNLSPQNMFS

SEQ ID NO: 992172 - protein, 146 aa, Homo sapiens
VDVIRKAEYTPRTSTWEIAQKVHVFTTDYRVCILYRLLGDSKMSFEDIKANVTEMLAGGVDTMSMTLQWHLYAMAAHLQVQDMLRAEVLDERHQAHVRDGHDATAGPPSSKPESCAAPNDFTTISVTPAEISCNNAMETTRLHDSC

SEQ ID NO: 992173 - protein, 37 aa, Homo sapiens
SVSCDGVRVKDTVYTDFDVEPSVYALQSVILLPSSTM

SEQ ID NO: 992174 - protein, 66 aa, Homo sapiens
CGALSRLPAGHPSTSVSALFHVHCSKCIVPRAWFQVHCSKLHGSGAWVPQLAFRQSMVYQLFPSAC

SEQ ID NO: 992175 - protein, 136 aa, Homo sapiens
GSVMSVKRACPCTTLVPAIGGLLRLSSPVPGNCCAPIKMHEVPAQSDVYCDVCDFLVKAVTSLLDNQETDKEILHAFDALCSKLLKSLSDELPGGGATVRQLSILSILLVEVSPELVCSMLHLCSGTRLPVLTVLV

SEQ ID NO: 992176 - protein, 41 aa, Homo sapiens
RATGQHSYRGRCICAANSFLAVIHIFTHSSFLQTISHCPII

SEQ ID NO: 992177 - protein, 44 aa, Homo sapiens
MVMSRGGELVMVPSVEAIPWMDLCVVLVADRLLSAMTCGRPCTV

SEQ ID NO: 992178 - protein, 57 aa, Homo sapiens
AVLDPWNVYICLRPSSPRGVVQEIAWTLVSIPGFMTDILGAWGSQLLPLAASPPTSQ

SEQ ID NO: 992179 - protein, 90 aa, Homo sapiens
MNKVVMLAVMKVMHGLSNMDFCSPKTNWLQLLLSAQSAVSHDQHWFPNMAPFPGGRLIHWIASLMAGVVFISYWNTHFRYKFAFLTQNAS

SEQ ID NO: 992180 - protein, 123 aa, Homo sapiens
MYPSPLHGYGSSPTFPQPDKEPWSPTKCKGPLGTKEELLHGTVSAVCQIYLNTVLNTLTPFVLARKDAMITVDAWNQEIAAVLDAKGKVWTQDLILQVDDALLNLIDFNSTNATGKFTYKHNP

SEQ ID NO: 992181 - protein, 119 aa, Homo sapiens
PDWSTRLRSRLIPPDFYCTLRNKPPSFGREFTNTGPVHAAVVPHLRCRKLHTNSGLTCSMWMYRMERALYVFTLAPGTISTEIFERLLAHFGQRREFSCSQYLLLCVSSFGSFIRYLPD

SEQ ID NO: 992182 - protein, 67 aa, Homo sapiens
MDPISPGRMPGINADRMTTHIKLQHSGPDSGFPMTERTCVVYPQTSVTTRTRIAEERLRSLDLLNWA

SEQ ID NO: 992183 - protein, 94 aa, Homo sapiens
TLSVTRRQLITVPRAVQSCYVLTVPSYTLAARLLHGPTILKLLVFSHMSPQEGFIVPFILNHFKMNLSTQQSAPYNPFLSNFCPYFMSPFNILY

SEQ ID NO: 992184 - protein, 52 aa, Homo sapiens
MLPTDQQPPCSVAATPQESGEPQEHFGRSGMQVQGALGPTGAPSSGWPQLPA

SEQ ID NO: 992185 - protein, 71 aa, Homo sapiens
NLYPDHPRRAKNTRSQYTEGLPLLDTEMAHTALNYKNQLLCFHSEYRTQEMPTIMRPSTTNRSQLIKYTSN

SEQ ID NO: 992186 - protein, 36 aa, Homo sapiens
MIVVLLLMISYSDTLNMEDNSSRKSNLRAAPHSLLL

SEQ ID NO: 992187 - protein, 53 aa, Homo sapiens
MVTVMDMATLTVIPVFIMYMDDKRVLPSRSRAQRKKHRNQEGFRRGEEGAQYP

SEQ ID NO: 992188 - protein, 110 aa, Homo sapiens
MDVVTPECIEVGELRELDVTDDGAQVPGLEDGVGRVKALKRALKGVRLVREDMARQSSLMRAVFSPNPQSDVTCGFSWGSVVTDFRGFLLAPKCGSPSGWPVATQLRTIV

SEQ ID NO: 992189 - protein, 35 aa, Homo sapiens
SAKPYITINNLHPRENKDVLTYSCKPKSENYTYIL

SEQ ID NO: 992190 - protein, 140 aa, Homo sapiens
GLALSRWSFALVAKAAVQWRNLSSPQPPTPRFKQFYCLSLPSSWDYRHAPPSPANFVFLVETGFLHVGQAGLELLTSGDPPASTSQSVGITGVSQHAWPQTTFQWLQSIPMYGYTRIHLNLSVYKGIQTIFSILPLCTML

SEQ ID NO: 992191 - protein, 53 aa, Homo sapiens
TTHGGVLYVLLFRILPLIKKVSDDGNDGTFAKEGENEGVEDSLSVSLHRGWPY

SEQ ID NO: 992192 - protein, 48 aa, Homo sapiens
RRRGGPDQGKKAEGTPNQSKGLGGKRATRRVKGYPEVKGLPEDKGLPG

SEQ ID NO: 992193 - protein, 34 aa, Homo sapiens
MDERSPAIVRTFGWVAELVILSLRCIADGNQQGC

SEQ ID NO: 992194 - protein, 49 aa, Homo sapiens
  misc_feature (23)..(23): Xaa can be any naturally occurring amino acid
MVGERERESSKDAQPEPFPFLGXGTKMKVSQEKGGEYNLPVEYNLPVEY

SEQ ID NO: 992195 - protein, 60 aa, Homo sapiens
DATGKASDSWDKVLRRTQLICSSRDRGSPLQQVARTPDLLIHPPRLPQVLGYSVRTQPEP

SEQ ID NO: 992196 - protein, 45 aa, Homo sapiens
MVTCNQSFRGEGCSSTCHNLPQNLTGYIWYKRANDGTSTYYTYTH

SEQ ID NO: 992197 - protein, 139 aa, Homo sapiens
  misc_feature (86)..(86): Xaa can be any naturally occurring amino acid
TQVMYSIPNKHDWLTQPCLNNRVSNQVSQPTSVQQIPIPNLCTTARAASSPTELGGWPCLFPKASGMVQLLHFQPYRSQPAFYAKXVYPQPSVAPFVVLLIQQLSNVSNTQRTCQGHNSGSCLFSQTIRRRGLQGTRAR

SEQ ID NO: 992198 - protein, 39 aa, Homo sapiens
LEDLLREYKLIMSERDQVSLSWTSCRPKLELAESKLKSS

SEQ ID NO: 992199 - protein, 103 aa, Homo sapiens
CCSSSPNYGGDLSTESGSGHKLRLGGLIRICLSSKINGENPQLKQIEGLVKELLEREGLTAAGKIEIKIVRPWAEGTEEGARWLTDEDTRNLKEIFFNILVPG

SEQ ID NO: 992200 - protein, 73 aa, Homo sapiens
CCSLFKPPPAGGVKCPDGEVMKKNMMFIKNCACHYNCPGKMKFLNSLYYRKMYGDMAGSQRVRDINSLDWNLN

SEQ ID NO: 992201 - protein, 41 aa, Homo sapiens
SDGDLEDPSGNIHFDWGGGGSSKPKIVPYALQPGRQSQTLT

SEQ ID NO: 992202 - protein, 110 aa, Homo sapiens
REYEVSDLSTRGDSSRGLSSCLEIQCMKIRTLLDETTCPTFLTTLFITTNNLLDALLNDTCADRLVLHDRTTDNLQPNRTGCFLTRATLTEHLRDTAFPIWPDRVPDART

SEQ ID NO: 992203 - protein, 38 aa, Homo sapiens
IHFSSKHGSKCMVQVHGPSAWSKCMVQVHGSLAGDHGS

SEQ ID NO: 992204 - protein, 92 aa, Homo sapiens
WPNWVPVVYACFLDDNQIITSSGDATCALWDIETGQQTGVVVLDTVGDVMSLSLSPDDRTVVSVRLCCLYQAEERCGIPMCLTRPNIGHESE

SEQ ID NO: 992205 - protein, 98 aa, Homo sapiens
  misc_feature (28)..(28): Xaa can be any naturally occurring amino acid
LLFRDPDHVGHGRGMSDVMGNWLLAPVXVNNWSLTGSPWHWSSPSNQVSPWSLSRDKRLFCALAGIRKMLECGCWNLSLELNKHGFASPLCYQLSGFN

SEQ ID NO: 992206 - protein, 87 aa, Homo sapiens
ELSLWGADYPPVIPLGRGTQGVGPPTLSVTFPRKGQDETVCVYGHGAELSRAACVLATYSLAAAYRRVCTVFHQIFGLETSGKFQGG

SEQ ID NO: 992207 - protein, 142 aa, Homo sapiens
AVELSEDSGVMKGGTFAQKFIDHVALIGMAEVKLGQAGPIVQKWILVMFWNPVNNVKRPESELLSSGNNSEIVLEGEHAWKVLVDEIHKGVLVAPHDLTHSAVHEGTFAEVVNAKVMMSFRVMGLFSIITAAPKTRMLCMTM

SEQ ID NO: 992208 - protein, 46 aa, Homo sapiens
RTSWNSCQSLLLNNLQYDNDITETFIQTSNALVRFSDCLINVKVER

SEQ ID NO: 992209 - protein, 92 aa, Homo sapiens
MESEVMMSDYESGDDGTSKRRRTRPCDSSSTRKSDSQLPPKWLTLVNLEVILVIRAGLCSSASKLFLVSRMGMAALDPAPLDVLAISSVPAT

SEQ ID NO: 992210 - protein, 42 aa, Homo sapiens
SIRRTLSGTPYTTSPLEFLTTITSWASLVMISTSPCSIILLH

SEQ ID NO: 992211 - protein, 127 aa, Homo sapiens
SEIGIQMMMHIQDQQTKEICALGGFSGRRKKNAMRILVPAKVASKNVIPALERVEPIKKHEVPAKSDVYCEVCEFLVKEVTKLIDNNKTEKEILDAFDKMCSKLPKSLSEECQEVVDTYGSSILSIL

SEQ ID NO: 992212 - protein, 52 aa, Homo sapiens
CVVTLRIQRADTSRIFPSVVAKTSFEMDREDRQGLQGLLNPDLKNVNYNKKV

SEQ ID NO: 992213 - protein, 51 aa, Homo sapiens
SGEQSLPEQSLTENSILAQFAGEDPVVAWEAVGSLKTPGNPCTHLVWASIG

SEQ ID NO: 992214 - protein, 123 aa, Homo sapiens
SGNWLQVSRVSLCPVLLPCSGFPGFLMLVPFKPCRYSRLFEHAMLQALRAHQLGIDTYQEFDMKAIFQRIGTILIPALIPNLLLASRTLIPIAFQHWGKRKSKFRSKSLVPHLPLLAHSESSA

SEQ ID NO: 992215 - protein, 104 aa, Homo sapiens
MRTEFIDNCIPTKKARIEVRETSNFQQGRNTTYGIYLLLRGQGILIFPSAKAVNSTTNQLQSQNTMWHRPLDIVLADGRVIVFSQNVGHLEAKGSADGSDGAAH

SEQ ID NO: 992216 - protein, 69 aa, Homo sapiens
EETPLMAADTRWRRSTVAGVVSLRERKQMSQSDLLSMHEASYVFSTSWSTDSESCYGYTTAPDTLCESA

SEQ ID NO: 992217 - protein, 54 aa, Homo sapiens
CDCKVFMEMSEREEELCWGWSGLAFSYRILGHGSESRLDLQQTCNLTVSHTDRT

SEQ ID NO: 992218 - protein, 84 aa, Homo sapiens
MRRLNTLQYYRVPDGAAVALCRCLTKQVLRDNQDYVPGELDPNAGGCMMKEAVPPWHLLKPSEEPEPTMPGRGTLRGGERERAK

SEQ ID NO: 992219 - protein, 49 aa, Homo sapiens
ALSVGGLGNSSTQESGRMGVRNAMDDQTDNVLVIQPHEEDGFFCEDVHV

SEQ ID NO: 992220 - protein, 82 aa, Homo sapiens
QLGPDVGFVWVDRAHGLRLVSRCPLGLQSSDGCAVATGVFFPQLTHMAVVEKTYVPSFFPWCDSPHDLVAGSPHSHVIHERD

SEQ ID NO: 992221 - protein, 116 aa, Homo sapiens
GSVPAPGYPEAVRVSGMVMEFLVIAVPRVLLRRPPGWDERSRLSYRPQGPPPGLLKAGGKVQLSSVVLQRGRMAPAWPEGLQETTEPWIRPLSSSRGTGFQNSCTVLGSSCLCRHH

SEQ ID NO: 992222 - protein, 61 aa, Homo sapiens
DRCERSVDNRRKDGDGQWTTDRLVGSVSGQQIDEQMWRRQWTTDVWIDGYVRVTHTGLDYG

SEQ ID NO: 992223 - protein, 63 aa, Homo sapiens
FCFSDSIPTPFQMEGIRNRNATLVAAPSSPRAAHSKSWLGDPMRFRHEGNVQPNNPWVVLIIL

SEQ ID NO: 992224 - protein, 128 aa, Homo sapiens
QSTGSYAFYDPDSSIVYLFGKGDSSIRYFEITDVACLFVHYLNTFSQQDEPHRCMGFMPKRGLDVSLVDIARFYYLHERKCDPIIMTVPRYYLFLDDLYPDTPGPEPSLDAVEWLSGQDAEPVLLSVK

SEQ ID NO: 992225 - protein, 137 aa, Homo sapiens
FPLPTVSYKALIHFTVSYEDCILVKGPSLSSSCGAKVSNYLNHTNIHRMPRHSNKKEEVKLSLFEDDMILYLENPIISAQKLLKLISNFSKVSGYKINVQKSLAFLYTNNRQAESQFMNELPFTIATKRINYLGYSR

SEQ ID NO: 992226 - protein, 138 aa, Homo sapiens
MSASKQRGNILFGVVAAVVAVGLLHLALAGSCLLLAAARAGWPKCGYHAGKKETKDLYAPEPSGKASKGNKSKGKKSKSPKPVKPVEDEDEAGLQKFLKFNLMSDAPGDSPRIHLPLNYPPGSPDLGRHYRSNSPLPS

SEQ ID NO: 992227 - protein, 73 aa, Homo sapiens
ALDSDADDLEHLTDESADETRCAYAYKPIVASSVDVRRIDFAHTTCSLHDEHTVAHEGQDADYIFDLQSLIDI

SEQ ID NO: 992228 - protein, 38 aa, Homo sapiens
ARYPRSRVSLELLRKRLDQLGPGGSRQQLEYLAKDGDS

SEQ ID NO: 992229 - protein, 79 aa, Homo sapiens
QSRSIHGEDIEQVQMKSRGNRKADEAAKEASLSSASCPSPSCYPSNPTQELSHRESFAIQQGASFQGDWIVKNQKLVLP

SEQ ID NO: 992230 - protein, 66 aa, Homo sapiens
GDMATVGPDRHVPEILCVDCSTNNPSHAKLRRELDESLQVAERLTRKYNELLTSYQRLMLNTSCLL

SEQ ID NO: 992231 - protein, 154 aa, Homo sapiens
TVIVDKMQIEARGGIMAMKTNDKTKREGDVHFDYDETWTIGDEQDTDLLQVAAHELGQDAGAAAQTTAAKDLNVCFYTFRYPLNLSPDYCRCCQHLYGQPWPTVTSRTPALGPQAVIDTTEIAPLAPYAPPDSCEASFDAVSTIRCELFFFKAG

SEQ ID NO: 992232 - protein, 81 aa, Homo sapiens
RHADCRREHGYKLSAEFGLVTGVAHQLRGSLLTVEENHSRCRSLQGNSPYRRRLHMLSTGVLLINHLIAGELLYARERNAR

SEQ ID NO: 992233 - protein, 130 aa, Homo sapiens
  misc_feature (112)..(112): Xaa can be any naturally occurring amino acid
MPCAVLAPLPSIRTSAYLLLALAMTLLLRLVLDVNAPPDNAETMLLERLPRFVSDADADAAAFDAVMERRAHGPLAELPFRVGDPSKMRGYPNLNGYFLRGQRGLSQKDGAXVRSEPFATISGGIDKHRV

SEQ ID NO: 992234 - protein, 45 aa, Homo sapiens
MALVDIDTHSADAVQNSNPFCIRSGNWREKFHARDCPFPKGLKQG

SEQ ID NO: 992235 - protein, 143 aa, Homo sapiens
MDKATIENRILILPNVPSKVKHASCINVKYGTDYGGIRSDPVTLNVLYGPELPSIYTFISPINVQEEKLYLSCFAESNPTGHNILGALMGKLQVSGPKLSIPQITIQSIVGSMLALFVTQPLARKAPNPSQSKSLTGDYPEFY

SEQ ID NO: 992236 - protein, 94 aa, Homo sapiens
WSRGPETGWAFFHLIRTQPAHRSPWVAYASCSSSSGTSILRVLVVDISWICRACQGPSASLSSLNCSCKALDIRPMLGPVRSILAMFLSSISHC

SEQ ID NO: 992237 - protein, 71 aa, Homo sapiens
MLSPRALALVWSQLPSPSLPSPLPFLSAERVRGPLCPDVSHGPNVGTRNTLYVCAPPGALATWSPSLMCGC

SEQ ID NO: 992238 - protein, 71 aa, Homo sapiens
YCSWNQLMTVLVFRLSWVAEVFDGFVVTALWLLLTTLVSDASFSSGPRTTRGFFSWCCFCVLAPWLSSVPD

SEQ ID NO: 992239 - protein, 65 aa, Homo sapiens
MPGERGYCLYRFLALSKTYSCIGIKSVQMLLQSLPSHVSKPIVPGEWQSFQARLSRNALHLRLWP

SEQ ID NO: 992240 - protein, 106 aa, Homo sapiens
DFQSVAKGTGFIDWLQEVVSDLRRPQRLVGPGVPIRSWLPHPNLLLCRWSPCLTAPCCMFLAVHVVDKEKGRWSCDVGHAWPPGSSFLLAQLLAFTRANFQLAYLC

SEQ ID NO: 992241 - protein, 49 aa, Homo sapiens
MHGGGDPAHGGRHQVDEVPVGGGGQLEGAETDVRECLVVDARGLIRILH

SEQ ID NO: 992242 - protein, 51 aa, Homo sapiens
TPRIGVCSSTKTSRCTSLALIQRRERLHMFRVGGLVFHAIRQLLPHQMADF

SEQ ID NO: 992243 - protein, 53 aa, Homo sapiens
MSISHKLPSIAGEAYADKAIDLINTGASILTAAAEAAMNENLTVLSGEALITA

SEQ ID NO: 992244 - protein, 59 aa, Homo sapiens
MRSVGSAALAAADGAPVSAGAPSGSQWVLIGHRLYSAVLITLENCLLPDDKLRFTPSMS

SEQ ID NO: 992245 - protein, 80 aa, Homo sapiens
RAPQGVFSNAHGFLLDTSLKPPLCGQTLCDNTEAIASYNQLSRLRQPREVRYRVSNLYEDDHRTPTATRERVDFYHHQLA

SEQ ID NO: 992246 - protein, 44 aa, Homo sapiens
NGWISPVCSPSNEYLIHKYISTTLSISKHEDGYSYPIPIQLYSA

SEQ ID NO: 992247 - protein, 42 aa, Homo sapiens
RHQAIHSIGSQQKGLGSGHVDRDNGQYRARGPYIRDLDMLPY

SEQ ID NO: 992248 - protein, 42 aa, Homo sapiens
VLTANDVSSTTHMVADLNAFSKHIYNAYLKNFNMTKKNACSI

SEQ ID NO: 992249 - protein, 53 aa, Homo sapiens
MGFLHVGQGDLELLTLGDPPASAPHNAGITGVSHRARPSCQRFLLCTLGARAG

SEQ ID NO: 992250 - protein, 97 aa, Homo sapiens
RPDNSHDTVSYTNPLWDCFLHYDSDDGLETAGYLADILTLEEAKDGQETTDSYTAWALTAQLARLTVVQGVLEHQEGRERREIATCSKRQSTLAAES

SEQ ID NO: 992251 - protein, 63 aa, Homo sapiens
HERPKGHDSPKREYNLAILVHCNLCVPFHTYKQLEPRAQLSLQEHATMPGYFMSALSRDGVSP

SEQ ID NO: 992252 - protein, 35 aa, Homo sapiens
FFYTPVSLKGWDSPGTIQVKLAGWGFTVGQGDGRR

SEQ ID NO: 992253 - protein, 38 aa, Homo sapiens
ASGIEREEKQKAGRTIRTDPQMLPMDLTLPVPRQEGWL

SEQ ID NO: 992254 - protein, 31 aa, Homo sapiens
MCIFGNPVSASAGDPVTCISTEAAKPLIQPF

SEQ ID NO: 992255 - protein, 36 aa, Homo sapiens
GKIMHACIRLKAAGQRSQDGKLIIRDSYTTNSVPGS

SEQ ID NO: 992256 - protein, 52 aa, Homo sapiens
MSVAKLCPRQQSSSSSDEAGDPNEAPSPDTLLGALARRQLNLGQLLEDTESY

SEQ ID NO: 992257 - protein, 84 aa, Homo sapiens
QAYDYSKKWLQALKVEYKKNFKKIECNCCIVGTVLGCLRRIFLKHTTFTCFLQPHQSHHFIETLCTCAKKTHLWFLKMGIHGSR

SEQ ID NO: 992258 - protein, 52 aa, Homo sapiens
MPYDRVQVPSPDLGICLLCSVTSMGLGVDDLSCVFQTVYGLMTDFPTPALPQ

SEQ ID NO: 992259 - protein, 111 aa, Homo sapiens
KVDDGGQGKVSSPQRELSRLALDRTGGQRRVPGGKAEEMSERMSPPDGPPTSSSGVEFLAMAERFSTVALGSMSFGHVPINGPPQGSNQQSISFPPISKDIKGSGPKQHFG

SEQ ID NO: 992260 - protein, 34 aa, Homo sapiens
CLSFGMQVTYGPTERASLSRWGPSSLQSRPETET

SEQ ID NO: 992261 - protein, 41 aa, Homo sapiens
IVESEEAPVYNEYMECQQRVLTVVDGNVVQCSACTCSGRIH

SEQ ID NO: 992262 - protein, 98 aa, Homo sapiens
RYRSRYRPFHGIFSLRQGDRRLLLETDWESILQICDLIRQGDTQGVSGACALMLEEQPCTKLGSLGARWVSTTELTVLGSYVEDCMGYMLGFFDILED

SEQ ID NO: 992263 - protein, 102 aa, Homo sapiens
MTDVLDLVRTWLWFLVRTTYYLLNDGLATYERTMDAVACVTGHYLTGRFCRNRGFLFYWLHPGIKRYPVYFLRPTSGKNITCDAYAPVTETLPCGGLLYDVD

SEQ ID NO: 992264 - protein, 46 aa, Homo sapiens
MNLLSGAEPEPVPVDPKEMECMVRIIHRQFTDIQIQLKANHLRGCN

SEQ ID NO: 992265 - protein, 72 aa, Homo sapiens
EDLMVGCQSSIFCLSHGNECHGRGSSLYQLSVLSLWTVVLIVPELTVPKNKNLRTSVTYKGRGSERTQIGHS

SEQ ID NO: 992266 - protein, 58 aa, Homo sapiens
PKWARFLLSDCVLLENRAPELLQMNLGSVTGASRIACEQSRRHHQTINNAPQCFPRNC

SEQ ID NO: 992267 - protein, 38 aa, Homo sapiens
NEESVKEGEEKARYGQIENYLQTSSLLASDHHLTEEER

SEQ ID NO: 992268 - protein, 39 aa, Homo sapiens
ERYQHITISVSSSSSSFYLVLVLLFLLLFFSFSFFFFIF

SEQ ID NO: 992269 - protein, 36 aa, Homo sapiens
MPHGIIVWGITSYRLAVHRCALVTVARCYTTEKTLN

SEQ ID NO: 992270 - protein, 105 aa, Homo sapiens
RGLEDGAAAELVSHLIRAPLRQISALAPLVAFWAPEIAYRKSVAVVVGQHVLVVVADPVVRPSQQIHVLLAAQALSEALSVSAHSGEISSPSSFLSTPMPCSRLV

SEQ ID NO: 992271 - protein, 54 aa, Homo sapiens
DPGSVSVSSREAEPEHVSHAGTMAEPLARSGVGDGHLAGSEGQWTPVLDPGRGG

SEQ ID NO: 992272 - protein, 67 aa, Homo sapiens
ASATRDAPTLVSQSAGIIGVSHCTQPKLDLLNAKRFNGGNRKPFFFYARNTIQCYLEPTLFYDIACI

SEQ ID NO: 992273 - protein, 102 aa, Homo sapiens
RERHKGLELQDHAIMPSYIFAFSVEMAFHHVAHEGLKLLSSRNPPSLAYQRAAIIGASHHARPDKYINATSVTTTTASITLYRTESRAIDMCIRILNNRYPF

SEQ ID NO: 992274 - protein, 37 aa, Homo sapiens
RTATNIRFTTQYDTSSQYVDGVLNLDGETPASLKKQF

SEQ ID NO: 992275 - protein, 125 aa, Homo sapiens
MTHISICFRPLLFTSGGDCQTHISICFCPLLFTGGGDSVRAISPSASALYFSVVAANLSDPYLHLLPPFTLHSWRRLCETHMSICFRPLLHTGGGDYQTHISICSRPLLFTGGGECQNHISICSR

SEQ ID NO: 992276 - protein, 57 aa, Homo sapiens
  misc_feature (13)..(13): Xaa can be any naturally occurring amino acid
RRDWDDLCGGVTXDVSWHLRSHSMLSTELSTAPCAVRVSTLSMLLACKAVKSSPVSS

SEQ ID NO: 992277 - protein, 118 aa, Homo sapiens
MRRNEEPQRVITPVSASFLSLLSMMKTLASGPVSGPSFSLTETPILVLCKRMGLSGDLTVTMGHSGEAHACYPAPDLISSTGRRTMVRDQGTGEPDRAGCTGASYPQPWTSDAHHPEP

SEQ ID NO: 992278 - protein, 72 aa, Homo sapiens
AFYQDVDNSYVDHGHTHEYYDIQHESQNLEDIPYDMGLIEKRDYNNTLCISSEAFWMTYNSSDEDTTPASVQ

SEQ ID NO: 992279 - protein, 46 aa, Homo sapiens
SYETASKDIDECDIVPDARKGGMRVCTTLWRIPLPTENSPDYMYNN

SEQ ID NO: 992280 - protein, 47 aa, Homo sapiens
MLEASAREHQGQHMRDLLEDASSLLTVMATDRLEKEVHKRPRTNICA

SEQ ID NO: 992281 - protein, 146 aa, Homo sapiens
ALPQLLGEENWDNVKQDWSPMKDGSSPKVEFSNAHGLYCWTRVWSLLCTDRHCVTTGEVIASYNQLSSFQPAQGGCATAWLHLYEDDHNNPTVTREHAGLTSTTQLAEAFKHYNISWELHVLEVTTSSLRRLLILPHCDLSKIGDE

SEQ ID NO: 992282 - protein, 132 aa, Homo sapiens
TIRQIPITADRRRKLKLGGSGEDILMGSPQDTHYTKENSNSTGKRPGRHHLHPDWMQRRPDLFRVLARRHNGSLITRKYQANQNGGGVYKRPAHTSQGLGVLKDGSRDWEGRETTKYNGGAWGGPGTGKTDT

SEQ ID NO: 992283 - protein, 61 aa, Homo sapiens
MILFQGYKYWARDRVANKYREVKDEEDFETESYKMCYEIAVCREAGSVAFVPGYRSSEFCQ

SEQ ID NO: 992284 - protein, 46 aa, Homo sapiens
YTRSLFLCTALSRTGDGELQGEDIRRAPRGPGVPPRFPQSSGGIAP

SEQ ID NO: 992285 - protein, 46 aa, Homo sapiens
YAREVVHPEYSSPPPARRAADAWGIRTLPLAILYPSWLQPEDETSA

SEQ ID NO: 992286 - protein, 66 aa, Homo sapiens
MPVAICFRVSFRIVIVILIICVILIVLILCGRGSSCWFHRCGFNFIFILILVLVILLILLTVIIRL

SEQ ID NO: 992287 - protein, 48 aa, Homo sapiens
GSPGGGCSADSLGDDNGPLHLHLVTRQRGSRRRNGDITSEGAFLVNVG

SEQ ID NO: 992288 - protein, 70 aa, Homo sapiens
RWSGRRFVGYLLNEALAVLEGTSRSRSRGGSRRRQRRWRSIILLPRLDCSGTISAHYKLRLVGSRHSPAC

SEQ ID NO: 992289 - protein, 65 aa, Homo sapiens
MGIQVISALWALSGPDPGTQCLVGPAPAGRSPVQAPCLRNVRGAAHPVACFGLAGDVLGCNLSPS

SEQ ID NO: 992290 - protein, 70 aa, Homo sapiens
MLDHNSDGQCYQCPAIRSSWSDIKFFQSDSPVAHPCQALSSGTLQLAARPPEALSPSHISLRGNVTSPQP

SEQ ID NO: 992291 - protein, 101 aa, Homo sapiens
SDRGEYILGRRSNRADEITRQQKGRGGRKEAVPFFCLVALSFLLSQQSYPRTLPPRKLRYTARSLLSRGLDSQKSKARPPLRADQRNSDISSPILPYQCAA

SEQ ID NO: 992292 - protein, 39 aa, Homo sapiens
MSVGMRRNMINKHGLTSMRNIKSGMVAHTCNLSSLGGRG

SEQ ID NO: 992293 - protein, 67 aa, Homo sapiens
MTAYYTELEQQTGCNDRQAVQRRTDRSPLPYHAYSKAEWLTLHLLCSCNFPGYDTADLAGPPPSSST

SEQ ID NO: 992294 - protein, 98 aa, Homo sapiens
TEGLQQTAGEQAVAVRLRSDYEARLSESTTTLIIAGIRNGRHRVHHRAEVFADRKTNARISLQHLHFSPFFRTANINGTVPPNEIQRNDIWFMAVGKS

SEQ ID NO: 992295 - protein, 70 aa, Homo sapiens
FSVVCAASVITAVAPFKTRGTCTGTAAPAGTGVPVGFADSGQATGKPFHHPRLRCCTVISRLCLPQSLVL

SEQ ID NO: 992296 - protein, 42 aa, Homo sapiens
RGCHTLEGALKLYDRFRKVAHGGKSGICHTMMVVSSEALAIT

SEQ ID NO: 992297 - protein, 94 aa, Homo sapiens
KYMDNYSEEEYESSPPAGGSDDAVQGQELEEDDFDVGKPKKQLEIDKKNDVHDHGKKNFKQKVVALQKRYKVSDEDLDSEQNPAEHIPRDKRED

SEQ ID NO: 992298 - protein, 75 aa, Homo sapiens
LAGKGILQTVGSNPPVQKGSVKATSDTSKNPCPLQSHHTDLMKLQSQGDRSGYEQPRIPSALPAAAPASLSHRDT

SEQ ID NO: 992299 - protein, 55 aa, Homo sapiens
LLLRNLTLMCVSEPGAQSGYVLRDGARPAGGILYPFVSGCSVGDGDLNSSPSLCH

SEQ ID NO: 992300 - protein, 68 aa, Homo sapiens
WVMMESILFHELYEKDDECYAEVWTYMMMFSHRASQPQPKSQCKKNPVPEESDWKVDSSSGQDVVSTV

SEQ ID NO: 992301 - protein, 44 aa, Homo sapiens
QAQLHLQACQEFKVAKRRHFSHLAALQYGNTPDFPSSSVPSLCQ

SEQ ID NO: 992302 - protein, 110 aa, Homo sapiens
VQVDCYWLSATLTVGKPTYPNDEYNHKEFLVSYVRGVSVVEYESAMATVIIPEDRYWENLVVVGTWNQEEHIEWAKKNTARAYHLQDDGTQTVRMVSHFYGNGDICDITD

SEQ ID NO: 992303 - protein, 115 aa, Homo sapiens
STRFRDGIVRIYEAQSVMNLSEWSLQHEISCKLSGSCISGNPYKLSVQPSECGRVISSDVYRQESTALWLVVANDANVDLSRLAFCMHFALAKNPNTFHIYAQYQTHRLRYTQDN

SEQ ID NO: 992304 - protein, 39 aa, Homo sapiens
IFGGRPPSSVVFYKATLYQEICVVSSLQQAFVPAGYPLV

SEQ ID NO: 992305 - protein, 51 aa, Homo sapiens
VYQELSHRESLYTASSLLSRGLDSQKSKARPPLRADQRNSDISSPILPYQC

SEQ ID NO: 992306 - protein, 67 aa, Homo sapiens
PTAGLYCSMGEGSNTACKNWVRRCKRHGPSAKWRKRVMAGPRKGSSQCAQRVTNITCGRGIVKGRVP

SEQ ID NO: 992307 - protein, 35 aa, Homo sapiens
IDPKQILELLHLNILSGIEYFEAEHAMCSPSFMTK

SEQ ID NO: 992308 - protein, 95 aa, Homo sapiens
LISTAAGAYLPCRDQQGKRSRTHCRLCSARLLDCSPGGSSADSFLTHPALCFALSPEVVLSNLPFLPQSLGSRVQLHSPLPSTLVFPVQPQLRGD

SEQ ID NO: 992309 - protein, 36 aa, Homo sapiens
VWLLALERVRNGSPACVCRAAPAIHRGALLLHVFDY

SEQ ID NO: 992310 - protein, 39 aa, Homo sapiens
RRHSCACALPLCGGQLWVLGARVAFCDPSPVPLLALLMQ

SEQ ID NO: 992311 - protein, 83 aa, Homo sapiens
ALYFLHEFPLITNPTPPISLTPCSTMSLYCYKFQGTGLRKSKYQTKVVEYSTTGRNAEQLIYRLVAPARPPGSPLLKVTITTK

SEQ ID NO: 992312 - protein, 58 aa, Homo sapiens
VGTIRRGIKQECSKQLAVLVSLHQALLCCQPAGTGPTPLPTSAPSTHSQLPRSLASSD

SEQ ID NO: 992313 - protein, 67 aa, Homo sapiens
LVSRSTEKRSPKARLLKVSPQQPGPSGSAPQPPKTKLPFLCAKRIHPGRGGMVDADNSHVKGTCGAR

SEQ ID NO: 992314 - protein, 130 aa, Homo sapiens
IGKSKLLYLFLPPSSRVPSVLLSASPAPDPFPQYPLPASLINPSVAAHHDPIRIQLKDSSKFPNVPQYPISLTHQKGLQPIVNKLCSCSLLRPTHSPYYTPILPVKKSDGSYRLVHNLRAISQAVLPIHP

SEQ ID NO: 992315 - protein, 56 aa, Homo sapiens
ARGINLEDEFQTQFLRTSHSLEDTCRRAMSYLHHAIDTAWPIMEIELTVVNFCDWA

SEQ ID NO: 992316 - protein, 116 aa, Homo sapiens
MGHRMLLVAPKATSALHRAALAPCAANVSTFSDVLPEAVQQPVVLDQCVLVVRVRVKLAVCLLEDLPRSGGCRLPASPSAFGCLPLGPLGGYSHRCSEVSYTRLLANILLRNRTGS

SEQ ID NO: 992317 - protein, 77 aa, Homo sapiens
HERPKLQDADLTLYQTNTILRTGPPLGLYAKDQQQAALGDMGNDGVYNLRCRYISLIYTNYEAVKDDYVKALPGQLK

SEQ ID NO: 992318 - protein, 45 aa, Homo sapiens
MGFHPVSQDGLDGTSVMYAACYCHEHHDVRRDIDVEADSLRVGAL

SEQ ID NO: 992319 - protein, 39 aa, Homo sapiens
MVLNSQSRHYITTQLATKPEAVKMHHLPISGCKESDEDY

SEQ ID NO: 992320 - protein, 141 aa, Homo sapiens
  misc_feature (135)..(135): Xaa can be any naturally occurring amino acid
MPQSRLTATLPPGSSDSTAPAPLEAEIMGACHHTRLIFVFFGRDTVFHHVGQAGIELATSGDPLASVSQSAWITGVSHCVQPMFLKCLLCARPCAEGLVDILSHLIHSALRREDEDTEGEACGAGPPLHNPGLRXVFLQHL

SEQ ID NO: 992321 - protein, 34 aa, Homo sapiens
MEDGPHSSQPFLELLDPRLISTEENMHAAEIMVL

SEQ ID NO: 992322 - protein, 41 aa, Homo sapiens
VNLGGYTSLQAESSTQSGLEDCSFGVGGRPSGELVSCTSRG

SEQ ID NO: 992323 - protein, 72 aa, Homo sapiens
LTAEVDLCRETVEDGRTLSELQASRKSHLAAWCSVSEVGCTIFVKTLYWKDRSRLERGAAVTPLDECQRQEI

SEQ ID NO: 992324 - protein, 67 aa, Homo sapiens
AAVTAGMASGLSLAEGHDRLREQHVACDWDCGAACHVGTSPRCLPCPALQCLGSQAQVCQLALTTTH

SEQ ID NO: 992325 - protein, 89 aa, Homo sapiens
MKQLIPTASLLVSRRVTRGGRSDPTSFTHHNREMMGTEAVTGRFTFTLHLETPKPSISISNLNPRETMEAVSLTCDPVTPDACYLWCIN

SEQ ID NO: 992326 - protein, 85 aa, Homo sapiens
IKDRPGLVTQQEEGLGQSDAGCVPAKDWDQLQNKVPGGPDDLEGQDATPPKQGAACGAAKQLVQEGKLGTLVPAGLDETLSLSRP

SEQ ID NO: 992327 - protein, 110 aa, Homo sapiens
SADEHGAGREGKESPTLGARPSPFSFQDHRPLHWQEGGGGEVQGTFMVPGAERRGQRYVAGDDAFCSAGDNVLYRDGVTATYGSSWRAPGRSWGFGVWKPYLGHLVHPSV

SEQ ID NO: 992328 - protein, 37 aa, Homo sapiens
LELLFYLLLFWASYSVCVSMGLISGTRAARKVFWPAM

SEQ ID NO: 992329 - protein, 74 aa, Homo sapiens
MYKKRALRPPAGHPSAQRLWAEAYRLTPGVHELPVQHARRNAYLKVSIERAQQENPSPHRGPGHLIHHPGRAHQ

SEQ ID NO: 992330 - protein, 68 aa, Homo sapiens
MLVPPGRDCQCTAEYCYMFIVLLDVPVQQLHGVISFLQALLILMDLLHPQLLLLSQKVVVLIPLILGD

SEQ ID NO: 992331 - protein, 59 aa, Homo sapiens
PVSYVLSRLTWMRRTRSRSSTVSSLFTGGSLAAATACGLQQGVVGDAGSLHREDVECLL

SEQ ID NO: 992332 - protein, 50 aa, Homo sapiens
  misc_feature (3)..(3): Xaa can be any naturally occurring amino acid
  misc_feature (5)..(5): Xaa can be any naturally occurring amino acid
  misc_feature (12)..(12): Xaa can be any naturally occurring amino acid
IEXSXTPQHQKXTDTSDISICLVEQQSQLKVRYTCPQTMGFLNLNAGFHY

SEQ ID NO: 992333 - protein, 117 aa, Homo sapiens
LYPINNSAAWHSAPLLVLRILAVVVPVPSCLFFYLFVLCLYFYDLSSLHTGRKTHRPCRAGPYRISCTVLSNKKCYLGPDALTHACNPNTLEGQGGQVTWGQEFKTSLASVAKPHLY

SEQ ID NO: 992334 - protein, 84 aa, Homo sapiens
MPMHQRVKSPGSICGSLCSARRWFALSCVSQTASFLTHPALCFALSPEVGLTNLPFLPQSLGSRAQLHSPLPSRLVLPAKPQLR

SEQ ID NO: 992335 - protein, 82 aa, Homo sapiens
TGERYKLRSITATDKRDRAFSFSFIASFIPELKKPEIQHTNIYTQKITNRCKQLSDTDPGKEEPPQSITIYDSNPSTPVKHR

SEQ ID NO: 992336 - protein, 138 aa, Homo sapiens
LLPEEGGVGPVSGCKTWSDCSSRVSLTFSRVTHEKTETLWCLPLSIRIPWQVSLIIRRRLECGRRGSAWFPHQICSGSLQYSMPKRLSPWRPTHTSHGLLTSMPGFAPWKEPTGCLSPTCSTSLPFHGARFLSRGSIL

SEQ ID NO: 992337 - protein, 131 aa, Homo sapiens
IPDNIKVKVMGCAESHQWDVQRGSHRCLSREKDLAGIYSEGRDLAGIYSEWRDLAGIYSEGKGHAGIYSKGRDLAGIYSDGRDLAHIYSKGRGHTGIYSKGRGPTGINSEGKNHPGINSDGGWATSAAVSG

SEQ ID NO: 992338 - protein, 44 aa, Homo sapiens
MGYMTGTISSMYQTKAVIIAMIIAAVDIHYQYTIFCFQTQGWTS

SEQ ID NO: 992339 - protein, 107 aa, Homo sapiens
YFGHLARNLTSFNLSPSHLQYVDDLLLCSPSLKDSQTHTDTALLNFLAIKGYRVSPSKAQLSISMMTYLGIQLSPGEQAMTPARAALIDNLPPPSSKSEILSFPGLA

SEQ ID NO: 992340 - protein, 33 aa, Homo sapiens
QDPCAHHRSSELYRIGQQLGITFSVWDSASLEN

SEQ ID NO: 992341 - protein, 121 aa, Homo sapiens
VTPGHRRSSTVYGWWQLTIDNPCQCLPHCSPHPRPGCQFRRGRASTMGPSMPSSRSCEQMVITGSLPRVPRSIPSPSSLAQCYVTTYELNLNLVADYGQSNTVSSLVAGGSASLVAQSIRI

SEQ ID NO: 992342 - protein, 48 aa, Homo sapiens
MIHPGIVAMLMCPGSTACTQGDCLDWSMTIPPDWSAVPCSLIGAMPMV

SEQ ID NO: 992343 - protein, 42 aa, Homo sapiens
  misc_feature (34)..(34): Xaa can be any naturally occurring amino acid
TLEDSSLSDIFGGDSHRCTRCHTPGCWLKHTPEXRTGPARFD

SEQ ID NO: 992344 - protein, 73 aa, Homo sapiens
LEAWVAGLDRQCCQHHPPSQETWMSERDSEGDESYSVPVSQAAHLAGRGCGSRAVGARVPATLGLEEDVRRGR

SEQ ID NO: 992345 - protein, 159 aa, Homo sapiens
  misc_feature (15)..(15): Xaa can be any naturally occurring amino acid
MSHDNVLCLSHVAGXLGLSLGRSRNRIIIHRALYYDLISSPDIHGTYKELLDTVTAPQKNSECSRIVFEKKLRIKSSFVAPLEKSYGTRPRVLTGNPRLDLQEINNWVQAQMKGKLARSTKEIPDEISILLLGVAHFKGQWVTKFDSRKTSLEDFYLDE

SEQ ID NO: 992346 - protein, 30 aa, Homo sapiens
MVKRGQQYFFSPDLEASGVPGLVNPGAHLN

SEQ ID NO: 992347 - protein, 72 aa, Homo sapiens
MPVLLFSSMFQGKGFLGGVGDGWVGSCWDSDGGSRGNTKAGLGEEGPLSLGSQGGLGGFSGRSGTGGSAVSE

SEQ ID NO: 992348 - protein, 74 aa, Homo sapiens
MVVTLSSQRYTEVNLSKCTMMFEEALPVDTVGFNVKNVSVKDVRRGNVAGDSKNDPAMEAAGFTQSFMVHIDRF

SEQ ID NO: 992349 - protein, 36 aa, Homo sapiens
VDLRSFCSLFTLGFISVLLKQLYTWLVNDFLSSGSV

SEQ ID NO: 992350 - protein, 48 aa, Homo sapiens
ARMGRAVLTGSRVPAGLVQGLVNLCVSSLALAKVSSRSSMVISNFAHR

SEQ ID NO: 992351 - protein, 35 aa, Homo sapiens
LRNREWSPAKEERVGHGGQLSRCCPHEHEKKQKLE

SEQ ID NO: 992352 - protein, 113 aa, Homo sapiens
GTVRMRLVCPEDSFVPGDGEHCAVRKIAARVCSPSRCDQPSELGMQVVFGSLVSAFHEATPLSLAEFIIDTRDAGYGGLTLPIEGPSKVDINTECLEDGTCGVTYCPTEPGNY

SEQ ID NO: 992353 - protein, 60 aa, Homo sapiens
TLRKCKEVSTYIKRIGYNPDTVAYSANFWLQVVTTCWSQDANMPLVHRDGTVTAYWTGNC

SEQ ID NO: 992354 - protein, 52 aa, Homo sapiens
RHRLDMGRQRHAEGADTPETRGMGMELCPLALPPPPTTRPWDLHGRDCGGQS

SEQ ID NO: 992355 - protein, 72 aa, Homo sapiens
SIVRLYEATDVMNLRQWSWQHEIYMSAKRSWYFSEPIRRIIVQPMNVDCDIYTCFRRNPGPLVVVAKKRTST

SEQ ID NO: 992356 - protein, 42 aa, Homo sapiens
QKEVWYSCRNEYYLVLLGYEASSHSVVGVKWPCIESTQVVDP

SEQ ID NO: 992357 - protein, 37 aa, Homo sapiens
VSVSDFLLVLDEHLNESIFISSKALHGSTKFISIKVA

SEQ ID NO: 992358 - protein, 100 aa, Homo sapiens
ARENQEHGDAGSRYPDDRCRCAEFEEAALDVEVLDSFLSFIPHIFRPFLAIRKGCDRAAVETPPDTVQPDLTVRLVVQALRAVGPAVAQLETRDGDSSRR

SEQ ID NO: 992359 - protein, 55 aa, Homo sapiens
HCGGCRIESEKHEGGRELMQELNYYLAPWRTIGFFKLHGGVNGQLETRDGHPLEL

SEQ ID NO: 992360 - protein, 37 aa, Homo sapiens
RYTHYTMHYSTNTTASGYLMLLEVQYFIGSNSVISLV

SEQ ID NO: 992361 - protein, 129 aa, Homo sapiens
TQYSRTEQKATATQQQREDVLQQQQAQTQQFHGSTSSTPATSNGSVPCGVPRRLSTEANAEFLPAAAACMQQQQQQQRVTALHQQQLMTQQAALQHKPTMAEGQQPQPQPAAAPQPAPAQEPAHESSPK

SEQ ID NO: 992362 - protein, 50 aa, Homo sapiens
MVENSCALCSAGSVRGQLWLLGALSSILLTPPRVYWHSQWYLSSEFCNHW

SEQ ID NO: 992363 - protein, 58 aa, Homo sapiens
MKYHLAEISRAVRHTGETLRWLDVHNSACVGVCLRLRHIGGPHSATLCPQAPCCCPGG

SEQ ID NO: 992364 - protein, 77 aa, Homo sapiens
ILTSPQSRKLSIKLPKGQDKIQMILAEYTSLFMKEVWSGRAQWLTPVTPALGEAEAGRSRAQEIETILANTVKPRLY

SEQ ID NO: 992365 - protein, 42 aa, Homo sapiens
MSYRWWVSPNARKNAASSTGSLVPPPLWQEVTPAIGVVSTSI

SEQ ID NO: 992366 - protein, 47 aa, Homo sapiens
MRIVIATWVRGGAENQDATLHSSLGDRVRLHYTRNRSLNKENKHRTL

SEQ ID NO: 992367 - protein, 53 aa, Homo sapiens
QELLLAEETRMRLLHTRSTANCFTAKLYAVPPRLLSTYPTAGSARLSANHGKR

SEQ ID NO: 992368 - protein, 33 aa, Homo sapiens
CDVTGGHGAVWVAVGVGPLRTSSWQRSTKLPPP

SEQ ID NO: 992369 - protein, 34 aa, Homo sapiens
ITDCHCTLDQSKSQIWLQNAGHSTYRSTIVHYIP

SEQ ID NO: 992370 - protein, 48 aa, Homo sapiens
GGCSVLCGQAVLTSEVLTTASATLQMATCELSHSHPSQSSFPGLVPLQ

SEQ ID NO: 992371 - protein, 34 aa, Homo sapiens
AVGSGCSRALEASCLHRAAAHAQDVSDLSMSFLK

SEQ ID NO: 992372 - protein, 60 aa, Homo sapiens
VGYLVCKPENWITSQAPRLDCKSCVGAGKSLRSSGARTLREEGGTGAGPGILPPWPPTIR

SEQ ID NO: 992373 - protein, 82 aa, Homo sapiens
HEASVGHDGSGGGLWRSSGSVVVFIPPGCLLPQRTGEPLPAAGGPALSHICPPSTRPPVDSSPIGHSLIRVDALVQLLAVEE

SEQ ID NO: 992374 - protein, 45 aa, Homo sapiens
  misc_feature (11)..(11): Xaa can be any naturally occurring amino acid
YVKIYAMPGGXDSRLLVSASQDGKLIICDSYTTNSVLASHSVLAS

SEQ ID NO: 992375 - protein, 39 aa, Homo sapiens
GNQRDFPVTISDYGWTRVETSEAEITRKPGLPTTCLRCG

SEQ ID NO: 992376 - protein, 36 aa, Homo sapiens
AARVCCCPRTRWGNSGSFTMWKSSPPPQHCLDSGRF

SEQ ID NO: 992377 - protein, 156 aa, Homo sapiens
RYRCISMHSSTSSSFASRFFQEGTILACVFWHRLRGHVLLALISRSTCSVSPRSSYSPQCSHTGQPLGARPPPVPASSPPPDAGPSESAPDSSLSAFFVFSTHLNPLIGKCRFIMSYARPPQVLGAAITTLHVWDHSNTRLVHTAGQGTLGLNDTT

SEQ ID NO: 992378 - protein, 101 aa, Homo sapiens
RVSIPGRCPALGVLRRPGPGTYLLLPGNGSGGCEGGPVKESCAQEGLALSGGAGLWVGRCLGRERRRSRPGGKWREASLSPSAGKLGVKRQTSLARSAPAA

SEQ ID NO: 992379 - protein, 52 aa, Homo sapiens
VLTGVTELPQDHLVAIGEDPLEDPGGRAALWGREDPSDLAIPCPTTAFVRGI

SEQ ID NO: 992380 - protein, 42 aa, Homo sapiens
LEGAEPPDDFERVHAEVYTHACAVGENGSQRRLLQEPINQDL

SEQ ID NO: 992381 - protein, 57 aa, Homo sapiens
YLAWATDEENDRQAEAEFNRIMSLVDPNHSGLVDLPSLQYDFIVAGRPPYTVPYLRR

SEQ ID NO: 992382 - protein, 87 aa, Homo sapiens
MGGERVDHLRQESDPPEHHGETRLYQKYKIKQAWWRMPVIPATLWRLRQENRLNLGGRGCGEPRTAPLHSSPVNKSENPSSKQKKHK

SEQ ID NO: 992383 - protein, 45 aa, Homo sapiens
NKHIAKDTDHKYEEVARKLVILERRAGALGVKGLERYGRRAEAMT

SEQ ID NO: 992384 - protein, 51 aa, Homo sapiens
ASGSAEGGTHIAEDSDRNYEEVARKLVILEWELERSEEMGCWWPESLSHDS

SEQ ID NO: 992385 - protein, 49 aa, Homo sapiens
LLVSRHTRCFGEVGGLVSDPCGKVSVQEASHIIRLSAFVHLVEWGYQIS

SEQ ID NO: 992386 - protein, 35 aa, Homo sapiens
MGFGQILGRSIRLGVIHHLRTTHGIRSMLRGTGAR

SEQ ID NO: 992387 - protein, 83 aa, Homo sapiens
  misc_feature (23)..(23): Xaa can be any naturally occurring amino acid
DAYAPLHGGTAACGQAARGAGEXGWTVRGRCSAPDRDPWTDTPKPKLMPLSIPFWDREWGPGYEKGQEKMDFFGLGAPRGGWT

SEQ ID NO: 992388 - protein, 56 aa, Homo sapiens
IEIACSFTRPRCQLNPLPSQKWEECTYCDAGRGECPLRSASSSGEWRTTGSTASLL

SEQ ID NO: 992389 - protein, 81 aa, Homo sapiens
MGSEEERMRREQIERRLQSESARRQPLVEKEVMMREKQFSQARPLTRYLPIRKEDFDLKTHIELIGRMVLDTCLHVELSSK

SEQ ID NO: 992390 - protein, 97 aa, Homo sapiens
MGAHTDMEGLVKRCQNFFGLLLGEDELLIFDYPVPLKGGSLLYSKAFSVGEFLGRIAGITGRRGAEAEEREASFGCLIGLSCLPRGFHLEPVRCPQT

SEQ ID NO: 992391 - protein, 60 aa, Homo sapiens
VTEKGPRGEERVKQKDLLDGEYGYEYYPMAPGTYIVTITCGVQNIARSPFEEKAGTECGN

SEQ ID NO: 992392 - protein, 57 aa, Homo sapiens
LASISLRAPCHYWLSCTVTSCTLDPENFRLLGQGAGLCAGPITYGEEFTPPVQAAYQ

SEQ ID NO: 992393 - protein, 108 aa, Homo sapiens
LAETDTEFPAAQSCSVDSAEAATSVICSYLELSAWEVRSTGWSSSSSSDVVGFGGESDGDGGHLEVDQPVILAHTLFRDHRFVHGRDVGILDHQLAHSLILSLHKLGP

SEQ ID NO: 992394 - protein, 86 aa, Homo sapiens
EYLSSVWNLFDFYGTGCALLELLALTLNMEPFYFMAVLRPLQLLRWIKMKERYRNVLHTMSELLPRMASLALTLLIFYYSFAIADM

SEQ ID NO: 992395 - protein, 85 aa, Homo sapiens
ADDPRFRPGGEDTWVGGGRLISGLDQVGEDTRVGGGWLISGLDQEVKILEEELADDPRVRPGGEDTGEGGWLMIPGLDEEVKILR

SEQ ID NO: 992396 - protein, 63 aa, Homo sapiens
VLAVQIGEGTGSPDQTQSRHSEGPGMPQTADTGSPDADRADTAKALGAPDADRADTVKAQGAQ

SEQ ID NO: 992397 - protein, 57 aa, Homo sapiens
KDSRHECAMLDVGDFTLTALNTMLRKGGRELGVYCKEQQEAALTRMAKDTITYMGLS

SEQ ID NO: 992398 - protein, 221 aa, Homo sapiens
YLGDSKDPLCYLFIIYPDTQLLYSQMSQASPQCLRKNRTHLLEGWMQPNKWDKDHIRCAMSCGHDLQQAAPGPGRAHQGHPNQDNRTVSQILSKRWYTLGANETQKYHDLAFQVKVAHLQQGPKEVQLRGQAHKPGASRSVTRARGSGEYQRRALPLPLGCPSELLSVAAQTLQSSDTKERLLWGRMAAHSQGTWLSLAQSFSHSGETTWTAGNRPSGLTD

SEQ ID NO: 992399 - protein, 42 aa, Homo sapiens
YQSGDVPVTGYPGSQSHPKHDRYPTPRGWQPLRDPPPNLPYF

SEQ ID NO: 992400 - protein, 39 aa, Homo sapiens
RQPCSLFSDASISSYELLQNYAYFTVSKLAISAILYETP

SEQ ID NO: 992401 - protein, 131 aa, Homo sapiens
HLQGEEINARKETAPNEVYLGLPHLPLLHQVHALLAEITFKTDPEHTDYTMEHGATRNFQAEKLLEEEAKRVQKEREDEELISPKRSERTREIASPHVKEDVIIFRGGRSQCELPKQGPLQNMITHTETCQ

SEQ ID NO: 992402 - protein, 58 aa, Homo sapiens
LIEEWVYSRGCRSRRRLPFLQGDYRQEHVNPFTIAPPNTARPERAGPAVDNQERLTGA

SEQ ID NO: 992403 - protein, 41 aa, Homo sapiens
LSDQNWASSRFYSNVDRQSCMMIDCRLTLKKTLSISRETSQ

SEQ ID NO: 992404 - protein, 42 aa, Homo sapiens
IEDTYYSVVKTQQDGWEGAPGTRKCSISISCWKDSFNFCRVQ

SEQ ID NO: 992405 - protein, 75 aa, Homo sapiens
  misc_feature (73)..(73): Xaa can be any naturally occurring amino acid
CDIVFSQSTTGRFTMKTSEMLDTHERKKYQVPAWSKGDVTCFHRDKHGPGNRRKVFRAPFWVGRATHPFNLTXRG

SEQ ID NO: 992406 - protein, 46 aa, Homo sapiens
TGAAWSGECFEGYESGFMMMKNGMDMEEGERNPLPWRGGPSVNSGG

SEQ ID NO: 992407 - protein, 79 aa, Homo sapiens
VITGSWEPYPAAPLGPGVTESSGTFITFLALEKGLLAPRPRVAVSSRGAWLSDGALRTCRPRRTLFSLVPLASFRPRVP

SEQ ID NO: 992408 - protein, 165 aa, Homo sapiens
FSGIMMLNVKWGFTLYLGIGLLVLSAEILGKRINGLGPAKLLKSQCSTRGPVASPESWETEAKSQPLCKSNMTLGGKDEGNAVVLGFYVNPEEWPRNSSSFSSLALGMYLATSSLLNGFDTPPYTYPFPYKVPGPLKAPYITWPIGIFTAKATNQVRSASQPPPS

SEQ ID NO: 992409 - protein, 56 aa, Homo sapiens
MTIHTGSRIYKAAPRKCLYGHIMWSSVHPLGHVKSRWGSVCRGSGQPSLTAGTDSR

SEQ ID NO: 992410 - protein, 72 aa, Homo sapiens
MVTQSPCLLCRGHSLLGAVATQKGLQTPGEGALKLLGAKDSRDPVTISPYPYTCEHGIGKSRHPDPRHIRLT

SEQ ID NO: 992411 - protein, 110 aa, Homo sapiens
AGEHPYAETRYCPVAFLAQSHFHIQPRPLPVWEAPCSPSLEIITGWCASNPESVGEEGGQQKEQSLASPPLPAQLGSRSFSERQPLLLLDAVTANPLALNSNSTCIRNLN

SEQ ID NO: 992412 - protein, 37 aa, Homo sapiens
IGRIPVAEREEVELVESQGWRLLRLQAWDDSRETPSQ

SEQ ID NO: 992413 - protein, 127 aa, Homo sapiens
CFWRVPHDPDSVCYRVGRISSEAVMQMLKKSRTGAMYKSDRGHDKSDRSHEKLDRGHDESDRGHDKSDRDRERGYDKVDGERERDRERDRDRGYDKADREEGKERRHHRREELAPYPKSKKVSRKDE

SEQ ID NO: 992414 - protein, 76 aa, Homo sapiens
VYYSHGTRLLDYSDYSTTRLLGLLDYSDYSTTDYSTTRLTWKVKKEYEVQHRRSMWLTKLGGADVRSIQLKLRHHI

SEQ ID NO: 992415 - protein, 77 aa, Homo sapiens
QLELAVIQKSTGHLIRTGTLPFVWVREMLRDFKSDLRFLSAGIGAKQEASEAYLVGLSEDTNLCAIQCQPCNNYAKR

SEQ ID NO: 992416 - protein, 82 aa, Homo sapiens
FERGLDRSRTCIQPRGHPVIQQLILTEHAHGPVSGLELTATDSAIPLMASVSPVRAGRERMPSGLEAGGPVAPVRGTAGRDV

SEQ ID NO: 992417 - protein, 127 aa, Homo sapiens
LTTRTAPHSVTHTSQTANNLAAHTRTHMHTQHTRKRTAHTNAQHTRTHSTHTAHSTQTHSTRTHIHTQHTNTQHTHKYTAHTSTHSTHTRTQHTRTQHTQHTHKHSTHITQHMHTLHTLKHSTRGRT

SEQ ID NO: 992418 - protein, 32 aa, Homo sapiens
LCEQVGLDPGGPGKIVLITIFCSPAEMLLLPE

SEQ ID NO: 992419 - protein, 93 aa, Homo sapiens
EHRITWVVVSVTADSTDGYVGEPLKREHPLMTPYQGVGPASMPLWDYQGSTMLTSQYVRLTPDRRARKRGLSLEPPAVLPQRPGKLTRPHSTV

SEQ ID NO: 992420 - protein, 44 aa, Homo sapiens
MRQCTGDLIQPNLDKVCALLQGLPADLDAPARPPTRSWAHRLRT

SEQ ID NO: 992421 - protein, 110 aa, Homo sapiens
AVSTETGEQQQERPNRTRMMCSSDPSGDQGHQDEDCTVGGPRLDDSHEVDVLQTGGLQAMEDKATGVRHSGWRRRTGSERWSRRWCRESGGSSPAQGAQAPTPAVPRSCP

SEQ ID NO: 992422 - protein, 79 aa, Homo sapiens
MGTEMLPGRVCLSICWVGVGLIQSTDLSRALEDRHPSLASRARVSWGSLHLQGVPSPDLAALAGLSPYPENRPVLPGPP

SEQ ID NO: 992423 - protein, 74 aa, Homo sapiens
HTRTQAYTNTEHYTATIQKHSTYMHTAHAHSALHINTAHSTHMHTEQHACKANMNTATHKHTEHTCTHRTRNIN

SEQ ID NO: 992424 - protein, 81 aa, Homo sapiens
RHQCLVCGSVGWTRPSRRSQFPFLADVLGQNTVGCYLLRVGRGLHLPPVMYSFLIYCNGFFGTHFSILGRDDNKCGLSTVM

SEQ ID NO: 992425 - protein, 97 aa, Homo sapiens
RSLGGDSHRCRGVYTRCREILLRKRRAPDRLDEQREMRSSSRLDFVCVSSMEEGVGIESEKQKAVWESCRNEYFWSFGDIGFFKLLVGVNGQLEGAA

SEQ ID NO: 992426 - protein, 76 aa, Homo sapiens
HAQYTRHHSHTAHTHSTQHTHKDTAHNTHNTAHTREHRTTTTTQNTKHTHKHSTHNAHSKSTHMHTNEQQHTSTHM

SEQ ID NO: 992427 - protein, 102 aa, Homo sapiens
RTRTPDIHEHQHTNAQHTHTHAHTAHWHTAHTPKTQHTHATHSTHSANTAHTNTAHTAHTQRQHTHAHSTCTHSTHINTAHSTQKHSTRTHMHTQHTGTQHT

SEQ ID NO: 992428 - protein, 47 aa, Homo sapiens
ELMLYPSTLECYAGGLLEPRSLARLWQHGKTDLYEKYTTLARCGGMH

SEQ ID NO: 992429 - protein, 70 aa, Homo sapiens
CAHVLRRLLQAFEGELAPVGGVGARWASWELELFDGVECFGGVRIRLFVEVLVWIRHTSQMHIHAMLRST

SEQ ID NO: 992430 - protein, 93 aa, Homo sapiens
GALRAIATRTLERFEPRMGEPTGFLLKENIRPFQLYEIIVTPLYHDSHSVSSQTCLCLTLMQVAPLLLPRQPASEATLARPWCSAGRACLQPP

SEQ ID NO: 992431 - protein, 84 aa, Homo sapiens
SNDAEGGTRESQCAATSMDNSIDLYRAVHKYVASVRLEQSNSSVGATFVDRWVLSSSKRSSLSACVLQVRVSVIAISTDPGANM

SEQ ID NO: 992432 - protein, 82 aa, Homo sapiens
RISVIECVSTQRGLETEDEFRKDAAADLVELAEQFQVECQGPCPFLLPLSPMSQSRPAYAGLDWGPESLCKTNTLATRLEMT

SEQ ID NO: 992433 - protein, 89 aa, Homo sapiens
MYVSPPRRDIQQVGLYRLQGFSMYSIFSLHICLARHQPGFDQIFIKIVPESSNGDMVLNPVPTHWAEEVGVEAKGLLDLPEDLADVPDP

SEQ ID NO: 992434 - protein, 76 aa, Homo sapiens
LTDPVSHLAYLCTSPSPPFSPHNDPSEGCGYKNKRDWGWTEERGDASNASLGAWKGSSALNRKIRQRGKVRGDGER

SEQ ID NO: 992435 - protein, 53 aa, Homo sapiens
MGDTDCSRRQYCVNHPGHPIYCVNHTVLCADGYILNATGSAWHINACVMDALP

SEQ ID NO: 992436 - protein, 133 aa, Homo sapiens
STAPLITAPKRPGPSTDAHDGVWWAGTDGSHLRLRGLGEPSCCTWPGVSLLLSTNVHHTSPIFWKVPVPCRPGSPTELRVLGLVLPISFQVSVIFAALNPQGPAPQGGFMVIDSVLSHMRFGGVRALHLLLPV

SEQ ID NO: 992437 - protein, 56 aa, Homo sapiens
MGTFARTAFMIVTDIQYLLYGPISTFVQASDGTCQGVSVTAWALGSGSTYVQNLYQ

SEQ ID NO: 992438 - protein, 89 aa, Homo sapiens
QTPHKRKDSLPLGPEGGDSHTLSEVSYTKLLGEHTPERNRTGSSHDSIEQQGDAEQTLDWITVALPTMLEGVGIESEKHKEVWESCRND

SEQ ID NO: 992439 - protein, 141 aa, Homo sapiens
PRGLPLRAVMPGPFLGEKDHAPGFWLLSQHCRLLNKMVGLGILLVSIVFLTVVILLLPFSTHFGSQHLREVNGLRADELVIRVCIIGAHLVDIVCVIVLFLIVHTVVRQALAWLPWHLLHQQAILFAAAAAGSELHFVIPV

SEQ ID NO: 992440 - protein, 40 aa, Homo sapiens
RAPCEQETQDYSSHHQRWCMLQGSSPLSVLRDLGNVTETL

SEQ ID NO: 992441 - protein, 99 aa, Homo sapiens
MVGRMPKLSTRRTIPTDVIKCRAASKRGVHTFRETDTRKGIFFFLLVEGNGSSKDSSGICSRDGHGRISGGRALTGCMWGAVLSVAEQIPLTHHSCLAL

SEQ ID NO: 992442 - protein, 123 aa, Homo sapiens
MSRINGTEHLCTVMFRGRTYTARCQICKVDVGLGVALIEAGVRVLLLLLRGDAWYRILVVILKPSKQHIHVLGRHLEPEYRKSTLEITCYTILSMELAPRAGIPERNIARADSFARHKLKIKG

SEQ ID NO: 992443 - protein, 75 aa, Homo sapiens
VCFSYYPIHKSLKAVPRSSGKGNCGFKENGRFSHGQVVSRDKLAPFQDPDLSSLAGRVLRCLAKHQDGLGHAAGI

SEQ ID NO: 992444 - protein, 123 aa, Homo sapiens
CSRALLCLLVAHDMALESAFVCASEMSLRVAQEEYRDWRRLFYWLLLMLTLTRFSSSILLTDSRSELCTIVYMPGRTPAILGFRDIVMVLDLLLQCGSVLWLWLWPALGLRLRLYSYAVGGRR

SEQ ID NO: 992445 - protein, 74 aa, Homo sapiens
EKQTKEITLVRHDRDQSQNTKNYLHTARERRTNIRKVARQHSRARVHLTLAARGQRTRNLDTPYIEKVRTARTE

SEQ ID NO: 992446 - protein, 72 aa, Homo sapiens
MVEKINKPDSVANHPDLTPIGSRWVLEQDPVVRTHNLIQQLMGFRNGRADVLRIWAEEGLLGCEPQAWRGPR

SEQ ID NO: 992447 - protein, 72 aa, Homo sapiens
CGSKGLDQGSGELDLGGSRDPRGSASQVAGTIGTHHHTGLTFGSREKTGSHLVARGGSENLVDSSSPPAWTS

SEQ ID NO: 992448 - protein, 38 aa, Homo sapiens
VPIILSVSMFPPRGYTSSHGVSTQSLFSPAETLDQLET

SEQ ID NO: 992449 - protein, 82 aa, Homo sapiens
EAIQRDHLPMGEPAVLLKAALSLQAGSACLAKLAGWPLATQTRITGCGQRATTQAQFDSGVLLRGGPAAGRSSEESDRCEAM

SEQ ID NO: 992450 - protein, 126 aa, Homo sapiens
MAIPLLAGAVIYRLPLLDSECPNPRSYHYAPGTRYDRSTSRVPTRTLWRTRAVHLHRLLGREATVIEMYGPAHTSPYAKKRDLRRAWTMASINAHVPPGTREKECQKMDGPLCDQGVPLPARRHLN

SEQ ID NO: 992451 - protein, 57 aa, Homo sapiens
MRLPDIRCLLSLSFYSNVYRLAYYKLLKSEDEWSGGERDKGLHYGKWGSPWVLVWKR

SEQ ID NO: 992452 - protein, 71 aa, Homo sapiens
ASPDRSWKTAAAVTGQILQQTYSKFDINSHNHDALLNELRAVLLLHEGHGQGLDIPYASCRCRSVEGSCGF

SEQ ID NO: 992453 - protein, 92 aa, Homo sapiens
MWLRFSTYSTRRGCRRQIGRCLLNLAAHFAPTESLLENTLFTGPWVLAEGLFSGAGYTVSKGGAPACGSMCTASVVELRGRGQTWGAQRVSM

SEQ ID NO: 992454 - protein, 40 aa, Homo sapiens
EAEAILLNVKSLRESTDSPRSFHLDVQGEVGLVMFFTTGS

SEQ ID NO: 992455 - protein, 30 aa, Homo sapiens
MPSCPGETPQNSRGKCPTNLRSDASGSLTR

SEQ ID NO: 992456 - protein, 129 aa, Homo sapiens
LHHASRSGNGGSSSLERGVGCAPRKDSLLKPGLSGCCGEGPPPMSTQCHAQRARAKSMCLPKQWAAAGAVEPPAPCPMPSQRAPFPIDWTKRPAHCSTGHVGVHFRGPKQLPSSCSILSAVALDPSSPD

SEQ ID NO: 992457 - protein, 92 aa, Homo sapiens
AREQILRWFGLKASQCLAPGLQAWVFGCQSLSPSTCDFRHCPVHTASPSSLCSGFKGSPGGWEPSQTQRSQAVSVVWPWASTEEAERSRGLL

SEQ ID NO: 992458 - protein, 47 aa, Homo sapiens
MEQHSRVLLAQRERTTAQVSGGPYYTTYKDLGQPTAVHDTLGSDKRH

SEQ ID NO: 992459 - protein, 64 aa, Homo sapiens
MYDITRKDSFLTAPRRGWRTLRRRSCTQENVLVTAGGPQDGPQTRNGRCTSSDDDRVTQLQTSG

SEQ ID NO: 992460 - protein, 144 aa, Homo sapiens
MDFDFIYCRDLDKIYAIAMRNGLRVLIFRLASFSVTTLLSATPALLSKSYSPAQNLTHLPSPHPQTQPMTPLPLSPWIFSLLDSIMILHQSIMILHRMSLLRLYPSPPLSPTNPLLTLSPLCLLPSPALGPNVLSNQLPCFLSG

SEQ ID NO: 992461 - protein, 125 aa, Homo sapiens
MSTASTDLYYSDHPSPTCLQLLCLATELQRVLERYSYTRTPQGFSPQEPLALTWIKFIVEHVMGEASATHAEGPEAKRSMRDLLALLAVIIRAPKSNKNWLYFYEVDYHSRRLTHIRDSRPSYFH

SEQ ID NO: 992462 - protein, 101 aa, Homo sapiens
RGQTRIRLLSGNGLCTGSCQVLSAASSGPRSLLQVRGTPSNPSPAPLSATSTGLRSPLQARGMPSDPSPGAACSCVCLSPAPTSASFRLSISSVASWASSL

SEQ ID NO: 992463 - protein, 40 aa, Homo sapiens
LGSTINFHVVSSGSPEGSRSVPDSVERGKETDPASCRRPH

SEQ ID NO: 992464 - protein, 78 aa, Homo sapiens
DRRIADISAVLPVDSSSNRSRSSSISSSGSSTSTGSCYQHSTDWEPPPLHAVTWSAQTMSCVPDLCVGRPCRVCQQGT

SEQ ID NO: 992465 - protein, 39 aa, Homo sapiens
GGTCSTGQGVLGIKVTDHAALCDPTGRIGPKKPSDLDHV

SEQ ID NO: 992466 - protein, 72 aa, Homo sapiens
DRRTEHTSASYRERRPLCDQDALAPTSYRQIVANAGHGQASQSRRRLVPPLSRHEEVDLVVVEGSRSPWIQK

SEQ ID NO: 992467 - protein, 97 aa, Homo sapiens
AAYRNRYGAQRRAETRQVSSWVARAHQTAEGQDARYGGRYTQDMTWSGVTAEHEEARPAFLNTLGWWGCGKKRVCNFTSSTESAHYGLPSGLPEPTT

SEQ ID NO: 992468 - protein, 44 aa, Homo sapiens
MHGHSVIQQLILSEHAQRAVVMACGTGPAVAHSPCMALCDPQGR

SEQ ID NO: 992469 - protein, 88 aa, Homo sapiens
QHSQSNMRTLNEPGAQEDEVEDDPKVTAGGQGAVETKFHKLGTGDGHHQSPGRRMFPPVQVCESAGLGQARPSNILARCDICSQLDDL

SEQ ID NO: 992470 - protein, 52 aa, Homo sapiens
VLQDTVFLHPHPASADSGQSSFTTELSTQTVNYGTVGETGHPITSSPVQGMG

SEQ ID NO: 992471 - protein, 39 aa, Homo sapiens
GNCFAEGIPELPAVVPREPRRLSAPLTGGCVAGDAAVLW

SEQ ID NO: 992472 - protein, 46 aa, Homo sapiens
DTESRRRGQSLQLGVGRSPPASRKAKDARSGRTVDKQDIDIGPGSD

SEQ ID NO: 992473 - protein, 59 aa, Homo sapiens
SYIGASEFGLETRPGLQLGSEDVAQPASRRPRRQVPVGRDKQDMTWSGSDERGLEVGAV

SEQ ID NO: 992474 - protein, 34 aa, Homo sapiens
SVHTYACAASLQQQDQELAGLKQQAKENAGPASG

SEQ ID NO: 992475 - protein, 40 aa, Homo sapiens
MTTYSVDYDSEEQLAVSVRVSMEKQNEYGETDRNIDSRHN

SEQ ID NO: 992476 - protein, 76 aa, Homo sapiens
MTFLEDTFGGDHDVCNGHSLSPHHRTQPAHRSPWVACASSSGSQFRILADIVLAYVGHARAQAVTLLLDMYHQGLD

SEQ ID NO: 992477 - protein, 129 aa, Homo sapiens
MTEEIQQYQNQPYCLRIEPDMRRFFENLNPMGSASEKEFTDYLFNKSLEIEPRNCKQPPRFPRKSTFSLKSPGIRPNTGRHGSTSGTLRGHPTPLEREPCKISFSRIAETELESTVSAPTSPNTPSTPP

SEQ ID NO: 992478 - protein, 41 aa, Homo sapiens
PGERTLFLSSSSCCLRTSSKSNVVRLSRAEKLPTSVVTMMQ

SEQ ID NO: 992479 - protein, 34 aa, Homo sapiens
MHTRLAKHTFSSSGFPSEHASSGKVSLESRRRLR

SEQ ID NO: 992480 - protein, 56 aa, Homo sapiens
  misc_feature (45)..(45): Xaa can be any naturally occurring amino acid
  misc_feature (49)..(49): Xaa can be any naturally occurring amino acid
LHMVRFVSTCCRLIEDLPSPGAASSSLCKVKEEKERHPNADVGEXWHQXSPILGPH

SEQ ID NO: 992481 - protein, 35 aa, Homo sapiens
ASKQLRREKLLCFPEAAMCFLAEQTKTKILMDSPE

SEQ ID NO: 992482 - protein, 60 aa, Homo sapiens
TYKGFPMKFTLSCPPPAYRASGTEWVLLLVIPWEKMELEVLVEFRGTVQSETSTVIDLEL

SEQ ID NO: 992483 - protein, 33 aa, Homo sapiens
VGTRWAWTRRTHSTDLRCLSTDAYLGDSFYDVD

SEQ ID NO: 992484 - protein, 37 aa, Homo sapiens
DAARAEERAAPSELKCGDLAAELKNVTNNLKSLEAAS

SEQ ID NO: 992485 - protein, 103 aa, Homo sapiens
MSKRTTIFQVDPNNLTNGTKFTLGKQLNPILESISTIGFKTRCRMQDIPMVQALLEVRVSTIKVLRDLSSDRSNRGRDAIYFKFLPVRKDRRNKAYFTKRLPP

SEQ ID NO: 992486 - protein, 107 aa, Homo sapiens
MLVRVNRLHYSCYNVLLHIITALKKLQLVMFDVTSSTDGTHPVIRFKTKRNKGTCTVKTIGGHTVYNAKEINENANNSPVVDPQTLLHMGKLSRDHIRLTKPIYIVG

SEQ ID NO: 992487 - protein, 57 aa, Homo sapiens
ALWPAVSHGGNVLCWEKNQTKPSPKRESGEEILHGECGTSCVEKAQLHCIFLPVRLC

SEQ ID NO: 992488 - protein, 98 aa, Homo sapiens
SSPCEITCPVRLSDLVDLHLLCVGQRVVQGLRLQAVAAGARWQEVGCSSSALKGSEEDELGVLREKLSGKAPSAKTISSDVFLQPPSPTRTTLTDRTP

SEQ ID NO: 992489 - protein, 204 aa, Homo sapiens
MFKRFSRLRLLSSNYSKSCGQKARAAWDSCRHSEHQTTVEDFKRAFTSPAAAAPCKYIWGLQYLEHVNSIKMEASEEAVNTGAHMENQVHQRIADPEESRSVVPRGVCCKLQEAHDPSPLELSAWRTCRGWHELCQERCKVGSVKNMVRAECPAVQDEDRATEAWARSQEPNKLRQDVTVYKRIERLDIELPVKISCGSSAPWK

SEQ ID NO: 992490 - protein, 120 aa, Homo sapiens
MSILGRLYRSKYCEIDIVLNDGETRKMAEMKTEDGQVEKHYLFYDGESVSGKVNLAFKQPGKRLEHQGIRIEYVGQIELFNDKSNTHELVNLVKELALPGELTQSRSYDFEFMQVEKPYE

SEQ ID NO: 992491 - protein, 199 aa, Homo sapiens
MRKKEVPKHLSQGYPRCHRLSCMGAYPRDQRECRRPFGQLQNGKGLDPLGSKTGGVMDPVTKPLEEEFPHLAVSPPKLYPFFPLVNATSHRLLTSSNARLGRYVTSSINFLPVPCGFYGVPYYRPDITYVSTENLFVMASLPRLSRAASCVSDEAGIPIPPPGPHVHKARWRYKRKGDTTQVGCEINLYIKGAEKRAQA

SEQ ID NO: 992492 - protein, 339 aa, Homo sapiens
KNFDALKDDYSGDHDQNDYNSEHKKEMVRMTNNVERDKNHSIMKSKGCCPCIRQKHPLQYNYTFWSLQVATPGLYPLDSQSYKQNIKHDWHLCALWSRFVGVFYIHTGTSCVTLQARVTSISSKKELKPCGTMMQGYQWWQSGLFGCRMGLALPLLGRNLTFAPWLGDPSSWSGRRSVGLLCVCPPFLRTLNFPTGLLTASDQCNPPADIRDRFGECLIYSQWHIGIQKVPTDCINGQFKLSKYKNYLVESSQAGNILFCMCVVGDMVGASSQYSFLTGRTPDQGLFAIYRENDSLKPSECTLREKRSDLLDTVYKGTRGHPDEADKHGSATEKRINGT

SEQ ID NO: 992493 - protein, 55 aa, Homo sapiens
SELQTEIADKCSGETPRQRIGHRYIEIFRSSRSEIKGYYDPPRKTRWDSDTGPLL

SEQ ID NO: 992494 - protein, 186 aa, Homo sapiens
LRSCCWRGLEAAGVLSDAPRGPSRSGHADKGLLVKRPGRQGNSGPVNCENSAKVKGAQVGTGKVRGKGLNSAVLRVLGPVAPEEVALEAGLEAFARYCRPTVCQARSGALGHTKVTEQRQRTWSYVDYGPSWAREASKGISKPDVYIANVHLKAYEFKTYGYSDGDLGQVTPTLRKRHFSRELKDV

SEQ ID NO: 992495 - protein, 32 aa, Homo sapiens
MSESVLLALGSVRGGAAGLYLGVRSGCRLPWA

SEQ ID NO: 992496 - protein, 584 aa, Homo sapiens
MRDELREFPVISVDGGTAKLSSEINCAQVVGGTIQPCRPMSARDEWLRPRVAEEQRWFHCSDLEVVDQYTDRRHADEVNRLSQVQTGGYPTGAGQIVGSNNQDLIDDDASTLRDDLEVIHVGSTLLDERAYEGKHERAKRYTSDVEFKEVAPVTVCPVLCRGKSPGLEQCVAQGLWLFASTRDEKRYQACAPTNMTGVGQPSHMDAPFHKSQFEALVHHRINQVCETTRRTAGSDFNTSIHTREHFWPMAGCERHTHLWNVIHHSYSHATSQIHLWSNQTTQSRSTHHISARWNSTERGTQQEDTGGANPRGRELPTRETQPPTSRPQYETQRGERQQESPDINDEEDRKTTKQNRSEAQQMDGNDKQAELVHRELTNPAEHTIVNTQAGRPEGKSQSEEKATSRTGHQRGGDSMERQQYIRKKRRSDRNQEENQRRTPNQETAHTPITERQRSRNEGRHPSVKQNSSRCANTGETAERKCETTNKTEHRGGTAATSDARPRHNEAAGRRGTHGPKRRTTRVRGAKTQRNRPPEAQTMTMSRTTQEAPERREEREERTRTQRQTNRARQSGWWSDQETPGATSE

SEQ ID NO: 992497 - protein, 216 aa, Homo sapiens
MKERLLYDLFSRSKNMETLTLSHGQDTDWLTDYHLDLGIIMRAYPLDDDETWTEDESRNTSNSIRRLHQQTRTKSHGGTTQHKQERSTEITQPTAQSKGSTRTATASRRRTKQTPKTNAPRNTDGDTPEDTTRADKQKKARARDNRTKTEHNHQKEEKEAEQKQGETKDTHGPQNSRHRRHKGRKHKTTRRTAEHKTDQLLTSERHRERSSVDTAQ

SEQ ID NO: 992498 - protein, 96 aa, Homo sapiens
VGVLDVTQDSSFNENKAFIRGCALTRVDTDQQRRDQALQGSEQAGESQGESVTAHGARELGQKTPEGAAPGMRALDCTPRQRGAPEGLWACAHDRI

SEQ ID NO: 992499 - protein, 45 aa, Homo sapiens
GVTERRVVTENEESLKYKESQTICHCEWQKLSKSLSILNIESAIY

SEQ ID NO: 992500 - protein, 198 aa, Homo sapiens
  misc_feature (136)..(136): Xaa can be any naturally occurring amino acid
MCAWGHSITQEAHYGHEGLLRATEACMLHIEPKTRTHGQLHNEANGAKHRVAGRHTTHKQERLKSARKADTQRRKTMEITSQDRNGQMRSRHPSRKARRRGQTAKRQRRPVAPKTHPGRVEDKHGTPAETSTRETXGGSSRREVGDQEGKRDRSQRASSDRSNKRSQPDGQETDNDDRQRTDAEIQESDCTTRRKHER

SEQ ID NO: 992501 - protein, 57 aa, Homo sapiens
GRDPVTLISYLKLPKPYITINNFNARENRDVLNFTCEPQSETYTYMGWLHGQSLPVS

SEQ ID NO: 992502 - protein, 301 aa, Homo sapiens
MVLKKFSTSLADRDSYATAAPVVRDKPGRDALSATPRVTRPCLMEHKRTQRLSARTDRGPPSFLRSTLQGRMTQSPAITYQPYSEQTLQRRTQGPRYHCPAQTVLRRHAQLTWGAHATPEPHRHNPTAAHQKPPPKSPINSAASTDTPSSPLVDTVSPNAYESHNASKAEVQAKQATAAIPASQQGLLTHCKRWDTIGPIPQTPALAAPNQPPTGITPHNKAELSGQHNTPTAPQRAPVCLRLPSCHLGSPPFPCPPGAPSLGLVLPSKPLAVFGAPVVAPTRPCTRVRVPVPAPLPCAPP

SEQ ID NO: 992503 - protein, 34 aa, Homo sapiens
QGVRILLLLANSLLLFEPTNFIHNNGSTFTTQVI

SEQ ID NO: 992504 - protein, 472 aa, Homo sapiens
TQADPVHYLFLHRQAQRLLYSSVERGFIYRPQCHLCTSGFRLKISFVNFARGTTTTRSFDSDIDDPMPRGTPRYTLQPRIRTQRERRSGANLLSDSRSHAYPNTLNHQQHPTASHNDGALNPNAYRMHTHACTSALHRTPSTALALTSGPRPLHTGTDTRHRIPSAPKHIAQPETTPSRTAPRTRSKANTPTATLNPRPPTRCNRRHGQRLLRHQPNPRTSPNRPLLAPAHPIPSITLHADCNKAEPRRHCTNRNTLRTHQPSHNNAPNELAPETRPRQQLTPATVKRPLADQRFITNGRPHAHPTTGPPQTKAPMHLPLPLPGPHHTGPARTTQQPNVQNPPPEPLSPTHAASLPHPNRPPYPLPNPTVPPHHQPLSPPPPCPTPLPSPPSPTTPLNHLLPPPSPPPPSSPPSSPSTPPSPPSTSPHTLIISSLLPLPTPPLPLSPSALFSSTTPPHHSPPPSTHPLRFHS

SEQ ID NO: 992505 - protein, 33 aa, Homo sapiens
RHTTGVRLPAGRMNLCLGERDGTGVMLADQRNP

SEQ ID NO: 992506 - protein, 78 aa, Homo sapiens
DLEMHRCALSSVARCLGGLSVTVVRRRHCVASPRVHLVVGLPQSGAPCSRLRLGPPQRLVAAPSSPSADGRAFGAGQS

SEQ ID NO: 992507 - protein, 199 aa, Homo sapiens
MQQLLSQPQHEREKEVVLLRRSMGRRGAQPWAASDVLCRSLANRDPSAAEDADLHNRPHVSDIWPSVWMNDRHAQRELCGERSPDQIENTQMGTPSVQEMSIETSCRKKHRPVNNQKVTHVKDLNAKVAAHKKPAGDEYVRGLHAQAQGGCKIPQETRADEEEEISRVNKTSGTENDEMTCARSESRKLARSRKARECL

SEQ ID NO: 992508 - protein, 60 aa, Homo sapiens
MEFDDPACANTGDNPFSTKTKHNTYATDWWQVPLTPSYSRRLNDRRHFARGTRRSEFYIN

SEQ ID NO: 992509 - protein, 130 aa, Homo sapiens
MKYGTITIVHPKAWELYKHSRYKALEPQPDASYRCIYSANETVPWMLYVLTEYPDSQGEQYWEVTMVLKNYTVSSPMGCSKVGAHKSRWPTKHVTQQGVTGNKTRKRRGKPRKMPRLTKGAEKSYIKNEP

SEQ ID NO: 992510 - protein, 62 aa, Homo sapiens
  misc_feature (50)..(50): Xaa can be any naturally occurring amino acid
MWSLEKKPVRKGIPVMLGANGEGGMKVIESRAQKDEEKMEIQEIQLKMIXETSYTLPQMKSG

SEQ ID NO: 992511 - protein, 103 aa, Homo sapiens
FCLSVELSAMRVSQLCSYTVYKIYPGHVEALRQDRREGFQLSISAKCESAFLFQEESSDDKLDCPLQKEAAKRDSRKTHSQRKEPAEQSNSMSGHYWCISCVI

SEQ ID NO: 992512 - protein, 92 aa, Homo sapiens
DCDFIPTNALYHGLRDDKIEHLWDTCLGGFVLEVGLSLDVEVEFQPGEGILSRRNQVRRRRRYRTGRRFRGSSVKYVERFGVAGTSGRRTAL

SEQ ID NO: 992513 - protein, 73 aa, Homo sapiens
MTKKDTRNYKSQIQNHRTRPYHRDIRQDNNTNKTDRLNKKQERHDNQSHVPANRDDKDNRANHHTQNDTNDTR

SEQ ID NO: 992514 - protein, 157 aa, Homo sapiens
PTPSCALGSVGQWLGLPATAVAPRASRCLRRAPRDVAGAAARCDLGRSEECALGGDVSGNAGPVLRAALPGPVAASVVGHVACGLLNYPAASCKTSTPAWPCLRCLVLLTCLETCACTVCLQGDPVTCTVALVSPEIFSGIACPDVEKLHHLQALGD

SEQ ID NO: 992515 - protein, 109 aa, Homo sapiens
  misc_feature (6)..(6): Xaa can be any naturally occurring amino acid
  misc_feature (46)..(46): Xaa can be any naturally occurring amino acid
FSSVTXIRTTVQADSYLSEVSLTSQLRSGSKCSLTICAEEVIKLEXHLQQAGSRAQRSSILSPQELCRGGIVDLLLVSSTTHPHCVCSLTQPNCSCTSLRKRLQEEEDI

SEQ ID NO: 992516 - protein, 248 aa, Homo sapiens
RERVGRPTRLPVRPGRPQGGSGMAAAVLTQQRRREMVELQRRGSTVSWSLSDKHDWSYSSSTSKLAVRVAVRLGAICADWNQLGAKLIPPVLRGHGTSCSLEIANLEGTTRRSLKIPVLDAYLWGEEYSAGQFYAKGSVQPIHKGTLPVKGTNCQCCYAYGNPNGCWERTAPQIAWACPRATWGDPPRALMDPPCKLTRRGRVPEGRHGPFSVTMSYLEIYQEKGIRPPGALLPEDWYIRKIAGEYPD

SEQ ID NO: 992517 - protein, 119 aa, Homo sapiens
GAGTRVSASGLPCSTLRSLPCAAALSLGLRCAPGGAAMACRRKPAEDQSRCDGDASPAVPRAMDAWEEAQSRRKALEARRRRGGKSNRGARRDKTRELYHSLKGPKTPYQNALTRARCS

SEQ ID NO: 992518 - protein, 108 aa, Homo sapiens
LYRSADVVERIVHLDVHLNCTSNVKSNGKIHIDSKLHVTLYNCSFGRRDCSLCLFLLTPLQVCVVLWCQSRCSSNEALCNTTSECPADRHQQDLGLCRILASMPSTEL

SEQ ID NO: 992519 - protein, 35 aa, Homo sapiens
CSTKKAGSMMMMMMEGTAAIPQSGPQDLGLDAGTR

SEQ ID NO: 992520 - protein, 110 aa, Homo sapiens
MAKDTKEEYASKNEPHTMRRHSTTRQADRYAQQDGSEGERELRHRVAVPGSSARQAREDGARQRRSPPTPHSAHSARPDAQRPRSSENRGERVKRANIREAPVVSTQRRS

SEQ ID NO: 992521 - protein, 86 aa, Homo sapiens
HASERVKRLMLKIRVIDHYMSVQATSNDITSHLEINLGDLAAQDVAAGEDEVDVGVVGAQSVAEDRQVKCFCSMMWMIHEAFPALA

SEQ ID NO: 992522 - protein, 404 aa, Homo sapiens
MAVRKKDGGPIVKLLRWSVGHRRPTFDNVRLWLGKVTTRSILQAEPHHQSSPCLACVVHVATTFRKKFIGKHVSECSRSLILPIQTVSHSISNAGSASLMPTFYAAAYETSTSDQGMAGVYDSPESITHGPAIVAKCIMTIEDVLWVQNTLPDLDPYPVCVCSPEDLRPETYLEEQLQVTVIDETPGNSQLRHKNTASHVDSILVPGATLDSTEEMSTQQVSELRDLSRVPLQLGTYESLTDNDHAVITNKCIFEATSGVEPRLPNSMTTPQDTGLHAHVCDPATTEPLHSAMRLNCEQKNDRHSHDHKHRPPAERNILPHLLLSHFRLPNHKLTDNSTQLSQILRHAPHTNTHQYTKKRIRHNIHLSSSSTTQTKNQQAPHTRPSHSHHTPNTTPPTSTKIDN

SEQ ID NO: 992523 - protein, 210 aa, Homo sapiens
MATNFLAHEKIWFDKFRYDDSRRGDSSEQMNRAVWQVPPVAELRPRGPPDGHQLETTVSSLVRDCQSGSVRNQSLRGVVQELQLAISKSGGPAETCWMKSSPGHRATGPTDPSTYLPLRQVGGPQSKKPVTPAEDDDGMMTLTLYGSDNEEEDTGGGYKLREERHTVQYAGAMKASEACTGGQVLHPAGCQALGCMRRHMAQLEACVRSI

SEQ ID NO: 992524 - protein, 392 aa, Homo sapiens
DRERRPFLFFFLLKNYSVKVVSHSFSATGCEQGCGKTQCGRLTPVSVVGKLRGMCQSFTQATSLVLPGFRHSLAFHRGTLDIYSRLYYVVIYFYFITFMGALGTKEKRENKKQKKKKKQHTKRERETANRPRTTARQHTARHPRTTHTRRDDRANKNSTTGTQSAKSATTEQDRRTQATQKPQTEHTSSPTTIRRELSNKKETHNEAKGKTEQQRNSAQGGEPPVEKAPAQPRNKEDPHRQHTDKGAKRDATTAGTEGPAEERAGPRRSDTKKTDKQGKKEQKRNHTHRSREPKHNDGARHHAHTAQRKNNTEKTNRAQDKENRRKHAERRTRETAGRRGETRTEDNRTTRKREGEHKARSNRKRSSKGGKGGSTNAENDRDQHRHETGSDK

SEQ ID NO: 992525 - protein, 321 aa, Homo sapiens
DPRVRQMLMNVMGTTGANTVCQNILGGYRCGCPQGYVQHLTSGISVSYENRDAPIPMPVARLCRSCYNHPAGRSQVRPAPRGSPSTQFSMCLHDVVTECSSSKEPLQLSAALTRTGGYPLWLPPWVFHEWDKATVSQRMGFQQGAVPVTVMTRRSMSENALSPEACYDVQNHTAILRKTAGRRQVFMNLIPLLLNSISLESVDDGQPRQHEVQPSPQLRVLKGGSIPGTYGARASKAPFREAHPFRLMVISSRVTDDTAVFRSSTTGMGSANLHTGPKEVMPDYTCDRESSLRKIASTRQKPGGHTRQGEAKERSVKPTGR

SEQ ID NO: 992526 - protein, 68 aa, Homo sapiens
IQMGAVVGSSNKATESIQVFPITGNQHVQISRPSPWVASVLSVRARAAFLFWAVSGWLLMRVTSLVVS

SEQ ID NO: 992527 - protein, 220 aa, Homo sapiens
MQVIFKRRGKLGIKSKWAGASGVEQRKYTVPRHLTWGISNRNNSRNKPFKGLEHKTQLDCGSARIATLFPVSSIFSGPCKLMEELWNWRRIVLDEGGNRSKWLGGRLKNQEQRSIERRKEFQNVNLSGVTRKKAKYHCTFIWHANWCRKQSRTTPDGPDQTRDTRRIDANTVPQLSEPGPGHHTPDTTRDSTAEQTAQNGSTKEPRVTGTTEREHPHTRE

SEQ ID NO: 992528 - protein, 108 aa, Homo sapiens
MRGASIGDAGIVFHLSEVKDRCHWSPNNLVPWVNQVYAQRRRVSIVGQEMTTFEYRSWNPYRSKASSEKSWVEWTRSTSKPGSKVLYLWGVLRDTRSPMSLTSLVRMV

SEQ ID NO: 992529 - protein, 143 aa, Homo sapiens
YRETVSEESNVLCLLQGPPIKAQSAVHEGGGPSPTAMAEDVDKGEVSAPSGAQASGRATGREVRGGTWLRPARSGAWARRLRPQHPHRHHQGCAVTQSADQGQCGGRLPVGPPRRAHCVEDEACVGVRFDVHEVSLYAEAIHR

SEQ ID NO: 992530 - protein, 228 aa, Homo sapiens
MGEYSTNVRKKGSPVTTTATSKSNMEESSKKMPDGHKQQLNKQNETHMTIQATENTDSNTDNALPDKHHNQRRQVQSTTHIRKTTHNSLTTTNENLPRSVEEPNRNTHTTTDTRQQQAPDNKPWNESKEPHRKKPEMTNTKTDPGHKQNPERKRRHKTSKGAQTQGKTDPGTQNKTHTTTTKGKEENHKNLDHQKRKKTKNTNQTKTKRNETEEKRNETHPKQKKRAS

SEQ ID NO: 992531 - protein, 188 aa, Homo sapiens
MPDDELLSSSTANVCSYAPEVSDEAMSPLGGRNKSRCSGLKSCNIHRRKVLHGSPPWSRWVVPGTHLRRKETSRKAHPRTIRRRAKSPRSVASFVVVAYNLAPLEVSQWVQCVPLVGRHIEDRTTQFRVAWLACGELPVGLRSGAKTARDPVGPSRGRPILHSAGLVRETHALQEQQYRTVGTQGAPS

SEQ ID NO: 992532 - protein, 119 aa, Homo sapiens
MSSPAFLRSHHLVVRQADSSQQGSPGTAVWILSLNLLFRQLTDLETFGIKGTHLKCAAVLPGRIPGLICPKPINPRGNPSGRQGSWCPTGLREGKTLRDDYGKSTRGKVGGLLKHGRVY

SEQ ID NO: 992533 - protein, 224 aa, Homo sapiens
HPTLNQWWKNGLRDNIHFSLLSIQGRQEDASKEKTEPSKDRKRLENKHNTTTKAPQQQRNEQREPGAPGDNNEKEKTAEENKKGHKDKTKKSADRKKRRQNTQDSKKDQNKRRKRRTTKGTDKADRAQKTEKTTKKKMNKNKRKQTNKTRRNRDKNTKNRETTEEKKTEQERQHQKQEERRKRQSKKTKDNKNENTEREERNRTENGDKQTKKQREEREKRDKS

SEQ ID NO: 992534 - protein, 96 aa, Homo sapiens
QTRERGEMPVAVGSLRTVLQRKLRSTVIKSGLSVNGLRRWSHWRDRGASSVTFSCLRYRNAGSRADGRRLGRTSGCSSGRHRLASFYGPLGMGIRC

SEQ ID NO: 992535 - protein, 42 aa, Homo sapiens
MGVWKRQNEMKNEREQLDSLITALHAITERQARRGHNENART

SEQ ID NO: 992536 - protein, 117 aa, Homo sapiens
RPFPRPTITTAVWPNTPSSTCALTTTLHSTPAAAGLPWAEWGAVFALASVPELHPAQPASIATNGATLDKAKMALSRSLHRVCVPNCLLSGGDSRSLGLRSVVGCPSRALFDWYAPL

SEQ ID NO: 992537 - protein, 61 aa, Homo sapiens
MVVQFNQTVKQQTLQNNTDMSKIGQQPKPEHMPTTTAIINADTQQYSITATTSETGQLSRY

SEQ ID NO: 992538 - protein, 263 aa, Homo sapiens
ADFDTYDDRAVQQLRAPVGECPAAAAGCGHGSRTQEGVVPQSSPYTVYRSEIYLFNTVQGDIDAIFKDLSITSVRLVRDNRHQMNFKDSAMSTFDEVDSLTEALTYDGALLGASGSSSCGHCCKAENQMKVCFRHFRNEVVSDVVHHDAASGSDFFTGAGEVVAQATGVTGPPMGSVRFQRWPSPPWIQHGFQRTHRRGKSTRDLRLQLRPRTVATPLNQVANPNSAIFGGARPREESRSKGAEVSLRWEEWGVGVDAGHRLV

SEQ ID NO: 992539 - protein, 203 aa, Homo sapiens
FFFSEEHNFMKTHSYKTKLKHLYVVMIKTSNNEHFYRGMALLKVIGTSQKVMARSHLVSKTVHVKISGYSFKREQRTRQRAPKRKKNQYIFRSEQAFNIISRLSSIHICEKKENHQDPHQQATEKAGDATRAESTEDDTQPHKRKKETTNNRRRDGAGKTKKTGKSNKARTRAEQKNKRQRITTQHADRKVRAQNNVCAQNRL

SEQ ID NO: 992540 - protein, 164 aa, Homo sapiens
ARCTRGKASWSQSRSRNCGPSRKSGARRRRPRGQGSLQSSTRGSCRKEGFSSRCAWALPPLLKCLRDVAKSASRVRRQLPVARQQCPGASSGSCAKPPLISFFFFYLKDSGVRARVPRVRVAFGRRSQLTGSLDLLSSSELPGSASVSFRESCEYGHVPPVSGN

SEQ ID NO: 992541 - protein, 144 aa, Homo sapiens
DELRGTPQTHTMQNDDGKFDESVICMRNYALLTHICIHRVPKDHASIQIERWTDVIENGLYAHVFSRRRLKTYAIVQSELIRQRWVEIDDDSTYLPECGHRADVPRSQNNCRLGMKTSREDVDLIGRLIKIDMTRPEGQKIMVQ

SEQ ID NO: 992542 - protein, 78 aa, Homo sapiens
NLVIYSTILAGTVISSAKLGTDLFTVDVGAVGRVKHDVACCDCTDCKNAKENNSARISTEACHHTLLSLTVNAIRDRE

SEQ ID NO: 992543 - protein, 257 aa, Homo sapiens
  misc_feature (14)..(14): Xaa can be any naturally occurring amino acid
  misc_feature (203)..(203): Xaa can be any naturally occurring amino acid
MGTTMLQMDTSRSXMYAHTVVLVIRGTQYTREMSGLSNMMMCHYDVCGIPGAHLYIIVSLSVCPVKSVGMRRHEREYNRVRFMVVGAVSEHIQKGTAFISYREFGRKTRIITHWKLIQENGVGLRKIWDRPHKFVRVLVLSQMLCRERAGLLVLPYGRSLFVAQFHVSVHVWALVVHLVNTSPIDTIWVVARTLSSVRAPSGXSKTYRTCGSRDNSIYQLAATEGHFRRLYRQMRRGEKPPPLGPSINVHLGIIGTL

SEQ ID NO: 992544 - protein, 107 aa, Homo sapiens
MAWKHSQEHPASYGVRIIHVNMAHMYAYVTARQNGQTQFASSAIARRHHTIRRMAERKLLRSKYRALIADFNAPGTGIARAMGKDRVEKGGRSDANSDLNLTWGAIA

SEQ ID NO: 992545 - protein, 349 aa, Homo sapiens
MSFRPSHHSASGRKIIQRGATSGGSLTGNEYTAVTYILGCDNGRNTCRHDTNSMRHDTERHTQRGADKTSKARDREKNSSARHNQRRAQQRKEKQRKPGTQRQSKHRTGRRQKKEQEKHRDWREQKEERKKSTRATRERPEEKGKKKERGRGKDARATARSPPRRNGETRKPGAGPRETAADRTSKEGEQVDKKRGRSTRAPGTRKNRAEEKSEGRDGHEERERRRKNRHEGEPRRKRGAERGDRKKGEPERRRTKEGTRRKRTGGERTKRGEEQKREQGKAKRDRRRRKTSAEGSGARRNQTRRTREDAPGTGGPHRERADTDKGDATKRGHDETRSGRGERRRERGE

SEQ ID NO: 992546 - protein, 238 aa, Homo sapiens
  misc_feature (200)..(200): Xaa can be any naturally occurring amino acid
MADSLIFSSSDLWDRRPRTRGTESKRKKDTAKEQLKETASGKKRDTLEKKPKSDQRKQDTKDTEKPHENAAAHTEHHSTPAEDEHRRAKKHPQQDSTRTTGPSKRKQSKKIKQKHDASEQGDEEERKVAEQKYQKQRLEAQQASELDKTRDTSTQNNVDRDTSEQSKEKSRRAEQQMSQRQKSKRQEHRQESKTTGAPAXTPQEAQTRIKHTSTDERRQRQDASHKERRSTATYRTSE

SEQ ID NO: 992547 - protein, 209 aa, Homo sapiens
MSHETNRPLMNCEREEVRLNARRLLEAYCEDRGTLPWVGAKQKWTIGIDHRASSVCHPLYDGVLIEAGFPKEGLPISSQGPFSQITKPGGAPIQSVAIKTKGPPGFPKAVYIGGGMFDNPGVGRHRYGRKVANCLNHRLWQGGPKFYKKVYRHHRGGEHTTGEGEFRGEGDDVSEKARRKAPNDVLEGGGNDATIQLQTTQAMTPGATI

SEQ ID NO: 992548 - protein, 148 aa, Homo sapiens
MAPPLGRKKPGADTNHDYDSPENYTKEEGQRDMSFYTTTDTRRPLPRRDTLVTIRDKTGAPPVDNRALQHKRTPPQGNLRGGHHTLCGGNNNRVRGGPTKKKKYTDEGGRPKIQAYPHGLFCGPRSAAPYKGLDYKHKNQGDGTTQSR

SEQ ID NO: 992549 - protein, 81 aa, Homo sapiens
VSRQNTGVVKTTPKSHNGKGKDYIYNIVVIGHARFGQVHHYWPSDSINCEWHTTKRTIEKVIEKEAAEIGKRATYQVCLGY

SEQ ID NO: 992550 - protein, 555 aa, Homo sapiens
MLQTPLRERKSAVIVGVLAVTRSHKQISALTTCDIQRSILLLQRVQRVANFVKRKYSGNTQIESVIPQANVSAANEFHHVGEQHSKYRKFVLGKIKEMKRKALMKWEVPRYCSTNFCAIKRPDKYQEDVNYQVRLRYPALILCPRKGPVGHYALPRTPSLSGGNSRISIIRGGIGHIKRYTSSTLNNKRVLGPNTSLVGVVEESDSSNDNEKEFANNHLIARCCTHHSDVTFPLIRYARENIKPHHTQREQSQDVYIVHTEAVIVTTVYKVKIQHIRNITQKLTEIVGRGVPRGSNSGGGTPNNTSTSPITTGIDKYKVKRSIEEKRRERKKDICDTNNQVQRGSQYERVGEQEKPQQNTKKNDDEEETTHNNEVRTRHRTGGAKRDDTSAIDNTTESEKDKGKEAQKEQQEETEREEHNVDEGQNNERKRRRDKARRETEDDAERMRKESKTAKEREQGKQERRTKDTKESRQRRQKEEQRTASARTKSRSSGEEKRSEKRQSRTAERRRSREERREGGGKGESDRQTSRERRRRGKDETKRKERGEEERRAEG

SEQ ID NO: 992551 - protein, 130 aa, Homo sapiens
MHAQLTRYLRTDTSLTEHSANAPATAQQTSRCNLPNTRAYHASKRLPVVYGTTCLVHQRTTSHTGLREPTGKTQPNPFTHNPGRSTGLHPPALHQSSPHSQAGADTHALQANGTPKLTRYPATPAVTTHK

SEQ ID NO: 992552 - protein, 177 aa, Homo sapiens
RLNILDTQANSLMMLIQKFPSNSIFCHEAWLAQMDTNNARLAAMLRQFSSTISAKDPNNLFMVRLAQVPDTFNVKGTLTLCTIPQPTGQLMSQVAVAGLITVLCLYHLACSTTFILRPITPMYRHGPGGMPCTPPNAGLRLTAARLRVQLASCSDPALRPIAYVNAECGHGWPSPQD

SEQ ID NO: 992553 - protein, 363 aa, Homo sapiens
  misc_feature (337)..(337): Xaa can be any naturally occurring amino acid
MPLSIALTILAQGQQRWSAQLSKYKYNRSMSYHRLASTQQTTSKPPPKFNPVYQAVAVKGIHATHCGSNTMGSHAQTQQLRASRQATGSKSPRATRPREHLCKSNKCGKGTQGTVCIQAGHYSKGSTRYHFSSCSKQLQHGPGAATNACRGLVPRFIYFLLWNTLDDKEDHGHDDYEGAIVRFLQVPPQSPPQQGKLILLTHEQTGADNAPFRSGCFGAFIQGQPLQQQISKLESFRLSDGGLTVGGLTHHLGLGQTTLGGLQHTTGGPPKRLADTHSLTFPGQHQPSGNCQTKRHRRGMRTAHTKHAAGAPNRNPTPREDPSVGSTTGLVVTQACXQHEARRITTKNGRINQHRGKHQQSHE

SEQ ID NO: 992554 - protein, 287 aa, Homo sapiens
QFPSHFIPKFCGWFPDSLNTIQNNVKYWSTIFLLTPCFPPLGGQPPGQPHLRGKRGSPYQIGSSKVRRECDNSLPLISLFKGPSAVRVRKASLWDSGGYIGKGNVDIGLLLFYFGGKRTRARGGEALTPKERGGVLNSVVHGGPLSLEPSKQGAPLLILKEHNKAVDKICVSNSHCGDHPLYTISPPLSVVRRLIYKPPQRKVIEYPAGDQRNNEVLDKNKRTPSQKIVTRAPTETHKLERGGDNIYTPTKRGKGRGYANKKELATTNSESAPHEKRSLPSMDESIH

SEQ ID NO: 992555 - protein, 102 aa, Homo sapiens
MHKQMKQGARQREHRDADDERTSTDRVRQGADEDDEYGLTKNERRLETTRMRQVEPSKPEQQRRTVRDADERGETQRRKRDEQTSYKRRDETAENKVNEGNR

SEQ ID NO: 992556 - protein, 66 aa, Homo sapiens
LESKGDGGERVNNQPQKQVQMLPLGAGCGYALALLHSQWIAVRDVLNWVKHETENKLGPIYTLRNR

SEQ ID NO: 992557 - protein, 55 aa, Homo sapiens
RAQLRVAGQRGVDRDGDAGVIDAGAGFGGGFLGVGHGGIGAGAHLGGGFLDLGLD

SEQ ID NO: 992558 - protein, 183 aa, Homo sapiens
MAQPRESAKAAKTRIRHAGRRAGEEESTEGKNRKDNRKETHNNTTKHTTITRSKRRNKKTSKQPDDPKKSTKQNTPHKKQKTQNTQTTQRKKHTRAHNTDNKTHRHTSPREQTSSTTRHAHNGVRKHKTKSNHQKEETKERDEQETNKQQEVRTKKHENTESNQASKKTKKTNSNRGRKKQDN

SEQ ID NO: 992559 - protein, 117 aa, Homo sapiens
MSGESAAAIRRGILNGLCATCMRLRELRQETIVQIEEVFGATWEPKVILDLTRATNFGDVVHLGVAFGHLSKVACPTDNVLWGPLAHEMESFNLQHGPQLCWELASSSCCNCKITQH

SEQ ID NO: 992560 - protein, 240 aa, Homo sapiens
MTTNSRTEQKKKEKDAHKEAKAENKSEEAKKRKETTQQTNRRRVEEEKRQTQDAGEREEAERENEERRSKKEREEEKKQVKETKKQRKSRESTKRRDRRKEKNQGQDTGENDKQGEKSAGDETERRQGTGSQPKSHSRQKRTNTNRANRQQTNTTTTKARKTHQKTQTTNEGHRAENTEQTRRGNKREQPAQRDSNDKQSEEERREPAETPSSNTGEGRRRQRTQNDKHITTSKYDNRRR

SEQ ID NO: 992561 - protein, 267 aa, Homo sapiens
MKRLGYVLCWCMRRRPLGSRFTKEENDFFKIFFSVSSSKSKTSQNGDLKSLTGLSLISGGSICCMASNKLKYYTGVITIHKQMLILLNMIAVHIRYTIMSLQFEFALMWQITGKADSRLGHYGQQPFLFTQLGHGSSPTGTFSHYVEVEIVPCDHWAKILTMSDRLSWNKELNNQSTCKITTQPCTHEQLTTHHQYSYSDHEHIKNPSLQHMCHNITHESNTRYTVNRSRQAHSSQTHTKGPEHTQTRPQRLAHHGEETATHDRAYK

SEQ ID NO: 992562 - protein, 593 aa, Homo sapiens
  misc_feature (50)..(50): Xaa can be any naturally occurring amino acid
  misc_feature (132)..(132): Xaa can be any naturally occurring amino acid
GHKQQIFWGPPASSFSFSRGNSSGSPRKNVPVRGRDRQVRTTFVAAQRGXHLVAEWVGGLCQMVRGWCGQPLTKRDVPPRGFSMWHTHPRILSCGPEEVLLSCVPYNIVCWVYRRVTTAFYRRVWFVAQHSXAQHSLTETHHNTHKTHTRALCVCALVREREITPLLFVRAPERGGTTLSHTGGGLYIWWELPSAGGQRVGDKKKDGRGAAIIKIITPVKSSPRSGAPKRVSRTRGVSPHKRGVILITSSQEGGEEDTHTRQSWVSPHRKLLFLKDIPGEKSGTAMISYEKKINPPRHREGGGPPQEGLIKRADETREVFILVLTTTEGGGAPLNKRGDGRDNNKKRTKEANLGGPDVCFLTQSVFGARLWGQQRGCLTLRGTPFVCGQRGNPIYIIVGGCVEPLMSWGPTINPYREEILKRRLLTRGKISYNTFFTRRGTTHAWRCSTLNYDGRNIYDQSAALLRKTTWGASTGDDSDSFLQYICTGSDHEYHTTSYIRIPATRRIRRQDSQQPGPDTTERVRGDRNDERRRGTEAKMNARRNEQHTPPREQQNDTPRPADFTTPGRRKRVTDRREDNNRQDSERCDDRRNT

SEQ ID NO: 992563 - protein, 76 aa, Homo sapiens
GDAVGRPTSSQSTRGSRDCMGWTRRFRTLMSATGWARDLDKRCETQLPNLRTGVQSETLSTQGNERDVGRLEPSGL

SEQ ID NO: 992564 - protein, 492 aa, Homo sapiens
  misc_feature (22)..(22): Xaa can be any naturally occurring amino acid
MASDDCKFIRNLTIRKKKSLWXNALSGNTLSFGIHLGHYRPKPWIKGKNERTLLRNKRHKLDATYHDRVDRVRHTTLIRIVTIGKWGDTETTEEAVGQEKRISTYRYNLNPKFPHELSNVIGGRQTKGNAHKGLSTSSEHMCVGKMEGCYKPLHRFKGKQRVYHKRRIHTEQEKYTDINTVETAMCRFSNKPHRLQNRQITSRRTAVTRRKTKRSTQDRIQHISITVYGPARKDSKAVHSTKRAKRHDIAIQRQSTTASTQKIREEWNKPAVVRNRKRADHDKSKRGTAHIHEDVMNETAVVREVSSTRIQVVKYKRRRSSDPKAKKSVQKGRSSHRNKEQHGRKGTDHQKKKPLSQDESRARNGNNSRSKAPQEVASEPTNDNKQSEERDDTGSTKGENNETEQTRQRAQPHDSDQHTETKRRTERKQEMTHRGRSHNNAHRAKRAHDKKDEADERAARQPAGERVNTQEEGDGSTGRRELSNKKRQHTEQ

SEQ ID NO: 992565 - protein, 71 aa, Homo sapiens
LLYRSYTFYSQYEQGLINRKQVRRMTCHNAAIKSNKKVREHQSKNSRKERYKSGVTRSLGTDPGASKQSSL

SEQ ID NO: 992566 - protein, 293 aa, Homo sapiens
MASLPQLDGGPDLFLHISDVERPSMSQCKATRSPIQMCSIPPKTEKLQAVEVVITHLAPGPKPETWSGHVITLLGPCCEAPPGPVACGTTPPRTQARQTLEHDLTSTRRRRFTRALPPLSTYPHLRANGRYSRRATVLTDASAMLPGAHHDTALLPPLAHHPTPTHLTEAIYAAFNNRGTPHTPDAHTNQRQPTQPDTHTTPPQPHRASTLHINQALTHTTATTTPPSPHHRTTHSEPHNGPPINRPTADDSKPPNPPHTHTPPHPTDAYTRPPANPAHHSTDPTPNPRALHT

SEQ ID NO: 992567 - protein, 121 aa, Homo sapiens
MRMEVEDDENPNYGTKSLAYSLTLPNSQIAVIRQGLTSSNPLRHRARCWKCNRMDNNAFKLTTRYCSNLTPALKLPETHEAGTTYHRQPDKQGYHDENPIKFTCTHQICNKRAMPRDKRAD

SEQ ID NO: 992568 - protein, 95 aa, Homo sapiens
ETVIYSSILAAPYSIDALSSEMIEHSWSRPKIELLVFHSSSNQKNKPSSHRSCHQVLPHVDSQAQSIILLIGYPLQQYTLRTMNHNQYYQSIPHH

SEQ ID NO: 992569 - protein, 102 aa, Homo sapiens
MAQRRDQYHASHYIRGLQSLPKSSNNSRFHCHPQDHGTLFSHSFPITPWRHHPHAHPHNLPHTLASPRPITTPTRPLKWYTPHRARPAPRAHPSTITTTTTD

SEQ ID NO: 992570 - protein, 102 aa, Homo sapiens
GIILTAHSCHTSKIRVDYFSQHVLLPRLVRRIGSRFPYTKQQFPLGTVSSDSDGAPDSELRRDSHWKEDMPGLECSHRRRYVCGYSDYCSSLTVWTDRSDVM

SEQ ID NO: 992571 - protein, 584 aa, Homo sapiens
RPYAHENTALLANSDSSLHLPPPASRSNAGNTTQETPWLQSPNFPTFTGTAENCPGMPTTTLTTELLLAPLPQHGLALPLLLLRLPPSCPSAPSPYHAHANNANALNTQRECFPLSSRKRNAHATYTHDHPLCTPHTHCTLRAHNPTPSTLNTTHSPAPTHTHTHTPPTPTPPTHTPPPPIHTNPSPRMTSQPATRRHTYSPHLPHLRYHSSRSHYTKLQTDTTGSSLPPDDARYLPLARQLRSLKVTALTAFSYVPYPTLLIRPSARLFAVQLSHKRTTTEPLRSDVYHMRHPYALSASPPPTHTHTTPLLPTTPDRNTDGPNAACLRPTRPTLSPRRQHRPTATFSRVQPPSARSAPLSLILVSSDQTHAGPPIAAPAVRRPIRQRRPRRPPPALLPSCSTPTSHTRREAHHDSPLRNPTSQSLCLVSLQRAPVTHPTTEQRSGKDDRTLPDSRPNPHQTETSTDEHTQDAARECKPTTEQTQKGSGTTQEQCNERRADMKTATRIQRRLRDDDSEYADATNHRTYQTTYTHNDVPQHRQTNDTQHTIGHNKRHLNHEQYHHNIRGIHKHRTEHYTPQYQPK

SEQ ID NO: 992572 - protein, 180 aa, Homo sapiens
VAGVALGTRGCRGCLRRCCKDCRALERLSAFVFPGELLLRLLRMIILPLVVCSLIWLAPTAWTPARSAVWAAQGADLYSSVTTLLGVRRSEEGLGGWLLQPGLPPPRAINAIRWEPAGQLPQMPPGKEDARLQFLDLASKYLPFQPGVSSLSLILYQLIDERNITGTRVKVPVEAGGGGD

SEQ ID NO: 992573 - protein, 428 aa, Homo sapiens
CNGSDLVLTTTSDLPGSSHFPASASQVAGITWHSSLPCPADLWISQGMICTTHSVVWDRWDAHTDNRQCIMLSDARTLPHPTCLPSKVAWRFITGHAGTTGGPPEQNYGAYTLRCRYYIWKTLGSTPYFAPQLRLVLLSCQQGTPAQRSLESRGQLNRRVRLQLETTHSSQYVSHTYYFPVIPDSRIIIYHITPKEVFKGYLIFRLRDSYKQLLKPVGRNLLLTVSTAKHSRGTAGILHKATALRWVPPRISTPPLIDTPDIAAMAHYNINSHLGHHHQLSIEPPLTNQQQMGADHRALDTYTILDARTNVYTRGGFSHLVTSSRDVFVIARTLTFIDPQPQYIHPPSQQDIPAVICPPPTNSCRFYTNFHRALALHHPPIIKHVSDHQLRRTSYHHCHLTTVQHRSSHYPALPAASRCDSTPTLLSI

SEQ ID NO: 992574 - protein, 192 aa, Homo sapiens
MPKDTSTNAKSHEEPKPRTHMTTIRKHIQIQNLRNNITSTHITTHHNQYNTNHQTTPEYLKIKDSHTHTLTLTHPRITTKTNNKTTQEYKHNPGAKKLNYANNDILKQSHNKTPTQHQPIEEHTETTKTQIAKQKSKIKPPITTKENKNQKNEQTWNTKSNQGKQMKQCQAVDTTNRQQIEKDIEHEKEPKG

SEQ ID NO: 992575 - protein, 74 aa, Homo sapiens
MSVSTPCSPHGPRFPVQFESGAHQDPLIYIPSSFTQIFRGAGSHIIFQNLYRNLPTPTQFRAFHLKFFDHPEGP

SEQ ID NO: 992576 - protein, 133 aa, Homo sapiens
MIPPAVVEEAPCWCYHRPRCCVCAIKNACWETSRRDNTCLLTVGPRWKKGPCCTPGKEKSFLPMAVCWSETPPLVGGNNQPIRGGRRRHYLLVAEGRRPPFLQSGGRKKGPCLGPLLCWPILPFFIKGSAQPM

SEQ ID NO: 992577 - protein, 341 aa, Homo sapiens
RTRWVDPRVRAPARSPAVREGAMMRRTLAKPERSTRTQAAKQRALEHSGDSTHGTTLVPNSRRMPTAADNTARLARRPKSDPSWLTLQHLTALLLLTEYPRTLTRWRLTEPFCTIDVIASHPLTGLYSEHRPGPGSNRTSSARSPKGYRIETPPLATHRYMGNPAMLAHPLDISARNGPLPITPIVILHQGQTGTLPNEEGPYTPIIYYTFPRSFSQNSDIKRYHSANKPLNSVESQNHVAITLIQPWWSQCKKTRGHQFCTHVKETVLPNLFGTIWPLKCLRNTSNRHPVYTFRVGKSEEDLFTFYQPTTAFMAKICGSQQQHIFATTSALHLQQLKPLT

SEQ ID NO: 992578 - protein, 345 aa, Homo sapiens
EGTKDPSRNRYKLFLECTLILTSVVPPELPIELSLAVNTSLIAHGPSIYMYDTEPFRIPFAGKVEVCCFDKTGTLTSDSLEVRECGRELSTTGTDGEPPGGPKDIPCSDTQHTEATGPISDHIAIMQPGQTAPIVGDPLEKAMLTAVDWTLTKVPCSECPSLPRMTRWASTDLCYIAAGEGGPEPLHSMSSQCPPDYHTSKTEISRQGAPVQDAWRTRSLGQLHFTSKPASSQTGQTLTVAPPATTRHHSQTHATTPASPQARDIREHPNAHQRRVPGLPAETHREQGQSPRGPPTARSRETGTHGGTQQPPPRNAAQHNEPTTQHHTPARPRNHSDDPERRTTD

SEQ ID NO: 992579 - protein, 31 aa, Homo sapiens
MACNDELANEQRTQGRLRSDYRRKWTFRGGR

SEQ ID NO: 992580 - protein, 81 aa, Homo sapiens
AIYKGNPMRLTADLSAEILQARRDWGTIFNIIKENLQPRISYPAKLSFLNEGEDEIIYRQANSEVIHYHHICLTRDFRKED

SEQ ID NO: 992581 - protein, 335 aa, Homo sapiens
GSHITLNHKTRREYDFVHTITHAYLILSSNELIAKDTHKGQQDLQKGQSLSISVGLRTWCLDNYASDTISVSYARTAIHYLREHQNGKDTLPASSSSKSSPISKIPYPCQISFEIRHFESRAETITVPHPEQMRSSDDHPQGLNRTGDLHAQFFEKRYTKVTVVPLEEFLLVRHRLVLDSGTFTRNYRGLTYVETYSQYRRHQRQGHKRKFAAVFWKGKDTFSPRTPRSRAYVEPTDEHSLQSGSSGGKYSVAQMEATTKSDRHSTVVRSSLIILWPFRDIVIGSIRDPEDRKYRRESKYHTPDIVKVTANTAADFTCPTQDKRTTDSAAPLKRT

SEQ ID NO: 992582 - protein, 203 aa, Homo sapiens
  misc_feature (13)..(15): Xaa can be any naturally occurring amino acid
  misc_feature (32)..(32): Xaa can be any naturally occurring amino acid
  misc_feature (34)..(34): Xaa can be any naturally occurring amino acid
  misc_feature (61)..(62): Xaa can be any naturally occurring amino acid
  misc_feature (66)..(66): Xaa can be any naturally occurring amino acid
  misc_feature (68)..(68): Xaa can be any naturally occurring amino acid
RKMAAAMTFCRLXXXRCGEALRWMPAPWCCPXVXYGVCWVIRPTTGDTKGSNCQTHLGPPXXFKWXFXLQNKGPLNPRGARAQLFPRGLFWAEKGEFLGLPKANNTGTGGLCKTLVHKPEAAFFLWAPQNFSVATRSLCAKSFKRGPKPDKGPPKGGPPPLWGVWAEKGPPGTHTAEGLWGGRPHTGHKPIFSPQGAADGDFR

SEQ ID NO: 992583 - protein, 133 aa, Homo sapiens
MSHGHAADYPGHGVHMQGRGRHRSPDDCIPHSLGDLTCGRHGMGGPQSPGREGASGRQSSKQQIAPTVAPDRSLAIKKSQAHVAKAGAIVTKDMPTGGNTESNQKDDEKEQARPGEPCTRKSEKRTQRGRRTR

SEQ ID NO: 992584 - protein, 157 aa, Homo sapiens
MPASRHRRACRGLAVVDAMTDTTAPRGSKGTEKHAEKREQARRGGPTGRRARADGQEESRQERDADGGRETGEEGEARQGEAGGGAASEKGREGEQEGQQEARAASAAEGRRAERRQGRGKPRARGSTSDGGRRREEGGGAEGGEEAERAGGEGGGG

SEQ ID NO: 992585 - protein, 433 aa, Homo sapiens
MKGEEYDSDGGHPIKHHMEREGDHWDDARKQWPGQVGRPNTATSRTLSAKAAAPHHREWGQPPPRWAPQRTEAAPQTAEWTTSIQLTNNRPRRKRNQTRQRRYPPEKTITHTIIPQTPVGATRYNTPYTETDAPRQRTYYHTPWMSASYPHFRSANKPPKQEDQIKPLGGRNKDATQERMTHDIPAPVGSQYPSQGPAHNGTSTRWRTPRRNTPPHGSEEGTAYYQDSATLKNTRQPEANVGSGHPTPGCQTRTSWAVHTTCKQQQGQQTHMDYVNPPPAYSPPNTGASLPQRKSKRRPICRKDRIPTDDYRSRPDETTPSRSVPDKNGMSQQGGKMEAQHIKGQHTYSSHNNREHIVMHQHPPSRAGTTASYDPTRRSQQTTRRRKRHYYERERSNEVKHLNQESETHYTERHFSSALTSGRKDDTHTPTGQ

SEQ ID NO: 992586 - protein, 110 aa, Homo sapiens
MPFYEHAHDGRTRNQPPAMTVAEQGEARHLRASEYTRSTPVSKEQVQDVRDTAERDTDRRTLTSAPATDLPEETTAVPTDESHEHLEYDRGQTETKHNADNTTTTLPNTK

SEQ ID NO: 992587 - protein, 152 aa, Homo sapiens
MAPRGFSCLLLFEPVKIELPVNEAGMTSGNDEKTLWSCNLLDAKTGPNKTTGPKQQTCIKNVGGATSEQESRLRDSMMLRLSPVKSELLYSNVILSNLTQRNYSYPRDNSADPILESISTRGLTDLDCGIRNIPMVQPLYKRFVRSTINSPT

SEQ ID NO: 992588 - protein, 318 aa, Homo sapiens
MLGIIDHNYSARKGDLQNWPDLLPKLCSLLDSEDYNTCAGQHLEPFSKHLSQAFLLSILAPVHVFSIVRLQHHAFPKSLYSSSKPSVVPNNQGLHAVSNVSNQVLSIQSGLQALMLHIDFYEIEKSHLPLAGDCKNQKDGKHMCAEPLGAVSSKFRNGIALLSSPCIIIVEYMLQRLKIQMHTCELSDSLVTIGNLNLQPAQYCKNVTRTGIFLKLILVFVDMALVSIISTIRLLTPNFSRMTIRTTNIHNRTTPQTPYTRPNKSTPVNTTRYRRQEETHKPVHEEQATHTKQKTNHQTNQPRARLPTQQTVRDQTAT

SEQ ID NO: 992589 - protein, 418 aa, Homo sapiens
GRGIKFSTAHRPHPLVMGRQKPSSICQTWYHKAPNGNTSLSSFNIGCSAIGGLESHISWFIRVLCEVSGDIRRPICKIDSSHGRWPDCTNDRLDMCQVILVSLQLQASDTLPYRYDSMAESSIKLAITTRRKAVSWRRSHCPSSMVISKHPSWQQWSRLKNSSSSRHEGHGQRISYLDKHAMATEVMRSGFNRQSTRGVMRALGQSRRSSGHLKGPPGFSMAPGCVALKPPAARSWPQYVPEDLIVFSWVVGQGPLHCDRHPCCPGEAPPWGLLHPMAARPESSSQGPAPANKGNSFPAKGQRAKPGHREPRAAPPQLPPRRASTGAANRAPQARDAPLAKPPQTPTHYGGGPPPPERRALPPRSAAPCCSGANTRCKGHPQRGRRRRPRRHNEPDQSKAAVQTVTRHPSNPGYGWLP

SEQ ID NO: 992590 - protein, 140 aa, Homo sapiens
SPVCHGLCPRLCCWLELVQCSDLPSGGGMPGRPFGSLLVLRLYGQEHQAPSVCSELRLLHGTVASFLNLALPPPCYSEADNVGFLMPSPSLVCPGSPLRRALPFLTHPTGSDDANTVHESLRSIGFQGTLVLYDLGSTEE

SEQ ID NO: 992591 - protein, 107 aa, Homo sapiens
RVCTSLLQPLGRIPTFQPASCGANKNSLHYSLHPITITLQAQPKNNSHIFNHAGQHRAHPRLVSVATSIGAKFWEVISDEHGIDHHRTPTTGTANCSVDTNLMCTYN

SEQ ID NO: 992592 - protein, 297 aa, Homo sapiens
MPIARHDSGTTNTTISIRNVDCTPLNRMGCQPALGKWIPILNNRAHPFTEQYATRFPKLGGGFNRGPTFPLNEHRDCGFEATEVTLPSKTHTTHHTRRPNRHTCANRATFACRIQVQVLWLHPANYRPVGGDAHTRLGLITFERDTVYNLPKIACVVACVAYNNEKHGSRCNPACLYVQRQHSAHTSTHTYSDERTFPDSPRHRARHVRLGLNDNKGISRFLDRSTPVLVAKYNNRHSVHYHYDAEEKVLYAYAEEQKAQIAPQRWTRATVGLVCVLGPNNITPWRGNNDRIIGLPH

SEQ ID NO: 992593 - protein, 71 aa, Homo sapiens
PLLRTNAPCILFIDEIDAVEKEERKRQHLEGRVSRRTTLNQLLVEMDGYNTNNKCRHFGRHQSTRYPGPRD

SEQ ID NO: 992594 - protein, 109 aa, Homo sapiens
MMRRAPQTAWPGGRQGTTGRHAERRTRPCWGEDWVTTVATEDKRAEENRPPRGLYCVTTKRVMPARERGHPPVCRKITRRSDVNRTAATTDDAHRCEATAHQQQTTKQT

SEQ ID NO: 992595 - protein, 43 aa, Homo sapiens
EKKIACPCSGLPLVVVVMSGYKRSVRWGREAGWRGSQRGGGGT

SEQ ID NO: 992596 - protein, 107 aa, Homo sapiens
ESSSVTDHHPCDKCQLVFFTGACCQCYRSGKVSTKGGNIEITRHSRRARFRCSVIHGRRRGKPVVRYTRSRRVSDWRCMTIYSLTLITREGTTIRSDKRKAKCIELH

SEQ ID NO: 992597 - protein, 403 aa, Homo sapiens
MARSHGGRQTGNDGRTSTRHETTSPARRWDHKSPLEGHSRDARMKTSLRTKTAGFRGKGSASIRCLRGPHCGHAVTLSDIQRPAFKRHHSRYLVLQRHCRQRGHYSFQPFERLSGATREEPYIYGIPAHIPWRKRDRSWAHTQGTRLGITTKDIPQIRTQTHGGQQNSICRIRNETATIPLAPLKRSGDTAHKFFTEQSHSIGHRYISIGVAAPKVTGTGLRSKRRGHLGHSNPHGSMTSCICTEEEFSGLPSRQIPGPVCPYKQASLVRPRQRVGYTIFKFQADPGGLITGKRTPGGTHSHWTLYDVEPTIPFDEYPRGAIPEQGHRQLGEYTARHAATANPLVENTTSRAGQTDNPYDMVTHRAIENLVLRALGTQEQAQQRWQVAEHLNTAADHTAEGQI

SEQ ID NO: 992598 - protein, 277 aa, Homo sapiens
RRRLFISTRTTTGSFGHPPLVPWTCRCSNGLHVAYAQCASSLKRATDASSLNMPKGTEYGIDYNSWEVGPKFRGVKMIPPGIHFLHYSSVDNGYLRKEVGPRYGLPLLSPAPAALLTAAALRAHSRPTHGRPVPSPSSLTLQRHAGPTSSELDQFLPASPITATHDRQWISLTNFTQRSHSWTKLQPDAIDRSVPSPACATCASPLTHTKAPRGAKSTPLWPRAAKATNKGLTRLPEIEPTAGTRRPAHQQLPTQTVPASCLPNLYINPTTTFNPHT

SEQ ID NO: 992599 - protein, 309 aa, Homo sapiens
GKRSVRDAAGLECFGKGASPQAVVVFTSDGVKGGRNTWFNLSRRSLAMLPRLGCSGVISAHCKLRLPGSRHSPASASRVAGTTGARHHARLIFFIFSRDGVSPVSQDDLNLLTCDPPAWASQSAGITGVSHRPGEHVNFKQMNVPGNDLQGELKWDREVIYLHLCLNQNDEALPCQLVTGAGGVRSTPGLLPRNTTVLQNNITLISCLFLRTHWFEKSDGVIPVSSVIYQAPLITSSRPFLEHYYVPAGKFIEPLLCGRAVGGLQQLFLGPRLVTQQVPMAVLAWFANKRRGPLAKDPAHETGRHRQTA

SEQ ID NO: 992600 - protein, 279 aa, Homo sapiens
MSSGGNSSFGFNNMLTATLRAHNPGVLFRDDQCANLFDSIATNSSSCTQRTRRLANILQRQLLLPPCSMTDARHLLSPATLNCGFTILSHCTCPLLSLSSRTTWQYKVTPTNHLNITFMHSPLPTLLNPHAIMLPDTLLLSSYPAPNPLCTDCYTLHPTTPPPALLLPLAPTPHSPPAPAAPAGPHYPHHHPTPSPTRPPHPPPPPTPPPPTPHPPPHPPTPPPPHAHAPRAPLPPPRPPPHHRPHPPPPHTTTTRPLHTTPTTPTPTPPPQPPTPHTP

SEQ ID NO: 992601 - protein, 76 aa, Homo sapiens
RQSSRVCNASLKLWRYSVSARAPDLAGSRSDSAMICTSVKCLWYETEISFETNEDHNLSMNESLVESCEVTCDRAS

SEQ ID NO: 992602 - protein, 389 aa, Homo sapiens
SAFSDTRKPTPHQKTKMSSEAGQSRRPPRSGHERGHDPMICRKCETESQSPRSINGRHVQTIDDDQNRDGFVDKEEPDTTQHGTRLREEPPTDEYHGRVMMSEAPGPINITHVSSLSVRGRSMNGERYLRGCDSVTRFALLRPRKPQVSSNEDSPPRTLVTHTWVTASTDEEVDEMYREATIDKHKATLDYVECTRHPRNMAPRMKDDYGQPKSNRPGADGTRLSSSYALDPAHSYRTSYIVKKQDYTITRRPKGARTGPQRTGPGIRPEQEITGLHSEQKNSGRPAPHRRRTQGHKSAQQTNRNTTGGDTRHGEQPRRETPRRQQKENRQHDTTGTKNEQGRARNGRQPHNNRSKNGEETSKTQQQEPERETREGEDLENALRKRLRE

SEQ ID NO: 992603 - protein, 141 aa, Homo sapiens
MSAFLQGVVGSTKTGWSPKQTAPHGARGRGPLIWPSFGRAWGLSCTTSWTIWACHALPTPRRERSPCIGARDGPEGSWRASGDKGPGGMGARPIKLPEKKKRKGLQRATRVLGDPDKPMGEQHPEDKAGSTHVEPLRRDDS

SEQ ID NO: 992604 - protein, 201 aa, Homo sapiens
MGKRSSNEVLNVIQGNTTVDDFNDETHGLQLEIFRVPHKQDDIKDEDVNVKPREHGRMKRAQMRAIRLYNFEADHKRHEGSLTREEMAEQNGRAARFATRNKTDGNVEATHGCPQGAKAPALLKPNLNENCLSLEACTARIHDPQEGEVLGRRCILATHTSSHIVLRIWILPKDYPWDLTNRLLGHIINGKRIQLDPFNDI

SEQ ID NO: 992605 - protein, 120 aa, Homo sapiens
ADTLTPAGAGTVQSLGEGMCVSEELGCRNFAGSTNCSACDAEPKDACLLGWCGDSSTGSDHRKNQITREVKARAEGRRVNGIGHRRAGEERIEREEKSGEQRAKRRQNTTRLRGNEGRKY

SEQ ID NO: 992606 - protein, 156 aa, Homo sapiens
MNTESTNTRRARHHHQRSRRTNKHTETRAGARAQPHPDPWERREPTNRHTHTTKARRPRRHKKPKERGATSTNKPTAAGNETARAREKNPRPRHRRHSGSRQRARQAAGRPPPGPARGPPDAQTDQARAHTHKPRARSNQTKSDAHEQRRRQGGRT

SEQ ID NO: 992607 - protein, 125 aa, Homo sapiens
MHTHPKDRPKGENTQPNQPNTTHHHEQNTQAENNTNTRGTHRDTHPRTHAQTRSTRQNAKPPARRHDQTTAQPHRRKQAKTKHNRKQTNKQKITNRPTRPRTKKERHRQRPQSDKTHNKKQRETP

SEQ ID NO: 992608 - protein, 206 aa, Homo sapiens
MTTPRPTSAKHDTPPRTNTPPPRKSTSQDDNTHSTSRQGYERDNPTETQYGYAQRKYTTQALSAETTKPARPPPQTPHALTPTHNNTTKHRAADTNNISDYHTTTTKRTPHEHKHTQQHQTHSEHPTPTDQTSAEAPTHATKRDTYTVRPNTGHTQHHSTHNTHTQQHRPHKGPQGPTQHTENNPQQDKERTHNSKLLKQQPKRRV

SEQ ID NO: 992609 - protein, 101 aa, Homo sapiens
WIGYSFLMHTEDGETKAVAISLVSPGAGLSQKDLPSPTPFIDMQWRPRYLHTSYANKYSFWLTTIRAARATRASPLPRKTQLQGPGTHTVTTHQHACQCVL

SEQ ID NO: 992610 - protein, 105 aa, Homo sapiens
MSKRRTLVGPLVRNSGFPWVFREELYINIADYTGARNLYIISVKGIKGRLTSEIPWMHGVGDMVMATVEKGKPELQNEKKVGIQSVVIQTIESHTVEKMAVYLLF

SEQ ID NO: 992611 - protein, 67 aa, Homo sapiens
DISYKAPLGVARGHDKAVWAVMNISLCLLLKNWESLLQYMNLARKKSDLLYSNQMHIYKKHRVQHEH

SEQ ID NO: 992612 - protein, 151 aa, Homo sapiens
KPYICEKCGKAFNQSSTLNLHKRIHSAQKYYKCEECGKAFKWSSSLNEHKRIHAGEKPFSCEECGNVFTTSSDLLNIKRIHTGEKPYKCEECGKSFNRSTTLTTHKRIHTGEKPYTCEECGKAFNGPQPLMYTREFTLEKIPTNVKMWQSL

SEQ ID NO: 992613 - protein, 194 aa, Homo sapiens
KKLKAHEEDDMTKMIRPKKCPNDSVLDEQVSSEENEEEEIGNLQLAWDMLDLAKIIFEKGKRQKKHSFMLPRHILNYGEVDVFDSLKDYVHSCARSSSPALTCRNSTWKPDEASRLLADPLPSWACAYGYNSQYDEAVDTEFSRIIEVIENRMAVLNEQVKEAEWIVCLNTEKEIEEVKDLVPENLERMIEDAK

SEQ ID NO: 992614 - protein, 194 aa, Homo sapiens
MYSLVEVTQEANISNHHPATYVRTHPTRTLPPPYKSPANGGPPRTHHTPKLYTYAKSPHAQKHKTQNATTPHAHPLIHTIPPPQQQRSDVNIMAPETPTILSSATTDEPTTQAKQHGTTPTHHITTGHTVPTAGHTTPHINERPTAHRHNKPAATSRPHDRPAKPKRDTHRTQQDEHTPTRGPQRETTSSTVKA

SEQ ID NO: 992615 - protein, 90 aa, Homo sapiens
MQGSNVTRKTKNLCQYLVNESTPAKFLIRNPPCSGEQASARITLKVRTSPKSTLYILLNFIPRGTTPLEKALHDPSNHLHNRVYTAKKVN

SEQ ID NO: 992616 - protein, 354 aa, Homo sapiens
GDLWIHDHPFPFKKHGIVFGRNDLCNFSYVMRMNVFKIQGQSLFSKHCTTSSHSQYLKAGSFYCHQTLEPCMHNQKTNLSARYSEDECTFRRHTPSASSAIMTKGLPGAMAEYTKEPVTMALHTSSMGYRHANGNIGIHGMPQLLNIRTYYSQAWKNIDTETATYHGSAIYISSNGTDARIDHNPQKGDEPPYLADSHSERRKDRKSDADQQNKQNGENTAPNTAPHIHHEGPQPNKKRRTRTETNAQRTNHGGGNPQQPKEKTTARTLEHKAHKYKGLEDKRWHEDTPAHNNTQNTQPQQHTPSNTPSTTTHNQTHKTYHPSAKKPPQRPNNSTQEPETHGPDHTTTTQDREA

SEQ ID NO: 992617 - protein, 115 aa, Homo sapiens
MHRIHTWCDGNIMTIGWITEVYGYYDELPKPEYGNANACRYCTTVDDVLAEAVSVDDQIVCILCRLISWVSQNYVDQIHRPIGNGNRGIVPSITGEALLVIVVMRRDRLTDVDQR

SEQ ID NO: 992618 - protein, 315 aa, Homo sapiens
MSECDSSQTVVIYQNQAFRLYHVYETQTSYEPMQGDEMFYWESYSKNYPFRVIVSQWPRDTVHDVVLPWYSSDTCYNVTDRRSHCYMVRCEGLCMDAVLAGSTREDTTTVYYNSLLCLTIRLDNYKVMLNCLPLGSHTPGENMRPVSDAVYTQEGSNSPSYTVDPLEKVNQLTKTHFTGLIHVADNAPVREDSRKPEGAMQRNFWQTAQGLTRPVQQVPQTFPSQEPRCWHDNKAGKPSSFVAHLVAQLRQHPSQLPHPNQETGNVWATWNFGGPQSSRTRREPFLAKTLRTVERGTRNTREPPGTAISFDYRAW

SEQ ID NO: 992619 - protein, 60 aa, Homo sapiens
MSFVKNQHATKNRRRGVVVCGGAHTGARINSRAEQARVGVEDHIRRRVSLTATTNTYPIL

SEQ ID NO: 992620 - protein, 226 aa, Homo sapiens
LRGGGRVAYVSLGPHAGKLVSDSRDVIDLEQGFGLMDLGTQVRRHGHAFQSANASSLISSSSFRTVPTRSMSDKPGRREISIHKWAMTHDGPKKIEGRERKAKMTDLDRFKVMKAKKMRNRKSKNEVKKLQKAVSWKLLPKKQLVLRVLLLLLLLLLSVSAADVIVPAKIDHRRSKKAPAQKVPAQKVTGQNSSACPKAQKGQKASSPRKQAVQGIGKNDSGSIKV

SEQ ID NO: 992621 - protein, 77 aa, Homo sapiens
CRPRVACGLWLSRHGHCRGGCPESLSEAVSREAVCKVCVRRDESDASSSRILMLTGFSHIELIDLDTIDVSNLILQL

SEQ ID NO: 992622 - protein, 153 aa, Homo sapiens
MLRNGNRVSVTAEGIEAVASSCSYLTLKASLKKMLNLTDDRSRCSCTQLPAATDPRFGWLLKYYLMCPYCMRRPHCPFLAVCRLFSYSGFSTVVCCLVVDLVLKNSGVLWALCPLLVVLCEAVSSTGSIRLSLQDARVENMPGGWAVFGPNYA

SEQ ID NO: 992623 - protein, 82 aa, Homo sapiens
YHSGIYGFKKDYKKVENSSAHLETTTRVCGTTFHHREKGAPVGTGTGQGRPKSYSTRSTQNSDFYTNRLRFPHFISLFLCAH

SEQ ID NO: 992624 - protein, 365 aa, Homo sapiens
  misc_feature (111)..(111): Xaa can be any naturally occurring amino acid
MWGARQFKAKFCHPQVRSLGRTNKSRGAAHKTYSSQYGYLIRAPKGKPEVGTTPLTRSPLVGGQWKKISIVLGGPGKDPVETDEINPKVLIHNVNSWCNNITGRARTIDNXIPTCQDFFPAAAFIHEAVTLGTTIKHTPGREDGFRCAIAPRPHGAPYNVAPCPVETMNRGDKRPRKSPPEVHGPNETTDQRREKAQQPINSIHTTPTADAPTHKRTTHNNRAEETHADNRTKHATSKHCSNDTTTMITPAQNHEKAATTKPPHDTHNRADTKQERQRKTQTEDQTKRKQRPADNQPRKSESRQKENRHHTPTPATQHNTTESSNRRDRKKTKHDEHNDQRTQQTEETQGETTDDKRKKKQNRQY

SEQ ID NO: 992625 - protein, 160 aa, Homo sapiens
MAPRAKREGDRPVLPHPIGSGSQGGRKPVLTVSGVVGPRPLHICTLEPACPDKERRRIWGTRSVVPVPYSYAGYPGGAPFALSALRWARISSGPGLSVVRRSERGCVGPSRGVWVPPPSVKGDVGDINSTRANVFPVRGGGVPSPQDFGVFAVIAEGGTL

SEQ ID NO: 992626 - protein, 70 aa, Homo sapiens
IDLSKPGGENYPHIVSWKDSTCNCALHTILTSVSTLIPECSHADGYSSSGHPTPFTKLLLTGRSHFPLVG

SEQ ID NO: 992627 - protein, 74 aa, Homo sapiens
IVATLEQVVYAFYSAMRGRAENSNLQAIAIELYRSEICITGFWSYLTAKTLAERDLLEIDSLYTECGGKSVSGP

SEQ ID NO: 992628 - protein, 112 aa, Homo sapiens
MWGIQRVVSATLRERTFSEVNQGLFVHLLWGKGSKPVSSSTKEVPRIVEKAREAKKKKWRGNSGKAIKPKRRKQGWSWPQNTVECDELEEVGQGAPEERHIAKSVEEKGRPY

SEQ ID NO: 992629 - protein, 213 aa, Homo sapiens
GLSMCKNVSVKGLFVDGNFAGDRKNEPHNWKLVMDFIHAISVTDPGEIIHGQYNARGYCHRLIEEFAHPRRTHWQVQVLHELEGNKDPIGRLLVEKELLKHGSLTFPLAQYWVRLTSDIRGDNSGFSPGRPKGPQLAGGFDRGFHLVLNTTPSRAPLSWRGSVMIDDEITLRRRRVTHNRAGGTYRNGMLEAARKALDKAHWSQVKRRPGKGP

SEQ ID NO: 992630 - protein, 322 aa, Homo sapiens
RVEAPMSGITSGILVTAVCPFPGCMSALGPPAVDTQASKPPVSTYHRQQEAWACPQDQPSPKALSPASAQAWSLKESEKMALREVDGYTAQPGTISLEMERQKPDDQSRQEHERVGRRRGRQRSRSASLHRAYHQQAIQRIPSGGLLFSSLFSYTGSVYTRGTSDWLISRQCHATPHAATSRSYREEHWHLRLRECRNEPHKGPQNRTTIISIGTISLTHDEDRVTHAHYVIDNTTPNKADGYYCLIHLAASTRPNVQDNLPAPPRSPRPNRTQRTQGNAEKAAAPEQSAPQQHERTGTNTRRTNHRKNSAGHQNGEREKVK

SEQ ID NO: 992631 - protein, 142 aa, Homo sapiens
MIREGDRDPYFDRRSKCAISMIMRDLNEGVVDTLEIETGIGGVIEYERDEFDMSYDECRDDRDQSYLKKNKEQLPHPEEGGFDEDITYEHGSLTEQSMEDAIHGGEENRGTYPEELSASASSFTEAPRPPRSTARVEKKPES

SEQ ID NO: 992632 - protein, 113 aa, Homo sapiens
NSIWNQKAGDSGKWSFCALPQLIPVVLVPRVVPIALLPVEHHPNETWGTSPLRRAVVSLPTNPFINVGEEKEERRGEGDLCPLPSGILGGALCPHVGFNPFPWGLFFPRTHLC

SEQ ID NO: 992633 - protein, 229 aa, Homo sapiens
QPPAASPLRYTSRSSPTDLTPLHLNEKHIIVDEEDRSTIRIGSMDISIPSTRTRTQHGHQEDEREDRLRDRRRKTARQHLHAENLHMSAMENTIREPEQHTINKIKQEVKQTYRETRHTKHENEKKKTPHKYEKQEQEQINRHKQQRRTRHNKQHHEHTHTRKEKKHKHTHQPENSTTQTNNRRETQKTTPDKETTKDKNTTKYRNSHLRRHKHQQLNEQLQQKENNAT

SEQ ID NO: 992634 - protein, 478 aa, Homo sapiens
MLLMLRLGLHEPGKRKMRRQTPLEDVIAKPPEKSPRLRRHPRRLTASGSACHSRRSNHPPGSPPTAAHSTPTPSNARAQLNYPSAHSPTPDLHRLQPHQDKRDLNESTPHTSLHTHYTRTHMNSPIVALRNDPKHTPTRTPPAAPRPPSRRQPTPNRTHSARGPAIGQPSRTAHTPTMSTPHPPTPHRATQNPPHPSPAHPTPAPTTPATIATQANPRPPAHMEQGTQNASDHLTSPIRTQPHPPHRIAPRHRNTPTTTSPTADPSAILGPNAKQRPRRHPTQRTPPPSTTVHTPTSPRHQPKPPSPRRRRSTYTCAHRHRRRHSPSHCKHHTGHITHPRDNLPATAPSPTATHERTQRRLSIHARTATTQATERPDSAHHQHKTHASPPASTRPRIHTRTTTHTQRETTPIHTDNQYTAHKRNHATPEDRRTAAHPDTTELQAHNAGNGPTQHNPGARPTCRKQTLRRQTTHRATDK

SEQ ID NO: 992635 - protein, 243 aa, Homo sapiens
KKGQFIEELITKWQKNDQELITDPLQHVLQTKMKLLRWCTKSGDHLNAGYRNETGRTPDMEVPALYLNLTTLQSVKTPLDLANAQENSNSYRRITKFSHKYTQEQGQDTACTSCYPGRTTLVICLGQERTQLINLTVCSVARIVCEHAQAQALALISVGTLVMLLIDGNNAYYYSADSTHQPYNCLTHTLHVTAVDDILDTGCDNLLTKEPLSTHIPHIRQINDMVCSESLSKPFTDTTVKQN

SEQ ID NO: 992636 - protein, 252 aa, Homo sapiens
MTTLLVPLQRASRASGVPPLRADFHLWLDTPAHSPDTAGIPLRALRIQHARHLCVYGRSPPGQTRLAVQRRAARPVSPRALFNNSPLSPRVPVRGSLTSFFFSAPPPLCDATHSPPSQEECPTQGKSRSRHAFRQTIPHVPATPITGERPPRIAQPSADVFQSRWDNERTTNCRPQAIVCLSHTHHAPQSNNTNERAPARMISPTRTRRLLSTAQNQAELRAAVNQPRTGGLTTTRTPLTSSTNIRGTHEPL

SEQ ID NO: 992637 - protein, 411 aa, Homo sapiens
DTHPRADRLKASEHRQTVLESIRTAGTLLWAKDSAAFADRPGTKLTATVRWADAAGCSRGSTQPRTATARHWPPSLEARLGKPSLADGQTSRITAAAQAAAATPLHGHAGGLLSSTPGRAWQGCSAYVPALHTHGVPPTSPLATRNTQRHEPGACTRHHPAVLGHQATAHRRLFAHGHLALATQAWTYAHHARPGTLAPHGAANGVPAIAHALRLGQLPAGAASLLFMAGSQTPFLRKRAIERRLSKELQSHIEGFLYTWGQHSTNHAGPGPAFGLHNLNGALKQARYDLKGSTWKLADTRESEPAPGESTAAFYEQRVYKAGLQKQNKGPLDGAHINTDRKIQSRSAAEQSTLREDAQRRSRRAVPQIEPHETIATLLHYTPRHEAAEDGLLHTEASTLAHKNQDIASRK

SEQ ID NO: 992638 - protein, 141 aa, Homo sapiens
MGYANNVDPALYGVLNGSQRHNIAEYNMTPLLTADASAYGTSSERTFFDFHETPSHQRASLFTPLIQFTQPRHSYPIHQPLTITPLQRHLSTTPQHKDHQQIIIHFSVSHHLTDYPISTSTRHYFLPLTSLLHVPNHTHSK

SEQ ID NO: 992639 - protein, 205 aa, Homo sapiens
MTLIKEINQLSEAIGQGDQSLDIYYFYNKVIIIWAVLRFQSRYIKVKQYLSLSTQSKLPLENFLNPYKVHHIYVWHIQISIKYIPLTVLIETGSCSVNQAGRVVGDFELTEGVDSQGRVILHLAIRDTMDIPGQCTMPRNYLSQHNMGSTCCQAQPLLLTWPLRVEHGNGPAATIIDNSQYHDEQILGEYNYPPIVQQTSAANII

SEQ ID NO: 992640 - protein, 630 aa, Homo sapiens
DAWVEPRVRYTSLQDAMCETMEQQLLPRNPDSDPDYEDGSSSAPPSVTRCCIPADYPCGYASLGKPHPTGSKTLHPTYYHTYETPYSMTTRTLFIDLPTEYQYNYIFQDLQTRLNISSKATTGLSPSEMTTHTPKRYLSQLRSCDHREIVDSYDRSDWPLERPVEPNLSATPATTPLLDHCDNGRYQRHDRRDAPTHTATDYTIIMVDISAPTMIRGNPVCVVTASYVLGYTTIHPHATTHTPGTLSQSFFPAAITARSNQFQATTPQTAVHDPKGARLDKISNHYESSQPMCNSEVHFRALASSHRGPREGSPRTLNTPTCTTPARGPRSVNPGGRSHTPMRYRKYLLYACDPARYRSDIRRSHAWRKQTTSATPHVPHCGYCREFYHEFNATKRTNTLGREMDGCTAASHGCLVNPLHQYSQTAYPSNADQRSPYRTYTTETFASHTHTHKRADSLIMTDNMHHEGALASQTRPPLHLSTMLPSHSQTHIIARLQPHTHSHSSHDEPKPRRAQRLSALSSTRRSQRTHTHSRSSPRAELIATHSPSTVITSPAPSSHHHTSSTPPRDDSARIAFTLLILAALLRARLSHELTPNYIHAEATQYITHGFVHRSLQLRSTLTLLSRPHKR

SEQ ID NO: 992641 - protein, 275 aa, Homo sapiens
ESDSGSVADRQAGGHETSCGRRPGITSLLTVAAHLTKSVSASMDLTSVRAAEDYKWLLEDAVTPAPIVVERYVRAPYMEIITCSTMLDSRTPWVVVMVRQTILKSISRDNQARVNLELEEFIIRDVQDILGRTQREKVGECEASAMLSLECQYLNKKKRPDDPRGTPHSPGEALFSYKRKPKSATLRAELLQKSTETAQQLKRSAGVPFHAKGRGLLRKMDTAPIKGIQAGAFRRPTGPGFKPTGTGTHPASGGCGKNKCEVVEISEADIVGAPR

SEQ ID NO: 992642 - protein, 304 aa, Homo sapiens
  misc_feature (43)..(43): Xaa can be any naturally occurring amino acid
MRGYVVWLTIEKWRMQGLRENVPMLCIALAQILLPIVRQFPLXEIAWALCPQSWTRTYFAAHGSFILTSYTILFFPEIEEQKIHLTTGLRGVRGEISPVRIQRKGRGVATDIVFIVGYSGEKVKSGDGSRVERPAKKGELGRGNFTYPETEEVPPKGALGGKFPHRERNRLHTFESRNPGCGTIGSWEELFVLAGPTVRQTPYTPTSGGGSQRSSTLDRGDATRVDQAAQREDADLPQQFYNEAGAATSYKQPRFNNGRVTPGGGGANPKNIALVSVPVHLHHKRNVWRNSSRTQRWSSDKVFY

SEQ ID NO: 992643 - protein, 108 aa, Homo sapiens
LKSAEPKQGRICGLSVFGWKTTDCVLHKGSEMWCRVLYVCEFNWRSCEPASIALVRLYEWTTENRAAALQCNHYNNIMALYLNDQGRLHPGGLTLCAQCCCNAYKPME

SEQ ID NO: 992644 - protein, 47 aa, Homo sapiens
MVPYAQKYQYELSRHTYWRNKRHTGGIKKRENNAVRKNLGVKDRVDK

SEQ ID NO: 992645 - protein, 314 aa, Homo sapiens
GRVGQNTGVVKIVPLRSQNGRRKRLISTLVCQLDDCRFGQRSTDYWPSDLSNAVARPEDEPIDNRFEKAGCCTMGKRLLPQYAWDLCIKLNSLSVELLVSPVLTILLCGKFRDTVNVTMMHYSIDRPTGTTKQLRYKKIMDGPGHYLQRSTCACSVDMLGCRAMYGGNLRKPGNSSQMDTGARTPYEPIAAFLGITTPGVVETSNLRLVRVVSTDSSRFPTLKVAIRPGTNGLQLTSQKVTSEAAKAFGSDTRGTCFNGTTSIATYSSHTDILCALTQRHPGNRTMCRANYQDGSTTFSHAGSEGHVFWFVTNT

SEQ ID NO: 992646 - protein, 153 aa, Homo sapiens
MPVKPSSLGHRLPNLSKHQVKASMGATTKLPQSTLNHVGPFSSLTATDGPLTLCHQTGDHTRGPNRTRQLFTQRAHTCSDSPNSDVTRHINNYGLPRATQSLPYVGTGGTDIPGHASGNFPKRPPSPHTKLRKALQKCNTRIGQPQPLSIKET

SEQ ID NO: 992647 - protein, 96 aa, Homo sapiens
FRSKLVASLRRERAVVKHVRVGVTLGNRGLRKKHEEEHSTEKLESKWNTINMQEEDSLMVSVDASNGYVGDSQSEDECDNAFDIELVQVISKSVYI

SEQ ID NO: 992648 - protein, 69 aa, Homo sapiens
LRMAASREPTTNVVDPFSKKDWYDVKATCYVQYKTYWKDARDQEPRNHNGICWSQGSCVGSLSLADLHK

SEQ ID NO: 992649 - protein, 84 aa, Homo sapiens
DEAYPGKKLLPDEPYERACQKMILELLTKVPSLVRKLDEEATDKEDYAGLLKKYSVKESLPSVEEVLTDKKTNCFGCADSISHD

SEQ ID NO: 992650 - protein, 150 aa, Homo sapiens
EEAWIPEREQYAGWAPWLVSPPSRRVKLQDPVFCRQEVDDAEELSWALSSEKSWGERRAGNTLSADGGSLNRRIHAGGEKSWHRAQELLVIAPVYSVECTLNKAADESERGMKVIDIRAFVDERTDGTSRKSNSKDAKHIAGRGRSEMYE

SEQ ID NO: 992651 - protein, 195 aa, Homo sapiens
YWVLRISEYRCQYAAFTPEDADVPSLRPMISGLHGPWSSGKGERDLAPDYPVLWCRKACDLVKNKRPCEKTVDSPGYPFSRLMQPLRHNAYALTLILLPSFALECHLQAARSSCGRTPWGATCDCEDRRQPKQLVLRMSAGESLDVLCQAFVTDVLCMLLVPYTVCTTRLVAHFPREHTEHEKSEVACSRSLQVY

SEQ ID NO: 992652 - protein, 392 aa, Homo sapiens
VEEEKVRYFGKGYMVVLRLGTGFSHPLTQSAVMGHRSDVEAIAKLITSFLELHCLESPTELSQSSDSEAVTLQARADSPTVPEPVHRPQDPWHIPGVPEPVHRPQDPWHIPGVPEPVHRPQDPWHIPGVPEPVHRPQDPWHIPGVPEPVHRPQGPVDTFPVCLSPCTGHRTRGTCPVCLSPCTATGPVGLASVGGSSRVGLLPAHAACLHTALKQAGPDPGTSRSFSIREGRGLAVLQAGKITQPGNPGLGHKKTPGELEKEGTGGTYGSKQRMMGPDTRVTHRGDIHRVRGLKGRGGNLQAHEAVITSLHLREGAHTETHTSVYKEMRETRCHQPYKNVPNKPVIGPKKQVMIWSTRDDHLADAAVVKSTLIVCRCRARPPRARSAHKKKG

SEQ ID NO: 992653 - protein, 134 aa, Homo sapiens
  misc_feature (40)..(40): Xaa can be any naturally occurring amino acid
MAHTGSRSCVVLYRYLRLGNYNFGNYSQRVRMLEKSTEPXGLAGSVVLRAQFLNLRAGGVKQAPDGKGAKGPNKTNHGRVGERAKGEHPGRVKNARAAIIVGEAHRGNSHEKWRGHDRERIGRTHRITEKKHTG

SEQ ID NO: 992654 - protein, 382 aa, Homo sapiens
MRAATNTDLTSILPAEPRRQDTAAHQKTTTGQETQTKEAPRSNAPLEPVIQQELSAYSRSHMNNSTSKTQTTDAAAQQTKRTSQLTRRRTDTGIPNYRTRDITEHSATTDTHMNSATTAQRPRGETRARSERAAESTTTDTRTANEPDNGRTGRRGRDEHPRRDRHTARGNTEPQRSTRRARGHRKDQTADSRRQEASERTAEDRKKDRPTDEDTGRRTSEREEGRRELKREESSGRKEEDERGGRARERRDASGEERTHAAESKGETRGRTSRETRRKTAGGDAGAATRQTMRGRRDDKNTAEQQQGRKNDKREEEQQLTRQNEGMRRQQNEEKHEHSNAATLSAQALSEPAQTSNETDEHPTQGAARRRRENDKTSKEVQ

SEQ ID NO: 992655 - protein, 77 aa, Homo sapiens
LISRCQSYTGSIEPSMLGDLRNNRLVSFYNCASILDLREDLYTCNDGMVLTRQGILLKSYIFTVMCNDDYLHSKEID

SEQ ID NO: 992656 - protein, 104 aa, Homo sapiens
  misc_feature (91)..(91): Xaa can be any naturally occurring amino acid
  misc_feature (97)..(97): Xaa can be any naturally occurring amino acid
LRVCWYDLLDLWTGCLKESVSRNCLRMYVCSAIIHETAVSPQGTSWEKRPLTCVVSRPKRPSINAFYEDNGDIVQGLSVDSSLPYEIGYYXPTIIYXRQRFVEY

SEQ ID NO: 992657 - protein, 225 aa, Homo sapiens
MQPWSPEIYCLVPACVGRISSHVQLLRDNDHAEIPKTLERLLMPHRLPVQALLRQKESTGVTVRATRTGMDMPLTGVTVRRQCCWERNLPVYSGSLRRATVEQSRARAGTEVPCGDLKLGFAPVPIPVFALYVLSGKLGTGLLFPAVMRNPTVLFFERLCLDADHKRHTPGRLAPDKFTVRFGFPPHMSADTASLWTERRRNQSFATEEPGNECTNNTRTPQYCR

SEQ ID NO: 992658 - protein, 206 aa, Homo sapiens
FYDRERRPFLCFYFLFIVFIYFNINNGENLFFLIFSLYCYIFLGEKRSIPVVCVNRTGVRRARRLLECSTQPMRRDNTPASTEGEEEMLSRACNGPPPCVASGGDHLSGQCVAHTTRVGETNVSHKYVFGKQKKREVNQTRCVVCEPQWVCVSEKTLTGDSPPRERRHVSLARSVRGEVLTHDRGCAGGRYKREGVWENAQVCPHA

SEQ ID NO: 992659 - protein, 288 aa, Homo sapiens
MENIIAGSEMREDVDSEVTIARAKIEGFDVLKKVKTLCLRSKFNYSAVDNLEELPSLRQLNLYDNQIKKIENLEAANRAGDSRYFFESAEKLSIGVDEVEHLTVDKSVYLRLATDSTFSTHIEELTANLHQLQMLELGSNRIRSNRIDIDTLTNLESLFLGKNKITKLQNLDALTKLTVLSMQSNLVTKIEGLQNLVNLRELYLSHNGIEVIEGWRTMCTTGSVTEGSVLTEPNLPSGSKSTWSAQCVSRTIKIFLQQKKARAKYPRASTTPEQAAQRVKGRGTGKTV

SEQ ID NO: 992660 - protein, 386 aa, Homo sapiens
MRRFWYRPKLDCTDCHLGLTATSLPDSPASACRVPAIAGTLATTPDWSSYFFGGDGVSAVLAGLVSSSYTASDLPASASGGAGIADGVWFTQCSMVPRLECSGVISARYNLTSQPPALAPKVLRVQPLPGRQPVWDVRSVSDWLPIAWDVTEYPLPGCPVWQVRTVSDRTAIPSRKCGANNRPDAQSNEMRRTAKSPKNTLENARKRHKNKTRTRKAQVKDNATGQEYQNRQRLERTTEERTDRTDRRETQKHPSNRDHKRERNEKNTPPTHETPTETTKQKQERPPANEPIPLRKKRQTTHKRLERATPKCKRGDEVPTETAETHRSQVCTSENTASTKTLQAENQEAQHKQIRDDSDVRQAEHLAQKERKEHTSKTAMIEIRTQ

SEQ ID NO: 992661 - protein, 133 aa, Homo sapiens
MVQDAVREKVSKQKYKRSPLTRMKNPGEAFQENRRGSMVPRGAAALTHYVKLSKIFHLPVVCDHGGTRGYTCGGTNFYTKDGPYSPREREECHSYTLTDIISHTTPSTETPGCGCNQTKWDTHKKAGRANKYA

SEQ ID NO: 992662 - protein, 121 aa, Homo sapiens
MNEFLQQYRNAANGTRCGSRLRQGAPNFKQVSMTIVQVEKGIVVDSDLSKEQKSIVIMVHIYEDGIPWTEAIECGCMICLACRVPKLSSSAKVEELSYCAPASQYHQECSFLRLARYYEGG

SEQ ID NO: 992663 - protein, 320 aa, Homo sapiens
MLRGHRKNFDEQPVRIPGRMPRHNHEPKCRPRGRPKRSVGGLSERKRHPGLAIIRGRLKDPPKTLKPRPQMQTRPLAGTTRVASFVPTLSKHGGNNREYPGRLLRAPNMRVHSPKEQGALRSPRRKTRQGPSATPPDPWQEQDIGNTEHCRIVIPHIRLTSRHTHQHCCHTHWQSPHNSTIASTHTRATHTRSQQNSAGPCGMTPPTPHNLSSSQPTSNPNLAAASSPTSDPAAHTTALPPSKQGSHTTPYYKPTEPNQTTAEDSTRPPPTATPLSAATPSRTPPPPPPPARPDTRGCRNRTSLTRATRPPPRTSTHNTP

SEQ ID NO: 992664 - protein, 393 aa, Homo sapiens
MLLLVFGGLQGSGKLERHADPNPGRLLLNASLSSFDPATLNYAARWPTRLRPLPNSATAHATPPPPSLLPLRTGRVRTRPRPPPPPTATARSPPRPPLRVHTLSSQGRPRTAQPLSTRAKPTVHARRQPTRGPPLLDPRRVHPSAANLVTRAPTHATLCSLPTDTIDAHPSLPSPSPRAPSHISRTTAPSTLARSSHPPPPSERCPPPLHLEPPSAPRLPMPLGRPTRTRSLRPPPRTSTPPAHDPAPHTRPPRNCAPPTERRRSTLPHCALHSTPPRPCAPFTLPSPHPHPSPHLPAPPTLPPPAPPRCRRPAHLPPAPSPCPPPASASPLQPSGPAAPPPRSPCPPPRSPHPPPTSSRPPSPPRPPTPAPPAPPSRATRAPPLPPPTPPAP

SEQ ID NO: 992665 - protein, 143 aa, Homo sapiens
MCTNSATLSPLKSRKVDAMPIKIIEVLQLQRSMEEQCSWTQCLPTSLERVSFTNHARFECLSVRKEILIGKIESKASRSCRGDQDCQIEMEQHVTRRTSEETESQQARITNWHRNCWPTLEDSYLLRSPFNAQTNVGSVLEVP

SEQ ID NO: 992666 - protein, 32 aa, Homo sapiens
MSCHRLASTFSTNYRSLGLCLRRPATGARTVS

SEQ ID NO: 992667 - protein, 101 aa, Homo sapiens
VFHITSVELHCIAVHMRGHFRGLDILISGVHWSFYVCEHARLYAHSLSIGSYYHGKYVYVILLDLIALLYLHAARKTPFILQVHSARYNQDPLSGNISSLG

SEQ ID NO: 992668 - protein, 250 aa, Homo sapiens
  misc_feature (158)..(158): Xaa can be any naturally occurring amino acid
  misc_feature (200)..(200): Xaa can be any naturally occurring amino acid
  misc_feature (221)..(221): Xaa can be any naturally occurring amino acid
MSDTNSHRQHEPSQRTHQTRRTPEHIDEHTNRHKRNESKRTPLEAEHTTTTKTEPSTAKRYQRHQTTDRPRCLRKHTKDADYHTQNRARAATQTTRTARQTLRDTREPPRPGAGSTDTATHSDKTMRRLHETHTTHHHTRGWVRTLTCRAASTTRRTXRRRRHGAEDTDNQTRRTDRHHTSLLQVREAAHSKTLEHRRRXESPTENQQRTRKRRQRQPHEXSKLTQPHYYRSSTIKDRVELTSQGETQNS

SEQ ID NO: 992669 - protein, 421 aa, Homo sapiens
KTPNVRMTAGAAGVARGCPVWPWDGEPAGGIPRRFRQWHPGAWESRTVDGAWWPMAAELCGGKAEDKELDALSPSWAALVKDMKIKSLAGDLYSYSLDTIKESEIIDINFHGRPTLKALRVNEAYMPDAEQADPVTGQRHQGFKDIIVDYSGTYKCDKIRYWGVQDSSHGSVATRTYRWGTSIPGPRLIHRTHVRQRQPGGGTTHYAQSPAKHGSSLHTADHGPALTGIQILGYGLQYPLDPEAHTGDFDPDTCCHKKACSVQIALDLGRTMGRSVKPRGTDIARAMGPVSAPRAHIMKQFLKNLTDNLDPRTIRDRRTVIRTKTCYHGLPVATRTNPNRKPRTGARPPRGQQQSVTLGRDGLAETTQRGANDPSGRTHATTQAASERYSGPKAEKRMENPTEPPVEIKINSRITAGVTTN

SEQ ID NO: 992670 - protein, 96 aa, Homo sapiens
MRTRVWQTDRQKHELTQDRREGPNRQPDKEETAQGRKNIEHQGDNGRKENNKTRNASAGHKARKEKKKREPRRHRVQQRGSAEPQSEKEETTQEKE

SEQ ID NO: 992671 - protein, 501 aa, Homo sapiens
  misc_feature (69)..(69): Xaa can be any naturally occurring amino acid
MEILYLHGRLPLVMQSYEVALVRRTDDSTCDSDDSIREFSSWIVSPDTLSLSRRVPHEIYHATATQHIXAPRDKVASHIFLYARKHKGDTLAKVFPMQSRGYVRRIRVLSAYRDIVFGVYANDGGRNAHIVCRGQYPQHFVLKLPKGVLGAHHVLWGRKHVHRDEPYTLVSEGNSTCGPHRSVAGQHPLFPFGHMTYDHGYGAGKLGLGELLGLEVAGINLIHNGLPLSEGQAPRGNYPAQIGGGPRFAPSFSAYRRAPSFSTMTTYPVGKGHGYPHNFCHPCKNGTREPSQLYSLMRLGVGDWSAVENSLQVGRFARGPLRTLVQSGFLPPQVGSNDPEPEGRLPGGGYIKNLKARHLQKTHEEPTSRSGGSTRALSNEATEEVDNITLQRGRHDNIRPPEAGARKPTRKGGGPRWSQPRVDHRRGKKTKGRRMQREEQRATTHKQSGGTKQREYLLAKRVRGPSKQREALTHDSSARTTKKKPHQEHDAATAEERQQTP

SEQ ID NO: 992672 - protein, 327 aa, Homo sapiens
  misc_feature (26)..(26): Xaa can be any naturally occurring amino acid
GGAHLAVLFLGPVVWYPKSLSIVALXGCAKAHSGAQGLLAAQQRSRSASRTSSRQTGTKIELPAASSTAGPASFPQTIYCALRPHGRLASLLRLILLAPAGPVSFSSERATTLTRAGGDGATAAPWETRAARTNGTARRLRTTSSALRAQRAEPLRPSGLEAPARLLTQPALSTCMGAPGAPLPLCWHPPACATHKQPPGGLPAGPRAGPSPLRTLLTRQSVPLPLTSPEALTLADVLLPGAPGLYSIPLPALASGPLRRSSPGPLPAIPQHCRHPPAPRPNPPPPPHPRPPRTQPPPAPADHTRPPPPPATPPRHPAPPPTPPPPP

SEQ ID NO: 992673 - protein, 342 aa, Homo sapiens
  misc_feature (311)..(311): Xaa can be any naturally occurring amino acid
MRQAGCKGLCLSLFDYKTDKYVIANNKKVGLLYRDDCKATIPRRTLVAIDGRILTTRTGYTNRTIDHLPLTPDAMYNTTKVQRDDEPYNPNPPYGNPESQAAFMGQMLHRNNRYTTQPHRAKTKTILQQDRIIQNTQNTADPPNNHMRGDTTTDPCLAWTHNMHSWPLTPWTSERPPGHHKRGHQGRTSPTPTIAWNNDARYTTLGQTTGQRNNEPTEPALHHIGPQNQGEETIGAPTAGTHTPVPNDYPIAHPSRLATESRTTHAASQAASPTSERTHHHSTEDQHTENNTHHPTLSTKASITPTRTQEXRPPADTYHYSHRIGRQLHNDADQEKPRASRT

SEQ ID NO: 992674 - protein, 161 aa, Homo sapiens
MEHAVDKTKHTNNRNTQKKNNEQQETTTIETTRRKRGSVRQRDERQKRHTRRNGTDAHDRAQRRRERAQEHTQGERRGDRRRKDEPNGERERDKGEGETESATRKEEEKAARQTGDKKEKEKERGERHKEERTGARQEDRREGDGSVVDGRRREPQTRVRS

SEQ ID NO: 992675 - protein, 230 aa, Homo sapiens
PFKGHHRPHGKKLSRFRLRGKPGPPDFPLSLVPLGQGRKRIRLYMRSRQNLQTSTYANTINDYTVTHHYSKLHNNTLESHNNTLVYRTTRRERMERSKKTERATDTHEPPMDAIEEYERHTESERGERGEEGKNEREARDRKRVQERHTTDERNKQKQTNKLNTPTPTTPHSDHKPTTRSKQPKTHNPNNRKHVPTTPPLTRHQDINTHNSSKHTHNTTTDSIPHTQKTK

SEQ ID NO: 992676 - protein, 171 aa, Homo sapiens
MRLSAGSPRTSQAALPRSIPLAGHLLFCVMALTLIHCPYTTPHQGVTPPYATPPPCPPIHSPLPLPPPHHHPPPLSASSTSLYLPTTTHSRPTATHPSPPPLTPLTTPPITPHDTTTTYYTLPPALSYSAPVPRPHTLPPLLPPQLRLPPSALPYSFSRLLPFFFPPPLPP

SEQ ID NO: 992677 - protein, 121 aa, Homo sapiens
ESGRREEGACSAEVNDLPRKNESSRPHVTTDPMAQAIHGAHVETEGKGSRNNKTSRHGVSRTRCYSVDPRKNSIPSLRMSSHFVSTFYHDLREPRDLFDRVHSINTCKLIFVLLLVSRGGE

SEQ ID NO: 992678 - protein, 120 aa, Homo sapiens
MTLVGADYGGLTEMFPVRGVRLRGRGAFLIYSPLGWLQKDVRGFPGHGLCDREQVPFMILGSFALVFEYVESCKVDAHSKQTASQAGKEYLLRTRNYSGLFRERSAQVARTLYFPWASRS

SEQ ID NO: 992679 - protein, 304 aa, Homo sapiens
HPGRSWLAQPECLDPLLRPPPPQAQLLGLLFVVFCCAVGERGEQALCLLCPPGSIPRTPEASRRERSSHISRPRGMPLDVCRLLLRGGAWAVGCTASLEGQEQYITKPDDSQETDHTYVDMIQTRSNHDALTCGDVPRRLTSSNSQESCMSNDGLPSPIPRMANTGEPKGHESSEAGDSAQNHQVTWTGSRPHIPWTGLMEMGFREDRREKQRDNKSQYPKEQALKAWTRTAIAEMTRGSAKANPEGKKEQTHKRRRTDRTRRPKENPDNREERREKTKDENTKEANNANKTRPTERQKRTSHA

SEQ ID NO: 992680 - protein, 197 aa, Homo sapiens
MRNWSQPDGCPLFPGQMGQTLIGIAHIFLKDTLQGRNAGRPRKASCATAESTGNINTTGIATPIYQCRIKRGGHPIQSNEDRTHKQDTPEEHGNTTTNERVGAQPTGADANREKGNAQLKGVDNQQNTARRPKKHQRGQRTPRRPDCRTGHDASNKKSAHYTRDRRRETINEENDGGDRTHERASQDDESRKQATSQ

SEQ ID NO: 992681 - protein, 64 aa, Homo sapiens
MDPGLQGGEGEQHLARMRDHEDMRRRPQGHSRTEDPGTTQKTRSEYQNTGNAVTVGDKNCTTPH

SEQ ID NO: 992682 - protein, 156 aa, Homo sapiens
MPIDPSWRIYLIAEGGDLHTGERASVEGKPALPHGGLVPAAKMLWGTEWPCGRREPVFSVAGDLRAVSEVSPCFIPVSVCEPMAGRALRVLCEGAGSCALRGSAGVPPLWELCWVYSVPFVYFFLEWRFGAVEVAGGEGTLSVYVGAKGCWVRLAA

SEQ ID NO: 992683 - protein, 245 aa, Homo sapiens
SARRDLSFPRLALLAVSSKVVTFITNPSFEPVLTELFTGTGLVWLAALVLLLVRSHPGSGTFNPQLISAVSSLVSPLFTTQYRNDAVLPFSESHGLAGLGSDNASHSTPVLASPCSPLAILIVYGLILGNTLGIPRWERQLARPSGSQDPLYAPPCHKDIEYDTSGWSDSSWIVRLNATDGTVVRTKQRRVVSLEESPSRRNSDCCHSVQCSGDEESDINAQMAIDFARVPSLKQPEEAVLKTVA

SEQ ID NO: 992684 - protein, 262 aa, Homo sapiens
MQSGAADRCSLLWLRDRGGPGMRTGGWYAVKFKWGDAKESSKVKTLDEMLHEKKRKKETGGENRDPMLKKNSDDLDTIGRSNCLVGGESSDRSPALVESTYQGYLRLYYAHEKDSMEDAEERENDPLASKTRQECVGKGQSSIDSKFDELRRANRSHLYHAPEGGSPATVKRKKELRRTNDENGIAKTRIGASPCEWATTEARLGDGTGQHSEYENRYPLVPMLPREAGPRSPNLGRQKTGPGWSGMKRKRAEGRGKKGVRR

SEQ ID NO: 992685 - protein, 103 aa, Homo sapiens
QHSTFSISGTKRDQYNSPLRNHPPYIQSIRSSLHNLYYIKSKIRPSAYTISSLLSLMTLTLFSPDLLGDPDNYTLAKPLNTPRPHQARMIFPYSATQFSGSVA

SEQ ID NO: 992686 - protein, 168 aa, Homo sapiens
  misc_feature (130)..(130): Xaa can be any naturally occurring amino acid
MCGNSGTQQGRSTQRAIDHQHVGGNRRREETRPTNMARRRQTTREPGAQRRDLNHVAPHRETLLEDEKNPEGGQRPLTTGPTGRTHSAPRAPRVREGNTKHTRVTKTTSHTTHKRRRQRGRDTPRDLTEXDDMTTRDNHEPPEDSPGRNRSNNSMQQREQKRDDTKHN

SEQ ID NO: 992687 - protein, 149 aa, Homo sapiens
MPASDYDIELIRLTVQYLLSTNKSLLPSHVNARHMSRSAHKERLNKVPGYSENLWTPSLLVPKISPLASPVLRGQPAAQVIHMLNGTRYPILVTEVDYNSLVPLHRDLYEWLHEGSAVPLTLNLSEIDLADARGGTLTAEEDEKTLWSL

SEQ ID NO: 992688 - protein, 70 aa, Homo sapiens
HYTLRYLYFIAIPTGVRSIWLDLLTPQVTKTSISMKMVSRLTLDSLNTCYSSVLFVGYRLAGIVSFHILI

SEQ ID NO: 992689 - protein, 368 aa, Homo sapiens
REEVPRRSGLSDGAQGMCFYYSAETGMEVPQLPRAGALAGSAPWTLITFDFRIVASMHDDAEMNNELGSGSAAYGYPSNRKVRGDTALNMKHQAACPVGPSSWRPIRCESESQDELRRVTETITRGNRRIRELSPQIGVWTTTRAMFFLERTNVCIRALKQPFEHCLKEAGSSIMWTLPQGTWMGGRVTWLDTALRMRASQADPAKLPHDDDYSDSMHPSSGLQTLPAAWWSRESLRSNVCETTIVSLWCKSSSVVDPDRGSIQGNAVHAVWCRGMVRESAGWMGKRLMGRYCGATLEGGWSPRYVGEAQVENGLVMKRSNKHNTGGRREGPPGRRIGPFVEEAVDHEWFDDGKGYPVRGRESTLWPL

SEQ ID NO: 992690 - protein, 138 aa, Homo sapiens
FSSLPYHIYPFIFPLHKVVYLSLYILVNIWYNLPFTDGDFLCPPRFLQTILLSGFEHHHTDHHMFFDYNYRTISSLLWDRIGAPLFNQILHAFEVEGTAQLCEGDASEGTYAQVVHSRQYGCNNDRLFNGRVSRMTVI

SEQ ID NO: 992691 - protein, 64 aa, Homo sapiens
MATYSCTYLEAPPSNINIKLPSTAYHLHNSNSTEYLEIAGALIQAYVFTLLVSSTCRKQIYIHH

SEQ ID NO: 992692 - protein, 186 aa, Homo sapiens
MPGLLIPEMKETYLERLRAAPEQGISDQLNLGSWTPVTCVLPVLTPPDHVLSDLCSPVGMPREHGSRFAHLFAAGGFHAPMDFVAAYTRPHQSAVTCPHTGCAAPTPAPLPGACANPLAMSPSLCSVQRLSVAQSTCQSPAAQDGQMVHHDCQIVLPIARHYPLSGTVLHAPSQRHTVSSLCPRWL

SEQ ID NO: 992693 - protein, 112 aa, Homo sapiens
  misc_feature (27)..(27): Xaa can be any naturally occurring amino acid
MVQWTYYAGNCLASAIVERWCRNSPEXVLWSTRNASARNPRVVTVCAVKPQWSLGAHDYGDKYSGQRIIRKGTSPLHLGTTTNENSHFYVCCRGGRLAPFGVAGPIVTHTKL

SEQ ID NO: 992694 - protein, 83 aa, Homo sapiens
MHITYCISHKHRKQMSPEPYNSEYGAPNVCFGRNHPDGNITYIETSILILSGRLHSILRPRTAEDYLPLFCEDTEENLFVLKT

SEQ ID NO: 992695 - protein, 311 aa, Homo sapiens
TFVKPAFEEFCRGDKEVCRCDSSHEAVDNMVAIRRVIVAAHPGHSEIGDICIDVHRRRVQCGGCYNADRFLSRGITVGCMTSGKRSHLESSSGPTEGLSSLEGKVVPARGNVCSGTEPGDAQTQTHCFLSGQRQGSVSSEAFLTQEWKLRCVTQTQLAGTLTGVPEVFSHLGSLRFKDPSRSLRNATECAGSLGGFCEECEAHYRAQIEETAKTLAGLMFVDSEPTVGREFFQSDAGSYTLTHITQTVCEQVSSLFTCYMVSGFRVLVHNQGVVWAYKLIMTSGCVTVANDIGTCGVSPVCQGDQASVTAY

SEQ ID NO: 992696 - protein, 329 aa, Homo sapiens
MPSGWHPWPRCWPEAWLVSLSVNWREEDFRGRSPPLGIHATMRSTTSCWILPAVARVCRADRWRSPGQAHSSSGASACAWQGSMQLSPVGTALTCPCLSSGIGLLHGALSARRRMKTWCRDALEEKPGASELAPDLTAWAHPMPEHCSPVCRVTGVRDIPLMKHIQQVVLRGCNGSGSKVPKLSSEAGCIMMHEVHTLSGKSRMRKNGQYWSRAVLDSACTEQRLRADSFLVGQEDGRSLRGALCLTAEPVGFGTVWGPPGRVIAGNQGAAHKWDVLNKKGRREISGRDGTLKGARDNRRAHSGKQMNPREPQHRRYGVQTTGHWETNS

SEQ ID NO: 992697 - protein, 224 aa, Homo sapiens
MAIKKHMRPQKKPTRTAPITHSHNGLNRRSENTTTPTRETRPTYEQTGDKKWQKRPPNKKKRQHAENEKQSPTGTQRTHTENTKQQEKNTATTGHQTHKKKRERGTQTQARQAAQTAASDEDSSRTQHEHRRTNTDKTVTQIKGTNNREYGTAKNHTTRSSRNEKHQHDRRQAETHTTRHQRKKHNQKPKRPHDAGTTEGTTHKRTTQRTAQEITDMRKTDTPK

SEQ ID NO: 992698 - protein, 159 aa, Homo sapiens
MAGWDPVHVILKTGGPFKALIAAQYSGAQVRVLSASNPTFHFGLNQPHPCNFSCEFPAGQGPYAFDEVMMDSVCSESNVHGLLCEQSTELSGKYSTSARSSQVCAVGVRLLADFPESKWPSQAPVILGVFPQPVRAVMSTTRENTVALRNCRREEVKAE

SEQ ID NO: 992699 - protein, 170 aa, Homo sapiens
MASCSITCATIRGFTLCVNSGLSSWSYTEYVYDISRPSVSDVPFGYAPLELHPITIEESTLAQRKSSDNRSTSITVSPNEFSPILLKKTLTRLKIVGNTTPLSNFKCYQCMGSIRPCFWRFIEESWASPRIQIFEFLRKPVLRPNGYIRPVGNLAGEYIIALMGTAVAVA

SEQ ID NO: 992700 - protein, 75 aa, Homo sapiens
ENTTGLNSGNSYKSQMADTEMTRIDRHLLVCVVMARTHIVNKHHHWLTGRSQQDGCDFNSMDINEMTLTHTKRSW

SEQ ID NO: 992701 - protein, 134 aa, Homo sapiens
RPTSSFLSGMKAPPRRTSVPRTRVSWCEVTWSRLSLGGSSRYCGMLDATPAEREHVASARASDVTPEHGPESLLCGPEYADGLDDPGVFTPGSSNGPEEPWEAIHEMCIPGGLQGTKAARECTAPMPTIAGLGL

SEQ ID NO: 992702 - protein, 245 aa, Homo sapiens
AKNLMYLKQILYLLDEIRGCARGGTLVQNPNTQSLSQTGMELRTTINDFLFQSQIIDINLSKVQRYCETSMISRKLFWLHRELVRSSVLIPGSRPKRGVGFSNSLQSLQPRTTESVLQCSADESQARRSRNQLPQLMHIEGFLADLTTANQDGRVILSRQGQSQSEHPEDFCSVNSSCDTLPHVVKEMPGSGHCRGEPCSRCPDFRAELLGCAGVEAERVVEVFLCVFTDTWISSSALPGLQVLN

SEQ ID NO: 992703 - protein, 395 aa, Homo sapiens
MGGTRGTHEKRKKDKRQQNARTGQSNTRQHKERQKKGENTRNDDQRTRKERQNTEEREKKRTEKKHRQENTNKEKHRQRKANGEINETKTQTAEEKKRSTAQENEHNDKKKKKKQKRDDTHNNIKPDNTKKTPRHDRTETENTEQTRSTERTTRGGARQNRKKRMKERERRTRQPTTEQKRESRRTNQQSNKRASEHTKSNTRDEDEQKKERGERKTDREERETREAEEEEKAAGRGREEKAEGRERNERRKRERGERERRDSSKEKREKTKRTRQSRSTRKSEEKEAERRQGENRRREGRREQRESNTEQTEEKEQKRGETKAGNRQQRQTGQHKKEEQRSKKARQKRRRRGRREGRNKRDERKASKEKEEKGVSAKNAKQERETEEKPDETDH

SEQ ID NO: 992704 - protein, 79 aa, Homo sapiens
  misc_feature (73)..(73): Xaa can be any naturally occurring amino acid
NCLHLLARVYVQVELTNPFKYGIDLYGVRCSTKYTYETKNDLGYVDDSMKLPRYGSQSIQGTYRVLCVMGMYXKYDNDR

SEQ ID NO: 992705 - protein, 51 aa, Homo sapiens
MVFCFKADFLCHGAGRLVITPRATPRSPHGKINPRFIKKHYGEHPLAQAKR

SEQ ID NO: 992706 - protein, 227 aa, Homo sapiens
MTDVQVSASVTSMMTQVLRLQPTQRTDSNYVVPAQKSAIRFPGPFTMLACNRKFRRPRLYASRTSGLTKANHHCTRAVMKNNRSLTHIDRRTRVSLVPRYSSARYLNYLVVHDIPPVIEPEEDLRNIGGWAKDPLEGQGGLLRVFAQSAVNTAPWAMLTWTRLPGQKPPVSLIFHSGDAEGGEPWQRYQQEPWAMTDEEKEGRAIIHQEGKPGSTREGHVKEAAAKY

SEQ ID NO: 992707 - protein, 66 aa, Homo sapiens
GGERGWRTYLPELMAESDSLDPSFISHWPCGLVIPRNRNSFKEGEGTGRRNTYIDVVINKNMKLGR

SEQ ID NO: 992708 - protein, 122 aa, Homo sapiens
RSVRHVKIDHLHVGWYQSTYYGSFRYPGTPGLFRFSLPACHMQGICRLSFSDPINNMSQGISLTRGYTDVTSYTEWKCVNEIGLFPAWKSLIRSKYQYFDDTMFVDEDVRIVIKRFTFDQLS

SEQ ID NO: 992709 - protein, 249 aa, Homo sapiens
MKLNGAVLEGETDDGRYSTIFELCSSDVLDTYRAHDSAWEWSQRAADHATCLECKLAKSEHEITGLEQTVIRLGESEVSRYKESDWLTNAEYPEDDILRQRRGGNSMESSARVIGERAEELEVSNGQLVKRLEQMKASRSALWSHAVEFRALIRHPGWVQLDEPCFRVALSLSCVGAAVSSPGFRETKTVASLALRGSRAMAHPRSPSGPPGASVCRALAGLAADAQNCRYFISTPGPRGSSVSDRTEL

SEQ ID NO: 992710 - protein, 104 aa, Homo sapiens
MMDIMEEDNKKAGPSVKYYEVKRQDAEGEEDEAMRMNDEDEACSELAEWKEEVGLSYLMKEDIQDEEDDDDYVEEGEEEEEEEEGGLRGEKRKRDAEDDGEERR

SEQ ID NO: 992711 - protein, 111 aa, Homo sapiens
MEVKPDARFAPEPRSPGRRQSACRGGGGPVIHKEPEQLRKLCIGGLSFETYRWIVYSNDCGENGAHSQMVLGNERAPETKRLPGCCWCIVTLCLVLKSVDAGNVCIELQQG

SEQ ID NO: 992712 - protein, 221 aa, Homo sapiens
MVAYDVKTSLDLDDMVPCLLLGLSDLRVTWAVVFIHNCKTRPLCFHYSLPFVGIPTPISIIITIPHTSPLTVCLTHSLMLCSSSCFIPLKRDSGQIPLLRSHGCPYPPWKRLRRGLFFVMCRRSCCRHFWGLEMVEPWFSTNPWSKPPDRCLPACGSCVAGGARDLLVGHTDSWNFAGVGYAPHLGATGVLPRAGRGVAARGTRWPRDRGYLEGPPCGPRR

SEQ ID NO: 992713 - protein, 286 aa, Homo sapiens
MTHTECLMYLYSPSLSPPPPYLTSWASSGTVLGVPGVLCQSMTITIHKLTPNPETSAFPQRHINASIRYHEGNVCPLVLSSPLCTVTAAPIGDTDGEEMVGVRHPLGVIRQRGCRLVTVSLSGSIAPRMLQSVREHGRLLVVSASGTFGLFGPEITRSCAQVLERKWCELGALMQTLCLREYRVRSSSSADIPLFGSVTGVVPAQSWVRWGVLGSLQIVRVFTDVVLVKFCMVFIGRVIQPVPVALQDRWGLRLACPCAPPGSRCDFLRFQRPPVAPTAGGGAAPP

SEQ ID NO: 992714 - protein, 345 aa, Homo sapiens
TRGSRTRVVEPRVRKCNSLGRAVPRSTESNEQYKVIACASLLTAEELSNIDPAIEEGPRGTCSEVQAESCMELASRMENERTKGSNHGAKISSHNAEGRRVNGSVTIRDKFTRESSLTCQTQAQKSDNSPASRGPYEMQVEKLHKKTCRRWWLDLGVTTSYTSFRYRIVTNSNAYGISSGKGARKPEDMSRGRTDQTNIPDAVQRENTQTRDQWIHQQAKQRQTAETAQTQDPDAIRKETGEKNKTEGKKDNKTLTKQGTNAGKDTKSRKNHAHQGQQKREQAPHTADRTEDTQEIETKGARTAKRRQQAKTTQSPLTPEEQGQKTDDPGRTQSRTKNSTSSAKT

SEQ ID NO: 992715 - protein, 202 aa, Homo sapiens
MHGRESDGSEIIITCWEKAPSREGKVTILWAAAESVFSQKAGKCKELRSPIRSKGGTMLGYRVGPRSIQACCQGMIANGCYTMTLYVLRLGWLLNQRTGVSPLVRTTTQRGRGHKIFPRGQHNSDEMWSKRGPRRRATSTKEARFKQRGQKETETGGNHTGGTTNKNEETATTCHEHNERTLITETEIRQQRQTTDNAQMST

SEQ ID NO: 992716 - protein, 231 aa, Homo sapiens
WKRSQCHPGWKCSGTISAHCNLRPWVSSNSPASASRVAGITSARHQAQLIFGVFSRDRVPPLLARRGPRTSRPRLTPPASASQRAGITGVNHLALPRPHFSLFFENGVLLWFTQAGVAVAQILAHCNLMPPVGSSCSPYSASHVAGITGVRKPRPADISSLVRGGFHHCGQADLELLTSGSSPRHSSLPKSLGLRGVTPLAPGQPPFFKPGHVVSRVGVSFPRDKPVGTFL

SEQ ID NO: 992717 - protein, 177 aa, Homo sapiens
METPRSCAAKWKPIRRRNPMPNLLTTGAAGHADRPQEHLRALELFVPSNCVPTRRSCQTMRTASSPSWHCLELCDGHTNAARQDALHRRATDTLALKNPASLIHERRPCKTSSTPCPTACEQPTRAIAYRGAPPHGIDTERLTARRLETGTELPPPRPTTTTPAHHHRRQPQGTPSL

SEQ ID NO: 992718 - protein, 188 aa, Homo sapiens
MTLWRKFNLIWTYIHTVLLLADLKEDLQERSVNLDLHGLRRFHRGRNFRFEQLANNGPLIFDRRVGQSVHEALAIPGPRPTWMAQGDRSGAVVGTMYHSRIGTRVAFYTRNRETLKCHVNHFTRNVGAGSPTGNPRAREPEAIVGGRGCDTANCVTRVDIRPLSHRDDHCTDGLNPALDTPHGPSIMG

SEQ ID NO: 992719 - protein, 235 aa, Homo sapiens
SGPTFISFKKEIITPLGEKIVDTRVPEFPICVCSTGGHKTVPPYSGGNVPFRGRPKGVLWGPKGGVQVVKPCEKWRNTEKRAVTQSGGTYSSQLSVRCAHKTLPEFLTEFINNGGSLLCRLHKVGENRGPWQRGEVLSSHLYSAGQNTVGKGYRLNTIYTSVRLAPTRGCRGAAINNHTTLYHKEVPGENTLKETRDGAPKEHVGDNATKRGGGDNNRGITELAVRVRTNPGHNP

SEQ ID NO: 992720 - protein, 293 aa, Homo sapiens
PRSLGKSCEKYRHLNQKEDVAYAVNSWDHKLFSGYCVLKAGKSMLQLSVASMVDPDGAVSSGNLVTFVLYQMRYNQAVEVRALHLTQSQKAVGSSEKIFEYLDLDPSLATLGVCRLPYSWRAVVQFQDVSLAQPKRPDVYVLQGLTFTLRPGEVTALVGPNGSGKSTVAALLQNLYQPTGGQLLWDGKPLPQYEHLVSAQSRWLQWDKSHRYTDRRSFTNTHGYGLSQKANYGGHPGCCRKGCGTIGPISGTPSGAMTQTVTKGWEASSKETREKEKAYGPRHGTREPGRTYT

SEQ ID NO: 992721 - protein, 112 aa, Homo sapiens
MATFSHSYIQEITINQIAKSKWTFPKGTGWEDPCRNKGTPYQDRTANTQINGRQTRYHKEKGKPNKIKAGGGTKRRGREAQKSKEERTSRTRQKRRTETQGETRNRKGRKDE

SEQ ID NO: 992722 - protein, 113 aa, Homo sapiens
MSRVYQFMKPDRANRSNLTKPFAALASPGCLARLRLELVPVAAAEADRRFLSQGGRHVGPVKVTRGGRVLRLPWDIGYRRLGGAASGGTVFGRFPEEAGDKAPVGGPRLFLNS

SEQ ID NO: 992723 - protein, 116 aa, Homo sapiens
MSSLTFDRRMMWVYGKELLTKEFSSNNLIEREGHMLRKLMKLQRPNEVVRNLPSVISDETLGTCDDWRERAELRWTVHLHLECCIVTQSLLEAAQNWPLIQDDPHLCDFIENTLPE

SEQ ID NO: 992724 - protein, 283 aa, Homo sapiens
RFRDADSASCMQVPRVLGSSVAGLRAARARLTFPAVPEAWHPGLCTRTYRAVSACSAGSERRQGLLRSLGHLPLVAVSLLASACTTDEETNAFVEFTMTDEIKEERQTYRKHKTLPKMSGGWELELNGTEAKLVRKVAGAKNHWSLSTLTSSIPPTFDGEEEPSQGQKVEEQEPELTSTPNFVVEVIKNDDGKKALVLDCQLSRGLRLDKKTRLRVTSFSIREVSFQRHWGRRSEWKDTNYTLKHRIPWTVPYMTHLNGFPLPTEGVDHPFADDLVELRQAWT

SEQ ID NO: 992725 - protein, 183 aa, Homo sapiens
MDHTWRDYAFKQKMATPTPLPSINSRVYTLKIMAYSLPLNSPVRPFLLLGTMLAVANTSSLDINGRILRLNRVPGSQKLTQEKAIFTPGVAVFRFPNALEPGHLQWRGPYKGFRDVANTLHNFVEAHHIETTPPVYPEGHQHINTEPPYLDSFTRKIPSQSLHVVHAEKVIALRLSGRKQPRA

SEQ ID NO: 992726 - protein, 114 aa, Homo sapiens
STPNQVWNIGRPSLPGPEVNHGSHTSMYKARVPWRSSLLIQRFKFGSLMTIRPVTSVRRTRAQLLRKSHPHGHKCIRDALLFLQPEVHMRLLLPVPLCPRSSWVSMTCGLSNGA

SEQ ID NO: 992727 - protein, 289 aa, Homo sapiens
  misc_feature (145)..(145): Xaa can be any naturally occurring amino acid
  misc_feature (147)..(147): Xaa can be any naturally occurring amino acid
  misc_feature (157)..(157): Xaa can be any naturally occurring amino acid
VGVVVVCIDWLVKRFVLDAYYCTLEPGPLGEMSFILHRSNQSTTPNVSRKQDPSSLQVDYVVVCEHIAYSIALDLDNLENSHKRVEDNLGDSLVALGCPHYSLIRAAICMRLHYCDGSPFVDYLSCVTSVCAPLRGARSRVGSLXHXGQSMSELVMXWGEHVDFQGFGPGQWREVALAGQGSLNVKNFGMRMAYPTNAKAPNWATKHGVFVRKGSAWAGSNCHFRRATAVGSPRAPAYGLGSGGQCFPPVRSISILGLTRVRPGPRGGVPEDSGISSRIVRIGRVVGAS

SEQ ID NO: 992728 - protein, 195 aa, Homo sapiens
MVVLARAPVALTSRVRGMAVLAMLQFVRAGARAWLRPTGSQGLISLAERGMRVLTDEPGWQCGRSEGSPGARAAQSRAPRYPTHRLPSAGLGRVLAWASSQELLWACATCIPDVFATAPRLDISVPGSYVAEELQMRISYAKDQEESQMCGAVAGSLGAGKGTEGGRDRNIRVFGSGKEKVLPNAPGGPQFYYIW

SEQ ID NO: 992729 - protein, 256 aa, Homo sapiens
MAEVGEISSRAADYPCCGVEPGTTRDEWPLGEILSVKDISWPDSIFYVHYIDFRTIRSGVNVVTHERRGPKEDPVAPGKRPENPLLMNGLPGSSSLALQRERCHGKVVGWFLPATPSAQQMTDPGLRSSSPENGMLGPVGLVACLETGSECEPSEWFRAERDEDSQDHVCCIGILTVQVSNAMYVGRGLADLDRKPTSEHAYYLGNERTLECFELGAGSRPQGRGGSVAPLVTRRRLDQIALLLLTVGEFWLKYGA

SEQ ID NO: 992730 - protein, 138 aa, Homo sapiens
MTPNAPELVRLLNQTSAKSNTRKLAYYVQFRCQLSLEHTESIVDPYGTNETQVSIAQSSTYQADTGFYEPTQCSRSRDDHRLDDRPALLQMDCGMRIHSGPYQGPLRCTSDALKNSASESQGSVSSSATFDKFRRADT

SEQ ID NO: 992731 - protein, 589 aa, Homo sapiens
MCSYHTFTQQIQTQKHHVAHVAGQYISHTHLLPRIDNTRWGVFAREQHSHMGPRWDHPHGGTSCCGYISAAHAGRHISFEESCVIYNTGAHIRGVVYISSPPVDTPLKENISHTLYVREICEANNHTHVFDDESRKRQKHNGARMTRSVLAHHTKHHNTDKRRHPVGVRSCTTNMLSDDDHAAQRGGDAPNYSTNNPNRDGSKMATGQPHSASSYSSTTYRAQIERPHAPNNIWRGTQTAAGDNTPLILHQPNTTDRTQTNYGRRAETTRAANNKDGNENTPHRQRRSGGTPTAAVTKNRATILNHDREHTQALGVPPPTRGGGAPPHKIREETTAPRDVRRRQPPIEPPAWSTTGQPNYTQHRLRTARHSMAATTTTRVAHTTDSRGTTTHYEMMKESSETPHHYQTHGETGDGDPKTMEDDRRRHTRSIRQRRNTIQNDQQREGGNPHSNSTRYRRGRNYELGGYNPNKTRSTANSHSRAGRSRTDIIETRPDARRSRRHKYRHHIYLTGAAAAHIKTLSTAQHHDRPTDTDRQPSRPSPASISKRYVIARTIIRRPTNKLPNAIQDNKHDKTKPRRTLSDHKDTQQ

SEQ ID NO: 992732 - protein, 216 aa, Homo sapiens
RDAWVDPRVRAWGLVLCLVPPAAPCRLPWTLLPLPGAAGGEMPLTSPVTACPACAMVCSLACGCCSAALCLLASWPLVARAGYSEERCSWRGSGLTQEPWQRGAAGPGLCWRARLSGCTLAGALLPDPGRARSQSAAGIACLRPVRPFAGAQVFAELRSGGALELLLAEGPGPAGVPVAVRWGPTRAAGPYYLQGTPKPGHSDSRVDSFRFELARG

SEQ ID NO: 992733 - protein, 88 aa, Homo sapiens
VAYGGTVLMSIDAFRYGCLTQGGPYLYTLKSERRRHYRESSESDIRYVGVIRVQLRLVLFTVHRDVGGWYRNNQEILRLEQQIFVCRP

SEQ ID NO: 992734 - protein, 120 aa, Homo sapiens
QELVILHHLDQPIGSYFSRSRAVDESGDIVATCSLLVPGMTKGLTMLHWWDSSTGGEPFGGTVLAKGWLQNEASVYSDIDLKKLAEMRRANPRILRQNADQTSSAVEMKKALKFMYLMCH

SEQ ID NO: 992735 - protein, 493 aa, Homo sapiens
MTNSIETENQRDSKRTTRGPSDNSEKSPRGAEQRGETESGTDTKNDREMTSNADRTDATEQDRTPKKQKPRERRNSTKERHNEEKVNKKEEAQHDREEKQERKDKSTTQEQTSTDPGGQRHNRSENEKLENGGHMMYGDHAQGSNHGEEIEYNDAGQDTRGPITIEEEGTQARSPEHRTSRIVSQHDNRENTVDRGRNEESEVQRVVRGREREIRTYDRENRRERQQEQLDIVRETAEAPGRGQREHTNNEQNDARRDDKETWRDTSNRSERARSKGQQRRHSNRTDTQATPNEIEHKKHTMERSRYPQNRKPTKHRNKRAQARRQEHNTTKRELQKKRPRVEKNYTRMEHNKIVRTKRREDAEKNKKPTQKQHRAKRTTRKNTRKAEKEDEGRRAEREQTRTNKGARERRESSDKTAEIDPQAEMHEQTRRNTSRAYKATTKSKSEDKKTGGNIDKRLRQEQETECKRAEKTDRREERRKRDRNTDVAHTSK

SEQ ID NO: 992736 - protein, 548 aa, Homo sapiens
  misc_feature (191)..(191): Xaa can be any naturally occurring amino acid
RTRGLENDVQKWAPRKGKEEEGMKRVIETIGPQDELKETNGNSDGLLNIIVLVLSTDHLVGPIVMVTRYLDKESRSAAVTWLGMDWLRGRADDSEVLHHECLLMSDSTAGMCAAARLTMVRMGICTGPYQHQISLGPNSVRTDMARTISLVDTLRRPLDSRSLHGGLFGPVSEVNDRIRAGKLTGMSSPLXYPARVNQPTSAEEAGRVEHSSESARSLREARQLPPRIYIPCCQIRLDRFHVRDLGKARIHREIHTQGGCARAELTKERKRTPTPEGGGTPKGARAAGKTPQGHLPVCPKNRGAPPTRWGKLGDPIKVKKGQESGHASGSTDNGSGEQRGVTNGGKHVGRTTYGEKKGKPPYTCPSRRGATHNTLGDVRHTPPSSEQILQEPRLGGRKLEKASKKGGSTHRRLLKQVKRRQTIILAHTRRKLWVFTTQTTTTIGPNSNYTEQTRRESHNNTRRTNELAKRRQTQRRNKTSGRGRNHTKDSDKAKRRRAGEERHTTKQTQDQHNRTREKLETRQQETAHDGQKRGHEHNSPRDAQAKRE

SEQ ID NO: 992737 - protein, 247 aa, Homo sapiens
MGVDRTQFSAGAEVRGNHGEYVEYPQWDKVTSIESVLQANVVPFSVSLRDLEKDVQWPFSDIEGGAHFCESASLRGAIGIVDIPSWATIDIPSFKRGATIKGQSGSSKDIKISAGLKKSILVLKIAYTGVDAPWTRTLKHSSEGWQRTRWNFGTLGSKGWTRVMGPPKISGEVLATRHQARDTPEGNPQRAGKGIEHGQMRDLGRTGQENETLNRMPYRREIQGDRAAKQGENIKGGARQQKVGEHT

SEQ ID NO: 992738 - protein, 225 aa, Homo sapiens
MSKADAVWKHRTPFGMNAFLAEDIFPTCGIGLTPGVHSPIGIYFSFVGSRNNSWGGPDMGANYSWGAQQCVEKRTTVDIVVVGTKHNTRVTSTDYYGRKKVGRWNPSKNYRECSGVETKGGPKCGGSSPPGVATHAGEVFPPEKNGETCNDVAPLRRKGGRRQPRDGSHNTTGQLMRRHKKTNDTRHIAMKQQRGGPQQTAKVNNKRAEKIHRTRIDRYNMNTHN

SEQ ID NO: 992739 - protein, 217 aa, Homo sapiens
GGFQNRVGVQRWSEATTDEVFNVQSECGGYYAMNQYGGNNRTGNNIQLLTYQRLATTGAPQQIMLAMLLLGHPTTSSHHPFSAPVTTLSYMACIENPPRGHAPTIITVTFPVLNAPNILATPTVKHATALHSRCYSLSTLTNHGEGYIQGLHSPTVSISTNICLSTSVELIVRITMPRPPYYYRSQRLEIDFSDLTEVLVDFPKVLYTLYSGKKAYE

SEQ ID NO: 992740 - protein, 107 aa, Homo sapiens
MDQGRGAAQMDLILGWLRQEKQCERGITDINQKLLTHIILGYGRSRHSVTRERQQIAEIDKQTTETFQTDWQTTDSHCLNKAMRRMKIITSIQGMGTMETQSFLIQD

SEQ ID NO: 992741 - protein, 136 aa, Homo sapiens
RVGWRCISEMKFAMRWYNRCDSGNSGAAREHCGSPKRNYWRKCMMKNYTILKGVTDNIHDQERDSGAEMKRLNELERSLAGSQDNQFRWSQYSKSRVCNRPYGGHKGWQLLPPRQAASRRLKLNYMQVQMHEHKTS

SEQ ID NO: 992742 - protein, 58 aa, Homo sapiens
MGLHRTQQITVPKGLPHATYKQAEISMCDPLSRHLVHNYKTHFGDTKCGQCHLGSRTI

SEQ ID NO: 992743 - protein, 257 aa, Homo sapiens
TEDPGVAMGRCPGRCYRCMVRTSRTQSLAICRGVPDAKDSAFLRLGSEKQCKKWMSFRLCGHMVSDEYEQLSSEALVGCAEIMLAKEVTVVKSCGKDGFHIRVRLHRFHVIRINKMYPVLGLTGLQTGMRGAFGKSQALWPGFQLYGPSYQCRIRTKLQEQGACGLRPCAGPQFKFPGRQKMHISTEVGLHPEFNACMNLRDMVAEKRLIPDGVGSSASPSAWPLGRVAGRISCTAAKCCCPLFILMHSCYCGSKKK

SEQ ID NO: 992744 - protein, 252 aa, Homo sapiens
GGHLSDLYSRGCQQDSTAKLWLLEEADAIFLGLALWLVCYCWLQPTLLLWRPNPEQSGQDPESTYLSRGIQLPQTLLYVTEPLIPKVKADGVASPVEGTKVNGVLLKAVIMTQAQREDARVTCWAGRQARGVNPKRIGVCGSPLHLQQRVGDAFCWGRGIHGYGAEVGAPGTAFREFTVNTMRRASALQDQTSPNYVQKTLLGRKRRTTLYFYPACAPVLAVCPKRFSSLPGHSKMIGIGGFPTPLGCPNLG

SEQ ID NO: 992745 - protein, 342 aa, Homo sapiens
MEAQLCVVYGQCVMCWWNNSLQYPLSFVAHVDLGSALTVDRLNDKSLGSIETEDMGDEEVAPGVMCARGLVPTESENLYARHNIIPALQLFYNYSCRTMVHADRGKWWNLIASCPCISRLNQSVCEHLHVYPSVACRLGFASYEALVPLLETETTSLYGWQEAPRHSVYHSPEPGPMFPNAESADIRSVEPLKTEQFGIILAIVELERPSGLLALWAAPPLLRYLTRLADLELGEGIGRNHRHAGPRRRNAQSNAYMTGIGMGPSKLQARDAPDPQVQTEVRWPPCPRDQRGSLNPITGRNVNPEKEITGFYLEEREHDARTHSRGDKQHTTQEVHKRTKGH

SEQ ID NO: 992746 - protein, 337 aa, Homo sapiens
QRFWAMEDSAVEEPVPEVVPVQLETAKSPISRLEKLSDCLFEPEGNVCWLTDSTVEEHVLALVVDYVSCLKLGDRDQHGSLRRAGKDGGLVVTEGNVRIRRRPCLVAGVAQYGRRRTLMRRMTHPVDLSSVSSALLAGFTHRWSSRDEQKKQDVTLSLQCHYVRFSMQNNSVFGDLKSDEMELSLLSLRKIKTGAAVCAEPARAVCEGCCELQKKSGGTSSWTQIDRRGTPLGGSSHWNRQKLVPMTASDEAMVGKAYEKEHPWSGVKWMKPIRISWIAGSSREGKARRTGIPVWRSWGPPTGPAHYISFPETRAFLEAPISTRTHYLGKPPFACML

SEQ ID NO: 992747 - protein, 108 aa, Homo sapiens
TPLTGHAETNSELREMLPTDLRIDVGAYSLTSFKELGEDSGQNDLWMEKRQLASGEDDDDEDYQSTMLEEVSLLERYPSNEVHIAASWMYILSRRIRDHEESITREAG

SEQ ID NO: 992748 - protein, 234 aa, Homo sapiens
ENQELANSRMAQTVMKLQASNFRGLCGPMSASEVALRSLPEEVVRETGEYRMSAEAQFSLLYNDVSVEVKTQLERGSGPAACATIYVISRIGCEHYSSHMWIELSRDWGLQEVSYRQPEVISGWRHNAGPAYDKDVSACLRIEFEQESGRCQTDAWPGAHSKLVDDAPPDSVVFKIATETTMLKRVIAQRIHAETFEKYKLRFGKLRAQATGICPIPPRKLGSLEDSGSQWPEP

SEQ ID NO: 992749 - protein, 193 aa, Homo sapiens
LPATCETIYRARHQGESVLRCPGLRAGDGPPTHPPLASGEETSICPLAMSSALGNERFPVFVGACSSLSIPWSSVICAGIPLMTSLQLPSLIGVMVNHSATYDHVSANQRVSVVAEAKPSGIRGICLSRMEECETHRPWRLSIGSEDQGSIGYTLHVGVKSNIRACCGSVLRVSNRLAPQRAPTLTQAEDSGD

SEQ ID NO: 992750 - protein, 293 aa, Homo sapiens
  misc_feature (251)..(251): Xaa can be any naturally occurring amino acid
MVNALPFSVTALYRRGGLTGGSPPLGGVWPETLRFVGARYTRPAIAPTSFEGGCPLCGFHCRCNPPPWRVPSVVLMVAPRISRSHCKAPCRRGAPFPFPTAFPHQRGGPLSEVRDTVRALGLDDTSTAESNAVGGYLLSFSKHVSGTLVTIHGYSCSPHERIKPTFTILVATLYENTSVVCIHPSGRNNGGREHTTQRGGALPTPREPRKTPAANCPPDTYTPCPPRGGSPRVLDHDATARPDAPQQTQWXPPHEPYSADIPTHVGATRAGLQTTRTPTPDTPQPPDRTTPIP

SEQ ID NO: 992751 - protein, 153 aa, Homo sapiens
MCFGSEHPNAKHVVVLLNYPRNRAKGRPKRAWDIVPLKKGFLKPHMWALVPGGTPFFTPMCARNLHHKTSSNRNFLGGQLSPHALSSPHDTAEIHSFFSFTGSQPNILGFGTCVRPPVSGQLPINRGGLLTPGGLILGPGRLVPGINSPLDAS

SEQ ID NO: 992752 - protein, 400 aa, Homo sapiens
AGRQLAAAGSSRGALRLAVQGGHGIALQEQCRESQVANAGRRALCVGYLRILVIVTPGERRKQEMLKEMPLQDPRTQGGGLAQDPGIVLREPTLSARTSRARRRNVGLGGQNWTVLASEWRVPAGGHRETGFASDGRRTLDWAQESEAAFLLRGPSRRVRTEIAMPGLSWGPVSYPSGEHVSPKPGMTAEGPQGEAGPRREIGCGELKETINSCALQPEVSPAGRDHNNGVRERDGPERGARTGAVDRSEAQQKRMIRMGIVAKYGRSNERERNTGPRSEIRTENTTHDTAREQESRTQNTNQKPRSDEPDNEVEREEQRRKGKNNKRTERKREEKTDTHRNKKGMKNERKRRARKETGTENETRRIVEKERRREREDRRRKKREKRREKEKKEKETGRA

SEQ ID NO: 992753 - protein, 318 aa, Homo sapiens
MTESSSNSNTIIYMLSPPQKKKQRLGESDTEPSEYRSRWSHTTNLVIRESGELEFDPGAPGKWPWLVCLRRFNSVDTGRLPLRRNSHLEESITSTEESSEENVNFLGQTEAQYHLMLQHPGCSCVSSPSAGVCISQRETSGAGSMWTESACPIMYGQLLQTKIFQELVEGVFYIPNMGIVHRDLKPRKLFDFMARDQKEKEETIGQACTGHLQKEHRLDQTESGERTQATYVQSEDMSERYHRTGGATEYYAQTDMVRSGEGRQEKAARTNNEAPTVQQLKLAEDDRTQQGRPAHNRNRSTSKPYRGENTGKTHAKTT

SEQ ID NO: 992754 - protein, 427 aa, Homo sapiens
MRFKNTERRHTKTTDQWHEQQRRSRSTGHRHKQTTTETNRRKNNQKQHRQRKQHKRRQIHHEKKSNKKSETQRNKRHSEREEKEYKHDKRPNKNTDTYKRITQRQQDRKKRGQKDKRRKQTDREQEKKERKETGKTETKEKDTAKQEKRKEKAEKKEEKKSRREKKKGRRTRKRKTRKEEKGKKEREENRREQKTKKRENEKKERTERKDRETEKKKKRPESKRDSTEGEAERREREKTRKEHTRENKRRSKDEEREQARREDEEKEGKSEKARGDGKHQQEQPGKKQREKEGGREQVRGERQRARRQARRGDEREEQRTEREKKKRRKEKGRRRTRREQRTKEKQKKEKREQDEREGKTKRGQKRQRQGDTDKRREEGEEQNRGGREEKEVKRRSAGNGGRRRKRAEREEEKKRKKRREGGQGPDG

SEQ ID NO: 992755 - protein, 348 aa, Homo sapiens
NLEVEKYIVHKEFDDDTYDNDIALLQLKIGFVPLLPRRAAWCALCAFPRWTLQLSDWTECELSGYGKHEAFVLLSISVAVLKGGHMFRAVPIQAVWHIRQHLLNRNQSTDRTCCVLETLRRRRAPGQTCHDDLPRRLREGPLVCLEAMGRMTLVGIISWGLGCGQRDVPGVYTMRLPNYLERGFCDNMLTVSQESTRLLKSNEIPPLLSSEDHCTLAQVLLYWFLQTHKRKKRDENLRETEECISQILPFGSFRTRSDSGYSVGGESDAMALKNALPGRNGLHLLSKANSDVRTVEQDQKRVKEKTTWERGNKNLSKHAQGEEGIKSEIHREGEDTKERIHSYKSSGP

SEQ ID NO: 992756 - protein, 86 aa, Homo sapiens
QSENEPTVSDPSLVAVRVTSLRRYETIRNVSLTAQVLQGSPAQCPRHEQRDMRGGEFIHESHKHPQGDGREQISAIRGEYLRKVGQ

SEQ ID NO: 992757 - protein, 67 aa, Homo sapiens
GRVGDPLRPKYSQMGQTALLVSGIPKARSLVSALWEKLPLSSFGPRARYSGSSSKGPRSHFGYRCVC

SEQ ID NO: 992758 - protein, 69 aa, Homo sapiens
EKKEQWYVPKRAARTCSPIRCTKLCPMRAQGQGQLRKFVIRNIVEAAVSQGTFLKRASFDAYDASRSCM

SEQ ID NO: 992759 - protein, 114 aa, Homo sapiens
  misc_feature (91)..(91): Xaa can be any naturally occurring amino acid
MSEDLVLVLRDFWDSFLASLSTEDGAPKDGKGDMSCSAFVSRRFVLVVRFSRLLTAPVYSQPGQLPFFGKVLRVTVEAGDGRTGGRRTGSXYWSEGAEAKKTVRDHVLNGISKV

SEQ ID NO: 992760 - protein, 259 aa, Homo sapiens
HASGRAAGGDGVAAAARVGTGDPVHVMQTHAERPVPTLCLPERRAAVRCHSSLRAPIGCSVVLEGPRASPAAPCVLLWVTWAWHAPCGWALGSRRGDCTIDAAHSCPDECPAQPCAAATFSATTTYDGDSSPDGQTVRLTAGVIPPAIQCVHLDVLLMDIGNSEDQVQIHTYFKPPSCPRTIQVSDYEVHYNGTYLDGTLLDSSHNRMKTYDTYVENWWVIPGMDKGLLGMCVGEKGIITITLFWRMERMENGKKFRSG

SEQ ID NO: 992761 - protein, 554 aa, Homo sapiens
SKKPKKKEKKHKEKERDKEKKKEKEKKAEDLDFWLSTTHRRGDSPEQPRKQTKSDYENDNTRTERTSKGESATTRKQQKQRKQHYHSKYRTSTQIQTRHADNTTGTKHTQVRGQNNNRTAQHNKNTEKDNERNTHANHQTKNTTRTHKQKQKEHDRGREEKRQQKTRATETDKHREERKAQRGEDRRKNRGAQMTRARSADDDNSRRQRGSRARTDERYEGRQAQDTQNTESKNNNRQKAKENERTEAKDRQQQKEKTSSEAQTRKQKTTHRTRHRRTARPEYNNHQKRKQERDRQPPDGSPRKRQSDDADTPKQHEERPQQNERRHTRTDTNDEQQRRDRRAKTNKQETTHRKKEEEEGGEEDGRKGRRRSERKRDSKKGRKSERSQQETGTDERKERRRRRTERETRSKRRRSAEQAAASTDSATGGGNAEGRDADETRRKEAKRKQVTSQEHRQQEKRAKQQKREQSEEREREREHSTRAKGRQIDGESKLRKQEQDRERRQDKYERLTHAGDENNPDRGRQEQGPTNERGATRAKRDSRRTDAKKTKAKT

SEQ ID NO: 992762 - protein, 299 aa, Homo sapiens
MDTTSRPYRAITDITTARAEYPTLTPTYTITHATDTPTLTRRPLILGTTPLHQLGLHTLLCPQPTALSTKQLNQDHQLTQATPKQTPNKTRKPPTVQPITTIRETTYSTKSRTTTNITSERYATITAIQTHHSTQITYQAQMNQVDQASDTRLRIAPLRCNNQQTMSEDNETPLATFTTTSAKTCNTIHNSVDQHSMNTNAHTNIRSTHSQLTKCRYNPLGTIHISLPCNTRAHTTSATTTTEQSTKSQQHHPKMQHPSAHNHISTANTSNTHDTHTYPKKTPIQTTYLPHYPNTHNHQ

SEQ ID NO: 992763 - protein, 244 aa, Homo sapiens
KWRMTPVQRGGARGPWWPCGWVNRRVDFLLAWFRAVASGGRGSRPWTGPGAEAAELAEARPRVKEWMPVTKLGRLVKDDARSSPWRRSISFSLPIKAYREISVISILAGLSSTADDGFANDLLPTCRKQTPLPGPRRTQVSRAYCVLIRGLTNARTYGSLGVKVASKGRLAPPTIPWGPSSLCQATRIGPPLRRGLLGGNKIRQATTLFPFAQVTWPACVTPVHGYASFPCTPGALGIVSAPCA

SEQ ID NO: 992764 - protein, 325 aa, Homo sapiens
  misc_feature (111)..(111): Xaa can be any naturally occurring amino acid
MARAGPRYWSEVSVDSRQIRRETAPGISVSQAGFMDHHFVETSLGRSTDERSVTRTNGDRIHTETYRLDYGFLDPFRVPLQQGHNTASQGKWSECTPHGAESCDPEIGARXMTDIASLTDGKHVTDDRGSRCSSWRYHRCDPTEDDFTLGSKSPRTTSSFSNTFAQGFPRRYGGLIIRPSRVFANAQAKAYSAAPTRKFTRTRCHGPHGNNGEPTWIGAAIRAPMAAAAALQRKLPRLSSPVLGLCPTHEIPILLADFLLASGEIGHASIPRGIESLPLTEPILPAGDITLHCEARPGICADTEDPSWVNHVAFSNPLWCTKRSQ

SEQ ID NO: 992765 - protein, 281 aa, Homo sapiens
MKRSCLRSPLGRLQQGVWLDLTCIIFSTFFLEVKSRNEGMAHGGVDGYSQDIGEVKRGFPGCPGKSRMVLTSPLLCTGRNGNLCQGIATDDPPYQTIPVHWKVVSGGTIPGNRNWYGQKKGELVGGRTPPNVIPGLLADQEFPTHGGYNGLRGHQRPSCKSLRKHVETPTKKARNPGEPRRDTQPGRTRVPPSRDMVLKHTRAQQERGPHMDSARSKKDAQKPTYERSIQTKKPENTTRRGEESVRSKSGHIRQKTDDEYAHEQLLTEKKENDATQRGALS

SEQ ID NO: 992766 - protein, 148 aa, Homo sapiens
  misc_feature (74)..(74): Xaa can be any naturally occurring amino acid
  misc_feature (82)..(82): Xaa can be any naturally occurring amino acid
MFCILEFLYTGLDCRVVTGAGVVSYTSVTVVHCEGEHRLQSPSGEVNTCRTYKKINCFICHPECASVCTLDSGXHDLHLQRXDWRSLVNMGGVIRASHLLTPNSFVHGSRYTYLRVVYILLKSAQCIEPIRVSLGEGTEAGEPKTEQL

SEQ ID NO: 992767 - protein, 342 aa, Homo sapiens
MRKLFEKYGIGRAKFLFIRIQRIWRLSALEIPRTLAEIAKVELDNDATPWEKAGWRVRFAVRIRASLTVRNLPQYVSRANCWTESLCMCVAQVERAVSLSVDDRGKVLWKKGIVEFLREASMLGKLWTDAVRGLPSHGVTDISLVLLTVEPYGPGYMMKRDFQISGFKIASNVTWNDEHADPDLHSLGSFEYDYAMRWKDSFEMEKQQQDQVGRKDEEAREKLEMEMELRDEHQVMVNEKDLMEGPRRNFGRCRAAIQRVHKGRPLGAREAETDSARKECGGRDMLGPRTVRTSARKRAPGHAGGRRNKNPSVRPPRAQRRSDHTLRRGAATDDQNVTPIPD

SEQ ID NO: 992768 - protein, 99 aa, Homo sapiens
RPKPSRSGTMLLPNDPAHRYIRGVGKNAHLAKNLRQNQVLNIHLTVGDFELEKSDQSDIMDVLASTASPKKQCPERMQQMMAQILKDMGITEYEPMSYR

SEQ ID NO: 992769 - protein, 343 aa, Homo sapiens
PEPELSPSREGSEARAGPLAPAPPGSHSTPGPSQSSPHRAARESMEMRICAAEVLGSPPRPGGAALKPLVLLSGRGADPGSWRWCTHGVCMEMNELLRPMPERGKVHHWLAQRPSAAPTYVIVDFLTHRWVPNCKLPRGRLGLVIPCTVRESCLGHMSSALGAWCCAGRCHSFAATLSDGGHRFEYVATLTAEGYCCLRRPIWHYLESESGAVLKRGPVYPLWDYARARGASLAVREGTWSPCLRNGRARGKTSAVGRLFPGRGGHRCRRNSLGLSPGGYPKDRVPRIGGLRPERATAHNVPVGYDCTVEFAAILCAAGPLAPSDGMRTQDRLTNPEAIFVAK

SEQ ID NO: 992770 - protein, 281 aa, Homo sapiens
GFQEFSKRWSMAFPVSSIFLCILVLPPISSLWVRGRSDGGRAATLPLPVCLYCGLNPEQIIATPIPYLGMCEPFSLHFIPLCLCTCIIYIHIIYTTIQTLYKEGNASSLMADCCPLCECRDLVSVVSDNFSLAQLMMFYGYKTLVTSQKYNKSFHQKRMKSCRRYGHSSPGVTYYLLITALSLAMAGAPPTLEDPYTSAIRACPGLLIAPTRRLDMDPGVVLPTGMTHRPLGGLAHTRLASPHGGLIDLWGLISPPRARHARSPGHCSWSVQPIRSRSSYE

SEQ ID NO: 992771 - protein, 353 aa, Homo sapiens
MSLEDPFFVVRGEVQKAVNTARGLYQRWCELLQESAAVGREELDWTTNAAAEWPAQHSSWDLEDLEETTRYQWNANPGKFKLPAGDLQDRKVFVERMREAVQRNEATILRQPKQPLPSFAQTELTRETSSQGKPAAPEAHPSDLLDASSSSRAHISPTSHGSSQATQQLHHGMTQASNSWRTGLSGTHPGSEAHVRPRWSTQPGRSQGIMLRCLRPSRWTTPSLAWTAVSGKLAKVFHNDELTADSGCAIAEPAGVPPSISLYHLSLNPALPGQAGPHKPGKHQSTLGPSLPPKREEGPHAHTANDEGPQGETPEPSPNHAGTRNTAQNTQRAQRQSVDEAEHEHRPSQTPVD

SEQ ID NO: 992772 - protein, 112 aa, Homo sapiens
MPIWLQVATDAAELACSPKTPGSGVVMLSRAVLNRVAQSMLSYPWHSYWLPCRDEFDGRRTGVPGDGPVSPFPLRPCGSRKPCRCFLSGRPPVFLFRVGARGPSVGELLQGA

SEQ ID NO: 992773 - protein, 224 aa, Homo sapiens
MSISRTRKAEEPLNVDLCDRILRSLTGLNRALAFYSSAAGGDDGGAARTTTGLDKRTGKDKMQLANETHLTSPSPQAQVGVKLLLPSPIQSLDRRHRPSETEERNLEGALEECETGRKREPAQQIQGIPATGWQSVSDGSTERRSGVLGPVTAGLSISTLRNRFLLWAQRPAGRQTYTRYQTLELDQGVHYNRYLNGGGGASEIAHALCLTGEADPDMGPEPDA

SEQ ID NO: 992774 - protein, 228 aa, Homo sapiens
LRLDLAGAGPDYDYLMTILTELGYSFTTTADRIIVREIKEKLCYVALNFEQEMATAASTSSLETELRAAWRPWSVNTFGNCCGFLLPMRHLFHYFLFTGALDVLWHPQKLPSTPIMKCDVDDLGTVRTVYVHIGQVLSGGTTQCTLGNCRQCMQHAASLPMDTLAAMKDQGSLLLLHATKYSADGIGALHPVPRPVPPSSGCGSASKEYDESGPSIRPPHMLLVRTMT

SEQ ID NO: 992775 - protein, 144 aa, Homo sapiens
MGRIVPHAQTVAADPLERAGPITSAHVRTPGEAKETARQAATENTRGPTNTAGTPKTAKDGNRAHNTRHEQKTQRGKETTTDETINKQHQRATPPGDKNTRGRQTAHAAGDTQHATHSTAARTTQGECRQGRGPHGQQEQDRNA

SEQ ID NO: 992776 - protein, 316 aa, Homo sapiens
ESLPEAVRNVPGMHPKTCPVVLPPETRPSQAGLGPPSSPAPITEGYQSLSDRPPGSRVFTESEMRPLRHRNVATRVVGGVPRWCPRTRAPGLVRRSCVLWVVWELTSRCRTAAPGFQGAVNALVRVVNWYLPPPLLRLSLVTRTVGARSLGRPWVTKLVTDCSSSCKCKRTSLLPIPDNTEISSMEPSTVLVQYMGACPRLVRTVLLYVSRSPFVLHPSSPCVHLNETGEIGMALSDTGAPVHGAPMCAGAVIPLGLLGPRWAPHHVGFLPSDYSVAPVGLVTGDFGPWVAWFPWRYPMFWSAVPPRALVLPGHTV

SEQ ID NO: 992777 - protein, 73 aa, Homo sapiens
PGTRNPDLSPTRTPAPDSTAGPGIRPSPDLDQTDHGRTLINYADLFLRQLPSEWRPEMFYENKPTISMRYEIS

SEQ ID NO: 992778 - protein, 238 aa, Homo sapiens
DAWVHAVSCCANSGWKDLGVLVSFIHREEYSLYLIPFDGDLLSMESEGAFKECYLEGDQTSLYHCSQGGLMTLQALYGTIPQSLCGNSENALGTVANMHDRGGRESLHGSQNSISPVLDNLLLLDRNVDFITRPRVPAQADIWNGLIDDKFLASRTVYGEHYLQQKFAPIGNQGDGGQGPPRRKQHEAAAEFVQRSSMLRIPMMMNLQAAVGRLGAQAQKRNRSILWSAFDGKGGTMA

SEQ ID NO: 992779 - protein, 288 aa, Homo sapiens
MRRLSPSRVGMIRSADGSSRVREILAWRPHAGPCRPSAEKCAATGFVTRPGMLLRSVTVSTVTKTNGNEGTDDSLAARDADIPFSRCRSKLNLCHTCQHLLPISGGKGDEHERIPGGGLTCVYCHGYVGPKGVPKARGHKKAEKGRRMVHNGQRCGETGSLGPLGDETFSQAGEKCGGTPSSNLTVGENNDRGAYGGGAPQRQLVGANEGICPPDVFFRVRHAAREGTMTKDNDEYRDKRASEYTHPTNRESDAEQQRQNYAEDDIEDKEQERANSTRARRITRLPEA

SEQ ID NO: 992780 - protein, 269 aa, Homo sapiens
MDNYADLSDTELTTLLRRYNIPHGPVVGSICVVLYEKKIFGDDEDTRRAADFSCTAQTLSAVSIVHSHSLNVDVRCERGMLMCMYPSRVKDDGFESDSEVKGFTMIGHTNGSRSLLLATQRAYGEHRGSSRAVPGAECSASSDDVHFRRIVGSEYYSYNSGCMIEDSRVFFLKERGCWRYLETLHVRHGDSAYLEHSRTEPPVSRSPGSSAWTLSYYAIPPAPLFIVAPRLIFCFMVTQLLRFRLKSRVPGGWAWAQNRRSRSWGASVF

SEQ ID NO: 992781 - protein, 105 aa, Homo sapiens
GRVGRPRVRDNCSGGDDDWRPSVFKMKWTRLQVNSSALQMSESERAKLSGPLPGGTHRAEGSCLVPPHLPAQRLEPRLIESLSQIAVHWASLMKAGWLTRLLHDQ

SEQ ID NO: 992782 - protein, 33 aa, Homo sapiens
AAAYYYYCSEFKLLTMYGDMHMIKNIKKKVVLH

SEQ ID NO: 992783 - protein, 31 aa, Homo sapiens
AAAYYYYCSEFKLLTMYGDMEIKHPHCPGPL

SEQ ID NO: 992784 - protein, 30 aa, Homo sapiens
AAAYYYYCSEFKLLTMYGDMLIKKIIKKLY

SEQ ID NO: 992785 - protein, 87 aa, Homo sapiens
  misc_feature (33)..(33): Xaa can be any naturally occurring amino acid
  misc_feature (36)..(36): Xaa can be any naturally occurring amino acid
YYYIRGRVDQNLSDVFDWFSQMYGYEESNSSNXKGXGARGLVVVHKSERHGGEPTSKITDFLHYKHIVLTTSKSHSKLNIRRRTLRV

SEQ ID NO: 992786 - protein, 39 aa, Homo sapiens
AYYYYCSEFKLLTMYGDMTLVKRCLSVELTLCIELEVLK

SEQ ID NO: 992787 - protein, 39 aa, Homo sapiens
AAAYYYYCSFKLLTMYGDMQVYKHTDFWPGDQAGDQTNC

SEQ ID NO: 992788 - protein, 38 aa, Homo sapiens
GFAGAVQLGLIGTAEDLEKALELTGLKVFGNEIKLEKK

SEQ ID NO: 992789 - protein, 51 aa, Homo sapiens
AAAYYYYCSEFKLLTMYGDMEVPGSSKGPLPLLLPPKWLGLYINKNKAVRK

SEQ ID NO: 992790 - protein, 34 aa, Homo sapiens
GAAYYYYYCSEFKLLTMYGDMEIKHISLPWAPAK

SEQ ID NO: 992791 - protein, 46 aa, Homo sapiens
AAAYYYYYCSEFKLLTMYGDMRKAAIKKDEPLPCPLPEIKNSLTEK

SEQ ID NO: 992792 - protein, 48 aa, Homo sapiens
GFAGAVQLGLIGTRIRASNSRLEFEVQNTPLGCLLRNLPTLQLDQDLK

SEQ ID NO: 992793 - protein, 39 aa, Homo sapiens
AAYYYYYCSEFKLLTMYGDMMGRVCKSFKIKSNDLETAK

SEQ ID NO: 992794 - protein, 33 aa, Homo sapiens
AAAYYYYCCSEFKLLTMYGDMLIQECKKKKLYC

SEQ ID NO: 992795 - protein, 58 aa, Homo sapiens
MDLLVQYNRLNRDMWRRLQEARIAPLRSTLGDRARICLKEREKEREGEEGERKEKEKE

SEQ ID NO: 992796 - protein, 32 aa, Homo sapiens
AAAYYYYCSEFKLLTMYGDMLKKKIIEKVVLH

SEQ ID NO: 992797 - protein, 34 aa, Homo sapiens
AYYYYCRIQAFNDVTGTWYVFSSMSEQLNRFISK

SEQ ID NO: 992798 - protein, 31 aa, Homo sapiens
AAYYYYCSEFKLLTMYGDMLIRKRIEKKKLY

SEQ ID NO: 992799 - protein, 48 aa, Homo sapiens
AAAYYYYCSEFKLLTMYGDMIVPLHISLSDRERPCLKKKERKREEREK

SEQ ID NO: 992800 - protein, 97 aa, Homo sapiens
  misc_feature (83)..(83): Xaa can be any naturally occurring amino acid
YMFHGGTNFGFINGAMHFGDYKADVTSYDYDAILTEAGDYTAKYTKLRELFGTFSRYKQGTDSSIHLGSCFCYEPLEFLLSSXYPTSTLANPYSRMS

SEQ ID NO: 992801 - protein, 30 aa, Homo sapiens
  misc_feature (30)..(30): Xaa can be any naturally occurring amino acid
AAAYYYYCSEFKLLTMYGDMEGVSYFANYX

SEQ ID NO: 992802 - protein, 40 aa, Homo sapiens
AAAYYYYCSNSSFYDVRGHASRINHRYLFSNKIFKLCTVK

SEQ ID NO: 992803 - protein, 33 aa, Homo sapiens
AADYYYYYCSEFKLLTMYGDMLPQSCKKKKVVL

SEQ ID NO: 992804 - protein, 32 aa, Homo sapiens
MDLLVQYNRLNRDMSLHSSLGDRVRLQLKKKK

SEQ ID NO: 992805 - protein, 73 aa, Homo sapiens
AAAYYYYCSEFKLLTMYGDMKTVAGRCLDVQYNLRCNGKVRIRRLKEMKDQETLLYSKRHDWSIINGIMYVTK

SEQ ID NO: 992806 - protein, 46 aa, Homo sapiens
  misc_feature (21)..(21): Xaa can be any naturally occurring amino acid
LLLEFKLLTMYGDMPLPISWXTERESILRKKRGNAKLFSRDLKVFE

SEQ ID NO: 992807 - protein, 38 aa, Homo sapiens
AAAYYYYCTEFKLLTMYGDMANYRKPKKGEKSKKKKLY

SEQ ID NO: 992808 - protein, 39 aa, Homo sapiens
AAAYYYYCSEFKLLTMYGDMFLVLEYRRCSIKVDVRMAI

SEQ ID NO: 992809 - protein, 38 aa, Homo sapiens
AAVYYYYCSEFKLLTMYGDMKIPAQFNAFWLPGDDWAP

SEQ ID NO: 992810 - protein, 60 aa, Homo sapiens
  misc_feature (31)..(31): Xaa can be any naturally occurring amino acid
  misc_feature (36)..(36): Xaa can be any naturally occurring amino acid
  misc_feature (39)..(39): Xaa can be any naturally occurring amino acid
  misc_feature (45)..(45): Xaa can be any naturally occurring amino acid
AAAYYYYYCSEFKLLTMYGDMEGGQGDTLSXGLNWXSQXVQIEIXLCQEEVNEIKDCFKD

SEQ ID NO: 992811 - protein, 34 aa, Homo sapiens
AAAYYYYYCSEFKLLTMYGDMAPNKGSCLCSLLK

SEQ ID NO: 992812 - protein, 32 aa, Homo sapiens
AYYYYYCSEFKLLTMYGDMEIKYIRCPGPLRK

SEQ ID NO: 992813 - protein, 57 aa, Homo sapiens
  misc_feature (53)..(53): Xaa can be any naturally occurring amino acid
AAAYYYYCSEFKLLTMYGDMRITSNSSEPDLYKSEMEVQDAELKALLQKFCKXEKPK

SEQ ID NO: 992814 - protein, 45 aa, Homo sapiens
AAAYYYYCSEFKLLTMYGDMCNKLSISKESLSCSHFFPTLVWNEK

SEQ ID NO: 992815 - protein, 33 aa, Homo sapiens
AAAYYYYCSEFKLLTMYGDMQWVWMNKKKKVVL

SEQ ID NO: 992816 - protein, 32 aa, Homo sapiens
AAAYYYYCSNSSFYDAGDMEIKHPIGPGPLQK

SEQ ID NO: 992817 - protein, 38 aa, Homo sapiens
AAAYYYYCSEFKLLTMYGDMVFLLLQVVQVLTQLLVPK

SEQ ID NO: 992818 - protein, 38 aa, Homo sapiens
  misc_feature (25)..(25): Xaa can be any naturally occurring amino acid
AAAYYYYCSEFKLLTMYGDMEPGRXFQAISRVHNQSHN

SEQ ID NO: 992819 - protein, 36 aa, Homo sapiens
AADYYYYCSEFKLLTMYGDMPLHSSLGDRVSLCLKK

SEQ ID NO: 992820 - protein, 93 aa, Homo sapiens
  misc_feature (27)..(27): Xaa can be any naturally occurring amino acid
  misc_feature (33)..(33): Xaa can be any naturally occurring amino acid
  misc_feature (36)..(36): Xaa can be any naturally occurring amino acid
AAAYYYYCSEFKLLTMYGDMRGKWNFXQARNAXRTXAAHNQERPTVVVTPIQVQNAGGLSPASEGLSHYSLACPQPAPMMPGSATHTAVMSIR

SEQ ID NO: 992821 - protein, 68 aa, Homo sapiens
AAAYYYYCSEFKLLTMYGDMLLAEDVIHACNPSAWEAKAGGLLRGQEFAISLGNIARPPSLQKIIFKN

SEQ ID NO: 992822 - protein, 237 aa, Homo sapiens
DPVPLTLSPVRLLPAGSNHGRPRLFSHSVSRLTLPGAETQDSRDCDPVVPSELLVCQLPPRCRCESMGSALFLRSSATPTETCDGRQRSVQLPCESVMRENSRTGVEHRGELRLRVQPGMMTPVILVGKESFEGMEMQRNNLLPRCATVVRVYSGSSHVVTCVRSSSCFIHRAVAYEAAAAALQAGSPDTESRISHKVTLSVNDMTVLQLDPPPGVHRQTLSRFFDKSPGPGAETPM

SEQ ID NO: 992823 - protein, 31 aa, Homo sapiens
AAAYYYYCSEFKLLTMYGDMTPKKSTKKVVL

SEQ ID NO: 992824 - protein, 31 aa, Homo sapiens
GFAGAVQLGLIGTRIRAGNRETLEFEISHPK

SEQ ID NO: 992825 - protein, 36 aa, Homo sapiens
AAAYYYYCSEFKLLTMYGDMSLYSSWGDRVRPCLEK

SEQ ID NO: 992826 - protein, 154 aa, Homo sapiens
MIGRSNVLKVDQDSAGAQTASPGYLKEKEGAPSLHFYLSFSFLKITCPFDPPFVRVVSSKSFSWRVCSGGGGAISHGNFSAENRGPGWRAAYSIESADHATTSGATLVKGKARAAVWSQQISIQSDKSTAVLQVLGAGSTKKNGWYTDPQNEDG

SEQ ID NO: 992827 - protein, 114 aa, Homo sapiens
MTATAPRRLRSLALVQSIRHSIIPASMSASIDGMKCSTRYLSRPMDAFKEFLISRHLHYTSGCRALSIYGVTFLVLQKILTYHSALIRSCLQSYYDNRPSLGICPPVRPQIIEF

SEQ ID NO: 992828 - protein, 33 aa, Homo sapiens
GFAGAVQLGLIGLEFRDQEIETILANTVKPVST

SEQ ID NO: 992829 - protein, 39 aa, Homo sapiens
AAAYYYYYCSEFKLLTMYGDMRSGVRDQTGQLGKTPSLQ

SEQ ID NO: 992830 - protein, 109 aa, Homo sapiens
MGSGPWSRSSMVALKTTYASYSVSRPEGKLGIMELAVGLTFLLLLILPPCQPVSWILFIDLGSTYRESPSSAMAAPLSDTLHNCDLDSAPPGPSWFMLLAFWLCLARLP

SEQ ID NO: 992831 - protein, 41 aa, Homo sapiens
AAAYYYYYCSEFKLLTMYGDMQGLQTPRTFGQGTKLEIKRT

SEQ ID NO: 992832 - protein, 41 aa, Homo sapiens
AAAYYYYCSNSSFYDVRGHDCFTVFLRSIYCTFDNKIIFSQ

SEQ ID NO: 992833 - protein, 90 aa, Homo sapiens
MRSMSGLSPRFKLPSDVMRPVASSGSFERRIKLGAGHLCSTGVQYQKSDVAASVLPLYLVKPPLALGGTVCAPCREFVVLAPNGGLAARD

SEQ ID NO: 992834 - protein, 116 aa, Homo sapiens
AAAYYYYCSEFKLLTMYGDMYIRPDGLKQVKNHKRSENGLFLPELMTLPCEIPSPGSSWLKSSPTKQLVTPTSARQRTTPFDCNFLFTNPNPVKWSQPYLPSLTVFSDSASLHPGD

SEQ ID NO: 992835 - protein, 51 aa, Homo sapiens
AAAYYYYCSEFKLLTMYGDMRIAVNPGGEVEVAVSRDCGLQPGLRSDSLSE

SEQ ID NO: 992836 - protein, 36 aa, Homo sapiens
AAAYYYYYCSEFKLLTMYGDMNGLFLIINKKVFFLL

SEQ ID NO: 992837 - protein, 335 aa, Homo sapiens
MSAGHTERKHTKSLGSEILGCLSHPCLCAMMLANAMRTLERKWGGRAGRNVAHNEMHSQYLMILYRRSQFKQARDAKYDGTALTQAVLVKIDVTYTQTQVIKGNKKQRHNQPQTGDDTDADRHTTTTSPGQTKTKSRAAQTRENTEKSHTGQPKGKQETGESDTEERRQLADSEREEARKDSSAQTARLQRAENHNYRDGQRRVTESETQKDQKQAISKQTTSTAKTNEDKVKRNKETDIQRAKKQNAEKKKQKRRHKTENNNKARTKYNKKRDGKCGMQEKKTKNKRKVKKEKRATKDTEQLTNENENKTKQKQIETDTDLRAQQTNRNRTIQW

SEQ ID NO: 992838 - protein, 525 aa, Homo sapiens
  misc_feature (513)..(513): Xaa can be any naturally occurring amino acid
HIGSGLDVPAWWSVIRYSTQCGKTKSTVINRRVIKFWYAVKTVVHWVWYRRAWRIVGEGEHTEPGGLRSSAQLLVAVRELYALGNWYSRTGDRSVSVRQIHMWCHGLGEGVTTVVPAESCPMAAARMLVHPAMSGNIGEAIDSEASMSSLLCYRNSHFPSHSRRTLGSIVHYSRLLMVAGNGHSLYHARFRYSPFPLFGTPSDTYPREQRTLLALMSEGPKSAGALVGNKWQIGVADTRHKNGVSHSIVSFPQCRGKVSDLGEWDCAGTECPPQGCSSKEGNTWKNTISCILGDDGYTGSSTLVPGVVPCDDCGVVTSQKALFPKKPPYGPDQGVEARTAGEKIKRADRLSSGGQSGKEIHHRPLMKRPCNQAPGWATPSAMGRRPGTLQPQYTETTASETLHPRWHQSGAVTNSEKGTKEQQGREKQGRTAHQHKRGDPTRSNTPAEQNRGETDKQTHPSERQQAKPKAHTTTHARTAQEHPHTTNHTTHTNPKHGTRQQETATHSDDDIDXTGKALATHTTTT

SEQ ID NO: 992839 - protein, 34 aa, Homo sapiens
AAAYYYYCSEFKLLTMYGDMFHCLNKNCLPLLRK

SEQ ID NO: 992840 - protein, 66 aa, Homo sapiens
LLSAAPSRQALAQPAECGGSWASPRGAGPLYQAHMVRTTPSGPPHSHPWGAALMPGAGRPTPCIGC

SEQ ID NO: 992841 - protein, 60 aa, Homo sapiens
AAAYYYYYCSEFKLLTMYGDMCEPQFLICKGGNDTYLTGVLRGLNVRRIVPKIKKKSCAA

SEQ ID NO: 992842 - protein, 514 aa, Homo sapiens
  misc_feature (173)..(173): Xaa can be any naturally occurring amino acid
  misc_feature (178)..(178): Xaa can be any naturally occurring amino acid
MEGAQVLIRETCTLTNTVCCGITEEQAMAGGGASRMSSCKESFFCGHKASLTDSVRDALLEARCFRGGMCIHGLVRIQGKQMEELDTEDPYWKGRTVTRWYVPVRTDQYTRRGAMRTNALFFASGPTRKVSFSLQPRVDNEISDPGDRCRMLAVNATRSEDSTISCLGGPNRXSPKEXQRGIPGPEAKGTSRLKEGGSASGARRFREVHEEEEWPYWFCNPGPRKYVEKDHVGPFQGRDLKRDRSLSGAQLGRGKELSEGVKRKRGPWRSVWLRHTWPVGLERYQGAHNRIPNFPEFMVPLEGHGLPCGRPSTKFLARGIAKRKELAPYHIPPRGLCWGHSVPVEQALATSWSPLSFPIFEPVLWPRPFVVMERPGKPKGRYGPSAMALGWLRSATQEGVCSDNGGRPVTTRRRGTPNGRKTPGHRVSRGKLGTGPRGGELDPDEEHRAVRAPRPTTVRRVSGPQHTRGTEDATDVEGRRVPPYRAGRRHKNARKVTPKRMLTHKEEDKKAGDR

SEQ ID NO: 992843 - protein, 49 aa, Homo sapiens
AAAYYYYCSEFKLLTMYGDMWTQEVEVAVSRDCATALQPGPQSETPSQN

SEQ ID NO: 992844 - protein, 451 aa, Homo sapiens
MLTLLGHFARRAARLVMLFIVRLEELHDRSGRVAVKSVVLTCHTVETHYLNVDVSLVVSPRMRTLLSTENASIARDNSHYPWKHHCAESMLVVNMRPSTGSVDYHHMYHTSSGIEQLLNRFQSLTLTNNVGLASRQAGNYSLIMAGLLVGGNLPSSTNAEKTNQGKPPRQAREYREVKVGRRPEHPRRKRARRQTRSVTKFPRVEPDPSGGRDQMRRKPGKTHTERNPLVRVFLTDPLYILGENPPKILRTGKDATGLTRGYHTVQSDPETAHGISKSARNECRVHRGTIKGSTAKKTSRVLTGGAYNHKKMSTHDTIYNTSHSKKGRPYTAHKKYIYPTNKTNNSDADNQRDIKRAMIIREAYDLQGAVSATKKGDEHQAAAILRLNLYNSTQNEYTGTILHLVFRTLTLVARSDRADNRNKSNDSMIDSHNKYTKQRKNKTIDKAYRTE

SEQ ID NO: 992845 - protein, 303 aa, Homo sapiens
MGGNSSCASQPQLVECSSERSVWYNLRESTCRSHYISSRTFAPAVVILNITDVNSGAAVEIVTPQDSEISHKKAAAHSRIYPVPELCVVSLSQEETGISQDDLESSVIEQCKTFKTLSKRTHFVKGVLARPNMSTPRYKPLQEHVVLQFSEKPLALHDVVSHKGRTPPRGVLQNIIIPATPGRVGLKTPRAFKGQIPFYTENNSGHIGAQVEALLNILMRSYFTTMICSKSPREQILCESEKKARWKGTRGKTWDNSHTFLQQIYGHVVCPPPKCFVDAPPIKEDTGNFPHHQQRGDHTHHKR

SEQ ID NO: 992846 - protein, 36 aa, Homo sapiens
AAAYYYYYYYCSNSSFYDVRGHVLFQVKRIKDFQPK

SEQ ID NO: 992847 - protein, 106 aa, Homo sapiens
LVKDGRASMSAAVRHNPTDQHDEKSTDLIVTRLLNAQAPRQVSLLVTLQPFIAILSFARHRMLEKFVSTWLSLLGLTLFSLAQAYSFWWTTTDSQTQYRSKNSYRT

SEQ ID NO: 992848 - protein, 35 aa, Homo sapiens
LVQYNLEFEARIRARIQASNVRSLNSTRIREILRF

SEQ ID NO: 992849 - protein, 35 aa, Homo sapiens
AAAYYYYCSEFKLLTMYGDMSFPIKKKMTSCPVEK

SEQ ID NO: 992850 - protein, 142 aa, Homo sapiens
  misc_feature (101)..(101): Xaa can be any naturally occurring amino acid
MAIIAPMWFNSQKDSVPTGGASGTMGAQGYASLLTNGGVQALCGAKRPCGRGNGPAPLRGAAQGDRATTCRREEKEGTTHRETISPKGPKAAENVMVAHLXEERGPLVIVRKPPVACPQGRMGFAKPSNQFSRALPIAPPTP

SEQ ID NO: 992851 - protein, 169 aa, Homo sapiens
MRNTVRFAFNVRTFRKGEVVDFGANIFKGIVKGFCWVALKKLNTLGDLEKTTMMENNTEKIKKKTKGDNQPTQREPMNEPKEEETGKDGIQTEREQKKEKRASTKAENEGKQKTRTTHADTTEHDAKEKWDAEKEIERKEERRGNASDRRNHQTNIKKKEEKNKQTEHR

SEQ ID NO: 992852 - protein, 32 aa, Homo sapiens
FAGAVQLGLIGTRIRARIRARIREKIEKKGEK

SEQ ID NO: 992853 - protein, 34 aa, Homo sapiens
AAAYYYYCSNSSFYDVRGHVMSGLNAQAKRACKK

SEQ ID NO: 992854 - protein, 35 aa, Homo sapiens
AAAYYYYCSEFKLLTMYGDMPLHSSLGNREDLVSK

SEQ ID NO: 992855 - protein, 69 aa, Homo sapiens
GRVGEAGGSRGQEIETILANMVKTPSLIKIQKLAGHGDVHLESQLLDRLRQENCLNPGGGGCSEPRSCH

SEQ ID NO: 992856 - protein, 39 aa, Homo sapiens
AAAYYYYCSEFKLLTMYGDMPNFHSHFICVNNKIFNFPK

SEQ ID NO: 992857 - protein, 240 aa, Homo sapiens
MSSGSEDCTVMVWQIPEKRADLPRLTEPVVVLEGLTKRVGIIAWYTLTETPETVLASDVRPVGTNCWILDRGMWCTDGVQLVLSPVNALHPMYLHRTDCQSCDTHKLVHALFLLMQCNGQELCCIIRRPVGDTLDGQTRDEGLMRGCPALRAIFLADGKVFTIRLQPYMSESAAWRSGDPMKNLEEAQWPCMELDSSNGALLPFYEPDTSVVYVCGKGDSSIRYFEITEEPPYIIFLNYV

SEQ ID NO: 992858 - protein, 33 aa, Homo sapiens
PPPAGAVQLEKIGHGVAVVTTYHHRPSILATSK

SEQ ID NO: 992859 - protein, 122 aa, Homo sapiens
IQSGIKKRGILANGPCALPIHPWFGPLWPIALYPGAHPKKLGTSPLACLCFSPNAFLEWGGKDGGRGERDLPPSCQAFLGGALAPSGLILLSRGGFFFPDTFWLIHQHRDIKAIQRFNYEAP

SEQ ID NO: 992860 - protein, 33 aa, Homo sapiens
AAAYYYYCSEFKLLTMYGDMEQAPAVALPPTHK

SEQ ID NO: 992861 - protein, 39 aa, Homo sapiens
IIIMDLLVQYNRLNRDMAQRGLLYTKPYTHHNSKTISKF

SEQ ID NO: 992862 - protein, 54 aa, Homo sapiens
AAAYYYYCSEFKLLTMYGDMRIVGTQDVEAAVSRDHTIALQPGRHSETLSQKNK

SEQ ID NO: 992863 - protein, 37 aa, Homo sapiens
AAAYYYYCSEFKLLTMYGDMTNNYEENILKVVLHQQI

SEQ ID NO: 992864 - protein, 35 aa, Homo sapiens
AAAYYYYCSNSSFYDVRGHVSCVFDTNKFVVAKTK

SEQ ID NO: 992865 - protein, 180 aa, Homo sapiens
MKTNEPLKHTHNHNTRTTPREKNKEAPQRTQNTRSKEHTRRRGQTIRRPTQQTTNRTEPKPLNTQTPTDKRPYTHERHTQRHTKTREAKRWRTTTTHRELDHTDATSETQQEAERTNINAKKEPNDKAKRRQHTDYKQNTNNPTDKHPNTRDARTETHHQKQADTTALPQHIRNQEALDE

SEQ ID NO: 992866 - protein, 37 aa, Homo sapiens
MDLLVQYNYGLIGTRIRGTVKLISITNSTIHSKILQK

SEQ ID NO: 992867 - protein, 49 aa, Homo sapiens
AAAYYYYCSEFKLLTMYGDMTQESEAAVSYDATVHSSQGDRLKLHLFKK

SEQ ID NO: 992868 - protein, 38 aa, Homo sapiens
  misc_feature (27)..(27): Xaa can be any naturally occurring amino acid
YSVLEFSGVDIDHHGICVVHVPTRLNXLEFELEFEASN

SEQ ID NO: 992869 - protein, 30 aa, Homo sapiens
AAAYYYYCSEFKLLTIIWGHVIKVFIVLFP

SEQ ID NO: 992870 - protein, 362 aa, Homo sapiens
NSNGNQESGGFWANGCLVALPISSLGLGPLLAYSPYTLSTTPTDLGDQPPRRAVVFFFPQTPLNGEREKEREKGRGETVPPSIRTFVERARPPVGFLPFPRGGPFFRAKTFGVKTQHREIKTTEFYICEEPPKKEKRTNKRKKQTEEKKNKNKNTKKEEGRRSTKKNNPRGRHTKKRPRTQDNREKGRHKEGTTNKQTHHTDGGESIKKGIVNERKNNAPTRRRQTRKSATTQREEGETQTRATKHKQEKKETQKGNNKNRTQRGINRGTNKRKEDGRKTGYNSNHNRTKPGGAHDTRKSNRNERTTSKEGEGERNGQTRRRSAHQTNTKTERTRTHAAKKEEENTTQKRTKKDKSERRKRR

SEQ ID NO: 992871 - protein, 35 aa, Homo sapiens
AAAYYYYCSEFKLLTMYGDMYWSIYFIYENVMFPK

SEQ ID NO: 992872 - protein, 36 aa, Homo sapiens
AAAYYYYYCSEFKLLTMYGDMFLNNQVSEINNWTTK

SEQ ID NO: 992873 - protein, 233 aa, Homo sapiens
MGIIVLEVCNFARILGTTETLVAHIPGVNATMRQTVSCTITGTSTMAAINTTVSTASKCCAVLVPFPLVIRHPTIFIHGDKMWHDQRALYNAAPYRSNIAKNLFGGSWTRQTRVSKSPQDADYWSGSPTNSVLVWEQKTVALQGLKHYGSGASLWWRGGQHIYSSCTILFASHNWPITYHYRWERSTLTPSFEFYTLARERAYQNGPLFLAAAIIDGVSATQDLSAPKVVEPL

SEQ ID NO: 992874 - protein, 107 aa, Homo sapiens
STPGTMKLYRRCKLEEMGFKDTDPDSQTLQFTWRHMRPHKEDEFLGELQKKRRGDETECSSSESKRIEVGGSEEAEKELREKLVAVLKQTVARTERNKLEDMEEIPG

SEQ ID NO: 992875 - protein, 395 aa, Homo sapiens
  misc_feature (114)..(115): Xaa can be any naturally occurring amino acid
VHSRVSFWSFDARLPVPEQASLVARWSHATTILYYPFESPVGGRCNARLDVHLVYQAGYKVGPHYSVVLSRSGVAYSSTNALGIIMQSSASMTGSTRIPELHKTRRSVRRGDGXXYLPIGRWTVKVECVERVERNLRGGIISRFARTNGLSSTRFARGICARRENRLLQRYDFVLRRAPSSACGGQSQNRNCIHETKLALRSKIIRGQARLGDPTNGCGTSSSTKEGRYLDNDTHSMNRPRHLGEVALHDASMVAPRFHSSKHEEGPCRLHPIGGHTLRRWDQRFHSLHHPEEIRTVVPGLWRSQPQFLWQDSTPCDRKVGSPYWFTFSYLERDASCRVIDRAKLHPETILSGYDISHTPCEYPERERQVHYSSVEETQTATTAGRQRTEESPIT

SEQ ID NO: 992876 - protein, 43 aa, Homo sapiens
AAAYYYYCSEFKLLTMYGDSSSLTNVCLANVIKVVNLYECIPK

SEQ ID NO: 992877 - protein, 226 aa, Homo sapiens
MTKTEKKERRTTSTEQRKTRETREKTKGNNKQQKETSREGTRKEQKQTQKTHNRAGKPEQGRAKERQQQKDTTKSKAADEERQRKGEKGGEGKKKEEKRREARSTDERKRQEKKKGKETRQTQPGAKKPEENTKEEKKKEGDKKTNRRQTNERTEKRQKETRTENTRETHDNETTQDRKQTRRKQRNRRTDTGHDSRGDEENDTNKQRQPENRKTKGEDRPTSKQQ

SEQ ID NO: 992878 - protein, 32 aa, Homo sapiens
AAAYYYYYCSEFKLLTMYGDMFISYIRTGTFY

SEQ ID NO: 992879 - protein, 124 aa, Homo sapiens
MSVHGVLIFTYVKISSILNEPNFRSMALPRGMPSILIPSSQTYWLGLSNCRAQGCLRTNQNSFINCCRIPDLYSRVSRSLCSTQTDVAETVSPGTMGSVQRYSALRKNFFPRSQKIWERNRNKK

SEQ ID NO: 992880 - protein, 34 aa, Homo sapiens
AAAYYYYCSEFKLLTMYGDMPQDTPNIAIVVFQL

SEQ ID NO: 992881 - protein, 162 aa, Homo sapiens
  misc_feature (17)..(17): Xaa can be any naturally occurring amino acid
MQPSACPIPLLHHDVRXVPQHADPDWARFRCLNQNWPGWFSILFRVGCSTEDTPFTSFASETFPVFSKPYVVDEFGLRVGSHKNGAWRCCPNYVWSSAVIHDQFIIKARGGRDPGSLSWFLANTRFVDTHLFPQLIYVPLFNSLTQFCVLLCQHTNSVRRTF

SEQ ID NO: 992882 - protein, 33 aa, Homo sapiens
  misc_feature (22)..(23): Xaa can be any naturally occurring amino acid
AAAYYYYCSEFKLLTMYGDMLXXKGIKKKKVVL

SEQ ID NO: 992883 - protein, 76 aa, Homo sapiens
  misc_feature (45)..(45): Xaa can be any naturally occurring amino acid
  misc_feature (49)..(49): Xaa can be any naturally occurring amino acid
RSGQRDSARPSEYDGPAGIIEGQRMEVCRSVHTYALVLVWKRLAXCDFXVLRREPCGLASYVACNDHAKRSSIRPV

SEQ ID NO: 992884 - protein, 36 aa, Homo sapiens
AAAYYYYCSEFKLLTMYGDSYYTPDRRQSETVSKKK

SEQ ID NO: 992885 - protein, 30 aa, Homo sapiens
ANMAAAAAGAEVPPPRAATGNPPASPPSPA

SEQ ID NO: 992886 - protein, 123 aa, Homo sapiens
MQRGSALARWIHRVLSDCWKVSPLPYPENEAALTSCHVHVIVPWCAGSHASLLGRRDCREVWVCERGSGCACLSTEATSLSCRRSRARRTVTSVLYVPSDTLTDGCCFACNALEGTFCWSRLC

SEQ ID NO: 992887 - protein, 30 aa, Homo sapiens
AYYYYCSEFKLLTMYGDMTFPKIIKKKSCT

SEQ ID NO: 992888 - protein, 153 aa, Homo sapiens
SGLPRHQARDSGEVRLQSMVFPAKTVLHGAIHGGSCAGSSVLSGTVARRAEPEWHAGSSADSHTALKSQERQRDGTSYDPLATGTRYGQPMAGRSVDDERANECARRKLHVSSLEINDGELGEEKGAMRGKTQILWRNGTSVGILYRRSFESL

SEQ ID NO: 992889 - protein, 157 aa, Homo sapiens
SGAVVAVDGSYLALLMYVGQAGGVMAALRTLDLLEVRGRERDGVGDLANSQECDPGVMLQLLGAASFKERLPTIRLLWGQLVEAIDEYQIYSKTSTNRRPKLNTNNSEFTEEQKKTIGNIATCYGIAEVQLLQYHTVYKTDYNLEDLKQLEPILKNI

SEQ ID NO: 992890 - protein, 42 aa, Homo sapiens
AAAYYYYCSEFKLLTMYGDMKQCIWMNAVGGCKYLVSPQTAK

SEQ ID NO: 992891 - protein, 292 aa, Homo sapiens
VKTMTTLRQIDVHMFNAVFVALDKAAPGEVCQSVGKLLWYPTCDYGHINASSSTDTVLLRGGRNDGRRGLQCAPMPLTVYTATSGSLPPSVKGLVPWWPGDGHSACVRSANDLCSIIGGVTEQHADMFFQMTFDKQYTYQHDMGTLICTKGSRCTLVGIPLSHNAGKSMYVFGGRVDRFVSHSIPTMEIYCKRIRVFELQNEGLVEWPPILCAEGPEHSALGTMGSCAPGGDTCSERVFPYSSVSLCPYRAKTARGGACPAGQLRPGYMALGAASGGRTAYPAWGSADRRGY

SEQ ID NO: 992892 - protein, 71 aa, Homo sapiens
MLTNAKFRGLPPRGRKHHPGRAHCGKKNVSIHSGRARGLQRGAENITRQGPHRKNERHPGAQKSGGTLQHK

SEQ ID NO: 992893 - protein, 42 aa, Homo sapiens
AAAYYYYCSEFKLLTMYGDMVFYVTSIVTLVKWLSIKDLCYF

SEQ ID NO: 992894 - protein, 289 aa, Homo sapiens
MAVTGVCACADVGLAVWVREDHSKPEAIGSDQSDEESDRERGLHPGSLVGPFAKEQSSAERGTTTFRVRLSGVPTYQTLGYYPNRTLPIPIKLATFCTTPRIPNTRQHYGVRSPLPHLTRKHTLAPTKYRDVHNTLTHTYELLPVHSSCNTCTTGAPSPGVKPHETAKYIASSMKHPPLRPPGLYHNTALTTNIHKHNKLTQRAVQHITIHYNTTSKTKSIAPAVRYGPAHLGFHLQQGLTISSDTDTLVATNEIFLAGSHRGLRHPSSVPRNPGPQKQIAWQVTASDT

SEQ ID NO: 992895 - protein, 34 aa, Homo sapiens
AAAYYYYCSEFKLLTMYGDMLEISTSSLLEITMI

SEQ ID NO: 992896 - protein, 52 aa, Homo sapiens
IQTRSHILELLYVSNPPALASQFFWIIGMNHHAQPITEVDAAAILVGVVGPP

SEQ ID NO: 992897 - protein, 40 aa, Homo sapiens
MTSTEEENETKNKQPQEERSRTRTEKNHGEQQITIEKERP

SEQ ID NO: 992898 - protein, 215 aa, Homo sapiens
MNDPTDDRMFHVVYCIGVARVNVGASRIGRESVVGTNRSITPMNSDTDHWLRPYDKGHKRKLDQEQLGEQTLELETPSIKDPKQQHTNSDATPKQRRVTHTHHNIKNTRIPHPTHTSSPATHNGPSSPTTGDKQRPHTGAQRPRHTPMATHKRDSKGPNTQSTVATTQDRATYKRYADTHIAVETQPTTASQRTSNSGRDTHSDQQPTHSQPDTI

SEQ ID NO: 992899 - protein, 74 aa, Homo sapiens
MSNNTHTAITSRHTISRTLILHIHFLYVATYSNRTINESSQLTTTYRKNIALTKNTTIQTNSSHSLYVRYNDTL

SEQ ID NO: 992900 - protein, 40 aa, Homo sapiens
AAAYYYYCSEFKLLTMYGDMVSCRTISMLPVKKINNKTHK

SEQ ID NO: 992901 - protein, 36 aa, Homo sapiens
AAAYYYYYCSEFNLLTMYGDSHYTNAWRQSETWFQK

SEQ ID NO: 992902 - protein, 256 aa, Homo sapiens
MYDVVHVHMCCVSLYPHYVSLVCTEATASTVCLFPHASAVNLPETHRFHRVWPAGLTSLYLLVLMSMTPYKRTHLSYLCQVCSMGTCCEPHQGSLTPRSSLPAFPSVYPCGYGFTSRSAGDMTAVLSLVIESEAGGEQEDTYITGVGLPKSAGEHRAQHEAALTHRAGTTPVIPHGVSRNDRPEEQGQMPHEDRSEPRDVPMEGNGPHDNPTRPPTHSRDKPKHYGRRHNHTDKEHTNEKGKREPRTRTNTATRTH

SEQ ID NO: 992903 - protein, 38 aa, Homo sapiens
AAAYYYYCSEFKLLTMYGDMCTCNIIPSYLKVKSLTAK

SEQ ID NO: 992904 - protein, 333 aa, Homo sapiens
FRLRGPAAAMILLEVNQPTIIEETLALKFENAGDGNNTGMHDEVTFADFEWGPPIISFNILMAAEKPRKLHGPDILFDNSTTGNFQGHMVLHELLKGGCTGVALRKSSNQDTMSLCYMTLYHSSGNPKVCHCSINAGDVEAKLVFASVFEKYFHIPRQRARKERTGPVIHYRDDETMLCPSLKHGQAVTVISGTESTADERMLVIVKGVAVRRKFQRNDGRSPATRRPTGVLFKATGDTLPAGRLETNTRRPGGGLNNHLARHSPLVAGCPRHTQLAVVREQPSTSDPQRRATWTYPIKAMKRVSPPLIDDKGFSRVSAAVEKIHISGEEHRM

SEQ ID NO: 992905 - protein, 251 aa, Homo sapiens
  misc_feature (41)..(41): Xaa can be any naturally occurring amino acid
MVCYQDFPSVVLVGLGEKAAGIDEQENWHEGKENIRSCCCXRGAKADSMTWRPLVCGGGSLWRTLRLLRRESVLGLYELRMILKQTTEDVLCRATALWTVGHSRRVRGHAPRMSCCALWARTCATSPLPGDSQRASDYDWRPGFARHYLSKNSPKCYLETPRVQYSNQVFRFEEPGTGNIAHFVATRFHMPQVCGITTKGDAFARTPQVVDKNHTRGNTQRHRIDAKEGDVALFRTLFKYAAITLNDEKNE

SEQ ID NO: 992906 - protein, 30 aa, Homo sapiens
AAAYYYYCSEFKLLTMYGDMAKKKNMKVVL

SEQ ID NO: 992907 - protein, 149 aa, Homo sapiens
MGALVEDSLTTHPPWAAALYSPPVKEDEREKKGGNSTAQANKPEEKTPGSGGDRENQEGWRHNKAIGVIKTRRGTNKQIITNQPTKNDEYIDSSPERKPINHKTNMETATYFNQKKGAKNNASPQKDVRTLQKVKEKHLLIRTQRETQQ

SEQ ID NO: 992908 - protein, 40 aa, Homo sapiens
AAAYYYYCSEFKLLTMYGDMEKYIKLYSFMCLIKDCKTQK

SEQ ID NO: 992909 - protein, 31 aa, Homo sapiens
AAAYYYYCSEFKLLTMYGDMLFSVKDQIINI

SEQ ID NO: 992910 - protein, 33 aa, Homo sapiens
AAAYYYYYCSEFKLLTMYGDMVGWREGVIKEVK

SEQ ID NO: 992911 - protein, 33 aa, Homo sapiens
AAYYYYYCSEFKLLTMYGDMNYIGMKNSRQEEK

SEQ ID NO: 992912 - protein, 44 aa, Homo sapiens
AAAYYYYCSEFKLLTMYGDMEIKAAVSCDCSAAFQPECQSETLS

SEQ ID NO: 992913 - protein, 97 aa, Homo sapiens
QEIRNRTLDSYIPKYVGNESLSTYLLAEHCRRGTLHMRKPGSLEGHRFNVRTSDEWWDRAKSLTNRRVRFEHDPTDNYVIRSLVPISYISQYIISVQ

SEQ ID NO: 992914 - protein, 35 aa, Homo sapiens
AAAYYYYCSEFKLLTMYGDMTKENKMDDSFLSAEK

SEQ ID NO: 992915 - protein, 313 aa, Homo sapiens
MAYRVIWKIRRVVRVRHRHVIIWNDVIPDVCAMASLNKSSVLLGGTISDCVSRQHRYSQGLVETLTRGVNDTYAQNAYLRAANLRRTGRAIRSMDSGQVATEHGTSDRAVAASLVVYTKITKNSQTNGGFAHTHCLESRRGTAMDTQRGICFQTLIVENGERRTFHSPHGPLVPNLRNFIHWLGDNPRDKEATPGMPHQYSVTPNCDVKITPLYAILHTSTLGDTCGKSFTQKVFLGERTAMHTTTQTNITKNHKMCCVNRNQIQNVVNSTNTNRRRWPSKSDVCTVPYYTQQEHDESELSTTTRRRPPAIND

SEQ ID NO: 992916 - protein, 328 aa, Homo sapiens
DAWVDPTRPAPGQQRQQQQRQQRAALSRRPPPLRKKPAQPPPRPDPRAWIPAPRSRSPKTTTAGLRQTLQGMTSGGPRDPASRAKMVGWHMLDVKTYTRTQDHDSMKLTSQAGGETSIQRKQSQRKAHRIAHGLGAGATRDQGIPPAPSEPRVSASPHEQHNREDTSSTDNHETPHVTESKNRPRSLDHQTQTRASPGNHRQPRSATRYYDGPQRLATTPVLIAQGRMIIGTTGHCRQTRAKPHPVNNINGNGADPTGKQNATRRRTRRLAPQRLGRDIYHREPKPPGAPPHATPSWTPEMRTATIGKHLGHTRGFCAPETQAPQLTR

SEQ ID NO: 992917 - protein, 43 aa, Homo sapiens
AAAYYYYYCSEFKLLTMYGDMNISTHLDFKQVNKTFRKRLKSK

SEQ ID NO: 992918 - protein, 411 aa, Homo sapiens
MHAGTEIHANQAPRQLRMPSLTPPHDENQLNTTWTKRSRPRPQKTETHDRPGTLLKYNDSNQVLKHSPTPPPHTLQTPTAWPPPGQADTPGTTGSGPPDTKHRSRKESPGAQGPTQTTREPRAHPTGITANPYSEKPRGSLRKRGTQTTDARQHQTPTHRQANHPTLGHTCTGQRHRRQEHNNSRTRTHYHTCTHVTTPNTGDTTHNTPITPKPVATPSHRHTGTQSDAPLNTPLAHTHQRERHTTPVCPPSPELEYPGSEAHKHSTGNTQTNTGTLTTITHTTPGSSRYQPPGRHSQRLGADSQQRATHNTPQQPTAPKVNQHAHAAHETAEGDPQTRDRPHNSKPATRPANDRNPDPPQRHSAARTHATQTTRPTHTKNTRTTGQTHTRSTEQPHSTTTEPARAPHPHS

SEQ ID NO: 992919 - protein, 106 aa, Homo sapiens
DRLCFSFLFIFLKYISLFSFPYSRDGTRIVMLENPALIKSSHKLTSENLYLNLTPLSLPWEIGQIDPVAVRAELDDAESAWPAVDMQNNSCYFRQSPSREKSLHAF

SEQ ID NO: 992920 - protein, 305 aa, Homo sapiens
MDSDDDSSDDEQEEEVQKRPKLSKKIVAREMNRFTVGELKQLGGSDLMSWKMHDVTAQDPKLLVHLKATSELCACATSIWMMKRKYLQGIRGIEKPPLRDCQTFIKRHRQFRRCERPCHGEGRTEDHEGQECERKFGLRWATIEIDYHKLNDAFFKVADQGKADIHGDLYYEGKAFETRLEEKKPGDLADELRITYGECQKNDMASMCAPTRVHGHVKKCDNPMDSHFKSLGEISYLKRRPGGPTRGAEGDPGAEQGTPQWSRCKHQLEIRDQGATKLRPGGRETLTKLQETTSRGQQTAGKTGY

SEQ ID NO: 992921 - protein, 31 aa, Homo sapiens
AAAYYYYYCSEFKLLTMYGDMYLKLGTRKTA

SEQ ID NO: 992922 - protein, 46 aa, Homo sapiens
AAAYYYYCSEFKLLTMYGDMEGCLGDAVRCRYDVWLEIKAISEVEK

SEQ ID NO: 992923 - protein, 114 aa, Homo sapiens
SDVMCEKRGRRLWSKYILIMKSYLKHFQMCSEEEKKEIFGRAWWLMPVIPALWEAEMGGSQGQEIQTILANTVKPRLYKKYKKISWTWWWAPVVPTTWEAGAGEWREPGRQSLQ

SEQ ID NO: 992924 - protein, 33 aa, Homo sapiens
AAAYYYYCSNSSFYDVRGHVPFFLAPQIIKTQK

SEQ ID NO: 992925 - protein, 71 aa, Homo sapiens
AAAYYYYCSEFKLLTMYGDMHLVPGREAAPALCHVTWACYKRGLVKKTKAHALPTALCAFAVTIKYILSCK

SEQ ID NO: 992926 - protein, 83 aa, Homo sapiens
MIAHLTCSLVGNDIIISTNSRLSLYWSPACNTQQFETHSKHSSREDNSQDVLSVIAAITGSLQDKLKNKSRSSVYEAVRSIID

SEQ ID NO: 992927 - protein, 30 aa, Homo sapiens
AAAYYYYCSEFKLLTMYGDMPQYIKPRSTN

SEQ ID NO: 992928 - protein, 396 aa, Homo sapiens
VLQTGGLPIHEANVQGVSVCLNGIPTYTLRGSQNPVCQRVHLPTQRRLLTVPRSLGIQNVSTYAGSVVPTCLLYPSYTYLNCRPVFWQQAVTRPATLNQEAHILVPGTSTRHGNPHDLLCDKLQLSLYMHLCTQAIGHHWHTLSPVVLPLLWLCREQAPLHGGRLFTHIYTYSYVSMPTGALHYMTQYRLLAPGTEILDAYGPKFILTHSREPPTHTANLSSGTNHTNTGLQQRITRGPLSSGLHSLNIPLAGPPCYANMGLSVRMTRQHKLERVPMMTTRDSNTSASARMGLQHRAPTEAQPLQDPHLCHRNNSQADCDADSPAAPNSPLAPAPICATDSNRERNRRIPTEPLVDRRSDPTAHTGISTRTHTCITTRSGRSRLQTRSHTTTEDKN

SEQ ID NO: 992929 - protein, 208 aa, Homo sapiens
MGFHGAAHTPARSSTAHNPQADTTRKRAPAATQRRRPCQPAKATTEQERQYGKPHLTTPLKHAHRHIRTYTQGSPNARDSLTRAYPNTRLGQCSRRTHLRGNIAAAETHRAGTPPGRGPTSSSADKALMTTHCGTSKTLSDPQTYNRRAHAHTPQKPSNRGDVATIYTIVSTTKRTQSRVITPKRGNRTNGQNRLVTRSGNPTTAPRR

SEQ ID NO: 992930 - protein, 40 aa, Homo sapiens
AAAYYYYYCSNSSFYDVRGHGIILKYIGMAKREINKLLKK

SEQ ID NO: 992931 - protein, 73 aa, Homo sapiens
MPSVDTPDLIALQGIPEYQNNKHSLEQATMNDAQINSHHKPHPDEKDGPHTRDNNAEGTRIKSATAPPSTENT

SEQ ID NO: 992932 - protein, 30 aa, Homo sapiens
AAAYYYYYCSNSSFYDVRGHVIKVFIVLFP

SEQ ID NO: 992933 - protein, 134 aa, Homo sapiens
KEKEQFKKEEKAKDEKFKTTVPTRRLKHPTSSTQGTQSRRQPIRAAKSIIATGTCKSKENVKGRQHKNTSFWVLANHLFPDQIFQSLKGNKNAAKLILTLLHHIPPQLKDSLIELKESSAKLYIESYSSTTVQE

SEQ ID NO: 992934 - protein, 45 aa, Homo sapiens
AAAPAEEKKVEAKKEESEESEDDMGFGLFDYTAFVNMSNKELNLE

SEQ ID NO: 992935 - protein, 107 aa, Homo sapiens
MPRRNNTIAVHYSYSSVTRQLTHSLLANIVPIAILVFAACEAAVGLALLALNLQAQYGLDYVHNLNTLRPMLTTTSSQPHYTHYQLTLTLQNNTYIRINTTTHSLIY

SEQ ID NO: 992936 - protein, 67 aa, Homo sapiens
TREYFPYPNGKPSSNVSPSSNADSHTRYHCGCCTVCHSCCLILIFIFLSVCSYSYQPLHCSYTCSRR

SEQ ID NO: 992937 - protein, 334 aa, Homo sapiens
RIVATWLTGMSLQPPLEEVSCGQAESSEKPNAEDMTSKDYYFDSYAHFGHPLKEMLKDRGVRTLIYRNSMFHNPALFKDNGGAGTVEARAAGNPLSLFAAKAGARYGIGIECASISDYAVKIVNSQQVRPRGDQSSRGSGAELRLPGQEVGDIIHTREWMALLVLFYDDLMTQQRDSMPVDKWLAPDGLIFTRAGPLLYVTVIEDRQYKDYKIHWWENVYGFDMSCLQTIGGHLSEPLSGMFVEPPKQVVTKRLLIKGGGQFYTVKVEDLNVDFPRFCLQVTDDYVGRLEAYSTRFTLPEAGCHNPAPNLETVSGRPRKREDLPGAQTATGAVA

SEQ ID NO: 992938 - protein, 431 aa, Homo sapiens
RHALGRPHALRGTRWGAATDCRCCLVFTRWLFVRALSGSSSLPCLVRDSPVAWYSTVHHVYPDRLEQQWARRDHCPLFFNNDSAIPAGSPLRNASALASSLHTSAQHSTVNRATHDQYGSSKLSTHYGTTQRKRTQHARLSDNATRHYTHGHGLLRAQTGIHRHRPLPERNRLPNEQPHNASSTIQDKARSNAGNATRTLPTEPKKERRACIGIDTGSALRTAPRAWPRASHIPRTSHPWPSHLHTPPTITHSPTHTNSLGQAKIKCTFLKGATPNKHAITNPPLYFAHLLDTANKLDIPYNYIKMQTQQTHTTHTQTTNKPSRYHKHARNAAHSTTHPIPRHHPTGQLRPQAAPTIAPLRNTPHANTLTSLFGLHIAENANTYSWSAHDKRPSVHTHDQQRSVQRTTHPTLVTPNAHQPHPPTPRTHHPT

SEQ ID NO: 992939 - protein, 300 aa, Homo sapiens
MNTFSVVLQPKVSDTVVEPYNASLSVHQLVENTDETYCIDNEVLYDICFRTLKPDHTNLRGSEPPCLSHHEWCHHLTSDCPWTRLKCCHSAKLASQHGPLPRSSILFYAWTSAPLTQHVCNARQLSELSQVPELTQTRSSMPSNMMDALLTPAHGSNTSPWLLFFRGRMSMKDVDEQMLNVQNKNSTYFVEWIPNNVKRAVCEIPTRGSRWQSSFIGIAAAIQELFKRISEKYTAMFRREGLPPLVHRRGLDDMSHRAEHLDRPRSAIRSRMPGKRGSESKRGKKPQSTKYSLSPNGRNG

SEQ ID NO: 992940 - protein, 164 aa, Homo sapiens
  misc_feature (16)..(16): Xaa can be any naturally occurring amino acid
  misc_feature (52)..(52): Xaa can be any naturally occurring amino acid
RDSSMKYCTSGSHTCXVCGYDRRRICDLLLSSYMSYRCYCTHSSALAELCPXVCIPLSFHPSWSRLGCIVEVEVFHSSQFSSLSYGRLSSGPPPNFSHSRSQAPAWLLVPVTCQEAPCDYKTVQLDRARWLTPVTPALWEAEAGGSRGQEIETILANMVKPHLY

SEQ ID NO: 992941 - protein, 163 aa, Homo sapiens
  misc_feature (26)..(26): Xaa can be any naturally occurring amino acid
  misc_feature (63)..(63): Xaa can be any naturally occurring amino acid
PQQPLQPRMFRLANAYSTLQLVPTPXRPTIDESQILGTSGQNVSDIFRYSSMEDHLEILEWTXRVRHISPTAPDTLGCYPFYKTDPFIFPECPHVYFCGNTPSFGSKIIRGPEDQTVLLVTVPDFSAPQTACLVNLGKLALQALKFLGFGAKDDDLGGLGLGP

SEQ ID NO: 992942 - protein, 73 aa, Homo sapiens
KQGYAKEVTVKPVSLAEQKQLKGYIPVADSLGQNSKSVGQRFKKYLGWEPQVNDSVEDDIANVVRSKAKSLGL

SEQ ID NO: 992943 - protein, 68 aa, Homo sapiens
QTVIYSTIFAGTLNHSAKLALIYYLSRPRNKDASLYSSANQKNKPSFHRSWHQGISLTQVNRIHNRFL

SEQ ID NO: 992944 - protein, 111 aa, Homo sapiens
  misc_feature (21)..(21): Xaa can be any naturally occurring amino acid
ENSLVYSPKVWANILSGNSIXNALVSLEIPRLVERLRRAFKEDGDKKPLTRRTGWKILWDVRRSKVVITEKDGSVWEQKVSELPPSVQEIIAVKGLENWVKSKLQALESES

SEQ ID NO: 992945 - protein, 105 aa, Homo sapiens
AYTEALGNHRQYGPHWETQMNKVNTALSFNKNKKKKKKKKKKKKNHKKQKKNRENNNTTLTPNHTARAHNPPLYTTLRRNRATLTNKQQQHHHPPHSPLTPHSYN

SEQ ID NO: 992946 - protein, 341 aa, Homo sapiens
QLKTWSSSTACFLEEYDCNHDRNKVQWWTIHDGAVMCMDANITCDSKLQAYRQKENLLIYGTGTQEDERYKDAAKANLNYIGLGWKYRLPSKWCWFGYGHNGYNENFMEGLQPTSLMFGGGATVHQVTEAFKLITSDTQGTGFLVNIFGGLMRCDCHLHRVSSWPPTDLEINNTCRGTATTYTESTDAKATDSGPVDFTNYLLVTDFGMKLLTNGRNSSLKSVTFSEASPMWLFNIQLAHMICQPSGLPDGGKMCYNITKSGSWISTLLITGRNWNWHLGTNLQALGPIIAPQRRFHAFRPLSRCAARYHEHAAAPGTPAGLTTTLCPHPPLIHHPPFTHQ

SEQ ID NO: 992947 - protein, 35 aa, Homo sapiens
AAAYYYYYCSEFKLLTMYGDMWNAGQYSECCPPSK

SEQ ID NO: 992948 - protein, 114 aa, Homo sapiens
MALLTRRLNRLFINLPTSLETVNNGLNHPLPYIANGASIFFICLFLSHRARPILRIISLLEKPETIGIILLLASIANSLHRLCPPVRPIYHSAGATVITTSYYPVHPYTNWDMT

SEQ ID NO: 992949 - protein, 140 aa, Homo sapiens
  misc_feature (8)..(8): Xaa can be any naturally occurring amino acid
LALVQREXSVAVKKAIAHYDQQMGEKVEVAMETLRELLDLCRTSEREAIEVFMKNSFKDVGQSLQKGLETLLDAKQNDICKGNLEASSDYCLALLKDIFGRVEEAVKQGIYSKPGGHDLFIQKTEEVKAKYFGSLGKETG

SEQ ID NO: 992950 - protein, 37 aa, Homo sapiens
GFAGPAQLGLIGTCSYTYLPFSSYPSTPTSLPGFPRK

SEQ ID NO: 992951 - protein, 86 aa, Homo sapiens
KQTAPQGQCDQVLSATRLLQAVARLTPQPLAHGGPLPFAHWFSLQLICSLSKHSLTTHHVLGLVLSAGGMVVDQTIVVPALSEMII

SEQ ID NO: 992952 - protein, 257 aa, Homo sapiens
WSRILCLRVLRLCGRVGGIHGSHSRFMGGVLLLIRTFRFEAKVSQIMEIFINYNWLVRKMDMEPTRENVASPGEAPSPSCENIRGGGFPPHFPWGQAFENHSHVTTLAIEATVRAFFHGPPFFREFIAAYSWFNPPVDHFFTAHFKTHLGEIRSVGTEGSWGELIEFAPSVGRGDRTSCGGQAWSLFRCTLGGTFLLENFSGWFSAWNPGPKDVFSRLRGARTLGPESKAWGTNTRAANFFSQKIKFPGGGRKGPRG

SEQ ID NO: 992953 - protein, 128 aa, Homo sapiens
  misc_feature (86)..(86): Xaa can be any naturally occurring amino acid
PTRTLLTYYQSNLKAKPFSPYMQTLYGDYDIDTPWLHSSCHLRYPGPGVIACRQIDQLISIDDERKVTYTRIYASCHRVQSNIANXLLDKARSPKREVPPIKLDSAYALRTSVKREVTTRRSLCSAIT

SEQ ID NO: 992954 - protein, 193 aa, Homo sapiens
MNETVTYPVLESSLSKPYYVQERRHRLVIECSLHPGEVRTGAKPREIREKNQPIIVQGLDRPRMSSPCAIWAFTHRLNSRVRGNVANHVLSAMTVDGSLPLGVIAIDGEKNWQSPNSSSTYATELVGLVSRAQHRRVPPSNTPMETGNARDADMTSQRSCGGTWTNGAKSSSVASEHRHGMMPGRPWTHEPER

SEQ ID NO: 992955 - protein, 190 aa, Homo sapiens
  misc_feature (120)..(120): Xaa can be any naturally occurring amino acid
  misc_feature (135)..(135): Xaa can be any naturally occurring amino acid
WYTIAEIDYHELGRRLQGNNIGARFRKLTWQSEDFNGVPTGISPITRRILPRAFPHTLRESSELYFHPFRIEYVSALEGRWISTNCLYEEDYHIHVTQYPFIVNARELLHTVTKKSVLGXALRYPNSRLSNVMGXCSKKGTMFLISRADYPKYSLFQLVFTIVYTLRIDARIPILNVDTKLFEQGTTFLK

SEQ ID NO: 992956 - protein, 263 aa, Homo sapiens
TELLLLEVCQKTYIGQNLNLQRGPHVRDFETPIWGNDPCRRADHSGTICLYAVNCAEELSTDLTAPAVLLLRCPKVSTPTKPKTIRHATQPVPGGRRGGCVLPRACTTILFSRLAALQTCCTQTLQVPTLRAHTATMRHVDAPHSNPNDAILMSDGTTTTIHHLPTEYGYTNWTLTQIHITALTRPATHLALPYSTHRTYPETHTTIHSWDTYHALTLDHSRTTPIGTTSHFRLITRTQDLTDTPSHAPTAANKYSTSALLTL

SEQ ID NO: 992957 - protein, 331 aa, Homo sapiens
  misc_feature (251)..(251): Xaa can be any naturally occurring amino acid
MTACHPQSSPLGTRVQGPEHPWSFQCSRGEQTDLTSNPLASHDYILKIVPTGFEDKSGKQRYSYQDTVANKEYVAYSYTGRIHPCKSWFRYDLSPITVKYTGETGAAVQIHHHRVCAIIGGTFAVAGILDSMHLHSTLRPGRRSSMGRECIDATIRSLIVRGTLGIASLASSALSPLALNLCPRSGCCPPGVCGRGWGTVKDGRCVAGYLFSRVLFDKLPAEVAFPFSGEPPEPVPARCESRYLATLLRPXIFLRNPNAIVSQQVESSTPEGDIRLLFRGPAQAHRVIDSAQTKTAKKIPTNVKYIDLNKDNLLHTNKVPPFSAADSPSTN

SEQ ID NO: 992958 - protein, 245 aa, Homo sapiens
MKSHITSDDVETLGFQSMSTSRVQLVYVCSGINQVNHRGIGYQRLGEMGEGSFKVIPEVCGMKVLQLGRERWWCYASRSITTLVGNMEKPTHISYVNYDEECATRESRKYDRNKVITGVESVHGLDVCMVLIVVDSVGEGEDWYVQEMGTIPITQWPSGLYTPGGIEEQRKLVSVINASVEFRRNTASLTGRENLVWICKLSVERRNDWLKQKSGATPDKSYVSVPSSLGCTSSDHDAWQAKVVT

SEQ ID NO: 992959 - protein, 30 aa, Homo sapiens
MFSAGGFRRAPGVDRIRSTGIATQTVEGIK

SEQ ID NO: 992960 - protein, 149 aa, Homo sapiens
MWLFEQWSQQVIGNTYFRSLVVNRGSSGKRPTVCVSCTPFQNSHILCQLMATPVPRGHPGCKLMPLLLAGKSIVRKSIHSVGAKAGLHDRGHTPMLSSVRKTRIPRSKGVNITPMVPPQDSHKSVPWLRSLMRRSGNWCPRGRVNEVGG

SEQ ID NO: 992961 - protein, 147 aa, Homo sapiens
  misc_feature (28)..(28): Xaa can be any naturally occurring amino acid
  misc_feature (57)..(57): Xaa can be any naturally occurring amino acid
MHNSMHIMSTLASNMSISSRHLSKRPNXNTHVRTLARKGAVRTLESQGVLHDLNTAXAGPIRHSYSFNSPRYIITLYCTRINQPLISSYQYLPEGTSYSDLHFVPMNLLDNHYLVHPKNLHSDLPDSYEYEPGYPPIPIRINSINLL

SEQ ID NO: 992962 - protein, 429 aa, Homo sapiens
MVCRQARMHALYALSSPVSQPFSQQQARRWCVPASTADNMTQNHRTVGAAMCKLFPNTLWTQTAHARRLRSTTSLIWLPTLMWTHGTNEAFTAQSSQRTNGQRHVLHHTKAHHDCTTGHCTELLHNTDTHLESVQRPQNPTNLMTAAPIRTKQAQRCAASEHPLGNERLGRTYPDQPQTNRYTEYPDMQFNNTGHTQGLTPRTKESRDSAPRAPQAHDDLGETAPDAYVPAPRTANATPEGQGRASSMGQQTMRNAHKSTPATPCSSQGDELKQTPGQNRPTPRLKKAIRIQPPNKLKTPKHTHAKQTTKAQDKPRRCWPRRHRKQRTRHFEKILKTPHRTSRQRRHKPRTTQQNTTRRTRNRTDTGEKHNQNGSAKKKTPQSERAHNKKTSPRQTHSRTTNQEKTKQRERAKNTDTERRITKHQTQSH

SEQ ID NO: 992963 - protein, 171 aa, Homo sapiens
MFPIGLLCLWWCMVAIHYVSPLKDRACAKFCVGGSTHVVDEAGAIVTLQGWGSYIRGTLGRVGTLFSHFSSGSLPESQGFHLEGLVLVLGWAGFKTSNKNPYPGILVLAGGRSLWVINPFYQGDNFGYHPVGCHPRVAVNILDVPHRQKSGLSAIPCPDYRGGSTLHTTNK

SEQ ID NO: 992964 - protein, 339 aa, Homo sapiens
VFEVFEVFWNSLAGDYSWHNPAQGAATSTRRERQSTQRKKRTTEQESGQTEKEHTSKRPQAKTQAITMNTTDTQAEHTNNRQTNTDNKRTPKPHRTQGPQNRNRTTQKNMKKGKDKPQPGQKTEKQARHNTEANTTKKNSKSRATQKKELRSRKRRAQTDRCDKRARRKRQRRKERTERERKEKEEEEQDEKQNHNNRQKKEHRKQRKAQQKEKEKETGRRTTNERNKSETHTEEDKEMRKQSKEARTERTRTEKRERNRRTKRTKQHKHKNTQRKEANNENETNRETNQTKKNSRGEAQKLQHGRQEKARPEHQRAERKNANHDTHKRAEATQKSKTT

SEQ ID NO: 992965 - protein, 456 aa, Homo sapiens
GLVWKWSFVLVAQAGVQGCALFGFTETFCAFPGFKVILPCLQPSRVNRDYRRPPPAPSLILGYFVIKNVGFSPCVGPGCGSQTSGPSSVIPPNFGLPKVRGIIQALSRQRPSLRIASLFYNKCDKVPLSVYSGGSHRNTAGHFSLRKTKTKHKQQQQQNNKRGGARAPTKRDIPQRKRGSTKNIIHGYITPADILCGSPNRRGAPNKRRRRRITKNAQTRHGRPDRVSNTPAPPRQRATHNASNNQGATLLGKEEQPPIQPRGGGGHPTWGATNTQTDRIKGPTGENYNHFTARSKGGVNPQGENNSPRPPEQTLCATPRLAHLTHYFRERRNITSYRTRHKHTQQPPHPRRHNPSHEHHQLNEAEHRRRTKHTATTNQNTDHTTPTQSENDDRNGPDEQTKHNKRKNNKTSSQKARKRTSTTHTQANTTAQTDNTKQTNDEPKTRSSRRTKIDRN

SEQ ID NO: 992966 - protein, 129 aa, Homo sapiens
YFTRESKRGGSGKRGLFVCPLPTSSPCGVWAPVVALLALLPVSTHPKESVGTSPLRVPCVFFPQTPFNVGEGKREEKGERGALCAPLSLGASLWRGALCPTAVGFTLSLWGSFSPRGKIGGNKPKPRGD

SEQ ID NO: 992967 - protein, 343 aa, Homo sapiens
MVRPHYLQKTNKNKHRNNNDTGARDERRAEEATEDNLNNAGTPRGRDASTASTTPHAYHNPVNLGSYRANHTPSFDSKENNKPNPVRRKYLTTAAHSRGAPGAAGQHNQQYREELSRGEGKAATEQQPPQHNAEEHRESVKTTIAHNRPPNIAHTTPPPHNQEAFAAPAEQQIEPPTPRGHTSTHGRAANHHPGSRWATETTDTQNKPTDPGKRLSLPTLPYKNNPNIKTKLTKTPTYKHQKPLNITPPHPKPTPHTLAPNHNLNHHTKYTRLPLHTRNSDNTATPIAEWRRANKPTGAPPHTPPSKAPTTPTHRHTTRTAQRHHPRHTTHQHGTTAHTPTTN

SEQ ID NO: 992968 - protein, 115 aa, Homo sapiens
MICLRPLSYPDSDVILMCFSIDSPDYLTRTIPTKQVEPQKSSISVPRCSIILVGTIIRIFGMMITKAGAYAKHEAIDPGDIYLNHRLEYLAKTSALVRLYRSTLELVVHATYDPK

SEQ ID NO: 992969 - protein, 174 aa, Homo sapiens
LLHSAWTEPGARSPPRRPTIASPTVTSSPHPSDLPKDPAPLQRRQHRRRRRLSLVAAMTTASPRRVRQTYQQDSEAAINRQINLELYSLLVYLSMSYYFDRDDCGFEELCPILIFTQSHEERETCLRTLDADAGRNPNERLGRHLPFTDDSRNTKHCDALVNRRGWRWQLALCH

SEQ ID NO: 992970 - protein, 116 aa, Homo sapiens
MLEGGGLHRRAQQGYRVLKPYGGWVGEWGSGVATLRMGAKATDVYLTVTLHWGNLKNFIPRGNYNDVALLGKIMGIFRKNHVWPPKWLPLVNLWVVKWFPLDFSGGIDFGWWSHKS

SEQ ID NO: 992971 - protein, 391 aa, Homo sapiens
TWLLKAYQELLATVNEMDLSPDEAVRESSRIIKNNIFYVMEYRELYPGTIIRKFDERCQRPNRIPFDDLAGDQTTSFLKMWSDSVGADGNLVVQKKQKKRRKTKKKVLDQAIVSGTVPSSPEEEEACVDKHHGMSQATRAVTPELLETQHGTPKEHTMTADTERAKWHRTQSERQQDQWTNGKPKHWNHDKDKAPTRDTMTTSMTRTSNGNKIERPDRHECRKQTIRAQILSKRAQKKHTKDDTTTQTLGTRTTRKHKHNKNPRATTARQGKTHTRNADIHTGNSDSRKEDQRESKPDDDRRRTKVRQRQESDNQTQRTKKSKATHRGKEEQERQTRTRQKHRQNPTSKEGRKQTRGEDSEQETTRGSRRKSTANPSRKDSRTDTGARCRR

SEQ ID NO: 992972 - protein, 89 aa, Homo sapiens
IDAPDGHRDFIKNMITGYISWLSCADPVSSLARMVGWLNFECLSISTELVQTLHERLPVLGLTSRAVVKTNRNMSVLKHRHEIPPEVHR

SEQ ID NO: 992973 - protein, 102 aa, Homo sapiens
KTTPKSQNGNGKDSYQHVVIGLGRLRASPPHTGHLIYKLRVDIDEKKPLITYLRRRLLRWERAPSSMPGSWIKLKRLERRNCRLSPIDHSPMSENHETSEVL

SEQ ID NO: 992974 - protein, 414 aa, Homo sapiens
MTEPPRNMGLCEETKPITDWVTQKRQGEWNQVGKHTWDIIQENFPNLTRQAEYSNSGNAENPSKILHKKICPKTYNHQILQGLNKRTILRQPERRPCHLQGILQTNGDSQRKPIRPKNGGPFTSFGKFPRNSHRAQILGERIEFFDTRLGDSPARCNPRAQQVSSTDTLYRTNSPTRQRSEVNASPQEERATTTIYSQRKAPPTTPHRRLTAHHSHPTTAPRSASPHTHAHNTAIQHSTNNLTTQRTRRDTQRQRGRVRETVQAQRAGDGARGRSSDKTRGDSGEKKARDAQRTDEREERIVESTSTHAPREQNGHGHQAGDESAEKNELTTEQCTRNNTEQSRTRRDENATDQRTAEEARQYEKYRRFHERPTGSESAENERKRVRRGERKRKERDKGGPHTDSEQRHEGAKN

SEQ ID NO: 992975 - protein, 77 aa, Homo sapiens
SGVPATYIHQMLLMTVRWFAFVRFTTGDAMSKEGSNACAHQSTVDRVDDTVQRVLLDCVQKPCDWIKDRLDVMEVWY

SEQ ID NO: 992976 - protein, 447 aa, Homo sapiens
MGFFLLRNAGGQLDEAAKMHQVRSLSHYIDSRLTKPERNLFGENATGPMGELKRPPCSIPLFGRRTFLYTLFITRCKNVDDHSHRVLAANVAGVIPERNEERDVITTLGVRRNKQGEGAGESICTARTNLWWRSADIHASGFLIHVHMYTHATRLTHAHHPHSRQHTTRLALAVTPRSLPSPPSAPHHQPHRPPRSTRGGPATPRDGPERTRGRSARSGAGTATAAGSRRGASTGQRTQGGGRVAEGEARAARPRGSERRRRGGRGGAQVGESRWDQGRQNRARHKQPSTGKNGKSGREQQARREGQQGQVGNEEARDSQQRKRDERHRTELQRDRRRDTERTQSTGQAHRAEGGQARRGRRALGGETDQATAPKRGEASRQRYAARDRGDQARTRAKRRSGGARRERTGEDGEIGTRAQGRRGRSRREARATNENREARAAERDSD

SEQ ID NO: 992977 - protein, 389 aa, Homo sapiens
MRPPYLKIIRAIYDKPTANIILNGQKLEAFPLKSVAKNRDALISPLLFNTGVGSRARDNQAGERNKGYPIRKQRQVEIIPCMAEDMMVTCRKVHTVSAQNLLKLTKQLQQSLRTTKSTGAEHHKQSPITSNKTDTRRRAQIQAGEPSHYNKMGTHKHNPHKHGRSETKKSTPPRNGPQTIPRHTTENTCDTQSGEPIINNTPHTHATETHETQRQTHGTKTVRNTRGTKELTTLIGHAEHPPTTYERLHTQQREDNKDTHTELYDPQTDTRTTTTSTQQQPHTTTTTDATERRRLQATRAQRTAEERYTRAPPGNTRAAEMTRNHPQQDPHDAHTRTHTHAHAPSNTKPRAHNHHTDGATHQPQAHAPRHTQSAHTQTHRSTSDAAPDT

SEQ ID NO: 992978 - protein, 232 aa, Homo sapiens
MAAGAAAPTPPGARHLHTPPIHSHRTGPDPPNVEAGTDTTPHRRRAAETTPPAEENKHPPHHVNPTRRTHTQGGETPHTTHPPPARKHTAHQRPKLTTRPLGCRPPSTGRTLHAARELKIKEHTAAHLTQTEVQQQRNGRTATTPTAVTPRPKHPPLPPPPLELSTNLSSSSHRSTARSPITRTPRPPAASRQYNKKHNSERDLGPKSSIPGFDAPPPAPRPQRARSHAPPP

SEQ ID NO: 992979 - protein, 284 aa, Homo sapiens
KGRCFVSAAELPDRPRAPAEKSLEPQHSDGTTAQLVYLDDCGHRVVANVGPTVCTPEVQCPCDACCEGVEFVTKLVAMLPQFCRRRLTRRTCGMPPRSPDRQAPPEKICHEEEERRVDDDDQGVRQEIAPEQKREERALMVVYTLNDAIAETDLTVRHIKLLKISVVLMERAYALAMEETERKARRGTDVDVYCFPVSDVVECEERNISYYSEYRMTLGDVGAWQGGGESGVPDVFRGLGYAATGTLRKRSDVGMLEDTQFSSDSGTDETFGWVRHLMGDLGSC

SEQ ID NO: 992980 - protein, 267 aa, Homo sapiens
RTLFFRRSVVAFLCRSQWNEEIAALVIDKWTPDMCNSMVLAGDDAPRAVFPSIVRAPQNTSGVMVGMGQNGLRTMGDEGPEQALAVLTLKLAQLRHGSRSLNVGRHWRRLVASTTVLQASCAVGPEEHAQLSVERRPSLNPQRRNHERMMTQIECCEDHSTDPGLVYTWPSRPVLSPRTPLGATHVALSWTLETGVTHTGPIYEGYALPQAILRLDLAGRDLTDYLSVKILTDVRVQFNQPRAMREIVRDIKEKLCYVACFELAMGT

SEQ ID NO: 992981 - protein, 71 aa, Homo sapiens
GTDEETTNSFCRIVQDDKYRKNVLDGKDKTVMDGRSESTLMLTGSGHNDCHLMGHAIDVISNTNIAINIWT

SEQ ID NO: 992982 - protein, 115 aa, Homo sapiens
MPRSLKPAAELGDNRGQVTGPRHLGTIRDRNQHMRQGLLSRRLENTRKGLNRGPLSLPTEPACCVVLRLASGRVSLGQGLSGGDPTWMSGAGFPTRKAGQSRDAVGRSGACPLPC

SEQ ID NO: 992983 - protein, 70 aa, Homo sapiens
RLLRTRGGVAWGLPEEQSGRAPGSRESSLPGANPLPGWRLLTQVGAQVLGRLGDGWVLALVPRGNSRHTS

SEQ ID NO: 992984 - protein, 316 aa, Homo sapiens
MASNVTNKTDPRSMNSRVYIGNLNTSVVKKSDVGGNLYEVWHKLVGCSDHKGLAFVQYVNERNARELTDSRQRIGRMIAGQHNRYKPGLQQPKVEPERKSTVKKAEQTNGRLVRDTITDKALMNKTTEHTYTKGSTRKPRTKIPILTTTPKKTRSADKGPQNTVKNHNKGNTHTKNGEKKQATQTINNGATKRHTQNDRHEHRHTTHTGRRKRARTPTTHKEEHTGTPEQPQGQPDQRTQPEKNNHGRTGKQDRPINRDKEGERSEEGAETDNQRRNTSGHKRPGEKERQRGELAQSMQRPKKKNSEQRTDNGYEY

SEQ ID NO: 992985 - protein, 107 aa, Homo sapiens
MEKKNTKKVWSLSGLPTEAVALKQPSASLRLGEISLALWDIRLEGITARFSSQLGHTFPMCLCSGERGRPVNIVPQRSHSNKRGQRGGLILRGDSVPKKYPLFTQVD

SEQ ID NO: 992986 - protein, 355 aa, Homo sapiens
GKGTGGVEWRRGVAQGPGASEATRWRPGQRQEIMLPLVGRHPTRAWTLAGAPTMAGCAKPVLLHTSSVLPPRAMPIPAMTKCPQPGSSQSFKQHRAHVFQNDPDTPSRNWIPSRASTHYTDLLLTTMTTRNVYRDHTDIERRTRPSSTEHVTPNMSYNQNISQKYGQMGRQVAPNTVYRAIGGLCHLNRNICTRDCRERSRKCRQATKAGQGRHLKGWRGSYKTDTQTMGDTTHPRQGCPPRSTYSTGSHTGTEEETRTSDRAMMPQATERERIRTLRTGDTENTDREKQKHRTEETANKGGRAHAKANATEPIEDREGQEKSEEEQEEQRDRTNGPHEKPDDETQAKKDRDQRN

SEQ ID NO: 992987 - protein, 236 aa, Homo sapiens
AVSETVPALDVPGLAVMLVVTAGVCCGLVCVTCWLVAGGLVCSEWVGFGDQSGRLLLLLPGLWFPALEQCLGPGLAAGACHGCPLLGAGICDSLRRYRTMLAWLGERVALDHLSGADPKILFLFYFPAAYYCLPACVGISGALDHASSPMWLNLIFNVCFYYLETWPFLVGSMSLGYYSPGSSPVFTSSPSSCEDWSRHALLDTCIDHSEQSSGPVIDVAMSYRMVVHSRPRSPME

SEQ ID NO: 992988 - protein, 473 aa, Homo sapiens
MITVGRSDQWWRLQTDEHSRWLRATRQGETSIERKRHVVMYGVGDAGRTYKMYLPDGNPSEQTHYDGTPTLLGPMAGTTQKRCNCRETTIEDTNGGHMDERRGHRAMNRMVSLNGTENEQQGTEPESSSTTGDKGLEDTTQEDRDQTDTIVDPPTESHRKKMHQNQTQDSAPEADKRKRRQETPEKEKKTKDPGRQIIHTPKQSTDREQETNKGTNTERKTEQRGARMKNMHHETLGNTGQGSQGRATGEKGEVGDEKEENKEKSRQRDKREHTGIQQRDTKSGKEAQREQEEQREEAPRQRTANHTTAAEENGRRHESREQQNKWKNRKAEEAETDSSSNAEKAEETETTQRADKQHPGSSETDAGDQRREKRDKEQDRRQTKRQGKGEQDGRTDRRAGQPTQAKREPAAERDYENEKRKDEEKQADRRGTAGKDRQKNARAWKHTEKGNEESRRRSKRTRNTEQATKRQTK

SEQ ID NO: 992989 - protein, 151 aa, Homo sapiens
  misc_feature (4)..(4): Xaa can be any naturally occurring amino acid
  misc_feature (52)..(52): Xaa can be any naturally occurring amino acid
  misc_feature (54)..(54): Xaa can be any naturally occurring amino acid
  misc_feature (65)..(65): Xaa can be any naturally occurring amino acid
MAPXDYADIRYHIAERADARDRSDESILSYEETIQQSYESVSADYVRRHASXGXTESYRCKVPRXTAGSIISVKRPCEAKRGSIRYHTREDRSVAPLACSGPSMSLGIKSRIYWHMLGTLLNHLTCVHTVIVHVLFGGILSVTKVWMRHSA

SEQ ID NO: 992990 - protein, 390 aa, Homo sapiens
MRTAGVSKMLATGPANAAVQAHDTGAAMTGPNARWPCGPFSTSSRARRTAESDGSKDAEQAFGAGASGAETVTPRSYLHSADENHNDIYYAGMGDLDSRDIYDGDNRHARHGQKRAKLGECIRICIPQGISEAGSPPTSTWTLSHDDPSMRCDPGEVAEQKQHPMNTGKKLPGSIKVWASIGGSPRLGAKKPEINSDWAISFQLVSGIRNHKNGYEMEELRVDQRRVRREGVEERANAHEGSRSTTTTQATTWTDEHRQGSIPAGEMARNQWDRAQGPGNESKGKALGGHHRRVKERGKQEAVYKERGKARNPEPQRKRGHMETKRTVGSHHECLITRKRRYQREGNRSHREKNEGGTTAATQAQPNTTKSKRTEEETRSPRERGTKRTD

SEQ ID NO: 992991 - protein, 303 aa, Homo sapiens
AGLANAWTCFGTARPIPPPVWPGNGWAQFLLLWCGGAAACVLRCPGVLCDDLLPIPDSPVCTSHVATAAHPWLWSHWKPLCWLTTCSMDQLLSWTLVPGSLPLCVCACTPAGLSACFLLLVTNVGFAWVKHDGTLAVVLQLMDVQCNACSHLHVMMQHAVPSDTTCWPMTEQHLNNLMAQLDPLFELCDYSVLEPSSELLNMKLWTIQKLLQDSKPDKGYGRLQNQRPCRPLPEDFLVTRRHQEDIGGQSVPAKEPKIGAQMTFHLANSWQWGGNNGNVRQLWRRAPLQSLGWGIGCIKVIGR

SEQ ID NO: 992992 - protein, 111 aa, Homo sapiens
MDSTSSPRTVSTMTTMYSLVCLLLTINGDLVRRGHYTMLYPGSTKTMWFNVDDAIITKASINGLSWTAEGYLLFYHKHVPGIRVMPYLQLVRKTNGNAFGKPHKVILTLGP

SEQ ID NO: 992993 - protein, 69 aa, Homo sapiens
HASNEEKIRVDILENQTMAQAYAVLGMICYDPEFGLDKISAYMKSSPDSSQAPVFSLGWLSGANQDRAV

SEQ ID NO: 992994 - protein, 353 aa, Homo sapiens
MALDWIAKYNQFIASMQSSKVNLCMCRTQDVALEMNHQVFYNVPGGLAPKARVSTKAIRLLTIVLVFTVLNSQGGTFGYSQDWDLPDWGVRFPYPLGRSSNFVSQTQGELPSGTHWSHLLETLEGVLRVQWNPSTVIGDREIRVHGPLRVGHWPFCKHSMSLTDSVAPPRIKRRYKRRESATKPRGIRLRERKPQKKPLEADIGKHNFCSPSLLGVGPEPPFGGTSDEKNLIESLTPVNAHVGPISLKKKLLTTHRGSLIKGKETLKLNLLSNIWIPQHESFWNPIPETNSITPKGGTTTRLSQNPIYYYKEESPVIPKRGVGRHIQETHSQIVLEQSQETISHEVGCDTSHI

SEQ ID NO: 992995 - protein, 150 aa, Homo sapiens
QTWKNIPCSRIGRINIIKIAILPRAIYRFNTIPVILPISFFTELENKTILKFIWNQERAQIAKAILSKKNSWRNHATRLQTILQSYSNENSMVMVQKQTHRTMNRIESPEFMLHSYNHLIFDKVNKNKQWGKDSIFNKWCWNTWPAYTED

SEQ ID NO: 992996 - protein, 86 aa, Homo sapiens
DSWQYQTRAMRASSVSSDILFYKSSYCTNASPYDIISVPAIRLLLLRNENVRTLYCVIDTACEHLTVLIMLSISHINKVTWNPTCE

SEQ ID NO: 992997 - protein, 84 aa, Homo sapiens
YVFPWSCRHEVSTTRGSQSAYILGQNSSLSSLDMAVDTLPDGLFTFICCRARADADNLARYKDLPLDTERRYAQDRRFFVFQIS

SEQ ID NO: 992998 - protein, 327 aa, Homo sapiens
MPHSTDTAPSQRETHTTMTKNHGNTTAMQDHGQHTSASAHPRATWHHDKSTEPTTHPDEHTNPPSEQSNEGQPTKDTSARCTTRRETTKRRKQEQSKDTHRTTQHRTEPNGTRIHTEGIAITIDDTDRRTHIGTQGQPISSPDIEPRRSKKDDNEDQAEYNKQHQSHDSTARYTMRDSNRTHTYPEDPHRPSGTHEDDNPQKRSASEHHRPNMPPHNRQTTNTKQPLHKGQNNDDTPMSSSKHNTTQATAERRTAAQRRTHAQKQHDEQKHDRGTGKAQATPDKHTPRHTRRTRGTKQSTRENSNYKQPTHTKQGTEARRRTQQKTQ

SEQ ID NO: 992999 - protein, 189 aa, Homo sapiens
KICDRQPQTCLLPDFCSRWQRSFIRSEVSLFPPPGPQLVFYPITEGQHSKSREVAIYLPVRSTNSAVRIDGREARSCWSAVSIPLRALSDQSYIALQSWKGIMITTYHTCYCPQQITGSPEFDRVSRAQQNCVEFDSYTSVITLVDGWVVFHPGFGYLSGSGVHIGLTYSFWGDIHAHAATNDGSSVSD

SEQ ID NO: 993000 - protein, 536 aa, Homo sapiens
TRGITTTDMTFQKTHNYESSTTTHSLIISISPVYVLFCNQTQQASLFRLFPEPFSVRARVTDPPSLDTRHTMDIPYRDRQAESSGRSHKRPSLIRERNRRIYDAEEAPPEPIVTTPKEFLPHTHKSSPCTIDVQTIPNQEERQTKRKDTRTHNHYYPSDNGNTAEKQRVPRKQVENPTQTSTDKHATKRRHQKHDPRQAAKRPTKIQNTHNQRTKAHNKAGHPREATHDTARSEEDKETKPRQHNAQPAHQKAHKHKTTKSQQKTNQNYTQTQGSTKKDTSEHHDSNPREDTQPHSNTQTQTRRTRGTHTQKYKEKWTKGKDPHTRHKKNQHKHNREHNTPNKEPHKERKRHRQRTWRNQEQNKSTDEQRSNKTTTNEKGEKSNDNKHADHHRPPATHKTRKTTTKKVNKSTKESTRPAQRHAARPKQQNDDKKRNISSRQEKANDKRAGEEQGEKKQRDTERDERAGKRRRWTKERMPKQVGATHRETQRQTRTRRPETQRKENKQEKQTQEERARRRQQSGPRTTTRSHERKHE

SEQ ID NO: 993001 - protein, 111 aa, Homo sapiens
MGPPGGKHGRVTRPVLPLSHWDSGLTTGGVGSLSSRAFGGWWAPAPSLFAPCVNRQVPGQGAGEEGHFWDRSLQLYGGSLSLWRGYRGEYSVPRFWLLRWAGVTSVSLTRP

SEQ ID NO: 993002 - protein, 117 aa, Homo sapiens
MTQFVVVTRHGPVKPYITRRGVELLMAIPTCEASLYSASNEHSVGKVAFKVKLRTNVSINEQLGYKPQTTVRTLVRNIPRYENWLNNIAEDAIVSNYAYGFNADGESRPRKDGKCQV

SEQ ID NO: 993003 - protein, 318 aa, Homo sapiens
MWAGNLDLSLEIKRLLEDTSYGSEICVTKFEPRALRQSSVALGVSESKHAHKGKEPHSQLAAPVSRKYLQIGFHSRMDKLRQANQVFKYLILTLYTLWPSEPVIRPLGHGDILNNIRDPFGPITMDKLISTSIVKLNNYYSTLYYSSAGKRSRPSRAGTHRWMKPPNERPSRQQRAPRTARETHITHAKPTKHRTTNTSTKHQHPHGAEIQKKTKRKDNSPRWGHITHQTPTLSKMNTTLRAPTRHTNMNQTTKAMPEQHHTRQKQPHKERQTMTNDRHNNMRQTETGTTQYEQRTTTNGPRTSATPSSSIQQMRRDR

SEQ ID NO: 993004 - protein, 81 aa, Homo sapiens
MGPGALLQAISPGERHCDRRAITRETNEVQRDSGRCTERTVTRYREMEARSTTTNYRQLVGDDDYAIAGKGRDKDKGRREL

SEQ ID NO: 993005 - protein, 114 aa, Homo sapiens
MRSNICMHSTIDMQRMATFVGNARIDSMKRDDNESKGADIEPMTSGESRLLPNRPKPRVILRQTALSEASLASLEAVEDEWQWKLWHTVPGVNTSVATISFSSNPKTQIVLESK

SEQ ID NO: 993006 - protein, 171 aa, Homo sapiens
MYILGRKTLREHSGVRAFPLDQLYRHAWNTKPPQRSPTEKLGSSTATATRPCETPRNGPDNPDNKQEITANTENKDLVGPKHHPVSKGISSSKYIGLTGNPLNYNNNKPWRAKKKTNEPGTDQPINKPPRENENTIREHVEEDLTITKERAHNRPVAPHGSRPQKRNTRHH

SEQ ID NO: 993007 - protein, 107 aa, Homo sapiens
MKVTQELDGISIAGTKSRAWSPTNKEFVTYELEDAPTLCLVSTQDYLGSGVAFNMIEDCRKRPLTLKSIQFVRTTYEVIEIVKCIGNQCTVPAGQLGDGQHVGRYAF

SEQ ID NO: 993008 - protein, 282 aa, Homo sapiens
MSVHGTCRDMCTVPRVPVRRVHSPQDTGLQRHDRSRLFSTNTRDCSGHISLDRRLPTRTTSTHGIRTTSGQRRKEPDYIPPSDNSANSWLETASRTHRLTPVGLNHVLFNVTFTLTGPNDNISTPINAAHNRLMDVAIKIFLYASPDRNPTDAGALIPWPASPQPHPHESTIVHPTPSQPGQWQTFRNTNAMGKLTRPRSLHSTRNSQHELFTRLPTRLSTTLENTPKREESQLGVAAWNHALKPIPGPPTLYIVSRPNTPIVTLTKHYQELATTALVPTPH

SEQ ID NO: 993009 - protein, 214 aa, Homo sapiens
MRISSPKSLIYCAGGTRPFGLMSNTGNLHPIVERPIVCCNTARHWHSGTYSHGKLQRMIVGYHTRPLNDLTPTSNPRSSLMANQYHRDVSKGDTPWMPYHNNERTSHPLHTGGDSRPLSINTISPPHPKRQVRPQPDPITPRHSPAAELSFRAVTNQTVPSPHAQPHHKLSRRPAHAHPRPHTHNRLASPEQHDYPTEHTYPHGKPPSPKPVID

SEQ ID NO: 993010 - protein, 305 aa, Homo sapiens
DGAVRVLYPASRAGEQNASPRIPGIPVLFHCIPPARVGPRWTWIRRGPPYVEVKGNIELKRPLIKAPSQLRLSQEARRQEEAYQMEDGREPEKKRTMRPWVRRAKLPHPTQRVPSLTTVPQHTEGRPQLTRFPRRTRTPVYHSVVATGLEEPEARSCCPCPEVWHMMVCLPWQEGKNTQDKRSAWDLQGQPCDLDAATKTVPREDSRVDQDENQQLSGPAQEMPSSQVRPGGAERTPPAGVLQPRLRAKADHGTQELKDLPAGPERNTGTRQKACAPPRHATRERHMFNTTRRGNTTHDTPPGPQ

SEQ ID NO: 993011 - protein, 147 aa, Homo sapiens
MRDMRHTNWSFDTTQGWRCTQPLVENICWSNRKRPRGGVTHNTSVAAVSGGGTKRSQPGAVKNGVCGRSSPPRRREIHVIHHICCTRRERLSRTALAPNRPVADERRDHAKRQPTTEVEGVPTHTAAGRTHVSPNTARRTTKNGGVW

SEQ ID NO: 993012 - protein, 310 aa, Homo sapiens
MGTSCNISPQRGQGAAHSHTTCTKETRWQYTDAPWSTQERHRPKWEEIQMLVTLQVDEDIPEECQLDVSQTQGELRDPQKHDVGSQIRKSECDEAAHKQHSAEVNRAHIDLAQRSPSSQQTEGSSQEYTGSIARQTQGTGTHNSEEMTTKRRVNKVRTGIDTYNNNYTTKTSNTREEKSSGKRKNKDKPDKTTENAKSTRTRKKNANQERHKTQQHHNKKDKDKKDGKHRKRGRAGNITQNEKENKGPKKTHTRSEPKRTGTETHKKEQTHTKTEKKEKEKREHQTGNNKNTNTKKHTTRRRKRRRQKHD

SEQ ID NO: 993013 - protein, 151 aa, Homo sapiens
MTVMIIALTWCLPGFFSSNTGAMRTCFFLFFFSWDTDFSLGPQGGHSRGHTSALQWHFLRPEVQGDPGPHPHEIRGYRRPGTPPPGNCGALGETGGFTPVLCRGGQKVRRSQDDAPKAGTGQATARALMKRDELSHETFQKGRTTGWASRG

SEQ ID NO: 993014 - protein, 124 aa, Homo sapiens
RPAGDPLRESKYEADMCCEEISSGITSRWMKQERTVVSGFINCTRRRTRSRRYIIRRACFQSEQFMPARRPWDPPATSCPGATISPVIRLFRFCLGRHLPADQALLILTYLGVSGEQLPLEFAD

SEQ ID NO: 993015 - protein, 245 aa, Homo sapiens
MKGIKKEGNTPRTKTTKQPTHNSTILDQKRKQKITYTHFPLITPEEQQTERLRYKTIVECNHTTSINQGGSRTTVRERRPITPCETHIQREGHNAIRSHGNPTQTQQAIVRHTEKETDGRYHHQATLMAAQRNENGPHKTSKYDSEQERGNYNTTNTDKPHAASANTKQLRHNGTNQIVREEANAMTETQRQQNNTVRSTSCDDNTPNTKQSSPTRSHRVDHTQTTQTPQNSSQISKKDEQPEIT

SEQ ID NO: 993016 - protein, 149 aa, Homo sapiens
MCMNAPKRVRINCENLYSSRSRTKGRESSSRPATGESRSSAIDSAENMDQGHPRIIANRESPTEEPSRDKISALLHVLEFLSVAYNHRFSIIVLLMALATMESIEEKETHLVARTLRELLPNQIRVAALFYLHVRYFLPAPTLGQTSIR

SEQ ID NO: 993017 - protein, 197 aa, Homo sapiens
QEASAVAVREPRGEGAPVLTCRAGRSGLEPGTFRKMAAARPSLGRVLPGSSVLFLLMTCSEKFRLQTSAYFPQMVSVAARYAQGGPACLRCQIYAVRSQIPYKVLGPTVPRAEWLRAFGRMAKTCFSMVPALSSTELDRSAPAALCVCSVAIEDSRPGILNHEPGLSLDRGLSVHVWWWTPVPHRSQGVDRLVALAR

SEQ ID NO: 993018 - protein, 230 aa, Homo sapiens
  misc_feature (52)..(52): Xaa can be any naturally occurring amino acid
MLWAETIMVQFQRLDIVWLVTLVLLGLILVADVEVLYVQRSSGKISPGTWYXNRPRACLTPSYYMTKKAPWIKHVSGLRVYIDLPERVIFHCRESLFQGAHDPLIQHMVGAGTGIQHVVSDYSVCGIVEEVSSVVRCDCGHRMRSIPEMLFVARFPDPPGGLDSPERFTGRVGWAESPIPISRVVYGLVSVRSHLPSAVLGRWVDIAVPVSQFGLVLRLGLWRIFSIMTS

SEQ ID NO: 993019 - protein, 401 aa, Homo sapiens
GVPTKSLFTKTGKQALLGPQTGESSPSSTLNGYSDDRAGLRGLVGPVLDSLVRWETTLGYPGVRVRRVHTGRNEGTGVGKFRTKGVTAAGQKREGVCVEIRREPSFISNTNVLNLQAQGQLFPSDTYSGSRAGTCPYWAPRSSRACVASDHQTHLVGEWPSGEDFFAGVQSAASKRVTSEVLMRDDRSFTNPHSQAKIEDKFQDSFSSLAAKETGNHIIGPCRANGTKGLDRMLPKSQVHSWAKPLDITEENPCKPAGDTSRRGPQGPDQLNEDDMEEHIYTRTYRTPDKKPRNKTTRATYVSTSDRIQPKGTQGMANTWETPTKPETAKPNGGKIIPTKRNCPRHQAVHARHHGGPNTRIGTDKRQIKSASNQDNRTLYDESNKQQVDGTHKNKTNNKRT

SEQ ID NO: 993020 - protein, 104 aa, Homo sapiens
LKRVAEVWMDEYAEYIYQRRPEITVTSPLGMSQSRKSSASSLNCIEFQVVYDDSIVLEDLPMILPNRGMAPGCRHVGGDPKVWAQGCVAELLKSAGAYGLSTKG

SEQ ID NO: 993021 - protein, 131 aa, Homo sapiens
MTETPRLRLIRLITAVPTSPISAQSCWVGITILSKQSATRTTTFFDAREGGDRILYQATYSEFAGTRKFYSFILPGFGIVSHMVINTRAPKKPESLGKAEDEIKEPGLWVSTQYTEKIDRELSVRKRTTAK

SEQ ID NO: 993022 - protein, 532 aa, Homo sapiens
MTRSRLSLTITSLLTELRTRPEPHRGTNTIHATTLSIQPQNTRTSATATPNTKHAQASAAELSHRTHHSPAAEHHDSTTPTQPHNKDIPLGADDNTTHTQPTTPNTPRLLHSNTTATSHRSLEHITTMTSMDHDTIRQNTNEHTGTTQPRAEHQHPTEPPRQDNPSPAHAHYTTRPHTIDLAARTTRAHTTGTPHQISQLTLTPTTNSTPTNTLAHSRHTLHAAYNPTHKPHPHTHTTARAYQMHPKKRKRATTRRGETTSRAQPNTAPCHRRVRRRQANHNATAGHYPHSHADTNQTTSKQRPPRRQHRHVKRTTRRGRDRTRREAGREGIRGRECIEKHAAYGRGDERRISADGEEESENGQGGRRCGVREGAEGRRQAGAADAVRHDDARMIRAHRENNPTGRRPRQRPGQRRRGPALDRSNADHTQQRRRIAMPRPERPAGLAPAGERATRRAEPHARSGGRDAAGSASEERGETPKPAGEDTGHRPRTEPAIQKARPEGAARGRGGGGRRRVGDRRRRAQTRDGRRR

SEQ ID NO: 993023 - protein, 186 aa, Homo sapiens
MKRGPPKDKTMAGAPENNLLRRDDADIDQRDQPSMAEQTTPARGRRSAATSTGRRARQHTELASHTGRNRHQWRRTQPTAEREPKQRHRRRANKNRQETRGKRRQQRSGGRTRQTADAAQRKQDQKKSKRDGQRRNERKARSTSTRRDTTDSRRNMQASAAGGRRPRRATNSPTSAARTEGRRGRS

SEQ ID NO: 993024 - protein, 449 aa, Homo sapiens
  misc_feature (237)..(237): Xaa can be any naturally occurring amino acid
  misc_feature (252)..(252): Xaa can be any naturally occurring amino acid
  misc_feature (262)..(264): Xaa can be any naturally occurring amino acid
  misc_feature (269)..(269): Xaa can be any naturally occurring amino acid
  misc_feature (283)..(283): Xaa can be any naturally occurring amino acid
  misc_feature (294)..(294): Xaa can be any naturally occurring amino acid
  misc_feature (307)..(307): Xaa can be any naturally occurring amino acid
  misc_feature (339)..(339): Xaa can be any naturally occurring amino acid
  misc_feature (348)..(348): Xaa can be any naturally occurring amino acid
  misc_feature (445)..(445): Xaa can be any naturally occurring amino acid
  misc_feature (447)..(447): Xaa can be any naturally occurring amino acid
CDWSSMQLTVSCIVEQSHSIQVTGSEDTSIPRESYHLYLTMLQGSGGATHYRPARVKLSYRDLSTMRYGDTEYKPYTDWPRARTTLSVSSCIERSERNVVVVRVPCSYTITRVTCAELVSVGPPEVTRGVHCGIEVHDEMMALSPLAGVSCNDACLHLCHVLPHCTGNLCSHYTCSCYCLSGPMQLIIATQYVTRLTLYKCVHFATLPSYNTSSRHKCRDTIEISYTPSSDMLSDAXLIYLLKVRTRATRVXPNLRLGDDCXXXRGKAXPTVFGSVSLRNYSXMCEPRSSVQGXATYCGLLVVVASXVRCCTLVWYAIEYKLHVLVHTVRFARCIRTTXVGRTERMVXIKRGTGVPMSAPQGGPLGNAGGRGLGITLPLMGGGSDHCGGPHPSALRGQPGGGRPTGRQGASHLHGRAGGHRTSYKMRARRRTGAGWRATHLCGVXWXVR

SEQ ID NO: 993025 - protein, 260 aa, Homo sapiens
HASDKATQTPLSWQELEGEELRMVCTETVSAVHGDGGMSERENAECAQCEERDQTCSGRDEAPGEQHRGRERQSGDGGGRAQSCPRGACERASETRGETNGAAERMPHMRREVTNHHTALTQNATDKTNKTHQRGRGQTRGPGPPEKKRARQTPQSHAVGSRPGSIKAIENEKTRRGPTHDSGRTLTKHRGDRNTEIRVPPKKRRGDKKQKRKQRKRRHGHKPKKRIGKTPKERTAEKTRHSTDTQTREERHQRDKTNNK

SEQ ID NO: 993026 - protein, 486 aa, Homo sapiens
PRKLKSRVKCPVTKTSPRGKTNSHSRGHREAPTVEMGGGCLKALEVWHPSGGPLWGQVCGRVSPRPCTRPSPNTNGVGKPKRGVAKPQNKGETPVVPARTHKALPHKQQRGNPPIRPLHRAKEMCPTPPRGPLVCGGFLVTSTVKKKSFSGNCGPLWGVECAACSESDTPLQRLGPAPRLLSGALRVSTLSVTHCGWPSPFITTPMLCERVCPPRGLREPLSNKRREKVGERHSGLSPARVRPLYTTRGRGKLRRLSSFFPKTLPAVKAPRERPPATRGGHKKTHRGTTQRSSPRKIPREGERNCNTPRAATPEEAPPPPSVVRVRQTTPPPPPEEDSYPHGRTHRAGRAEQTTHQDRGTTNSSKTRLRTPQPTPARPSSQAEEATPRPHSGERRGAEETHNPPTPPPGVHTTDEHNRHVSGAPRQSLHTQTRELERQTTSQPHTTTHTTHAPTASEQQATHHATEAHPQKQPRATTIHTQHTHPP

SEQ ID NO: 993027 - protein, 272 aa, Homo sapiens
MEGEKVYRGANTQTQDRRESKRTDRRTQRRPRQIRRRTENNKETQEQTRTTKQKQNSQGQTTHTENMRRNRTRQEETEHGREDERATAQHRRPEDTRQEPTSPEATQVERVRQEDDRTSVAAARWKATTSAAASRRTQADGARAPDNANRSRRDEERTQSSTENGTDRKGDRARRGQEREQARTERKKTQERERHRDEEEERLRRRRDERRDGEEERVDELTGDGHERGESEATTINHWYEAERMNRQQKQSEKANRSSSKRWVGRFARSSV

SEQ ID NO: 993028 - protein, 216 aa, Homo sapiens
MTYTHITNCMAADVDRRVKRSYRRTTTHHLSKKAFEYGIILCITSEVILYLRQDCFMSLLTTSRPSSLTPKLGAARGPPQAGISTPVVKSPYKSHSLIHIRYYFCIRTFIFTLQLTIVLIENNRNRSNSSTAVYYKFYWWSRISPFLQASEYCESPFTISGGIYGSTFLVATGYRRTFTVISWLNLCCTICCQSVNISNFSFTIQDIQFWPSKPAS

SEQ ID NO: 993029 - protein, 288 aa, Homo sapiens
RQDVGVHDARAGSELEPGVARRDSEMQAARMAAEAWGVHAADGCGERRCSSVSLVGSCGLTPARSLPGEPICLVGCLASRLDDFLDKSMIPHSRLTHREPSEKNLSQGRNLMSFCCGNVQRTMLTEQNHGVPMTRPCSRSTQTQFLKELSGCLCPCFFDGSESESRSYDEVTALGDGVDVMSHLVGPQGAAGPLVCKCPVSWVVWAFATASTPVVVEIVGMHGPCACALPCGAHQSIGFKVHSALLVQRPERKIPPQGWHLGETVALFCLTEPPSGFTMSSIKLWWGH

SEQ ID NO: 993030 - protein, 73 aa, Homo sapiens
TRRLSRYQFDAFYGGEEYSSGSSMQVQCHAHSLEALVWKGRNAHDVLAYGSHRELVQDAHNCLGARPDELDLV

SEQ ID NO: 993031 - protein, 198 aa, Homo sapiens
PELRGIRHKNVSKSMMGHGSDYSLSEGRVGRVPTVVVGDVQLQDEIIRRIMHVHQVKTTPHGNDSAKAQPGTGPKPRESPTIPRNLHLNLTAPDRTPEGAFDTNPCSYRRYSLTHQTERLRTLNGLHPTERIPTHTPPTPPLLATTPAPAAPPADTKRNPDGTSSHALYPRLAPPPTPHSDYITLRSLIAHHHSTHNP

SEQ ID NO: 993032 - protein, 185 aa, Homo sapiens
MDDWTSSSSCQHYTYIGPSVPTTAIKIRSRCVVSLPSIVSVCLDGSYSWHNGVRARDSSWCGYLRFIKTNEHSSQDLSDLIYSSILSYSNVERLNTYTQVQTLVVSVAFREGLARCHLMGVSPVSDLSAGWRHRGQVNKNDDEWWIHRHGILSEHLAELKIGEGKKILFERNTLIERKEAVGLMA

SEQ ID NO: 993033 - protein, 302 aa, Homo sapiens
  misc_feature (99)..(99): Xaa can be any naturally occurring amino acid
LFEALDCFLPPTLSTDNPLSLPLHDVYKDWWYWYCTCRPSVDWLFSDPVMVVTFWLRVNCFKRKLKSVDNASHENAFAVAMPLLWRDTLLRDSHCYILXAASGQGMFARALNGFAAMTSANDATQPNVKADWFHMPQAVLSCNPSRSMTIASGYAPVIGIRHHGLTVCMQGLLELSIGETIDPPIWLKSLEDGPEILEMSGDACRIVEYGSLAKAHCCVWTSFSRLSSFWGRVAVRDMMTDSCGGVSSYQWTKKSCVELVQSPSLGHEAQKANEYYPYTGTHLNQAGRTGLPTVCSHWPQVA

SEQ ID NO: 993034 - protein, 146 aa, Homo sapiens
MSRQWHLNSLGVDRTPRRTRVFLKNDHTQHKHHTQHTTPPISFRKDSTLNTAEIVYSRTRGPTLRRIVGRINQLEGVHMPIRKVRWRNCKGVVNPEVFRTTVQLMVVPPTTISQQVFGKNPVNNVKNSKQTRGGELERPTKGGLTS

SEQ ID NO: 993035 - protein, 96 aa, Homo sapiens
GRWEEFIWNYYPINGMLIKHHSCELLRRSTKKAVIGERLVRRGHVSASVSRVLDDESDWWSLHQVLASNEKTLVSVSERLDLSVEDLCPSRHRLGP

SEQ ID NO: 993036 - protein, 136 aa, Homo sapiens
MTQQRNYYTHGPYCPAREHKKLTGGPTQQPARINPHPTYRRPHPDPHTDHHQSTQHHSATPIIGPTRHPYTKRLHTQPPTPSPTHTPPHPTNTCTTPQPLSHPPPPYPTYHQNRPPNTSTTPLPHTLPNRPPSTPH

SEQ ID NO: 993037 - protein, 136 aa, Homo sapiens
QGSDPCRLLAIHADLSLLALECSTAWPSHNITYHCKNSRGLHGTSKTGHLKKALTPHRALNRRSRSLRPEGIESVFDPTSVILSGVSMHQHVHHTVKSHGANELDAFEVLRYHPEQPFPDSAAIDIGIVAHLIGTA

SEQ ID NO: 993038 - protein, 449 aa, Homo sapiens
LTCMQQLRGSPDIGHRVSAGCRSDMRQGNRKLSSECRDAAQYSGSSRAQMDTMLTARSVDEGPWVLGMDGPYEIAQGTAPSAKKTWWHATACMNTAETRSTGRVALQLLQPWQNRPTSDYRGNTDFLTCETSFPRGTPKHMDRVEKACSYDDIMALGERPVENTPEMSLLQWLIRYGDVSPFAKSFHCGKLEEMTEGPNYAWSPWFKLSLRTDRHCNKPFPGTNGKWGEHGVRRVGSHSNTDMQVDYLDTASNCSSNRSNNNAPPAQGEIPSLHGHGRKILSLVYLQPERNETLGTGPWHPKSAAQDRTKQHTDRHNRPPPPTPREEAHPTNTPPPPTTEHDNPQAPRAQPAQHTPTHALTRSGDAKNSHPKDKTSASTHSGETAAAEEEGRGPPQARHAPTGSRTTTTTHTAVARRPHLRDPAAEPGGTDRAACGASARTPRPHPRDT

SEQ ID NO: 993039 - protein, 119 aa, Homo sapiens
MKHTKEREEKRQKRGLDEGCRNKEKAKSRQNYTQHHKRGHNKRDQDETIDKKTARGERRARGHPEEEKNGEETEKNKKETEKENKREQLDKKNSNEHKTKSKTDRKRRRKEEKKKKNDK

SEQ ID NO: 993040 - protein, 179 aa, Homo sapiens
MSLLVSIIGDVAGQKACRKWRWSWRNSEDMRAKIHDKYVTGLMIRQQEEPCLTTTFDTACAATVWLKTRDSSWASSVKIKLAVGPNHGNHVARKEGPYDMITRDSIVEAKDENTVPTTPNRKNQTGWESQKQAWQAPNSTHRLTQGLTWASWNPGEPPEAIHYEKTVSHNSGRRTQKTT

SEQ ID NO: 993041 - protein, 82 aa, Homo sapiens
THASGPTQIAGPPSPPPLDRTPPSFHHVPSPPHYTDTPARCRAPMELSGEQYFPLSHQLPKLTPARPQQQIHNTDPSVDPKA

SEQ ID NO: 993042 - protein, 66 aa, Homo sapiens
MRRVHRENKTKEEVKNKSRTTQKNANGHTTRRHTLPHTYASAQTSTSSSSHNEPPRKDQSATPTIR

SEQ ID NO: 993043 - protein, 130 aa, Homo sapiens
SLLKNALKRKDAGLYGTRAPAPPLSHSVRSECLHERASGRLVPHSAVSQTRVRSMFWLRETRVAAPVSMTRATGPYRVAAQPSRNGGCARDRDSLAARGGHTPKYVSCKESCQNHLAPTERARQPDNIPH

SEQ ID NO: 993044 - protein, 135 aa, Homo sapiens
SPKKVFFFFQKPEKKNQKGAPRGGTNLWLPPPKKRAGREGAPNLSLCGALRAPLLTYGCALFLRGESPTVPVKRCFVQPHSVSRPTLFFPPNNFFVGGGGIVVQQQAGHHGGSTLWGVWYPHLNVRCCSKTVVPL

SEQ ID NO: 993045 - protein, 320 aa, Homo sapiens
QCQAHSSSRRKMVQAGSIPLAAASDPIWPSRREPLAAMRSWLAGQPRGTCPALLPAHPQDVDELLLLIWIFSLYLSEQPCGIQRSTQLCSLTKCGRAFSPQQAMHLLATRALPYITTRPAGMSPHAHPAFIHVHHCTQKAHSRAYPNPHNLLLLQSTNQQRTPTPGTSTRAVEPEPHLSRQRRNADSACMNPQHSGITQRDMLGHYPRETTLRRPSPLYSRLAVAIPQANVHSGAPTQARLTPTSTPGPGHSPMLNQPWITAHKPKKAFTTRNLRQETVTTVYVIHMPPPSPTPSYHTHRTTIKDNPYTHRQPPILSFQT

SEQ ID NO: 993046 - protein, 487 aa, Homo sapiens
FSRYTDTFCNVHQILDFSLMNPHLHVYIGAVTLQIKIQNIARSLKHSLISPPTQYPPEATTYFDLIIIALALSLLLRFILKMELIHIAQYSLVEFTHVTVCLRTFTLFSLFSAKAPRRLMPCKSQTLLRDGPQREHTPNIARIKRRPPRQSKPSTCKHNGNTPTARKTKEVEAHTHQTTQNDTQNRKENASTHAARDTQTTSSKRPTTEEDITTERECGTTHHHTSQHTSTTPPPTNQHRTTQHKETLTKHQRDRGSDITKHAQQPGARTEINFNPTEAKSDDLELQIIKPQTTISRHSRATEMKAHDKKEKNSNSKVTYNGPSRRCSKTTETVHIATTLDLHTRLATSAPITTPHSPPPTQSKDTNSHTNTATVHTTDCGAKEGTRRLRIHRTDSNRHNTHHEHNVNHVTEAHTTREHTEEKRLERTARTKQRPNDPKTTQYAWTSRSHTRDDPHITPRTTRATKNESQERERARTTRQNQTDLTV

SEQ ID NO: 993047 - protein, 30 aa, Homo sapiens
DAWVDPRVRGEMAEAEGVPTTPGPASGSTF

SEQ ID NO: 993048 - protein, 97 aa, Homo sapiens
AATIPDLIVTRPRRPPDVHSRFLKGSKSNMATLKDQLSYNLLIGVTDPPEKITVVGVGAVGMACAISISHWKGSFVEDESLRLVSTSQYERTKLIGE

SEQ ID NO: 993049 - protein, 305 aa, Homo sapiens
MISVVRARGARRSDQWPWGLAAKRQRESEGQQMGNPNSPKTLGQPGLRYPRPNELRNSGSSDKQRSGRRGITLSRALTTGAHGSPTAGGPRGSHRAHGSLAPRQGHIARPTRCSSAPNREHAGGEHGRGTTSPPPYSGRQHPHHTPPLVPYTRQPVNTPPTGPNQANLDPREWHPHTNGGHPHNDNPRNRHTTTPQTATTGDPQALETTNSFHNHQNYSKTTTPGRANITAQPGENHTPWNNPNGRKTRQPSGRRATNTPIAATEHARREDAHQQRRPHTTRKQANPPNPHNKERAAQQKTAQSR

SEQ ID NO: 993050 - protein, 403 aa, Homo sapiens
RSDLWGAFVVSSLRRTGPCRPGGRCPEADAAAAADSCRVAVWEVGDHARGLLSVTDATGGAVGLRTDMYFLSGWPKRLLCPLWEPWPEAPFHVQSDPQRAFFAVLAEDRLSIWYSRTSVLICNLQGACKIIYSVWILPSKLNGGQKYHDSCINRQMGYHLGTLHITSTRGDKYLDEPVVIPKGKSPNEGGTPHSHREEPVLLHALQLREMRHHTWTFQGTPSMSMARPAVARSSHASLQRPDRDLPATHSFNVGHKGTAPPWAEKRTTHHLGGSATRPIRRDTPRTTTQHKGHTTSGAHNARHNTREQRATTGSHPHGRGKRPQDPNSKATTADAHTGATHRTPSADERPTGTAGTKKARQHAHRRHPRDPRQKNEREQPRKRTEPTQSAHSTKAHDRTHTQE

SEQ ID NO: 993051 - protein, 343 aa, Homo sapiens
THDVRGRVGRTTTSGPTRPETCLILWPLVLSVFSSMVCVKLPWRLRAWELLTVTLMVLSSRLAFSLCVTTLTTFLGARLTLSVISSMCDGRRVPVPGETLPYTRSEYRALLNSDVALEYLARVSGAGAAMMPELLGTGTTWTSWEQKRGQVGRIDMQTRTNGGSVEQLQQLHAAESILTVTGVSCQRPIPMQQPQPPGLLCEMVFYPVPDIWSHGGSREQVRQAEQAGGWMSAGPWIPSTEHNWGTLSQQPHGLDCLAQTTSLPQSRRKAFNQHWPPGAQATARQRSQRGPHSQSRNIATRNRIHFKHVRHVCTTMTLKVANKRGDNDMAEETVCQSNRRTTA

SEQ ID NO: 993052 - protein, 338 aa, Homo sapiens
MTKLWVVGAVNSCVRWGTSNYGRRTLRHLGALKDPPFEDHVCSWLKQGDRVPERGPDKRRKKLIGRVCGFHVDAWGTYPLGTLHLQDRYVSITHTLLGQGLIPGHTSRVPNVETTIEEPIGVGKMRTTTQPFFDNRGWPYRTGGDVSLGGWAAKTEDNCTIGKSSDTPSLGTHGRQVRTHPETPGLEKLGRDNDTPSRDCGANSTQRRDTRVETLPQGSRSDQMGERKLPQNAKRTLEGTYQQKEQAAGATRSHTEEKHPSMRRKRENRVESSKSIRREGKRREKNRTGEENRETKKTKRRETQKRTTKEKDTEQEQQDEGANSKQNSSNTLRTVDTP

SEQ ID NO: 993053 - protein, 144 aa, Homo sapiens
MLPRLASKLLKLKKPPVQLPGTKITFMQPPPRADGSLGPQRSNGQTSCARHQATAHTDTKTAHSGHTTEKHAYHHAPRPKHGDSRGCPGQQDQDGTRPPRRPTGGHHRWKPERVQHHGTGTPPPTPDATTPRTPWDPTIEANTK

SEQ ID NO: 993054 - protein, 126 aa, Homo sapiens
MARTKQTARKSTGGKAPPEISRWPANRRAHGKCAPSTGGREESLIATRSGTDGASERFVVNQKSIELLIRKLAFQRLGEGDRAGFQAPRPEVYSSASSSVRCKEGIANVVAGWVVCEDSQPVCHPR

SEQ ID NO: 993055 - protein, 138 aa, Homo sapiens
MSTGNNPIGWKRYAHLHGPATHHSQERHYTLITREHKHKRKRPPRPTECAGGAHEALPSRQRRPTEGEITKAADKRRAHERAACSKTRAKLTTNTTTTTNSDNGSDRDITLTQQQQPASDKDNNLATPHTSSEGAKRA

SEQ ID NO: 993056 - protein, 107 aa, Homo sapiens
MATYSVLGKKPFPSQLTYLPKSRNMTLTLSPVTHNTMHEHKWKHRPARNQLYTGTTPGSIQIPRIRGQPEKGYPPKGNSTDQKHRGIQRTRPDVYPQGKAETKNAAA

SEQ ID NO: 993057 - protein, 104 aa, Homo sapiens
MPSKVAGAILMGTSSSDSPTLQALTKAGFIGLRDSLRAEHLSLWVIMDPPTLRPFKSLMVSFLSYLLSLLSTRKEENTAEIGKNDKDVQGGGTKQERTHKDITA

SEQ ID NO: 993058 - protein, 196 aa, Homo sapiens
  misc_feature (46)..(46): Xaa can be any naturally occurring amino acid
MTSASAMLRRGGQVDLHVSRKWGKGQMTRLAGKTYMLDEPRCTLLXVYSWHCLLTGICCGAGKIILETSGGKTLRCVIGSMIRDSLHEQEELTLTLAWYEPNVINDAGMETLWNIKPGLPGNLNEEEGSHLGMEHTYKGDTHTFRSTQGEARDKHRHHKGGHTVNPNSTKTQEKAKGQRDAKTSETGEEHQQNKCG

SEQ ID NO: 993059 - protein, 564 aa, Homo sapiens
MSESDTPKNDQQRYSEQQIARNDPTPMSAQTDAHMGSEIVLTRRPARERSEERQQSSSRAEPTPRKTRERNKREERRRKPEQQREGERHTERRGNTHSEEKKDMFTTHTLVTCILHSFTPLLNDRTRAVNLSDTRVSASLLLFVYVVELPNRTIATPPLNVEQNKHKNTYVTLTASGESIEPDGAQRADDRGKRQGKRQTEGARGTRKGNGSKQSARGGRRGEARREKNERELGRDRASTDQREARRQKRTETKTRDEDGGADRRHKRMTSTASESDGAGREEDDAQRTRERRRDQAASGRERGSRQRTATAEEGKGERKTAKDEKERDTGAERRERGGSKTENGETKATKADDTRERRRRKGHKTQDGIKQRAGSAREEADQEGERERRREKKRERSEHEAETGTSRMTGEARTSEEAQRVREQQRARRDSHGQKSEQRDRSEGPAAAENPESRETGDEGAEASERKRADGERRRDKEREGERWRDDEEQQCSGRGRGEITGREKGKRSDENEERASGGREDEESKEREGGKRENEKDESTRAEEKEQTESRRMRQDEEEAKD

SEQ ID NO: 993060 - protein, 259 aa, Homo sapiens
MRDIVMLDQLDAWTPQHRHGLLGATLSLGREGHVGYLDRALSQSRSTLNRRAYRGPFRRNHATADGKLGPATTCTLCTTTRRAHNWPEVITFGKQTKTLRCGGHLLSIHINRPTLHHAPCAPSIDTKHRLTSPRSEQHQFCTSPNGGMLPTISQAHAHTTPLPTNSRRTWPGRVRIPPKRGQEVAHEEEQFTRTVFPPVGSCENGSCKLHLVRSHSPEGKTKLSRLGTVPRKAPVIRLRRGQRTTTNVRTQSPTSYTTG

SEQ ID NO: 993061 - protein, 121 aa, Homo sapiens
SSSSVGCPDVINTKCIGGAHSSGPLLQDVLLEYDKIHLSSGRNVAFCHAGLTAHNYCCIDKRALHDTLASSQTHHHPLAKDPSYSLESRSHNAMVILDTHFEVTNRKRGVPKRTGAKNNLG

SEQ ID NO: 993062 - protein, 105 aa, Homo sapiens
MVISIYLVQDFRRTTWTLYCLHLSVAVKQHNKSVYTKMDFPEDKPKVQNELCCTMCHKEVRKLRFQKHRYKPDTVHSAKLGRKGDEELWRRELKIPWVQVNWKYP

SEQ ID NO: 993063 - protein, 314 aa, Homo sapiens
MARQDDNIAGTQEFIGRTPHLLTYMMTFNPIAYLSTPWQQSRSSQSHNRLILQDHDHLLQLPQSSLQEPYSLAHFLVPQHMTCSLITGIAWMEPPYNAHAANVDKIAKHARRATGPPDNQRGKTRHSRYTDTSHTPRAQHRPKGPPPPHHWTKQGLTRKQPAQTNSTDTHNDPRQPQHRKKKPTAKPNTQRAHNTRRKSKASQPTDRTHTRTPEVHGSRISLTRWSCTHKLNIRLGRRTYRDREHARYGRRKGERELKRELRAAAERAGGSDAEGAMTAGEDGGEMTSPSRGGRPMSGDAATGGETRMRTGGKG

SEQ ID NO: 993064 - protein, 429 aa, Homo sapiens
GILTRNEHCVPWRRTRDQRPYRQAYELPRNCGKDLKRDDEQTSGSVEKAFEDKIPKRRFSEMQNERREQALRTENEYIAQRSISETQRLFHYFIPTSDLFIIITFYDSFWSLMLIVELCQKESIAYTARMATHTPSTAMETAIPFASRDYNHEVEKTRLLNGSTRTAQVTHVCHVHPQASFLTNSGHATQVIDRSADHSLERTTSLPDAPTTKTSGSVSTCSPFIAHMDRPSYTPEHALVRTISLLTQHYCDTYRRYSAHRIASHTYTLTTSSNPHKHVRSTSDCPIQRTHDHSEDMATCKTVYVHREAVTPGLARARYLNMRTQPEPPRTSLQASHSRRARPPHEPHQEELQTDPPQTRGNKESKHGARDTSRLARTCTGQTRPEVGTARRLTNATGHGGRDDAARGAHGAGSEERARSEPSHPIGQA

SEQ ID NO: 993065 - protein, 431 aa, Homo sapiens
MTEDLRELYPIQHECLITRRWIAGDGHTHLLTAYHGNLHGSRTTNGYDSHGSRSTCTMVCFTPNTQSQCIPERTANLATWSCKGMILTRATTTHTLNYIADASFAFESPYTPCISHDSQYHIEDPRGNPDTGHNSGAKEKTTRHEDIGTHRNNDSRLYAAHSTDNFLADNHSYKLIDGQRVQRISTPTTPHTAASMTLRTTKHDTHQTNETQTHVGTTHLTTPPQSAANHKRYKSNTTESEANHTTPTPPPHEQTKAPKPNDETATAKMRHPNHPSSVPRTTTTQHTHPHTEYTRSTVTQEPHPEPVTELPLQLTQQSHYTSTSLRTHERNSTRKPTTHTQKSTKPTSKDSQLMATPHSHKSCLRCNTRQPSKQTNITDRSKQNGPHQPDPDLNHNTRPHNAQNNILTSPSHTPHSTETPTQPARRATQRT

SEQ ID NO: 993066 - protein, 417 aa, Homo sapiens
THVLLGSQEAGRLPAHCLASRKAPSSRTSRSMDGRCAPAPRHYMSFQDSRSFWPEQIVHCLHHGTAQCRGHGAVSPPTPLYFHGGGHLHALYLNPPPLIHPISMEPTVLYTGDTPGSHLDTNPLQRSTLALCNLAKRWRVMSGQDIWRAGYPQPYYMPHHGLTLSLMRATTDPRACAIRPHHPQGSPNPQDHSAGSTGDEEPAQNPWPDQGAAGSDTPTAENRPLARMTSPGHEEATQRPQTTQRTTQRTPHHQANNEAQDNNTTQPQPLERRQRQRKPKNRARHRRHRRKGHHRIQTTKHIRQPKQRTHRPRDSSNRIYSGSANAGNYDRVTTIKTYTPRRRQRETRRTAHRAPHPHTDAATANRTRATPATEPPAAHRPHQEAQQQPQHAATRPPPKHRHRPGESHPRRSMPQRE

SEQ ID NO: 993067 - protein, 484 aa, Homo sapiens
MTAEHKRTMDNNQVTDPTKVNSTGKQEHCMRCKTQAGSPARQATLPAARDDNRWPLAGTHRLTTRSDDPQTYKDTRTKTRQTTTTFHEHHTHPAALALDCKAERTTAASLAMAEDTIADDNKPHNERDTTPHATRSITQPQHAHQRESHQRTENARYHVQRTDLHRAPHYRGKQRNTEHNGAKKSEQRTMKPQGHPTEQHKHITELHTPNTPGIRTTQATAKETREQHPPGNTATLTQENTTNSDKPQAATQPQTSASTTRARRHHKLTEEHRPTQHARETTKNRAQDTQRTSHGPPPTTTDETHHTHEPNETSCPPDEPQQRTIANCTPADTYNTTHPNDEKRRKHKPKPTIHDKDTRPRYTRKNATDGTGRPHDGARRRDACKQCAQTGGRRQREGEQKADETATERKQHKKRDGVKRQTDRSQGRKAAADDARTAGAAQTRGRPDARARRERARRRDGEETDEAQSHHQPTKRERDSEGES

SEQ ID NO: 993068 - protein, 192 aa, Homo sapiens
MSSTKHVELCYILIKGQFLRMPLDKHMEMENTLISILTGSYDEDFSDLVLGTDNVNNDNLWDITDVVNDVAWAETTIALSCLLIDVLLWTQTILLLGVECRDETTVNTPYTAVTSVMLDAVAFYTLLDGVSEPKLPQLDSMGTTYCIHDSASTRSHTRLNDRMQLVTRSDTHIVAHDKHTQQHQTPRSRHYT

SEQ ID NO: 993069 - protein, 404 aa, Homo sapiens
MRALPGHCSPTAHPRPHQSSSFPHHTQHHLPTNILDITPHQPRHTSTALAFSKPCHHHHEPTTRDCYSRADTPPRNFDSPTLPLAPTTRARTPHGTSPQHVTPYPPLQPTHPLDHSQHATHPPSPWHNHALPRRTHEHLPHNSPRPTSHPTHVRQSIYLTHTPTTPPPPYPTQYMLTTPTLPPTPPNPSTNPHNHTHTTPLTSHIPHYPTHHTPHPQQPRHPPTHIHTHTPHPTLHPTTLPLTLPHSNPSTIPLPNNNTTSSYNQHPPLHYSPHNSTTYTHTLPYPNSLHHPTNPPPLTPTSPPLLHSPPTALPQNRAHGVRSVLPYAHSSTHTAPPPIYTLNHQSVSSLLALPALTPSSPPPAREHTQPAAPDAGTPSPSPVSPGRPRPDGRTLADWRRRTRH

SEQ ID NO: 993070 - protein, 261 aa, Homo sapiens
MLRLQRFMEMSVEQEILVTGIKVVDLLAPYAKGGENWAYRWCVELAKTVLIMVVNQQCLPKPMGGYSVFAVVSVRGPVKAMIYTMNSDVNLVLSTLKDATSKVALVYGPMNEPTWCSCPGSSDWADCGWILQQTKKVHDEYCLVLSDTHLIAFTQAGFRGVWIIGPNSLTAVGYQTYTLASDMGTMQERIYTTNKARDLIQLCTGYIICAWLIDFDLNAGPMATERIGPLRIASQLYCRVAMAERGQRIQAGGPLETELFV

SEQ ID NO: 993071 - protein, 426 aa, Homo sapiens
  misc_feature (53)..(53): Xaa can be any naturally occurring amino acid
MRKKERPWRKAGERIYCSGPPEREERGDLSTRSAERATCDHVALKCTRAHVMXRRQGSNSTAQEVTTKDWSHKTGTVSSTEGMENSDISIVVGLVHIGCPDVGVGPQGLTESSDRGAMDNRIDGTKDAQENTVKGLHRESNHSHVTHERGNVLMARCYPSSPSLGCQLTGRPKINRGTGPKNRGGNLDERPRQNILKHGTKHLPFDEERHPGGQFPRGKTLHEEKGPLGKRQDTGSEKPRTQTQWTRSQNNCATRRTKDPGPKELGAHEAWSHTRVDQRKSLGMKWHANHTWGQRTESQTGAEPQPRGGNSETSNEDSGQSEQTTETRRANNQRNKQQSSDKKRTNGVTTHRDQASSQRAAHQGDNQQADTTPTQPRISGRPDQRQGKKGTNNTKRNEKNKNKRKQQNERRKQKADTQEQNKTERQ

SEQ ID NO: 993072 - protein, 529 aa, Homo sapiens
KVDDESLKELFSQFGTTLSVTVMRDPNGKSKGFGFASSRTTRGMPHKGMWQETATGQQNTNAWLTIILTLAPVHHKANARHGQSTSLTHWHTLLHTSSAHTRHAAHFSSALTPRARCTSLDTTLNAHLCATAPRHSATATASTYLSHAHHQHTSHLHSTILQETPHFSPPRLPFKRGYTWHRDTGQLAQTDTRPHNTGAYTRATNPDYTGQYTYQTYITHMTKKNTGPNPEQTANPPTPGRTSTNWGTRQTCGMKAPITESPANIMNLTGLNGAPPWGTPQQETQATRQETQDTPPQPTHGGTIPNHRVGNPHQTPHTRNNLKLDTAKPTQKEHGSDNRAGNNLGKTQKSQHHTYDHPAGTTHSTLGTAQRARHANAHHITNEHTHAPNRSARIEAMTPHRKDALRQGHYKPRFTIGDERHTQETPHGFAPRYENGEAPYHKTRREQTRGHPSTTRAEHFYTYPPNPDRFRTPPQRLLHTAHNHTRHHLTNHGTTLYTQRLTHHSNHRAATPNTPQHTPHVHATTEQQR

SEQ ID NO: 993073 - protein, 322 aa, Homo sapiens
MQEVHGCWQAQVNTHKAADGIWPGPRLSSKLHLLGQDPVGCSHQTTMDGSHSAALKLQPAALPQVAPGRQRGLLLHTRNNLIGALLAIFGHLVVSLALNLQQVLPHPPGQRFQGIPGPISRPRHGGWDMSLDGFLGCNWVVYDFLRIQRCLSTHPWPDPSRKKLRTATGTSIQNIHHSYRRQEETRNTTEHHKTRPQKARDRTAKDTHGRNQSTPQRQTAPQGHMNRDHHQQTRHSRAQKDDCNCQQLATPLQAHNSPPAEATTGTEPRTHRHKTEQSQRKRNRDSRRQAEDALAIPTTAGEPQHPQTTPTKPEVRRHKRDT

SEQ ID NO: 993074 - protein, 570 aa, Homo sapiens
DAWVDPRVRASLVLKLYFTATQTIGNSCWHNGLYFTQVANKSRQHWRLRRDWTHVHDTQISSSCNSSTKHLLPLTEQHATNCLCHTRTDGHYRTAHMTARGHQATRPTAHRASTEQRLHTSHTSPIPCSYTHRCALRQPLNTAHPLHLPTDTCPSTHALQNRVGPPNALHEATTPMPLKAHALAPRRSRHATKLHPRRPLNATRASNSVPPSSLHDPDAATPSVPTGATPPKLALPAMARPAHPPPPRTLPPPLQHPPLHTPLPPPTLHSLYAPPHAHKMPKTPHTQPGLHHATHTAQTPHTNGPSPATSQEHPGTHNAHGHRHHTSPQQPNQTTDEQAPTRTTRHPQQPTERESPPRAAGHTHQARPNIASGSRKNDINTPNWPRKPHNSHTPHTAKTKESDSDMQPTHTKPLAQARIYHHFGDTTHRTRPSTLTPPPTHPHCRTPADKQTQTTATPNPRTTPTPATPPRPPHPPPHPPHPPRRAAPIADRPRRHHSPPRHTLRPHPDTRRHNPHTPAQPTHQRAPHPTHHPTTRHNHPPPRTQTAPSTQQRAHTPPALHHRPRHASPA

SEQ ID NO: 993075 - protein, 474 aa, Homo sapiens
MRFLFSSNVHMAYTQLAAFGISTWYGLVSCTPLVLAIAAQFECKHNHPYISGSDYNGCKSHQPITAQMPTSHFAICPYPAPKSGMAEHHTPSILIHSHRKRQRHIRQPNTPQSVVIVWRHWDSRYWPIYVYHIGTYLPHTHSNQLYPCELNQHPPPPPVPQKPYMLLQPTPLCTSTRHGGSTLGPWQLLHTKRRTTRVTSVQHISAHSPHTGRHSPHFSSTNRSSTPLSPFPLCEPPHLKRVHRGTRQHGAHNRVTQRLVTHTAETHDDTQRYSPSPGHRENDTPHWPRDPRYTDTQLVRTATYPLSPPDRHGTTTQNRDTHNTPLQTPTTNKMPYTTTHTTHTSQRQRQSAPTTKRHADTTHRRSRKREPQQTPRTTNRTAPHQRPRRTHNRGTNGTDQAALNSTPAPHSGQTPHRPKRARPRPNTTLQTLEHTGKIATLEHRARPAQQHEPPELHHAEAAAAHTSPTHHPTQ

SEQ ID NO: 993076 - protein, 454 aa, Homo sapiens
MHILKTALDPQGPMNTDTLLIISTSTLHDPMSTHERSQSRRRTKRGHQCMTSTETSMRTCGIEKKLPLNRWNNGNNNGNPQGDREQQNHPKSKSQGGIPHRQDNPIEHRHHQKTQCEHRTRRENHSNKNAIDRTVHPDHKRHHGHPTVTPLATIHEGTTANGDQPTQTMWGPHYGTDHGAGDHATKRGEIPRNANTQRDHKTITREIGRKHQHNKGEATQREKRGNTQLGSAPPEHWKAKLAKNDHDQMEHHRDSAAKQHKRPPNGPPRVRKCASESPTLRKRPTNELERKAQRESQADTQHDDKHTKRRTEQQRPHKNTKKDAPEDTPVDSTAASGKATATQGERAPNRRAVQTTHSGISGQKPTGGSHNRKDVEASRCSTRASEPQTHTTQRGPERRNQEYQSESRRFDEARHTRGLGHLAARTPREMRHAEHSQANRLAREQQNSEVRAEH

SEQ ID NO: 993077 - protein, 398 aa, Homo sapiens
  misc_feature (279)..(279): Xaa can be any naturally occurring amino acid
MWCLPRNAHAREKRENSHQKLTRHSVDTKWKTCKEAPTLSTPFPVMCAPRVWDHTLGIPKFGTTERSIVQYNPHSPYKSSAHKFIPLRHKDTRECRIFFYFARVGIRESTPRSKYIKRTRERTEQRTHWGRDEQHLQLEKDRQPEVITKRKGNNTTVRSKTKWRGGHNNPQRTGEKYGNMEDATNSKTEFFPPQDWETPRSHNQKEGRRERTQERSSPPTTKKAATIMGASVATTYESPSPRDYLFGRDEENITTPVWGRETTVSSDMLCTHPGWSNKXTTRQEEDNKNVSENDSCEAAEHPERGETRSHKSEEPRERYAGHSVVETIPDGDEQSERQQGGTKRRVETTKAKQGRLYEQEREVSRERSYPTVVSDPTTRSRRKTRGEDSSAAEQDRQP

SEQ ID NO: 993078 - protein, 396 aa, Homo sapiens
GTGSEVSGYRRRSCNNGLWRRRRYAVFQIHQALRSLVRRGNRYWYTGAPVRIFAIYRRRITDRKNVTHAGQTLNLVIPRHRLNREVQAGRKSSIERLCVQAIPGPESEPYLGTTSSDRYELWCSNDVLTTVSCRSEKVKKRGRCRKGRDALMRTTIIQPLARLSDSGVTGDQRSAWLGLPYSCVGIEAIRQRPSRLLARVRPFTNIDAHTRLGNSESGHPWNEINGSLKTAQQQRLITAYGRRATSGLNNAGFTHRYKLQQIGPDPLPAKTTITTYPSSIMHHSTATTHSLTNFLTPTPNPQTITNILEPIYHTYANTILNHTHHTHTTQPSFHINIIQNPTVHTRPPYSPNHPQHTRPHHIHPFTNKTTHYSIIPTHLNKKSITTESRYHYSLIQ

SEQ ID NO: 993079 - protein, 103 aa, Homo sapiens
MQQIDFGTHAFLDARVSKELLFVTLQVRVPEARGTGGYSARNPSLGITRAHSSEGFVKDEGGLVNGPDTHLRVQGARVATCGGKGLPLRNEQGKAKDWREAKS

SEQ ID NO: 993080 - protein, 333 aa, Homo sapiens
MHYGTFIFHVILYIRSMRVTLYKCHSITEGQIFCGNKMVYKGIRPAINVADSISCRIRCQTRGYEAGTRYHEAGMRLSIARLLLQPSPDLTSMLPISTTFEIDGVRLTSVAEDKDRILPWLLNNTSGLSSYDGRKREIYESKLAPTKITNRFRKSHSLDSNVQTATHTKATAGTTNTEPDAKDPATPQNATTPAKRDSYKRSIRPPAQNLKPTGAIPHQHYTQPHTPPRSQTTTAHPDTGSHHQHSCLIQKPTIEQNTRSTTVPTATQPPNPTVRDPQPRHEHANNQKKAGHLTPNPTGHTTPTPKHNPREINTAEHTTSTGRREDDTPSQHK

SEQ ID NO: 993081 - protein, 267 aa, Homo sapiens
MNIRPELQEDTSREIPPHKGEPGKGRITGIGERMRPALARHGETPEYYQKIPGWATAEEETHMLARQQRELLTDEEAHSNEHHGAAHTRTADKDGRRTHNATATHGHATERAPLPPATPTRSTQKQKKDSRRGSQMRTEADDRQNSAEREHEPRTPRERRRERDKARTGGPHKRDVSTEERRAERERNTRDSRSTRGERRTAEKTEKRGDTGERQPRAEREGTQSTAGEERQCGTSTEKERRRRKEGQTTGWRDTRSGGGVARSTAG

SEQ ID NO: 993082 - protein, 276 aa, Homo sapiens
MMKLHLEQFKLDYWKMYQGNKLPDYTSMAMASSAVTKCVAMVRKMADNELNAHDWMSKTYRWFTWLRSVRVYGFTNKNADNQIRKTSYAQQQQVLSNPAEKMMAIMIREVRENDLNRSGQCLDSRQHGHTTLNTLANLSILSMMSSLENERMLKKTPVWDWGQRHGSSKVKARKLGTGHGGRNGAPQLNRRRISSTSHAIGQRPTPLEARQKGTRGTHPHTKSITQKNPRRQTTQIEESQPPNKQKDINNIYTYLTTTKHNTNIEITTQHSSYQTS

SEQ ID NO: 993083 - protein, 235 aa, Homo sapiens
  misc_feature (88)..(88): Xaa can be any naturally occurring amino acid
HFHRRTTRRRLCCSHVSYLIPEKFQSYLWQTTHTHKNRLGGDKIWLCHALPCIGVSGQNDTASWLDVEGKAMSIVTYTQSRGEDATSXCRRSGGWVIGCWNSPLIKCQARSHVPDTHRSPRICVFLGTRTRISDGTKATAYTDTQAPVVPSRILGPGPTNAHAGMTVDVGLRVTSSRAQLRWLSVHRFVGGLFLFPKDQATNKDATGGRGPQPLGCVQTPEDKALLRPWFLLNKH

SEQ ID NO: 993084 - protein, 375 aa, Homo sapiens
TQELSRKIRNQSWIIIASLSPDNEQLPMLEAAPWGPGYQMQVLRSPVRLGGLPSLDDSCSLVGARHITGVDSMYQLMSRALAWTDSLRVTLPDEYRAGLVGKSWGMDSVPQKAIRKDCEQEMRMCHPGVVVNSRGLPDLIEGSPLPPGGLRCKKWPTKVIGAMSDRRWIHVMASCVPGDADPLKVYPDTLKGCMLSRKNRFDDDLNDIDPWRHYRSGKVFGARWMQHWLLCDLDAMHSLLGKSTVTLRVRVLVLEDPVYLGWVVCIAVICAQVSQMSKRQKPDQNSWQEQTCTAFMLTFDRSDPVRTFRLFGIHNTLALALANTVQTPRKQVARRLRRHHFHRCYAPLNYDARSPATCGLATRSDTHNTPVQALS

SEQ ID NO: 993085 - protein, 71 aa, Homo sapiens
KKEGNCSIRDRAEIYSKSTVRPDRVYTETQVYSERRRKRALVGTYADSSQESYKSLEELKTATSILTHPGT

SEQ ID NO: 993086 - protein, 263 aa, Homo sapiens
NIVDPRSRQYLGLQVLFTTLGEFFVFLVETGFHHVSQHGLDLLNFVIRPPQPPKVLDYRCEPPRLPSFSYFFTISRLQNNSFIKLTTQPEIGDLHHTQCFAHNSIDSPWPPPTRLLNASLRGAHHVTNKPQKHSSRSTTMHIPTQRTGCATRDWHTPKKAPGRHHTGPIKTHTPAPELTPTYIRNPTLTLAPRTQTVKNSHYTSNAHKARRRAYTIVIHHTREWARNTTITYTTIHRTPSTLNKRPHYSHRQHAPHSAALSST

SEQ ID NO: 993087 - protein, 172 aa, Homo sapiens
PTMAFITYVLLAGMALGIQNKVLPGGCWCLCASTELVWVVMDGAGPAPGPLPGHRAADDLSTFHLLAYSGYKYVGMILYVCSRGCWFGSDGYYVALACTSSALMYLHCALFADSSPGDPDQHGGPRPPAASPVYLTSGSCSLPAPSSYTADVMHLVRMTLDGPQMALSLPFH

SEQ ID NO: 993088 - protein, 194 aa, Homo sapiens
  misc_feature (31)..(31): Xaa can be any naturally occurring amino acid
MEKNCGASSHSYAQRNRHRTGNSRTLLPIPXVANNFYQPMCSLCKLRRVVHQRAPGETFKVPQSESPTLGGGTKLFSKACDKETRPRVCRKIPFVTTPPTKGGANLGGHFCGWPFPAQEGPVDTQRGSATTKNAPLSVDTIPESPNVWPKSQKEKLFGGPTGGPVFVLPPRLCLGSLQPGGSQGSMGWDAVVAR

SEQ ID NO: 993089 - protein, 371 aa, Homo sapiens
  misc_feature (34)..(34): Xaa can be any naturally occurring amino acid
  misc_feature (168)..(168): Xaa can be any naturally occurring amino acid
MGAIPARASWQPGLEHLASRDGLGHGTPTLVVSXRSSKRVDWVCTKDDLGVESVVMDICRHEMVKRLSKESGVGRVPFFTLGRPLRLGNPLITQGRKGLDSARGAANTLARVKAPVKPQELSPTHCETRGDNSRRPSGSKIIPSYLADAIYGYCIPCGENRGETDSLXCKYVGPNGKLSKGICHKYKKRQKNIKPENHGHWGGIILICPFPGVAGRIPRGYYTNSVRIRLWVGKTKVLNRQGISNVVGDEPDRPGREKTGGHQRIYDSPGGGRPPEKLGPIHWLGKTRGKENPGPQEIPWARPEEPTRRGVNQNITPGRPEEKAQLAGYLGARARGKRLKRLYGKPGVAARDHHITVAHPHDSRQSWPYNQ

SEQ ID NO: 993090 - protein, 78 aa, Homo sapiens
AQGVGRQNTGVVKTTPKKPKCGKGKDLITQHCARSLGHVKFRASSTTYRATRDSIKCGGTRQKTPYVQQYWQKEESCA

SEQ ID NO: 993091 - protein, 264 aa, Homo sapiens
MQRCPSYQGLTGCTRNEPRRVLACDCAHRTRPQNTPPDDHPAKQRGIPAGANTQRTRDTTRASHGRDVSPSHTVAHHPPKNSSPRHHSHEDRYTAPTSTYHTQSTRTPPAIPPARKHNTTAPRQYVPPGTERQVTRQHIVRTQNHARETQQRDLRSAAKPRTTATTPPDARQTLATGAPRHASAESDNARAQTNTHEPPQARPPAPDQHSPTTRPPTQSAGEREQRTTADREWDDRSGGEHDEQVRTRKATRSRVNHNGTPHTT

SEQ ID NO: 993092 - protein, 107 aa, Homo sapiens
SNFIVNLQFKHAKDSRFKAIREKMKDRSKPLFQMQLCGRCSGKHTAESKHSHRHRGEQAFNIGISFDTHSSQSITMDQSVYDGRQSTKHKVSKVDPTYTKPVDQFIT

SEQ ID NO: 993093 - protein, 296 aa, Homo sapiens
RSRKHGLQIVAVTDGVIKVCKRHEGAEVFNASEEVKKAQEGGASYYALSEDQCKNIDAWRRARRSMVGRLVGAQSCTEDAPYARTLVQDGWPDKELDAMPVYDCKPYEIATDEAKTVTDSWQIDYFLGTRRRDKKPPIQTAEIEGNETMMPTEEPNQEHEKRDTGDTKTMDRRARARDHGITGKEREHQGNAAWTDRKGENEAQEGEGKKGPGHRSNTRRGSGKKAQREESQRHTQTIRGNHNTMGHRRRQSQRDQRTPKNNAWTPQRRDGNETTGHGATRNETVATNRRHGEGEG

SEQ ID NO: 993094 - protein, 434 aa, Homo sapiens
  misc_feature (79)..(79): Xaa can be any naturally occurring amino acid
MCVRERECVALKSVSFLTIYSRGARYIVCGENIVFHNILCGYKIYIFSTHRGTHKFSERYVWWEKIYKYKCSHIHHNKXTKQREGGRAPHKDISLPRGAPKYLGGFTRAHILCVTQEGAPPKEKGRRTLYKPKAGHGGRGGYKNNGRWEQRGTTVRQKEGEHPWQKRRTHHHTREGGGAHQQQAGTTKHPNTRRDTKQATIGGDKTITNPLQRRRYTRWGSNTKTETNTQPRCEKTQYVEHTREENINNLRQTIFLIPPGASSYSTLYTTHRTPTSQTQKEHNKKHKHRKENRETTDRRRSNRSRNSDTRSKGHSGREGGDAKKQKDAQTEERRTKRRETHTQNKKNNKDMQTEDTSDSDRRDDRGQEHEEEGHAVRKAQNRSCKADHHREPAKDEIRREKQSENGQRKRDDEQSTGSRTGREGAANESYEVTT

SEQ ID NO: 993095 - protein, 148 aa, Homo sapiens
MNHCTSAECPRAHPCVAHVGGCLLSLVNMYSFHLSLCLYCSVFDIHNLIGLLSCLSGPGSTLTVMPYRTGCSGLRGQCPPVSASSRYVAAGRDFAQRGGPGRPSRGDSALVPHWSDTCPHFTFARIAGAPAEWPVLTLPRPSTFFSPQ

SEQ ID NO: 993096 - protein, 307 aa, Homo sapiens
GELDVAEVSMIRMAKECGADWCQCSDEDSVAMKFKFNRDKPMREAEYTSKHSVGEDLYGEHKRHLEFSHDQYRDAARAYAEEVGIFFTAIMEWMRWQLEFLHEAECTSVLTTVGIWTTAEVILPYLGKDSQQNRSPNWVNLQSGLHVQIGNRRWKAKVFIEDPVKAHYNPQTFLPVFGQMVASDITPGIQRALEGPVPEAWQRVQVLRANEFKDTDSLSLGPICPNKAVNLPWGPLGQPRAFNQNNYIESDRATTAHSWRSGPQGKDKDNKRNERIERFWGPQGNPGSKCRKDVNPTSEDVPHGEEP

SEQ ID NO: 993097 - protein, 226 aa, Homo sapiens
RTRGSTHASGETKERGCASEIITPHIYNYLIFDKPEKNKQWGKDSLFNKWCWENWPTICRKLKLDPFLAPYTKISSRWIKDLNVRPKTINLGITIQDIGMGKDFMSKTPKPMATKGKIDKWDLIKLKSFCTAKETTIRVNRQPTKWEKIFATYSSDKGLISRIYNELKQIYKKKTTPSTSGEGYEQTLLKSKTSYAAKKHMTTMLIITGHQRNANQNHNEIPSHTS

SEQ ID NO: 993098 - protein, 325 aa, Homo sapiens
MYGDLVIGDTVPEKGAFFNSFFYDKLRTKGYDGVKRWTKNLDIFNKELLLIPIHLEVHRSLISDDDESDATSPILTQAAYPKPPLPKHIAKYLQAEAVKKDRLDFHQGWKGKFKNECGQAELVDSDCEMISCVADHAEHSGHLYQTFQTSTQQDMTNLSSEEQNKGSMSHMQNPTEMRPRKPKKPQSPYSGQRHMREKQTQKHQTHKHHLTTPTPKNQKKTDEKAKETEKHHRNNKTDKEDKEDKNTQPQRRAGKADEHREAHAHTAGAEQGSRGCKGRRKTNKKKSRQRTEGGTQRRERRRRKENNTETTEGGRRPRVKAKTES

SEQ ID NO: 993099 - protein, 72 aa, Homo sapiens
MDHRLETQARRRHYNVPHINSARPTPARARLHADEHTNRYTTGALCSGKPTLRCRATRRQKARYGQSTRTPD

SEQ ID NO: 993100 - protein, 73 aa, Homo sapiens
MTVPNSEENGDQTAKESRRRSKAQKKHRRRTTKDRTTEQGDSDRDANATRKDRQHQKVEHEREHRETRAQKQR

SEQ ID NO: 993101 - protein, 344 aa, Homo sapiens
QNTKWRMTPCAAGGALGCPVCALVMGEPAVCFLLEVSGILASCVAWVSLAVCLVAVGRCACWMLCCDVQWPAVTKCSVDAPDHPMLGACFVSTGTLQESQYHKAGRIYSTIYPCPHITDIEMHRSDFSITGGTISYKAVTVLARINDQLPDSMTPVPGQAAPRIQMALLFAYYRVDLTNMATVEALGVLQTVLPMDAESPDIPLVSHIILATRSSICPPVQHNGYSGANNTRQFPNTSPFAHVTWPAAGIMCWYALIPAPHVGTGIELRNLCLTSCYNDGCYRLNWLNLKPGTDLPPLGTHMAKGQRLHSIYKELTRYLNPDLLERNHVIHKVSFYRFMTPIKS

SEQ ID NO: 993102 - protein, 433 aa, Homo sapiens
MIQEEGELNNLVNDFGGSLNADDGNTTLHCDTHNYEEKHQIMHPSKETTCLDTHTIIKLDRFIQGGNEQQDDTFIAIHGGQDNNHGTVATYHGQEETRTFETDISPKSNGLNYTQRTHDAGSQHNKAKPKNKKGQFIIRPSRVIGGAKLRGHKDRTSYTASQPTTWREHTRRTDPEPPRNAYSTTRRDATGSTHDARSLKPKHYNSQERQTQQELNEGQCHRSTMINGKTIKKSATTDKSHKLEKSNAHTEQWNRDNLEPRDRCECRSATTISNKEEQKPDGKITMHVVVTGTQAEELRGTKDCDAYQIAQQCNEREQHDTTEENKSNTRKQRGGIENTTGTERHGHSGPRAERTSTGRHATKREKAGNSEKQRQQVDKKSTKTQNAAPRAHKDTRERNSASTDDQHSYWLTHARQPRRAEKQRQSRTGSSGQ

SEQ ID NO: 993103 - protein, 340 aa, Homo sapiens
ARSEVPSPETQPRSHPPYDPPSPSFASSPGASPAPRGGALMPIATLRQPCPPGPCPRSSYRRMFGGPGHAASTAEAHRPCSYADVLSTRTYSLGSALRPSTIRSLYASSPGGVYATRSSAVRLRAAECPGCGSCRTRVDFSLGDCHHTPSARTPGLNAEGGACRSMNDRFRPNYIEQGGRFLEAGRTPILPAPELQPVSPGQGKLHAWGDIYLRTTMRRTAPEHLEPSNPTIQAAPTPQRDKHGRRNITPPPRNNYTHRQSPNTQDTRKTPENIQQGSPNATRPACNYTPTGTHAPHQDQKHNHTPKSRHTPTHRTTVQREKIDHQNNAQTPPTTRPQTT

SEQ ID NO: 993104 - protein, 367 aa, Homo sapiens
MDAGRCKQVYEVTVLVRDSSRLPSEGPRAGPRGSVEMFLQADDVVQLSRGLGRTAVIVAAGHSENELSPSDEDVRVAPGTLWQAMKAHGVDKVVACNSALTCSGDPTKVPPLTAELWLIDHIRMAKVLRASGLKVRGCDARQHIGDQTITGAYTSDPWHGSRGLQRGPSPNIDWAISCCGCFTTDEYDGQSKLNQTRASNQIGTLATSWEEWTFQGPMTGKTERGNKLERQQSRQTPKTNKTKQAQRTKSIPQGETRIHRYPNIVTQEPQNSAHKAQAQKRQQHRQRDNETGTETRTTARGDRGPRPAREGQGARTPEQGKIGQSEKSWDERNNRHEDETEDDGQTRRTARQKRGAGNREHHNSETE

SEQ ID NO: 993105 - protein, 310 aa, Homo sapiens
MKHIHERLGTPERCEQLEENQLTKTIRAQHRQQMDAKHPTKRHKRPDTTKETRTTSSRPAPTPAKRPSKGRVQIHDETWYSQKDNEERWTSQGDRQLHNTTKTQRRNKEHNRKKRQNRDEALTEEQKRGREKQTRQERRHPRTRQRQATQRNTQRWEETHSGQSNEYEAARCGTREHPKRARKTTKNTRAREPTDNTQEQRRGNTGSHTEHARQSTNEPQHRRTGAEEMRGASARRKDKRGKEAQTRNKKEERHQNGKRTDRHNTRGGKRGRTNTERKEKYPRGPSREIDNGSSERDRKNNKNTKQTKEQ

SEQ ID NO: 993106 - protein, 286 aa, Homo sapiens
MGFKEKIPENTRGYASADVPTHKRKPNTKMNIPAQRHSTRRGNKTDRQAAKHDTRESNKSHHKPKQQTTHTNHNTHTQNNTQQTQQHHPQPKQNKQNKGHKKTESTIEHNKACNTTKTDHHKKQATETHNKRLNEAEHPSNEDRISRQRKSKQTRRNETTTETNTEKRPKKEKKRTTQHEGKRQTHKHKLAVTAKRKEIEKKKKQGRGGRGRSAGRPERGDGRARSSSQRNERSKTHRERQDEQYTVAHRHTNGERRAESEGETRRTTRARRQRAQHGTQNTTKER

SEQ ID NO: 993107 - protein, 368 aa, Homo sapiens
MLKQAVKDHNVGSPPKSPTHASPQHTQTEKDYPSERDMQNTFRYYLNNQQLSKCLDSDCGLDIADTQYIPGLIQRNTVSDYTPKSMIQLQYKNPYIFHKKCKLTISTYTDISLSRMERITTFQSSQTSYSLAETAHTTHVTCCELTHRTDKFLHGDSTHTNITEALWGIITPHHTTLYNTTDHTHETHVTTTPSHTLRNNVYPETLHAPKAIALRTRIPYLNHGRSTRRKRVMATLRYTQPLHHSLAMVTYHGHPTQPIHPHSPISKSPPSKTAYDQHKHNQAASQEPNKSRQHTHTETTNNTYRHETNMTTDPEQLINTTAHPNTPRPYHTETTEREQHRTRAETHQPNNQQPSTDTKNINNTDSPT

SEQ ID NO: 993108 - protein, 192 aa, Homo sapiens
MNNTDSDHRDAPPPTHNNHPPHTSTSHTKQPRPTQHDTAAELPTPLCTLPLRTSFFDSRNNSPVTAHPTQHAEQAARTLTSRQRHTRRREYQRRSRHTKHHQCSDAHTHRCRTSAAQTHDAKPSTHTTIETERAQTYSRPTHSARYYRRLRSQPAPQMRRNTNSNAQPHTHSGAATSHPRTCQTQHTSTHAP

SEQ ID NO: 993109 - protein, 439 aa, Homo sapiens
HKAQERLQEEDKYDKEEYRKQIKAKHREKRLKKGKPAREANKRQAKAKDEEAAFLDEAVMMHDDDDDGFDPSTLPDPDKSPDSSEDSDYLNDMANITIHADYPQQASQGMTEEEHTSASGQTWDTPNVITHDTRQARLRTNYTHAITRTTAPWSSAKRMTADGLVTTLHSDNLQATYAYTISLERATAHNIPLWTTTLGSMDHAVRATTRLQHNRTEYRPTTTHNRPPINDTQLPHKRGHRADQGENKKATTRKSHKASATHTQANNRTPAAQNNMKTTPPQTPNDTAHKTPTNQRKTRATRHDGPWTETRPQVEAPTRAPPKTQAPEAQNATNTASTQGPAERRRRQTSRHKNETESPTTQLQSPGKPFRRAHMQDRTTSHSHAAATHRTKSQEKRPHDPQDHKPTTRTTPARGRADARQPRNAGVRPHRTRERAQDK

SEQ ID NO: 993110 - protein, 108 aa, Homo sapiens
MISTYHLIFRAISRPHAIVIIDLRTEWNGNALSCYDGGEEVYSKHHMDRITKDVVLTMGQKCPRSVGYIHSNQIMGWGSKAIEIRSVETGHMDGVLMHKRAQRLKLLV

SEQ ID NO: 993111 - protein, 399 aa, Homo sapiens
LRSVCTRNCKIWCEGWPDNIHAASHIVLACCWPAGFSIGLAMDQASHEGQVEVQLVMNTNVANALMVSQGAFTWLFWMQALARTTTGNKVLRCPEGSLLDGRLWSIPQQYQTISLDYDSESKELKCRRYIGTHIHGPGMLTELHCGYLNGHEDERCLQRNRYSQYIKENKRKIQEMMEGDVVNDKAPWLGTTSTRHPRSTGAQKAPNETRTVTHSKSGGQHGAQKMLPLATKKHRIPRIASTIDRQSFRSRRHTEKGAGIKSVATQAKCPNDNNPHIQLTLTVTLTHSRDKAKNSGGQQKEIDPQREPKHITNTRPMLTKKGPKKNKHTKQQQSRHAAIHTLQEGENQHTRDNRRGHKKQRGKTSGKTTHRSKNRETTQQKYTGNKQQRKRQNGRATTN

SEQ ID NO: 993112 - protein, 386 aa, Homo sapiens
FENLKIQKKSEEVYDPRSLYEQATGNSTGTGKPAGVRGNSSNIRTNHGQAGFSMTDADPHFLACSVSPTQPGTLTSATQPTAHEHRQHTCNSTLHRHITSTHHTVHRTRYATFSSHSSTPSTGHSCAHTAQLGLGATAINQHTPHSKPQVSSQAPHTLRSATRAGMLQSPITRQHPRSTRGPTTLVTHKSKQHARSHMKAQYVHQRKPHMHVPSQLSWHTVLLREHKPSTCTMATIPIHSAHYCYPVLVLRANPSSEHLEVPYHHADCTATSRSSQASSITRQQHAITCAPGNSLVRPPVFRTPTPFLDGHLVSPFRYTGQLLPKGLDSDRLIARLTSDFMVPPNQQKLLWTGILLHHIEHSHPPPLSTRAHTSTTHINHALRHKH

SEQ ID NO: 993113 - protein, 222 aa, Homo sapiens
QEEQMETEQQNKDEGKKPEVKKVEKTARNINGFSTSKDTCSDYTQFTHNIASHLDVNSMPLRPWHELASLPGHNANQAPANHTAACIHYHCTHKYRRIHKFSQGNPWHTQSTNVVSTTVSSTMFLVGEGDSVHHPSADITSLAEQRQHAGKRNKTTRSRAHATGPNQKAQKKATNQGPQTSTMAGICMLQRWSISHNHNRGAANEKNSKDTHASQHEEKAIQ

SEQ ID NO: 993114 - protein, 55 aa, Homo sapiens
MAKGEIEPFESTFLWIGNGHYACPQEGAPKTSRGLVHEGRTPSTDGRYTYPQRNW

SEQ ID NO: 993115 - protein, 30 aa, Homo sapiens
GGSVLQVWCIKTCRNLFLGVLTSHNMKFNC

SEQ ID NO: 993116 - protein, 415 aa, Homo sapiens
MAAETLYTYPEKTERAFKALIAAQYSVGSWSRVLSGPPPALPISGTTTNPASPENIARDTIIACTDKDPRCSYDEVIECDFVMMYRGGKRRICRTIVMPMMRACGADRYFRECKQTSRVVHDEAAAYLHDSPDYMMPLTHGNLGDVSPTFVAINASNNKTGQLRMQRRNVRRHSGAAGCLLEDEDFNLVGERVTLGLTVTVCHAPCGGLYKQVLEPSCRQAFPKYQPLVPHLPLTSPVPGCLGRSENWCDERLAQVDCYKQFARPKLKRTHNGNEKGSREGAAAAPAERTDEHNGGWPMAPDGGNMVDSYSGVAFEAKAMDLSVTLHKRTQWVRQLKRQCPTCEPRSVDKDKYGDPVTRSEARGNTGGAQQHHEKRKEHLGQPTEAQKRRYLENEPTEMSTASWSQVVRRDSHSY

SEQ ID NO: 993117 - protein, 90 aa, Homo sapiens
  misc_feature (90)..(90): Xaa can be any naturally occurring amino acid
TCTCDAPARLRTESETVLQSERSGAYSCTTTSVQRTWTDVLTLVRRKNPLGSAGPHVLTGAHEMRLAKHTELAPRLHIKGKCAIDYTAFX

SEQ ID NO: 993118 - protein, 83 aa, Homo sapiens
GSSLHASSWKMGSLFLDYDIQKESSLHLVLRLRVAVDSSVMAFGVPSDWRLLCTIDHVLPTYSLEDDHVLSNELIPCIKTLFK

SEQ ID NO: 993119 - protein, 35 aa, Homo sapiens
MLLTSPRPLLNLGCVGPSVDYFFVAPFLGDMRGEG

SEQ ID NO: 993120 - protein, 32 aa, Homo sapiens
REAKRREGLAWMSQECREPALGRYERDATVAS

SEQ ID NO: 993121 - protein, 240 aa, Homo sapiens
THAIGPTRPKRTIELTDTCKERESDTGKKKENYEISRSEMVATARSSCVLPQTATKSRSTKAAVERKIDQVPGRLSVVETTNAQNTRDQDCRRFGRAGQLIMDRVETKLVEATEARSGLLKAKNFHMEQSGSMLNYEHDRQMEQPAAWPEYLNRHNSTQEDLDWTQIGAAGKPGDDASINSPHYVTLVIQQADATSFINTKTRSRYQGTRFHGCPGMHKWPGPPGFPLGWSQRIQHPLGK

SEQ ID NO: 993122 - protein, 449 aa, Homo sapiens
  misc_feature (395)..(395): Xaa can be any naturally occurring amino acid
MDNILYEWEKRSADNVTYQTKYCKNHVYAEYDTKFHIVVDIHDDKLYDGPARTRITIKHKDVSLTSMIEYICMEHVHKMNSPSSILKTISQSTYSEKIRITYTIVKYTRQAQKTTDNHVAKRVETVNSKQEQQTTHTQEERNKRRRENHNTKTGTRDTEKKDKQRKQKTDRNTANSDKEQTTRRDGQQKRKDEPTERGKTPQQKGPDTTRATPQKTKEKQRQNNSKKKHNTGNKNTRETPNPKKEHTTRAEQKKEKKKTTKARHRDAQKRGNSMRERRREQEEKQRGGAKREKTGEDRSRQRRNGTKTRGSEVVESNRGQKPESRQRRERQEDGREEATREEARRKARSGRREETDKRTRAREDGPEEEKGEGQAKQEDERQQRGTREERSRTRXRHTKRETKREGERRARKTATEARAEREENSEVAQTSDEGEKRERRREREEEESE

SEQ ID NO: 993123 - protein, 403 aa, Homo sapiens
MLNTHTQAPQGRTSTSTVTTINRDGERGDRSDGGQERGSREDRTKEEREEEQEECRKEARKVREGRTRRGEGSRRRAKREGTREGSRGEGGEKKEAEQESKEEVRKKKTTKAEKKKRKKGKERETRRSRKKRKRREDREKRTKGKETEESEESSSKERQNKDEKTAGGEKSTTRRAKQGRRREEERNGIQKEKQQKTEPTTERAKKQKEKKNEKSETNSRKERGTKSRRRRERKEKKQPDRTQREQRDEKKQNNRKNTKKAEQKHRTKKNRRTNSGEREQKRRRINTRRNKERKQRGNNKREKGKTEKKKKRQTEGKQEEDKARTKHRDQVRERKENKRQTDREKKEGDKAADKEKKQQAREERKKENKEKRREDKEENKNRSHASKREKKRQKRHSRNTKQR

SEQ ID NO: 993124 - protein, 441 aa, Homo sapiens
MEGDKGGVVNCLEPHPTPACAGNQVDLDHDVKIWCTRQLKLSTDADRVYKDVINEEQRGERDEEACTNTDLSVNSSHAVVSLLHSPEYRDAITGAGENLGSGATDADSECSLPESSDNTQDEEEGPDRRCSSMPILRPSYQALHTATKTHLGPSKAMKEIKRQNIPSDEETKPERSETKRKIPYDEVGRPQPQATGRLHGKQAAIGPTRHAMRQQPPTDPRTPHHAATHRPPHANPAHRAHRRPAEQPTHTPHHTTPQHDSERRGNEGTPRDPPPQHTGEQQKNAPRQCEQTQESKRTDPQNHKTSKATKHSTPTTTTNTTPTRDERPRGTPGRRAERRGPKRKHDNSDEGTQHHSPQGGRAADAQRAAPRHHRDAHDDEKEKETGRTRQREKKSGRARQEKRKKRPGGAQRGDTPAARATPRRTPARPPTPTTGRGGRRQ

SEQ ID NO: 993125 - protein, 191 aa, Homo sapiens
MTQEEKSKRTKQSKEREEAETNEQTGEQTTKHHRESRDAEQATRRQRDGRAGKQRAKRDERSRENETHDRDRQKRQNRTDSTNRPRERQRARSRRARRLKRARAQAEHDHGTQSNNTARREPNRRDAATGHTKRSRQRETEPTRRIRDDKKEQRQTKQQGKRRRTNQKRKTDERERTNRQTQRQQQRSSRT

SEQ ID NO: 993126 - protein, 63 aa, Homo sapiens
MKNDKSEEEQSSSYLKKDETNDEDDESEERVQIALLLSKGDLLDDDDNEDRGDDQLELIKEKK

SEQ ID NO: 993127 - protein, 230 aa, Homo sapiens
AEQTMVVSQTLPSGQFVVTDVEGGKLWCFTVDRGSGVVKYSCLCSAVRAKFVTVLDAEGTVYFIAGVSLHLENRPKVSTTWEGGFSIGSVGPDGQRGSPVLSHFFSENEDFRCIAGGGVDARGDLIVADSSRTEYSPFASGGGYSVLIREGLTCPVGMKLLTPKGQLLVLDMSEIIASKIYSYHREKDEFQPIGDEKSSVSSAAQANFRSLKSGEKWTVQIRLRLCPDSS

SEQ ID NO: 993128 - protein, 677 aa, Homo sapiens
MLSFSPKGEEIETELAHDVEEGKAQRVQEASVVKAEANMGFRSELEPIGLNIYCSSSVVTIIICFNCSCCCTYIQDVPPTTVRLINTTTSTTVVHAPYPQPPSVPPGTLDQAKQGYHTMTHYRQGCQQHPSQCSSHHLYPGQPMGPTGTNTENLAGGEDRDQKTTDSQSLKAGTTLVCPEGGPTENSLDSLAATRECRECRVIWCAAPARIRGPGEQREIQARKQYEPKKGRRGDPTGNQGKHRQLTTMGDNQTTRRNKREPRQDRRKTKQHNSEKNPQDNTEPQQGDPPDQRPRQEAIGRRDEERASTRSRGSHDRERGIDRERREREREEKGEKRERKRGERRGDEKKRRDKKRERKRREQRGEEKRTSAGRRRRTGERRGWRDGGEHAKQEKEAQNDQEKDTDRQRQKRGRVKRREGRKGQRARHRKTRNTRQGTEQRDRKGKEKETRSAHETEKSKRKGTKQGTERRTEREQETEATRRQAGRTRNKKRNKETKNKEKNERERKREEARKKRTANKSKRHKDKRGEDRGSRKTRQTGSRKREKRDKRRKTTRNDKKNSETREKERQRQRTEEEKEEERDKTRERQTGQREAHRQGGKREREAGTERRRRAKQSRDAGERGNAAQQKKDTRRASNEERETAQRKSRQPRRNRGKKQDSEDANNEARADHSAKTP

SEQ ID NO: 993129 - protein, 251 aa, Homo sapiens
MDTRGGLSCEFSRIGGRCYDRKERRVRDIIQCVKPCTSESCDVETTGHHHDPSSIYYLYCRGTISQSISRETSPDRTLHDIHSAVSLSMRMMCEPRDKIDGPKPAEEAETKATDMTDMAKTQGSNGHRRSVTRFRIEHTVGLSAVTIYRPQLITLPNVDHRPQIGNTAEEGLPRTHLDFLSLYPVGPWPHSPPKRQDLIIRSSDEHGHRKTERGSPIPLMADVAYKLAKTGTVTLHATEGGIRYPGLVRRA

SEQ ID NO: 993130 - protein, 322 aa, Homo sapiens
LQGSPMGRWSLWMMLRPFQDPDLSSLSGRFCVSGQAAGWASGHDSTHHPHVGQSASYTVKFDSLVLRERRGCATGDGNPVPPSCAQMCSQSPTQTATVLGDSSLMHRSGGVRVHGGLVGTCSSALAGWEVHRRGDMLEHYLMRKMGYDVGQGVSGRDLRKAGEAAASMSDGVALECKVAWTSGVETLAVSTPRVGNRWLPDRPPEVPGEYGPGWGPPASSANVFDFLSANSCRSGPGARRKPRAAPAEKGSTQGMDHCQQECIGPEASGSYRCRTQLATQRTNRARRTRRSWRKPGPTNNGHTRRRTRLPPETPPDRETPPA

SEQ ID NO: 993131 - protein, 124 aa, Homo sapiens
RVWLAASGGREPERPECTCGEAAARSAVCRETTSQPSTRLNALYSSLRWPFGWLLHYSSPGPGLGMAGIAVGGCGRDANGVPADLEGPAESTDWRLSNRVRTRTDHRVTDGRTTAKARLDAGSM

SEQ ID NO: 993132 - protein, 391 aa, Homo sapiens
EQGERAGEVGRTGRFPRPVTPVPSANVPQCPVELAGPPDGLRTLIMGVSWCWLLGWCLDKSGAEKVHVTIEHLGPLNFLLCVLQLCTWLCIHTFGFGALRSLMVTHISDTNSLLSGACEHLVLTLVGSKSYGRDTTVCNLDELVGQHICRLTVTFYVYQTRYPPNGPYTDRVCIRGPNSLIDVDLLSAVGTGPLADELKGPEPPKFGMQPPKALETGTVAGSKAISWVPSIMTRLQFWDQESLQLGFNPLQNIPSWVYRFREKRSLTYYPQWRFQEADVTGGVHGGGMTVTELPQPKLDKTKSKDTRLWMVIEGFKWHPIRQEGNDPNIEGRNEQEETKQTRGARQTAEEENYNADEATAQAEARQQRKTKEIVTQHRRIEPSEKVEQDMH

SEQ ID NO: 993133 - protein, 82 aa, Homo sapiens
DAWSKPIRPSRPCVYVPQLTSVYLAIRNFDLDSNETIVYWPEQLYEQFALLELDASLVYIFVREAYSCESPSYEKASYLADA

SEQ ID NO: 993134 - protein, 329 aa, Homo sapiens
LLRAGGRSWCVFRSSFDPLPLVQSGWAAGEELAEPWMDEVVRFAKKMDQMVQREERGGALDLLKELKNIPMTPGITGSPQESGMSVNAIREQSTDEEVDSLGLKSLSQIREKNYYMGHQREKDLEEKKKEPADYICRTSPVGKRRKYFQKATVSNQREDETKMLEILMFHPFLGHQALLILCGGSVGRCLLPALRTGDDYFALELDEEDLGSSTWEKLYYPRTKRVRPATTENRVRSRHIQILKMQTSHEGPCPCARFPRAYCVNYGGKRVLRLRDVRKCGQHAQATWRDRRPPLFPVGIDPKLLPPPLGYRPCGSLHASCRTYPQGLS

SEQ ID NO: 993135 - protein, 85 aa, Homo sapiens
PIPSEQLPPASRCVSIHHQQLPHGFTNMAHVTQAHVKLEITAASAFNLELLTWSELMELPTSRCLSIHSHYQLSRNKTKLLYCVL

SEQ ID NO: 993136 - protein, 506 aa, Homo sapiens
  misc_feature (107)..(107): Xaa can be any naturally occurring amino acid
  misc_feature (147)..(147): Xaa can be any naturally occurring amino acid
  misc_feature (456)..(456): Xaa can be any naturally occurring amino acid
KPPPPGAGDCGSQVIYYVIWGGVVGIVGGAVEPKGDLFFILFLMCHPRCGDGEGGFRDSHRFSLPVWPFVILHKGLSCVAPQYNKVCCGEPLSLCTGFSCEVLVRYXRDVAPTRASGGGGDQGRDKCVVRAHTCTMALKETLLGATXKRAGTTSLWGYTAGRHCGVCALSAQCVRENGGRTRVVYHALMCVPVYKCGRNVRSCVVAQECVGARECESVTSTRKESFLAGARGGPSQLLTSWGSGGSLIGEALPYIGVLPPRRRLKGCGVRPPYYILGSITRGGEEDYHITPAYAALEYVKQGTHFMLWGGPPLWGGGSGPYWKGGNKNDSEEDQHNNTQTSEKKQANEPARDEKEKKQEKDTDKAEKTRDKHKNRRKKDKAAQKQRGGGSGAPQRQRECNATAEEGEAKHEEGRRRDHHQTQDENQKGRAHTNREGEGGEVTKKQQEGEGAAGERXQTNNRRRGCAEQAKGDRDERKDDSEGEGEKQHKLSEEEGARNQEGGQQQK

SEQ ID NO: 993137 - protein, 105 aa, Homo sapiens
AELTAAAVETEAAGRKASRQAGRGSSASGTQEARGPAFAWAEGLWPRSSLGGGPVPKPAKGAPRRWAAECGGLDCPRPRGRGRSAVWPGGRGLSPLRKCAPGAVL

SEQ ID NO: 993138 - protein, 48 aa, Homo sapiens
  misc_feature (17)..(18): Xaa can be any naturally occurring amino acid
PKPGACGTCWASLARLXXPVPEEPQNFDSLVGFVTAPGALLVTMTEKK

SEQ ID NO: 993139 - protein, 146 aa, Homo sapiens
MLTMETRLADKMLKYADTLSSVSRSVCLHAAARAGTVPQRQVLPVWELLRLQVGRILCFLVAICVLVSRWQEGGEADSHSEDSAWQAPRGEGPVIYVFVTLVEKSGGRCTSGAVQIHPELGVQPPCRAVNGHTPARKNLPFENDRF

SEQ ID NO: 993140 - protein, 173 aa, Homo sapiens
MRAAHLLTLPTGQPAHTEAGPQGAGLRTAPLHKLRHSRAEQMSRHVNEALQRPPASSPSCRMGSCPHPWHHILHPVAPPAACSRARDSSATHAATSSQLIRLPTHTPPTVEPAPAPAPHPLHRALPPPQATLPRLAMPLINTPFHPPTRAHFMTHSTHVQCAPTYTPLLSPPP

SEQ ID NO: 993141 - protein, 119 aa, Homo sapiens
MVHVDSEQVPPLLAIRSINAVAIDTEEPLKNLRRRLAEDEDKGSFKYAWVLDKLKAEDERGIIAIDISIDGKFETSKYYVTIIDAQDTENYYQKHDYRDISRLTVLSLIVYCVDVRVKL

SEQ ID NO: 993142 - protein, 102 aa, Homo sapiens
MVSELETLCTEEFEPVPNGWKGAIPLKNEKSFSILTQRGFVKANIALVKNWNVPIRVLGQHGRLLKHQRANCPGPFPRFGAGIKSMPQWGVPLYTAKSRTPV

SEQ ID NO: 993143 - protein, 377 aa, Homo sapiens
KAKPKKLSSVWSDGSVQNVPEWAALMPMMIPDRARHPPTAWTHARSLPSCRLKLEWVYGYLWPETAGPTFILLTTWGRQCTSVASVAVLYSVRGADVQRHYLGHNDAHQMLAIHPDMVTIATGTGGREPPEGKRKPLPPHDAGIWDSDHPSSTYTLLGLDGVRQSRVLVWAISKSKDCNLPVLHLHDIPTDTHCSPLVRLGQMTTHVLAVKSPMKARHAGTLNPRNPNCDLITLRAQSQHSTPDPWACEANCRSGQAPLDKHKQADTIVRGDNIWHGCPHVPGNYGKHLSKGLHIVKLKTALAEPPTDARLITSSRRCKGNTHANTRTKKQKAKNKEQHSRTNSRRTQNTFQSTFTTITINHPPIFFKSPLTLNLNN

SEQ ID NO: 993144 - protein, 107 aa, Homo sapiens
MSPGTSGVVKTTPKSQIMGTGTTTHINIVVIGHVDSGQVHHYWPSDLYNAVASTKEPLINLSRRRLPEIGEKGSFYTDCLGSWIQLEKLAGSEPCVSTIDISLDRKL

SEQ ID NO: 993145 - protein, 342 aa, Homo sapiens
MKLLLGIALLAYVASVGGNFVTYELSTQQVYPGKWCNSKIDKHRLKQMVEPLKSRKSRSIRQKKLYPEIPPVNVLIEKDRKTTLDNRRRTGSWASHLTDKLMMDGHEVTRGWTISSRGRKQTRGDTGSDIEELRVDYTTMLWRPLYIEVDQEYKQQGIHQHPVQTTCIILSRDSRPIRLGTYNMEALGKKELRRRHGTRTTTSDGDRRIMKTHYKEADTGSTIHHKASGRTEKETDYKNQAANQKQEDEIPGHKKHTWTGGNNRGRQTDKTEEGQGDHTRHARDHAEQNIEQLVENNKGTKAGTKRSQQQDEQNTSMTNTARGRPSADSVTDSTAKEKKAER

SEQ ID NO: 993146 - protein, 196 aa, Homo sapiens
LFVYFLLLPHAGGAIMSGNRALAGRAVAGTQQSEPSLGGESAMSSGIDPTGYLPRVTSDRVSWNASTCTTMRPPAARYVPRAVLVDLEPGHQWISDGRSVDPFGTVSSGRTTSFSVSSGAGKQHGPRGTTQRGAELVDSVLGFVMKGGCTSCVRALQGFHADPLPVVRADWSLGWVPSSSARSGRSTQTGSEHVSV

SEQ ID NO: 993147 - protein, 36 aa, Homo sapiens
  misc_feature (29)..(29): Xaa can be any naturally occurring amino acid
LFMLGLYSLQGFPWASAQNCLQNKPGTVXSLRTVQG

SEQ ID NO: 993148 - protein, 448 aa, Homo sapiens
PRDRGRVVSTTRRAADATDGGRGEQPPWRIARYTWCSVDGMCLSQGGGRFHLGIHHAAQNREHWRWSACLLSTRTGGRQSPGQWGVDGPSIWACRATRHIEDDPDMLNDDGAAERSTIIDNDGRTIWPATGAIHSPEQTDRQSKRKITFMKVTQHENTSIDWSQDTQWEKQPPHVNKYARQRRQRRNPCTWQMHRKVHWYNSGSQTNEDVAGNKKTKKEPQQRGTVDIPRADTDRKRHKTDINTPHRKELQNKEQWGHIKAKPDKRTKGITQCQENGETRRQREETVAPITEEDTHRRSDTERRPRPQAGIIPQQKHQHKRNRQQDTDVIETEKTTTQVEAEHKKDNKAHQQRSRNGKKQEREEKTQTAQTQKTTESDERSKKDKQRRKRETATTEQNQRPEQTKTATKTAKTRNTEPAKGRRRQKDNRQRGRHNTKAGNVDTNTQPH

SEQ ID NO: 993149 - protein, 56 aa, Homo sapiens
MCELREHPEFSFLYTQSVAPYKKRASDNNQRKYEQGLRQRSYIKVSGNYGGQHRVY

SEQ ID NO: 993150 - protein, 518 aa, Homo sapiens
  misc_feature (108)..(108): Xaa can be any naturally occurring amino acid
  misc_feature (127)..(127): Xaa can be any naturally occurring amino acid
  misc_feature (136)..(136): Xaa can be any naturally occurring amino acid
  misc_feature (159)..(159): Xaa can be any naturally occurring amino acid
MVAYSHTANAIHCTAIAARYRTSGIRTFVLSMRRAGRELVRASWTVFTQVRVNRTSLPSATTMHTQEFGGCIKGLCISRRAETQCASCFAKALFPVSLWCVFVPLIIXSCMESFSPYLLPPESISVXFAYVMPHLXPSLVPIPERLSFPIGCPLDSDDXASYQRCVARTRDHATRDVAPYVGREGPVHWRAVSDHRGGQRETWSRRFTFPLYEGHMSISMRVVFPPRVHFNFLCEALACVVFAPSVPGPPLLVPGENVIGLRARGGPLNGTFFLPQGVLRSKTRVGPRLSPRRVWAIWSKRLSPPVFVNFARLVYPAQSPQSGSPTCGWLWPPRGLAPTHIGERATLPATLGYRATLVSKSVRGYIRNSREMRTRGTSPPQRHGKRWGSPRGVQRPTGAKHIEEQRYREQSVGSAKKRDLAQTQPRRGRVPPKEEPRWDSREKSRQQYKNRRGGGREELVAALDNIQKRTPRSKNQREHTKRRIHNNGNAHTHNTERAAETQPKQRTTRQKKGSDAKK

SEQ ID NO: 993151 - protein, 42 aa, Homo sapiens
MRKERDGEQNRRAERKRDERKQKRQITQGARKERKHKGGKGK

SEQ ID NO: 993152 - protein, 186 aa, Homo sapiens
MRSVPDPYSRVPATPGLADPLRPVEPAHLAPEPLGPNSRPRVRGLERQCGGSCVWRQRQSRRRGPAVVFGGVSRIAPHTRQWYIPKELELASWAYASPHCQHHLRLYLCICTLEHFSNHLIPLPAGSHIANERTEEMTIPPWLSIACPGSSGVFSCLRVWLLLDPFLVPPSPVLHSEERLEKGTPF

SEQ ID NO: 993153 - protein, 378 aa, Homo sapiens
MVHKRRERREKKDKKTKQKRNVQKNTTRRANDQAATGQDCGTSHLQRPAHATRQRTPESKPAQGQPTRNHKGQGTTRNKRTEKQEESRKCNATPGLHKRGHHKYNNPNNIKQKDKKHNTRQPYETTKTTPVKHGRTTHRKAHSAAQRRTCGKADSGMRLQPNWGSKKNDGKTNPRSQDEKNANTEQRKAENKNTTDNAKRKHHTERKTKTRPTGQPHGNHEHRDKGDQHRNEKGKPTHSTDNKTKTTKERHRQEEKRKRKKGDNEKQKRHEAEKAEADKATEAQEERQEKSMTDQKDNNRENKKRKTQKKRREHKDRQRKKQRGQRGDEAGKATNENKRQERERHGGKRKKAQATESSRRTPSAAGHTTPHGEKQERA

SEQ ID NO: 993154 - protein, 47 aa, Homo sapiens
FWRDYGYCENGVRLENEGKLSGRQCGIRRECFVCYLYQQVLAGSELL

SEQ ID NO: 993155 - protein, 545 aa, Homo sapiens
KTENKGKTGDEEMLKDKGKPESEGAGNKQGKVRSRAGQQSAAGRAGIQQQQQGNNPAASAGQSREQCTGSSPGQCKQVAARKCAHADGMMYRQDKPITTKLSTGACAHFTVNGRTKHDGTEHMSPCTLSPVHIASARLHPSSTFSHHTHRASTELLRALQATARTHHSQDPRTHLRARQLLTARACRQWYRHSTTRNALMILTRLRRGSQYGATCHAGDETLPGGHHLRNRVHHFANETHLSLVLAAYSMDSTLVALRPHFLQHQEGPTLNSPPPNPLLRALTYHFSTYHKGATTHVPPWSGLRPSPLLDCNAYINSNNAKRCSHFTYSGAKHGIQLHQHPPLLANKRKGTDSAETHYASHTDYPQHNHNVERKKPDTTTKNNTERQTDPHTAHPHTHTAPPTATSNASTPPSPLNKQEAPPISADSYTLNRPTRHARRPTKTHPLSAAPNAHTDTNTPGHPTTNASPPHEPTTHPQTTHRSRADQSPNQHTPAAHTHPSRADTGARLTQTRPDSKDAPYTRPHLPAPDLPPAIESIERPSPATA

SEQ ID NO: 993156 - protein, 291 aa, Homo sapiens
MGGVQEGSYTSFEKANVGPLEGPHTLDYACKHKFSVGLYQGNVTLGHKVGHSMDARKSPSPPRGHHRVATDVGRSTAGEDSSRSNHHTLGGPTKRSRPPRECPLWRGGPPQQDRPVTCDLHTFTGESASLKYFLSHRDIFLYKHVTMGHKGSPLKRDTKEYAASLGENTSEKRATMPKMDRYLPRETKPRRGDVNPLCPKHGSMGGKAHEIAKRQQVPYDKRTWHKKPPVRGPLMPAEGYPTEKGQQYTTRPLQGVERLSIGIRHSECQLRNTHIHEEIRQTNEKRRQLDT

SEQ ID NO: 993157 - protein, 362 aa, Homo sapiens
HAYVWSHMATMKFQWDLNAWIKSAEALGKIVAERPVTNSKQALYLMAPSNDAPGPLSKQGSWQLSQPMEVQEGYGIWVQEMIPTQCAEPHVSGVKRSRSGEGEVMRLMRKVPRSEPVNAWYLDPQQLTASAPDLQGTSQAVPLRTTSLIVLERGRCLLQLPVSQGLRLQGTPGDPTLAGMAIVNAGGEEASIGALLLPLRALRPYLCSWLIAEGPGAERSRLAHLVAAPAQGWNVVHLEGTSAQECGRGTRDEHCHHWQVCKAKGTRERSPKVIRYTDGHSRLRIQGTSVRHPATARNHDRKANRPPGTNTGAAKHTTTEGRVTTEKRSTPGPHQKAQQEKTKNNTKRASNNRPANQTKPRE

SEQ ID NO: 993158 - protein, 246 aa, Homo sapiens
MSPRALDSEQMRTHYGNPEARIDELRLFPDRTEFDLYDQIHQSRCSDLREDSMNPRHHSRYDGNTQILNKHIDIADRQQAEDRSNHNAEVKRKHEQEKKKHKTAEGKIDQQQPLGETDMKQANRMEHTLTQSKYRSTTKNEKKRKEQQKAPRLMHRPGLTDKKRTHQNKNRNTIQPKIGDRTHGQKERTHQETTQDEKRNHDKTMEHQHTQQTQKESTKQNRRHKETEKQTRQPRDTTTPLHTHQI

SEQ ID NO: 993159 - protein, 88 aa, Homo sapiens
KTGYFISKKEKKVGSGNRISPIGPSVSLVVIKSFYDDVDNESHDLTLHPGPSAADRRYGIQAQMVTTDIQKIQPMGDRLYIGLAGLAT

SEQ ID NO: 993160 - protein, 164 aa, Homo sapiens
MDPYKHVHPMITTKENTSDNYESKTQAQNLIARQQQQKTTEPASNLRKGRQNNRKANTIEIGGMTLALIHRGRLPPPLYEQPPITPPQQKRQKGRTHYSTTSSAPTTQTPCKISTRVGHDNPINIRTTQKRQRNDSPYKKTPTGATISERNSNKRTHHKQCNNS

SEQ ID NO: 993161 - protein, 76 aa, Homo sapiens
EKQIRDSYARETGLPAGTALDRGPCCDLGDAEPAWTTCAGDDVVAMSSQEAERAERQEAQHTLSVTLEQWLRQRPL

SEQ ID NO: 993162 - protein, 265 aa, Homo sapiens
MSAEPAPDGGAGASRCGHCSPCTVEDALNKVWSLKQKFWEMLCLPLDHIPSPFSRFARCDHNDVVKFPARNGTIIWNGQTYFMAVAFLSAHEKQRSKFPGGACIVNFMKTRLSRHSGTNEDCLKWDAGGMNVVDLGRMDTQTNKLDTRYPYVCHAELNAIMNKNSNDVKGCSMYVALYPCNECAKLIIQAGIQEVIPMSDNYLDSDEATAARLLYNMAGDDIPGKYNTRSAAQHCPLTFDHLQQTEYKSFGVHHIQSPEDRDHGS

SEQ ID NO: 993163 - protein, 74 aa, Homo sapiens
MHFTIIFIGGKSNVSVPSNTLSRAIRNAPTKYYRMDHHNYPDTALHYASSPQLKILNDKLPPTSRHQEPIKCKK

SEQ ID NO: 993164 - protein, 376 aa, Homo sapiens
MGRPTRTRRGARVCVETGLAARGKPRQLRRKVPRTLGAPVTQSKPSKKEEEERKAALPSAPYQQAFGGAHHCELRGQAPSSGTGVPTAGGRPQTRGGRETRADRWGRRTRQAPWVPQGQRRIRLAVNAPSFPENPRDWTVCGILKKPMVDQALQQSMLAGSWCKWIYVRRNHGIPQDGRIWLLPDLVTLGNRPALALGICGNMPWIFKGEDKEDPRWQLEIVLDNGWDIHRRVSKYHEDGENLADGTGTMAWRAHRTKAKKQRVHLVGPSLCESSAQYDRGQLTTRRPFTPANVTPWNRRMALQHQGTQPGWKRIDTRGPGIPVTRDLGATLKGGVQHTVETGTLSTPEPAADTEHNQQNHRASKRHTTAHTKGSA

SEQ ID NO: 993165 - protein, 419 aa, Homo sapiens
MNVDPSAIRYDIPEWRSDERDKVKYTVHTKTTLPTCQRPEFSVTRQHEDFVSGYMTLIIDNTQTYARAIYIPPCILRKAQTYDWYLEQKMQKAWEKVTAALMTQTTTLTPRLTPRNWKLEVSRWAKQKDLVYNHNDSLNITDGIMSYSTLGYSDKRIAHNSPVNPEDILIKDYYKDAEGRPTHPYQTEQIQRGASTHKTNKWKGNKVALQSNAPIEQPRDSSPHRDKHATPKGRPTQTNEQRPLTSTLQSHKEALPRNDQGGEENNVDQHATRHLHNNEKGRHNLTVRQRAARLKQTRDNRKRPKGDHKRYPNTHSRRNEIRNTKEEKRKTGPRTPQNKRRGRKERDTREEQVTTKVTRYGIKAELTKHNGADAQQSTEQPNQTNCWGMHHQEERKTAQTRKEKTYSSEAEETINERRH

SEQ ID NO: 993166 - protein, 249 aa, Homo sapiens
IAAELGACSVELESLDAAMAAALELWAAAVAWAELGPVREAMDLLGALAYAPADACLADVCPHAVPLLLACCLLHGCCCSGMRLPGLPASRLPEPPSPQEILIKVQVYVSWGAGAPGPGLSGCVGNRTLLAAGTTDSEGVATLPLSYRLGTWVLVTAARPGFLTNSVPWRVDKLPLYASVSLYLLPERPATLILYEDLVHILLGSPGADPSPWCSSSAGLAACLSDPTTASSGRHLRLAGPAGKWGYPC

SEQ ID NO: 993167 - protein, 407 aa, Homo sapiens
MLATPRRALHGKEVCDCREEKRQQTSCNMSRAIVYQLAAGQATHGQQQQQVFRTQWPFQQSSLRTGMVHHFIHEGIGGTNYAILDHAYVISKDALQEAWVAGGITHVVNPQQIQGKHEAGIDHHEKSQTATDHAMDHTLVQTPVISHTTYTNSAGQQLARHRVIPGNIEKADGQAESTLNHRRRKIRKRSRRSGPNGTPSQGESSSKNNSRHTQNNNNDNNRNKHKHKKNTGEKQKAKNNDHKQRGHNTQTPGTKDTTTDHKEKDNTTERNIKMKHEHRSEGSDQQPHRQPRPGHQHRQTKKEENNVGTPRANTKEHPTPAKSEHHNNGTPNTTTTRHTDGRNRQLGEKTTTDNHQNQRTIHRSHTNNSTTTNDRKTTRERQHRKKPTRKRKETTKQQHDETKTPNT

SEQ ID NO: 993168 - protein, 395 aa, Homo sapiens
  misc_feature (100)..(100): Xaa can be any naturally occurring amino acid
MIDQQTLAGLVKFMRVISQYTVMLDLIRSEITSGDSGNGYTTDRLKQQYVQEVIHEDWKTRRGPREEIILGIEDVLLGECRKYNVQYAISCEYHIDVYGXLLWSGNVSKGNNDVRLPHGNNDTIVIYDVDIRSLGYCEDRIARLEQHDYIGQYMGNLKVVADNFKLGSRTSMAMEPRHFEKSEEDSGLEGILSPYGKGLLLWHNMRGGSINSMTNFLVPPNGKGLGAYNYIVFFTHNSYVKTQDKGNMRESKAVEKIPKGHKDLTQTQSQGKERKGRNNKEENRGQNKMYHGNSRSKNTAQREHQLRVENEQQHKKPPNKHNTGHRKEEKKTRKEKPQKQTLLGTPAKQKKSNDENSKKNEHKRQKSKRNVNQRSTRHKREGNTKKVRRTSHKRA

SEQ ID NO: 993169 - protein, 75 aa, Homo sapiens
SLSAFGAEGYLTLAEARELSCGIDVIVHVPCCVLHWCCAVCLVMPVMLCCDVMPVHACLCLLVLCASHVLDVTVF

SEQ ID NO: 993170 - protein, 175 aa, Homo sapiens
MILSFLKPFPAMLNCESINTSFFYDPKKKKSNTLTTIHHKKGGGPQKITPEEGEQSIVGTTIFGERGGPEGGMHKTQDDGRTPPTLEGNINGGTVRGPNLRGPIRDHTPSKEDSGKKNERCSGHTTHDACEQSSDTKMRNETNTRARRAAETRRRDGSTNTRTPRAPRARHRAEK

SEQ ID NO: 993171 - protein, 96 aa, Homo sapiens
VVLSLNPLASPTPSAACTLNTLPHLLCQELATTSTMPYQVSSTDPRSSTDRQLSDICSPHRWHHGTGALHGLHDVTSTVDAYAIAVLQIHLRTLTN

SEQ ID NO: 993172 - protein, 170 aa, Homo sapiens
MLDPPQDLRGQRRRGRDLCGPQRNTKKPTHKKQNNKRPKQQNTTPTERTKRVSPREILSPRKELFHQQDGHIASGLERKGATGGSTMNSKDRPARSVSPVRNDVGEIPTWRTPIGVNIEREITHKPRETRHHSQTAGIPQPSTKPPRGEHTQPHAQKRGTHLPHNKTKKQ

SEQ ID NO: 993173 - protein, 359 aa, Homo sapiens
RRQTVRTPPSSSTADRPGRQTAETDSPGASGPHLRPPASASRPQPLPALPAPRPPAPAAVPTMTCRQYGPLSGDRLRWSSSPSAAWLAVWPELPVGRAGALDAAGCRDCPAGRETSMLGRLQDAADDHAPRQLRRNCAPSASTCEPHTRASIMRTTAPRTNRNDRPCAPTKSMGSSPGTSTQGQQEVHGQRHHEPNPDDTTAKYHVAQMPRNEGRRDLDCPHAHTDKENEHAQDTRPTYTRAHVTRTARATRKPQGNNSKQTETAEQPWTTGPTRAPNPPWELGHTPHRTDLHQQTGHKQKQTTGGPKKPNPHGTTHSPHMDRAARDSPTKKRTAPTDTPATQSAKYDTNPRHEPTHNT

SEQ ID NO: 993174 - protein, 336 aa, Homo sapiens
ASAGGLPVGGRGRREPNEGAITWQPPTSPRRCPPRRGTYYPAPSRRGETAPAAAGARATVHPARGVRRLAMAARPTLFRPQLSGVLSASAVDAAAVYRTPHEGAPLLARSSRGPAFFLCLAGPFCGRMRKKEGALSHRCKVYFEIGMADEECRQGDIWSLRKDVRETGIIMWDLVREEKELVKEGENHGVNGGVHDHRRRFTGDDGQAESSIYGEWVPGWRTCTRKQEGALAGLEQGAGGDTRDRAGDRDVMAGADAQPGRHVHDMECGPGPKGRKGARAVDSRGDRGNTGGGHYTATRRATPAEREEAKNDEGKAATQRERREASSDGRGRKTAK

SEQ ID NO: 993175 - protein, 309 aa, Homo sapiens
DLGSGITCSPPRPEPEHPGSRQPRHTPSKMGKEKNHINIVVIGHVDSGKSTTTGQLIYKCGGIDNNRTIEKFAPEAAETGERDSFNDLPGMLDKAERTDACARTHPLDHLPLEVRDPHLANHSETTVLHLKIQKHNQQAVGQDARQVNPDYLKRETQEGRNRRIRAGGQLHRSRDRHHCTPGVHRERTLTQTNTNTHKPADRTTKETKRTENRQTKDNEEDRRRKQPRPPTTQQTPRTTRTHKQPPHKHEHLAAAEARAHNKPKRQRNGATPQAHKRRATETTYTNTTTDTHTGTPTKHPTHKTPTRHP

SEQ ID NO: 993176 - protein, 424 aa, Homo sapiens
MLEEDHDGGPPIYITQSTRLARGKRNKITSCQNNDKGGEEKPTQYEPQREKNTDTTQSEHTHKQPCMTQNTEETNRTSYTDQRETHTTKEAQTTPTGSAQPNDRDTTKTRRKQTHYTHTETIKAEGKHTQQQKNRPKTDNNKLRHKQTNDSKTNTQKENSTQTTQQINIRRRTKTHNPLNKARQEKRKNHRQTAKRKEGTQEKNETPRHKHHPTKPTQQDNHTHQPPQVEPTHNTTRQRENTNTRQARKDQHQQAAQQERIRHNKNQRNKAQKANSKQQKTRNETNDRNGKKEKKRDEERSRKDEGGKNKHKEERQRNHTKNQGDSYERETRKRANQRRIKNTRRCKKDELIRQTTQNGRRKEVSKMKKQREQRRQGSNHADTDKNYEAGERNEEPKERETTQETRTKYKTKHQSARRYGGARV

SEQ ID NO: 993177 - protein, 112 aa, Homo sapiens
MEVGDVQGTTPGPRIVETPVFYWKYTNKLRWGMGGVGPPGISAATVRRLRGRKKCVETVGSVGGVQCEPENVRPVGISTRGCEQVQELHMSSKTNNKTNVCGRSLFHTDFYI

SEQ ID NO: 993178 - protein, 303 aa, Homo sapiens
MSTHTAHPTALGDTQAAEKRRLLDTVKRRVSAKDRRKGFYSKTRGIWLGLLSMNKQSYSDSSMDRDPHRELIQPSHRLIRQHVDPRQTEAQKTHERSNSERAGKTPQAIQDVRDTNIKTAIGKDTHEERGDRETETKGRQRQITRHTEEPNKTNKNHQEKHTQRKWQPNYTEPGNKKTETGYDKKRTRQKTTDQDKHNQRKTHKKQKDNNKNQRKRNKNKQSRKKQNRKKQDKRREERESEQTDEGKRRQTKHTTKEKKKKRRKERKQTENNTKSTREKAKDKKRKKEEKRRKSKQNKKEKKE

SEQ ID NO: 993179 - protein, 514 aa, Homo sapiens
DGGLKEKQSMGTQATGVVHSARGRPRDPRRAADEPQAPPLLLGEGRDLERGCSDDPPCPLLPRVPMDSPPALEYGPRSDLDAPFFFTQVKRRRVRRPMAPGEYREPWMSTGHVTERHGSAMPAQTWGQSAESPKREPKMQQRRARTGAQDPEKLLGPTEDLMDTKDHGSDAQTDPPRNYTTKQTECIQTLTTKGHGNGSHSHYQRSTEGMDHRKERREHKLQAPKTIDTRRDVPGKPEGQEQGTPHKPIARDRNRGAKNKEATETGRPHARHTEGHTGNRHGAHTRARSQPQRQEKNGIPGDNHKHTTTGQHHTQRHTHKADQQKTQERQTKHTTSQGEHHKTDHKHTQPTSNDRRTQCATIRPMKGENLYEAEDAHHKGDNTERKKTTGPVTQHNQNGRPSTQTTHRHTNKHERVERTQTTENAHRKAATTADRQHEERTTTQDTDSSRQQHKDAEELTPTKTRGPQHREKTPTHQEQTDKRTQQTRDRYTLREAQTRRNQDEEKQTRSTHRQ

SEQ ID NO: 993180 - protein, 328 aa, Homo sapiens
MTRGEQHRQSNAQHDKSETDRDKHTATGRKEQGRSQREKQKRARTHHAAHHAHVGGHRHREQRERTSSRTENREDSKAEDNRRDQNAARDEQHEDRGSADEERTEAARTRESKQRDEQKAGARGSDVGSKAERRASGDQTGQERRERKKRGGTDSDDARQRSRQREKRDTSQHDEEKRRAEAKTVEAQAKRNEVAARGEPRKRAEPSRAGEQERRSKGEETRTARGKKDRGKSKTRETSEDDARGAHERESEERGERTERAEDKDKTRRATDGSSMKRGAAEREETSGDGQNPKRKGNRQTEERTSGRERGKSAAEHEGAAEDRMQDE

SEQ ID NO: 993181 - protein, 441 aa, Homo sapiens
MRNAPTGTGKTHMEQNRNRTKRHAAPTHGSGKGPTMSEQKTRQNKANTLAHQRGHSAAHTDKGQRRAENAARENENTEEKETDEKETKDRQKERTTKRKTEEETEKESKQKDEHTDKTEEEQQQSKKKRGRAENKNEHRTNEKSSEKKRKGGGRADRGEEKKSTRDRQAERETMRSERGRRRQEKQRRGREEEQKEEKGKREGEEQKEVERSAEKKTDEEERERKLEGDKEQGKSGEIKTNREKHTAHDEKTEEQEKSKEQEANARQDRRHSAPKRQQSKETRRADDDNRRREKESTRTEERRADEGEHGDKQTQQHKEEKQNEEEQEARQRETKSKEGEEASTTSTQQAANRRHEQNGARGDTRNNDEESGGREHGEDDRKTEQNRKRNNRTRARPRKVEHNNNEYRSRRADTAENEHDRATGSARSSENSDITATRPQD

SEQ ID NO: 993182 - protein, 127 aa, Homo sapiens
PKVTHLVFLKNWKKTDPPFLAALSPFYGPPPKQGGGGRRLRFWGHPSPHPCRAVWALPRVVGAQGPDPRALLSPGFVGVLQPHAKAQGVVCAPELWGCAVGETTSKKPQKNPTVPRERNRARGGRGA

SEQ ID NO: 993183 - protein, 104 aa, Homo sapiens
MEPHANRSWRNIMMVSNQTARSTQKEGGRKRSPQNKAPREKHKVEKHRHTTHKEGSETKDGEPPTDWMNDNEGGEQLRKNRSRADRRKPLKQAAQRKGHNNHEK

SEQ ID NO: 993184 - protein, 183 aa, Homo sapiens
MGGPGGIATFVGQAGHFTPLPPTTLLRISWGALRRGYTDLPALYIRGPGGQREPDVQHLAGVLLCVVPPFHGMKKGVSRFGKAQLGMIVYPGPVLKGYIPSRGGAQSLYERVTPSVFVVTKVGPHTSEGRHLSKPKRQVDTPEYTQSSVKGGKTRSRRTCVSETPTLGGGTTGHHTTRIRRLA

SEQ ID NO: 993185 - protein, 229 aa, Homo sapiens
LAFETVPLVSPTWPVGSGTSTVLGSSSGGALNFTVGGSTSLNGRCEWLSRLHESAWCRTNTTLCVGSVATEVPLSTTGPLLQHGMVGPLHSSPESASALVPNDDAIRVCASTRRLATPSSSGADPDRCERNKTYRCIKQRPAASKGFQQLAKPAAVTITQHMAHLGVELSEPAATWAGAFLSGEPEPGQRCSHWAPAAWRCSTYFCPRRAAACHVADILVVPPVTQRST

SEQ ID NO: 993186 - protein, 45 aa, Homo sapiens
APVTWNGGQADFTMPAATGDSAQTANAVIRSDRIPLASRARKSGE

SEQ ID NO: 993187 - protein, 85 aa, Homo sapiens
WDRTPPDLSPKITSFEYSPVLHTPTVSLGSNSHLLPAVMALRLSLPAPGWFGTIEPARSPLNALDGHQEALLMGWPSSTGALGIT

SEQ ID NO: 993188 - protein, 501 aa, Homo sapiens
MLHNVGACEPEKSGARKSESVRETRRAQLSAVKHHKEEPPKIRKTIRQRNEAGTEKHNNNNQSAINTRATRTPRVTSPRSTRTHYNYTQHATARRRPHHRSTPHTHTTGTVENSAPGETKHKRMSRSRRAAGGQHDQPFDTALLGTVPQRPIRTKRHRGDRSRTTTPPTTPSATIGQTDQTQGRPYSPLHKTARGDRRDTLSAPQYEKVIAGTKPMREQKDKQGTHTTSISKSLQTTYREEDRNEETEHNSADRNVHTGTHNTMTYTPSINAPRTRKYTEHTYPDENVARPNHIKRRVRARRMVDRTPYRDEERVPMSNESQHRRGPLPQNYNSVSSSAQTTTTLGKQRRRELDVEIHTRTNKAKIRCTTDEIRKRKASAPPSGKALRHEPPRQTTPPRRKQKVTSQLEHHSTTTIDELERYTTQSRRRNAQTKQHEYGTKVYAETKHAERQGHVHIDEHRRQTHKTNTGENRHEQQRAENAHIQRRQEDSNVDRRQRHMR

SEQ ID NO: 993189 - protein, 91 aa, Homo sapiens
RLDVEEVCWRENTFELTEDSGHAVEAPALALPCRDCDERLEQRLQVIFGQADEYVLEPKMRCQGSPRVSTGNSLAAEASFCATITDSGTIL

SEQ ID NO: 993190 - protein, 289 aa, Homo sapiens
SSMQYFESSRRPGSQQERAHSYGRMERPQADRMSQDFDQRPWKEVTKEVQHAMGREMLKLHEESLQKGQVADDGFKAGDWPRTDTSIYGGPGGGRLSQTRKSRRYFSPCATCPEELHRKAALEQDLAFWYGPRLAWRSSPNTPAMQRYVKRLHEVGRTEPELLVAHANNRYLGELSGGQVLKKIAQKALDLPSSGEGLAFFTFPNIASATKFKQLYRSRMNSLEMTLRSQAEGDRRGKTGVLVNIQVFDEVAESCCPNATKQPKPLHGNQGVYKVGHEQFGGFWPVWNP

SEQ ID NO: 993191 - protein, 49 aa, Homo sapiens
  misc_feature (9)..(9): Xaa can be any naturally occurring amino acid
RIVLDEGNXKNVVTRNSTVEYWVSAFFFTLTLNIISATSTLMKVDLVDL

SEQ ID NO: 993192 - protein, 163 aa, Homo sapiens
MLARPSSGSHPSLVLAVLLVPGFQETNFPKHKRRFSPLGCGEERNKDLWYSIIGMVRIQYIPDRWFSDNPFMELAGKHYTGPVVAKMWTQGKANQRTTNQTNTKRHKTRGGGAPLPYEVTHRARGRPTGSRRDNTQQTVLVTQTSGGHPTEDTPSTQDNATAR

SEQ ID NO: 993193 - protein, 196 aa, Homo sapiens
TIFNTSDEGPILNSAMAFLIAYLNRINSRLYTDIRQKGARKRWGKAPYGCVTTHPFRLSASENLCRAKEPLKTAASIYPSPVVHTTAPPQPLRPACDPLPPTYPYLNGKRAARETRVEAEKRARESANAANPYAHGALMGVAYRHEDLHKARDGHAHYSPQCACVRPHARREHSKRAMQHRYHSPKRIRETATIAE

SEQ ID NO: 993194 - protein, 274 aa, Homo sapiens
MPYQYRSTDPGSSKQGAVLTSLTAIVWHLATVHPESADVVHWRALVKRVQSIGNRQNTEENRRFYRQLHVGLVDDRSKPLPFGGVYSSSMITVYHKAHDGRPFLPQVSQTHKGRCVVRALKVYNGGDPPEQGRTGDELTPNGLDWAGCPLSPAQIRTERDFAKDGIVLLEQIGDYTPLQSLANTMHNMPNVTGPVDAKNLDPWKCLFVAHSRTAEYPTLIAGPMNLDRLENVHRERGGAAAKGVIDTIYLMAGIHCFPAGSWISKESRRKTPSP

SEQ ID NO: 993195 - protein, 341 aa, Homo sapiens
HASRTAWVDPRVGIGVDLVLFPSSTLPDPSPPCFKWIILDLLTLPGYFDQIFFAAPSSQSSDSTPSNRGRTSCVVDQRHTAMTISSMHQPYSGRPQRDGHKQTGCDASSSKHQQMQIDGQDTGGLHTSLVNTPYRYTSTLSPTRNWSHYRGTDDNRPSTTNGPHHTDKKYTHRNNTIVAKFTITLGDPQTKRQHNGVQPSQRSTYTQRDTTYTDTHPALTAAQHKKHIKLTHNNQPAHAEPRSKHTDAEPEPTNEHKRTHIDRTPHTQRVTTGDTPLLNNIDRPDANEHVKGTGTTHLHTGALATTTQTTPAQTTRTYTTTTDKRCIYQTHNRHPPPSQHN

SEQ ID NO: 993196 - protein, 199 aa, Homo sapiens
  misc_feature (24)..(24): Xaa can be any naturally occurring amino acid
  misc_feature (67)..(67): Xaa can be any naturally occurring amino acid
  misc_feature (107)..(107): Xaa can be any naturally occurring amino acid
MIVKMSLWSMPFLTGGNQHSAFCXENRQSGIAWSDLVLQSWLRIMSSSNSVTKFCSETVRGVSNMTXPVLTARSGQHVSDALAKYAKKFNIEAHTSLPWLRQRRVHXVGVDLGVSRCVYLKENVRCQWFTFGGPELLVHKVMWARVYEIAVIRTQPQALLTSRFLRWVLPYTASIVGEQLRRSKHYSDAVCETLSGISN

SEQ ID NO: 993197 - protein, 153 aa, Homo sapiens
CLSADVSAPVLGLERAEHVGEVSQKPRKHHWCWAGQPAAGIAFSGAEDPDPASRNGMVQSASVMDHVGIARRNTQWRAEMNYYANTSKEEPVKGSMFPTEPMFLHYYLAFSSTTAVPVDKPRSVPPPSAPPQTHVDVKTTRMETLIVPHSHLE

SEQ ID NO: 993198 - protein, 316 aa, Homo sapiens
MRRRQWCEDAKRQIQPPYASEDEAMSAREEEDLCLHEGIGWVRRQKQRNRQAARVKTTEPPEDATKSCSRSEQGVTQGPSRTVMAIRLGERVDPNFAPFPSEPPKKAFSSTGKDYRRSRWAKPVNSRESNRETEQEETRVVITGTRKSQQYSSPQSEQTTERAKGACITMLCRNNRALITETDHPVRDRPHTSLPRYRREPVTNSRESQVNPPHTSGGRNLHKRDTRAHTSGHRESRTQTRQRDGNLRRRETATRKDEQTKTQRMLAHLCAGDEKTTRGTTYNGERDTDNTRVSRPEQHPLFNTAVEARDKIPHKN

SEQ ID NO: 993199 - protein, 108 aa, Homo sapiens
MPQITMRFRISCSLDLSGLYCGSLIIVLRVPSCIDGYVAMTHTDVSDIWDAVVAYLDPPLPIYCELARTYLGDTFTLSRSVTSLGGGRQTAQVVNIKAVRVNLIGSLC

SEQ ID NO: 993200 - protein, 146 aa, Homo sapiens
  misc_feature (87)..(87): Xaa can be any naturally occurring amino acid
MWVSQEAHLVENYIFLGILCGITTGAHLREKAGATRYVCSGCDTTFLQKKEVHLSLVAYMCDTTRVCTSQGRHLSVQMSQKVCECRXPLSITVWRRQRSHLCEKRFPISAFRVWGAHIETTRFFYSEISRGSHLSRDMAFIKVCFA

SEQ ID NO: 993201 - protein, 33 aa, Homo sapiens
MKKTVGTINLDKKAGRWQRGHRKVIREKRDGQR

SEQ ID NO: 993202 - protein, 126 aa, Homo sapiens
RTRGSEPLCLAASLESEERLCPAPSSEMWGAPLPRAHCLRCGEHLCPAARLGGEERLCLATARLRSEERLRPAATPSGREVGGDQPPPGSHPVWEVRGASARPPLLGSEEPLCRPHPVWEVYSTAH

SEQ ID NO: 993203 - protein, 243 aa, Homo sapiens
TSSRSRAAALFIFFFIFWKRSLVLCGPGWSAGAQSQLMCKLRPPGFQCRIYPCHKPSQVSVGHIQVCQRNQQYPFIIYLDIYIDTTMWGQTTRKITTTSENGSIEKSSMCTTSANTHNNQQNYATLTPTQRAKSTHQKRANNTKKQQQPHETNKNNYHTTTQTKKTIEHTKKLSTKMNTQQITNTTQHTTIQQSYITHIKKTIVETTTQLPRTKKKKEQHNKRERQNKTATKKREHKTRKKNQ

SEQ ID NO: 993204 - protein, 85 aa, Homo sapiens
DAGLGRPGEAQAGERWATPAPAQCRPHPNGGCQSLSPETEQASNIDRYVENNYTCKTEMHEQDLDKAVRMWSYRGGIKYSHTTHD

SEQ ID NO: 993205 - protein, 167 aa, Homo sapiens
RRQAKPVGGGARHGDCLRLPRLRKPLWALAGTPASVTGPRAGIWTLAPLAGRSLAVAGAPASGSPWTPGLAFPPGPVLPTPCGPRGLGAPGPRGQGGRSRAPVSESVPRTATPPASGHPALSSSKLVFGRARWLTPVIPALWETEAGGSRGQEIETILTNTVKPRLY

SEQ ID NO: 993206 - protein, 478 aa, Homo sapiens
PVINMTFYWAPDVAIQNLLWQVGVWKGSLLFKLLSITIVRPKGRTLAARPHKPPKQIILLEAPCVTYLQGHRHFGMGDHVGQMLKGSLFLTPLNSVFSRGRLKMCQGAITNAKTTCGTTTPTSHKLIYISRGSLCASKADTILIFQNEAEGTVITYEGDCGPIWPYFLFPLSFLNFYKTETIFYSDRGAPNFYVFAPKPTFGASPECKCVVQNLQTPKDPKGVLFLGAPHSIFYSKAPREDIRRGEKNRGQTCCTTHKCLPTAGLRATFAFLNLNTACGQIYHVLAPHRCTGAGKHMSTPHDSNYVLRVRTQMATPSSRNERPTANPLRPSTAGHPLLRQGGAPPPGGEKPVLGVPTTSTTLYRRRRNKTKIRRDDTPPTPPSFANDYPQTTKIIGRYGIDEDKSCVNKHNALFEHTLNGVPRSDVTKRRRRAERINYSSSDQTRTTDIITQTQPSCVNRNGEIANHHIYRGQSPRSR

SEQ ID NO: 993207 - protein, 132 aa, Homo sapiens
MTVRSALRRTDRGATWMLSSRCSKHYPGRQYGSTSYGQQLHEELIKRGVPLLQNLFDNPGGLKRGFLASNYAPTSQSYPSLRQINELLSGKLAKDNGEHCSPGLWSTFTSNEVIMTIGFSRTVEAFLKEAAE

SEQ ID NO: 993208 - protein, 592 aa, Homo sapiens
  misc_feature (248)..(248): Xaa can be any naturally occurring amino acid
  misc_feature (251)..(251): Xaa can be any naturally occurring amino acid
  misc_feature (574)..(574): Xaa can be any naturally occurring amino acid
FHDRHSRLSPAIGAVLTEDVTGLDRQISVALAHTRETARKSATMPDAGMPDIILDGRETQVGGQTQRIRGVSIGLSVVDEFYTKCELKALGELDSPSVGRISSMWMERRGFVVDVRKARTRHWFDMTISEALIGLEQIIRPPAEARYLSRHRAQREMHTMEHLQRTQRRGGIRIYRRTSIISRPYGRNLSAALWPMSSATSRVYINPSGDLKMGAQTVITQGAGSPVGPGVDPSVVPWHVLRMQRYAXHLXRMSWWSCSIPRGSLPTVKANIVLARCPGNREGVPREWGYPLVVHSQAETNSRAERKVNPQKKSEISWKNQPFSSLDPMAPSKPQKAGPRTRGGVEKPPLKNRPKHTLRSGGSPNKDVGLGKKQPEGVKKNLNVGTFGNKNGKGPLGNLRHNFLGFARQTSFKKRFESTTPTRDINGEGTTFKANPACVVRAHPLYTGRHTQPSNLGREPGGARGEIDDNPLSKRLSGGNPLGGANHWQHDQHLNRPTGAATHSYTPGEEPQETEDTRTGGQNTKQTSELTTQQKIVETVHTNNTTKSRNHLARPQLKQTGNRPSTHNSHYGQXTQNYENTVAHNSTKPARE

SEQ ID NO: 993209 - protein, 293 aa, Homo sapiens
MNEIAGLVIEQVVSESVMQVHGFGWGADVIPRRLVFSFHRCEATPDTRSVVGGLGQKDSYVLGDEASEQSWRFLTHEVPLRLSMAISHTTGDCFMVKDLATRLAFYNGAWCVAREELTRGCFRVAEVPLGKPRGRYEQDDSMDSDYVFEERFKPPRDMCSVTIHDRCSRSPSELRYVVGATQLVIVHWDLVEMGSPLHGGPMLTSGLVPCSPKSILSLDLLWRGPDRFDLMKILNERWLPLSGTLRSVKSCRDVREMCAWLPDLAGEWHRRSSTVWRKSFEVPMAGLAWHDGP

SEQ ID NO: 993210 - protein, 244 aa, Homo sapiens
NNSPFLTITSMTRVMEVSHWGNMAVDKKYVDLKHTGAVLKGPFARYDYQRQPDSGISSIRSLKTILPGAAQGCLVTRDEIGQMWTTSQPPYGGVIVCMRWKVRPRYPSLRRVERPITSVGYNLTKAMSTSIIWVTSDALIDEVWWTTVCGVEQVIRFSDCEDHACLKEPRTLKSIVAYEISRCPEMSWTTTYLDTFGRPVIVAYKKNLVEQHIQDHCGPLQQFNKVLMLEGALLVVAAFLHPGL

SEQ ID NO: 993211 - protein, 151 aa, Homo sapiens
MDSRQLRILDSGPVKLTASLWVPASVLRMWTTAVLDFSFPRNGIPLPGSEAVQEMRVLITGPCGQKFPGNKGAWGATWTGDYSPRALRDGARGHSQGWDTQLGVEPRDLPLYVHSRGGTTRASEGDSEGDRSIEVEGGSNKHKERNAHCEE

SEQ ID NO: 993212 - protein, 166 aa, Homo sapiens
MGSVPEGPSGMGRQEPRSFCHCNKLPDAHRGAAHARRTQDGRHGGPEDRLVARQRRANNRPYLVTEVAPHGGAQTHEKGLPSNSNEGPHYASQPTRRDPERQRHTTRGTRATPKEQHQDITTRKRTRSSDEERNDARDEHRTTRTPPCRPTYRSIRRSTREQEQEV

SEQ ID NO: 993213 - protein, 245 aa, Homo sapiens
MAVSKSFLHNSLYQSTRTHEWEITIILIIHSNAEKAIKVYQPYSFGPSVTGAGSERPNIGIEQGRRKRRAQYGYGIAKRSQSTGPPITREIARRIMVADYGTNKPKGGRTTDAHKRQTPEVPTRNFESTVGGTTWIAHGFNHKAYKQKENDVSEAKVVVPRETVVIALMGERHRVEETQQRGEKNEKQDQQERQVTTPQGHETMKKTLEIISRGDSEPRGKKEREKQDTSNEGILPQHPPLHEKQ

SEQ ID NO: 993214 - protein, 416 aa, Homo sapiens
MTEAPVLASGLLYLSSHSAQMMGKGSMTSKYLWDQQKLTAEKYSGIRRATDKAHDRLTVPHHNYMKMQPQPTVTQQGKQDHNPGDQHGHQKQHRHKCHGRTLAHKPAGTARGSRQGRTTTTAPQPHRTRWTPPVQEADPPTHGHTPDSGAATSKITNEKTGKQSNPDKRTIHPKSKTNTQTRNRPLCLIRKQPKTKENTQHTENSERSKKRTKEDKTKNATEEADAPGKRQKDADRRETDGKNTKSKNDNRNTEREDKTSNKHKRETEEEKDKQTNTEKETTRQMRRARRGRHEQTRDQHRKERQRQKENDNQAKNERTKHRQTQKTEAGERRKRARRTQQRRPGQEQRSDEHATTGRTKRAESSRNERPRERTSGATRRRTGEKAAKQSREGKRKRRRKDNGSREEREQLTAKQQ

SEQ ID NO: 993215 - protein, 247 aa, Homo sapiens
MRDPCSLMEPAYVRCIKPNDAKHVAGRFDEVLIRHQVNVPGAVGKPAACAEPALPICLQILNAFLHRYNVTCAHADVDHSVCKCQDEEMGCAVLESRHTEDYNAHEEYNDVSQWTKIFTYRHSHNDPDKDNRGLTMEGPAAGAQDQKRIQSLTGRGVFAWPAENYSRGDRDQTSLATPRSWVAVWQPPGALQLKGRRQEGSVRVQTHSGGGSSAGYNTAARSPVCPRNCIVKVSMCDTYIGSSYVAL

SEQ ID NO: 993216 - protein, 281 aa, Homo sapiens
EAGWNGTQLSPLLSPWPRRRVYRKTQREISEDTMMFWTRPQLHVGLMEARLSAIYQHRQHQQELLRGVQQRLIQAPFQVTDAAVLNNVAHSHLCLNGTTVKQQVFSTTARQPTVEPGRKQPVSLITLSRLAQRPVGAQQHRSTAQASQGMKNLTTVHTVVLTAFVSTSHKPSKKAPAPCGQTTTHMIFEPFSSMSSSLSITRHLHPSTQSTQVGSVNFCSGGTSFPKVSQTIKPRASTDLVNSSTTMSLLAINTHPANGTTEGIPLAKETSHTETVNVTSL

SEQ ID NO: 993217 - protein, 342 aa, Homo sapiens
MKSTPRREKEVGTRTGDEDEDTERHSNQARELTRGAEAAQRHNATGSARRSDTGRKKRETSRRETKRKKKKAEKTQQTKQEKQHKDKPTKREKNTKRKRGAERQRRNRQKKRREDDERKDTQKAKNKTPDNRARKRRRRRQTEAEAREETHTKDKHTKRDGQRETGKAPTQQARRREKRPDREDSRRRPQHQKNRGQTRRATEEQRRRTEQRASRTRDQRSRGENEKRTKQRGRGDDTPRNREKPREEDRTGEKKTRRRKKQNQRNCAQKNRRGRSNRKKREGKRKNNTEERRHDEERQEGKGETEKTRKRRQRGEKRSRRRKRKDGKRTQDRRRKEEREGK

SEQ ID NO: 993218 - protein, 732 aa, Homo sapiens
  misc_feature (662)..(662): Xaa can be any naturally occurring amino acid
MIDNMHATQIHRFSRTQAQHISEARLHEASRYATYVLNARSDTLTLTDKGQGVTKFTQINQTCAHTSMKHNVRGTKAPNGIFPHMGGGQYCNDFHHTHIGLGLHSQRVCNVRWACPWEQLMSIPKRWGTQDHRHRSRHRRGRDTEMPRKPKDKKMNRAVLRNSTRGTRHQDTKRSPGQDRTGSTRPHQAGGGRREGASQQRQTGRKHSIDRSDKDRQHGHSGMNGQRGLETAARTSRQSTARERKTQRRRERDERGKRTQQGAPRQNKQKKGADKRRRAGDRGEGVRERRELHGSRDKKYETHSSGATAHAGNDSGTAPPPRGGRARRPNRKGRREHDTEEGQTQTAAGTGEGEDERGRREQEAGEQSGDTRRAAEDREDTKEDGERGEERDGRGRERQKEEESEAGAEREGATRERQRGRRAGTERSGEKKAKDEAREKSEPRQRRRERARQQTDTTRAAKKRGQRRQQTTKAAAGRRGQRTRDREEADDERPEQKEKTPKNQKKEEEMQQETKKKQTEKEKTHEQRREKDGGERDKSKEATHQAHEGSARRQAKKTTEKTRTSERGTRAEAERRADERARERDKSNKREQQKEREKDDDSKERMDAETAAEETRGGTRRARSEQAEKTRETREDKKSEGGDRRARATRANERREARGTEXEQQEAEMSRQETSEKTSTNRQKDERTEREEDRAGVERGEAERAREERTGEGSPEREEAEAREQSEQEHRQ

SEQ ID NO: 993219 - protein, 745 aa, Homo sapiens
YVHNPKATPLLKLHRPNNYITTTDMTLQKTHNLNQHNHTTSRNYYIIPHTILLTQINNNTFRMIPHNYHPPHPLTTHPSIILHYLTPSPLTTHGKDQTHNCIPGESQHISRIQQHRNRLYYLTRPLQKSSISRYVTTLHRSIEQTYSTYLWSIVSVDQHTTLVTRRTMGENKMTATNEGADNTDQENDQKTGRANKKQDTYVHITHPMRVEHTTNHAITDQNSKRKHSTSRHQNRRIGNTRKKQIQTLRHKCATMAHNESVINKHQTAQQQLQHELTQQEKKKNKQRTPTKGTTNKDTQQRQIKSTKGEKHTHTDTDNKKPESRRNSPSHSNPRTQTSNQPNTRHNKPQPTRTYYVNKKDRRNQARERHQITASHRLLLTVENNEQDKETRQKLDETTERRRHNTQKNRRKNQNNEERRRRTEEEQKQRKKKKRYREGKRSKEEQENEETSKNDETKNKETRREEEQKRKTEKKKRDKRRLKHETEQNTNRTRRGGPPKEVKTGGDEEPNRKNRERRKHRRGDEREGRERTRTEKPKKEGERRNKSGRDEKREKETGGEREGESERRARGSEEKKSREKDEKKNENKRCDEKQEESRGRDSNKQKKKHEKTREDNDERARRDEETRTRRREKRKKPKGKQTRHTEELSRKTRPRKERSDSRKPKRTASETTKEENEHERPNKQNKKEQDTYEQEQGDHRTERNEQQTREKLRTELSTEDNTSNEERDAQHARQSQTTQQHEKKPQ

SEQ ID NO: 993220 - protein, 118 aa, Homo sapiens
MGKFSSHLCPDWPEGCNSSTGLDRRAFCYQVLRANGLVPPGQGKFVHGTPLRSEVCVIPCVARNFQARAPCWVSPHLRETVGHKCRVGHRVTAHKGVKTLPQKPVEIHRGDSERLRAS

SEQ ID NO: 993221 - protein, 105 aa, Homo sapiens
MMNSQRHTTSYLWGLSTHTIYTKYHSQYNNIKTHVNRRSLHAYRRRTSQHTQRNYVRHTNRREERAYNTLLRDRPKACAIYSTEGMVHRRTIYIEGETKELNRPI

SEQ ID NO: 993222 - protein, 457 aa, Homo sapiens
AGAAAVLQLAGLCRGAEVQLGFPRAPSSPKKQLPERRVVNRTGKYHSKVDSDTRSRAPTIATRKAWRNDRISEQSTTYEEELLIRDGQHATAYMVNSIAKQNTQDKEDAADQTQYKNQDHHNKRMQKETNKREATDTGEGERGQDDEQTKNRQNRKKRQEQGRKRRRHTIKTHRNNEKHTREMRDKKDNTKTGQQTREAMSTEYKERTDQTHATTKDKRDSKQHHETQLNIEEKRKRQRKKRKQQRRRGEEADKEKEEKRKKNEEERTQERRGQNENTHKQQHTTHKHNIEDKQKEKQEQQKKRQERREEETKTEETKHTKEEEQRNNNKATQKEKEQIKKRRVEESKESDNNKDNEDKKEERNSRREKKRNTQRRDITYSRKTEEEKKDNEEKTPRKRQKDETQSRHNREKKYRETPKRRDKTITDENKKREDTTSAASNNGRHTEDERKQTGRQG

SEQ ID NO: 993223 - protein, 110 aa, Homo sapiens
MGIKGWLRDDTTGHRGNRVNTKIERAEKQNNSKYTPGAQKQATTRGDNSRSAHPEQKKKTDENKKQTRDKERKNTERKNKRRRQELKKKQHKEHRRPTTLYTTEEGPPNN

SEQ ID NO: 993224 - protein, 327 aa, Homo sapiens
QRGFPDEGILAVYSTGPPNLGEMLYTKRFGPNAMSGEPVPNGQICNGGLGSRRISAVTPPLEHMVAQVFKLNRPMVETTSMRKCETSFIPWPADHRRHVSINSARVDCLRPVAYGLSLWYLTKGELVICDHEALNLVVSEYYMETSRETETVFELSHSNRRSSERPGTSRATWRTDRDMGLMNAIGASARNPATSVTISGHPDSGPSAAEWRNTDWREVRSHGQRSVLRKGQVRVWCQGGRSARRIRGWSEGDGTGAGSKDTGSRGLGKIWSPRSEITDGRVRPTTGPLGDQRMRAHQTGHGRGHTHRNNTATKEQRSEQHTQTHGQ

SEQ ID NO: 993225 - protein, 103 aa, Homo sapiens
MAIDVSIALTHTTCSNGYCPKVVSQGIYITYHLDMEVLKENTLIGTLTQSRPGVPKIMMDHSPYVCVIPKVNQGMLFSVYRPILRSPSKATNECCPFSNTNYA

SEQ ID NO: 993226 - protein, 491 aa, Homo sapiens
MLHETTITMSWRTKTERRSLASKIDAVPANGQTSNPEKPIKPDVRSYNHHEVYNQATDYEDLPDTTLNDNARSIPMLSHRQPHTDHMMQPSNTEVILDQTQPKYPLTALSCAHRTTLPEIYPGLTVIQGMRKHWGSHVHQEERWIPTRKPRTLEASQAEPNILDTGTWNTPEDNRNIIAPRHWYTRTRDKHYTPRNEQKPHSIGDRETTRTRAHRKAIVGSHKTHHSSIVRNPRRYPHRARAYPRQVPSQQLHNAQIARIGDTLDMESENGRKKGTHRGEPMGEANNNRKRATIDERRSNQTKDGYQRHKTAQHNNGKGQMTSDTKNTRAKRDSSDLRGSQTRDVKDDDNNNKVKETTTETKHEKTKTKRHKRTKEKTEKKKNDKNRTTRTRAQVDCTNELRKHEIRIQTERRLRERNRRKRHKPAERHKADSTAEQRKGGEENEETEEGDENTGKKKKSSRKRREEKEKKELKKKGKREQREMMDTDAKR

SEQ ID NO: 993227 - protein, 275 aa, Homo sapiens
NVTRVGQMRLTSPLIVPSPAAHLTELSIASPLSTDENEKKPTWTCPVCDKKAPYESLIIDGLCEILSPCSDCEIQYQWKIGSWCPMKPKKERIYTEDTPTRDNRSWMATRYRPKPQGADPNRSNKNEGTEVTRTRPPRQSDYHQHRRSDLEHTNHTTAQETEHPPDLAHTPVTEDMRNAKAKIQGRTPGPTKTKHLERRTREHQWRMAQPVWDRKQQPWINRITTKKHVNDEPNERRRNELGKNRKITTGTSKMNRTKANREEEKIHDNNGHPSD

SEQ ID NO: 993228 - protein, 244 aa, Homo sapiens
VTRGRDRVGRQLQEVLEGFNMANVLAFLSDDEDDGGGGVKEKMEEEEAEEEEEEDEEDEMDEEEEEEEEDAFSSEVQGDEVSHALTEDSGPLTLGEPAPDAMSSPPPADVSTFLGLFPRPEKLLRLGPKSSDADSPGRLTRLNPEKVDRLPYLKVSLVFKDEATVSDRPCRMQEDALMQKAFNSSSFKAKNYLTEDGGAHEVMVKKVKTRSRPFTKLITAPDGAERMVQQDYIPRPCTPARGRR

SEQ ID NO: 993229 - protein, 291 aa, Homo sapiens
RERGCKEDVRDGVDHIDIYADVRCEEFNQEARQYGGHESDRVCSDECHISICEIMDDAPEDRDDMASSPQRNMYGDDVGKKEQQPETVVYIIYLAIGELHYYEYGNLIMVDNEMKDFNSEASVTSVSGVKCEYASEDQRYYYATNPGQNWAHVRKGGVSPYSQRGPRSSNAIMARQKRHKGTQAHASNRASYQSVQKIPDRNSIPRQIKPRGRLKDQSTQKQGPQGKHVTHKDQGHNNGPGGTRVKETELPYHREGQDYTVTGAINLSKGWDKGKGQPAKTRGRMEPREAD

SEQ ID NO: 993230 - protein, 311 aa, Homo sapiens
MESRSFAQAGVQWRDLGSLQPPSPRFKRFSCLGLPSSWDYRRPPPRPANFVFLVETGFRHVGQASLELLYLPVLYSSCVVVSLHAFVVSFIDDFYSQCPVKGYAIQIPTTDSLLFKSVSPEVRKSDHSESLTPPLGAQCDFVNKSAIHSFFAASVRFICKVRYTIAPDSLTYVCDTLLWQNAHTYHSSLCARSRPHYRRDGPRGTMHANTWKDVDAKAAEAKRTRLTRAPEQRHTLSAGHGRHADRRRPTNDQGARFNDHEVTNVKGQLPTHTATQEQKSQKPDDGTRDTNKRRTEEQETNNTTEKPLDPH

SEQ ID NO: 993231 - protein, 197 aa, Homo sapiens
CSSEPESEMSSSVHCQTYLSYITDLKHSISLSIFHKPMQWPCIPVSGTDNFLSFNPCNCRRSSAQCSKHRSIKAGIVAPRQCKACKTRLFQHLAIPLWLYSCAAFRSSGAALIITKLGCISIRNSKHLALASLAHHMCSQIGTSVCTPLVNSQWPSFSHLHFTATWLAFQPQPFWLPHLVGQCLERLEPMHTQAGHW

SEQ ID NO: 993232 - protein, 262 aa, Homo sapiens
MRRSIFESERVKAARLVGVEPGGDRACCECPQPCRGLQWFMPVRTFFIHNRTGLRTVAGESSNPEHAVSSPSEPSSPRCLISENIRVVYRSALEASVVTADAVTEKGPDARSSRIGQFGDGHVQVERDSNMDAKQFMDHIEMVGPRSLPDVMEQPVYIHLRETPETRLPHRASELPFRYRGLQQTCQAQEYIRSPACAEHPRVVLWNACDGVQSPCPERKKGAADCAKSALKWNKLVCGSICKESVRKVPESTFLLGVEQLT

SEQ ID NO: 993233 - protein, 111 aa, Homo sapiens
VTHAPLGQSVGVVSCFNRCYGLESWRSFARHTRDGTLPLLAEPLLVASPLSTSNHVVSCLARGTAQYEQFQDALRLAYTELSVTTLAIIAFKISSDTISICTTTVSNTYWQ

SEQ ID NO: 993234 - protein, 288 aa, Homo sapiens
  misc_feature (87)..(87): Xaa can be any naturally occurring amino acid
MVLTKMTTTTAELLICGKEGYPCQLLLYQPILICCSNAKSINRRWNYRWPKCYARIITSSPTRQPAYSASLALDSLGDGATRTHSLXCFDLWLRRNLFQTVLFYPPTQYDHTWLLVPHSYIGPTYIAQTYLQLLRLRTQDLSEHKSLSSHRIPSFLTLSHLVYSHSQHDKNEVHITGIVSTATSDSTIHALMPIYTVSRSSRTGRITRGPRLRSDPSGVLYLTAHIPTPTRDHMELIWESTFPPHERARNTNTSTLKQTPILTSVGAICIRLKGKRSSHIADVTGVSP

SEQ ID NO: 993235 - protein, 79 aa, Homo sapiens
MTSICLTSRPYFLGLYRHWGIQPSPAISRIFQVPGTQNDAGVKANRIFTDKASRQFTAIRKRAWTLLHGMNGRRQRLTS

SEQ ID NO: 993236 - protein, 234 aa, Homo sapiens
LTFCARFLSSSFLRSGYPAPSHALLDSPGPSHGVSCPNPRPGFSMTHPCPRHSASSPFGAFVAYLSLQLSIPPRSPSDLFCSVSADCEMAADISESSGDDLQQETKEREPSLDARLPTFRVPLLVESVTLPTELPVTICLMSLHKKNHRPETTYPNLESCTNLLVQTHPNHKSCTYREASTNPRDSTRDKHHTINDTLHGATSPTTPQTDHHTVTLANSPTHTTQCTQHCPPTP

SEQ ID NO: 993237 - protein, 288 aa, Homo sapiens
TRSDCERSICVIRASAAPNRLTIHGHLLDQGRLGLTNQAEAETGWAVAQYERLLHPCTWSIQRVDTPWLLVRESLLGAREPSRRQEEFASPGMPSQDVICKSIIRQSICPLYLWGGHRHMQRRSLPCLCCGGSRKEASWMDLLDADGRTIKAVAVLTARTLRDMATLSQTLWKVRWEEVFLPVGGDTTFCVKNVRDKDKLDVDTGSVDEREPLRARIVVSMVRGVETIVILGRLGGWSSVVTEIETKDAIKNDRGGSLHEGHGVSRTCLWRGRGSPQAEWRAPDGVLQ

SEQ ID NO: 993238 - protein, 330 aa, Homo sapiens
MEPFTQIFVKVYRVATIDLVDRMFHSVREAWLCSARSTIWQMCKELIPECLYLPEKYLIQYPNNFDLGCRHQNGTKLGVVYPSNLGHKGSHENSSESIVEAWKCDNGEYAIYMSGIDLMLRLKNSKALAAGRKLVECLPISLTLLSGSRGIIYENQVKRIEGRHDPIGGHLLTSARILNRYLTTAFHQSVSAHSSTPVGDQWPQFVVVAGSHKLCRIFVVRRNPLQSLTYNPSGAQNLEANLFRTEILEVNKKKGYSTRTWKQNSIVAAHTNVPDPICSKATTLYTVHRAIICETQNELHEDTRHSTQTKLAKNRRPTICAVDYQLMLLF

SEQ ID NO: 993239 - protein, 269 aa, Homo sapiens
MTRRSRDAWVDPRRSGLLKRPEQLRKLFIGGLSFDTTDESREEPYLSNGERSRTGVGYLRDPNTKRSMGLWVCHICHCAQEVDAAMNARPHKVDCEESVEPKRADLQRRFSKTRCPLNCDTHRYYVGGIKWKTLKKHHLRDYSEQYGTTLDSDLTVMTDRGSGQGHKGACAFCNLNDDHDSVATIVIQHYYHTVNVATNLLTRSKRPCHSHEMAKCFIQQQRSKWRSGTLWRGVRGRWEQVRIAQLGDVSGNHQKPEVAFGDTRSSWIA

SEQ ID NO: 993240 - protein, 105 aa, Homo sapiens
MAKLQHWRLHQRARRASHGIDPFIVNTFINKPTDRPPFWNPIGRRLITEKRVGQCDSKAHRHRSERTPYNSMPLLHLIMHVRQHKLRSTQSPHQERPQRQCPKHL

SEQ ID NO: 993241 - protein, 109 aa, Homo sapiens
LSGRAAVVTFLQSVQVPEFSPKSGVEIHVSDLELQSANASVDDSPSRGAHSHSAAMPRLAPWIQDVPQLTIEKDDDRHTYHMDFIVACSPTLTGDRKSMTFLLRDRGKS

SEQ ID NO: 993242 - protein, 427 aa, Homo sapiens
MQHADCSVPPGSPRRLSADESPWKCRKRHSCIMTLSVWKMYHYHDMQTRWPAAEPELCRLNAWIMTQSPGDSTLLETRMRGHHRSPERRISSTRHGQHPPSRNPIRTHMTTRTTRRTTGDHTGTGRTKGSAPEREEPHTEYRRDTKGTNDKKKSATEPGAHEKDHTTTIGLRPQEEPTAKQNQTETKRTPDSKALKGDRAARHSRETGSPEAKEQRATAMDTNHPDQKQADRGKPQRPRTEHTDKRPMQRQHKQAPQQGKSENIKHRKMRPRTNLHHPGSHNPRDTQDQGKNPKTHTNRKETSTKGRRQQPTKAKQEGKTGEHEKREKQTKQQSRKPKQERKEQKKQDKAEDHRAQHQRESSPKAAREARHTTRSQQEPSQNRKQRATQNGRESRGERTQNEEKRKEGQEKRKRQRGRRERKRKEDN

SEQ ID NO: 993243 - protein, 600 aa, Homo sapiens
  misc_feature (114)..(114): Xaa can be any naturally occurring amino acid
  misc_feature (549)..(549): Xaa can be any naturally occurring amino acid
LLIPRVHLGYTKSRLSAPPRVYVTSDTSLGTSSAWHPCTIQYDADEIMTMAATASQTGRYEALHRNSAMVLTDIGSIHHCLYKGSHIIWKVSFVTVVFSRNDEAPVSMWHEVTXPQLPLHFETDAGNCLDPIACARRSFWTTLGSCPCQGIASSSTFPLPLAASKLYNPCLTLTNCLARVGRSTCRTLNTHCRAIPRPAWWGTSCRELTQTCETTLGLHSEANPPVNAWATYDDLLGRAWGLWATLLTVASGYWSRTAPMRYPVGPNAGRTAGARPTEFGRGYFIITGTWRQGGPRNTGRTRRGDPKGGPTDPRALFALGVALTLLDGPRNAYDDWFRRVAIPIAPKKGRESHMRGPRQGRVVIMETAREEKRLPPHISRAEGATVVGFIASVGHCSVTTITQLCGSHFNRYNRGLHIGFHTILGAHHIFTTASQQTNLTRILIGWGARTTGDPPNGLVATKRGRTCYGSPRGGGEHNDEAAIEVRTSTPHKRGVPNRWHLHLSGTRKYSPTLWGQDKARAAHKTQRTAPERNPDSTKYEEHPHDLDRXVSGAIIPRQQASKRGKNQAAGSQRDDKTEPTTTARKVSTRTQARQHTETRH

SEQ ID NO: 993244 - protein, 107 aa, Homo sapiens
MRIRDAKSCAHRRPPVHFRILGFPGTHKLPMRTSVPDYHFLYPYVAIVRGNEARIELWAWGDSSLNNRVTVRPTGTPGTTRPGARQPLYFSEDLRTGIGNGQQRAIP

SEQ ID NO: 993245 - protein, 440 aa, Homo sapiens
MGYSSCFSKWHYSRGFPEFLSAEEAPTLRGLVNHFSVGGTTTCEWTLEEAVNSMDNIVVHPTNPVASFQGKYISLKQRNSPLKSFRSGNLSSIFSKVGRGVWEHVRTCGGPVNSPKSVFPCRPWSPSLKNSRFPQSFLQRTRRGWEASPEVPQRRRNIADQKRAFRRGPGLDSPDCKNKSTKHERGGGTGTHRESTSRGEGGPQETISGLIPQRAFLLVVLPRGSRPPNKGERPRASIKKRRERTGGTAPGFTPTHRGAAYMLGHTPAGAQPLGGILLLDKENRHTPAAAGGGTHQLVGTTESPPTREDLQGAHKGDTVNKQFIKRGNTTVVVTPTKRGTYALPRLEQTFALTPDEYQYEKLTGRAACDTTSDTPQLAAHRDNVRRPQQRVAQTSRSRPYSMQDNHYTIKSNSTLSRSEQTTPSHIIMTITSTVKDTNDA

SEQ ID NO: 993246 - protein, 43 aa, Homo sapiens
MYPTYHRHVQRDSRLVYVPLLLCVPTNRLCFDACCNRLKGGDE

SEQ ID NO: 993247 - protein, 70 aa, Homo sapiens
LSDSLHGQWINSVKVYTGDAESPCGKCLAWLSALELEVRCRDFSSTMFGLHESGGSSEVLSCPCSAVRVI

SEQ ID NO: 993248 - protein, 135 aa, Homo sapiens
  misc_feature (103)..(103): Xaa can be any naturally occurring amino acid
HASAHDVRKIRPPEVRDSSSPLIHRPPPLPIATIIQSIDETFGVLASVERLSHGSILNHRNEVLLPKRDVTYLHLDASIRPFINQIAHSSHIEDGKSYWHEVXPTYLFTSKWTAVKKFVVFVPSFRTCIGAKAYS

SEQ ID NO: 993249 - protein, 66 aa, Homo sapiens
MKSEDRYSGMCSVQEISPGRLQHLLPMVPWLLGPHPLWILQAHWGSSRAACTDRRTSGLWHGSNLS

SEQ ID NO: 993250 - protein, 36 aa, Homo sapiens
AAAYYYYYCSNSSFYDVRGHVLNEFDNEIILLSFLK

SEQ ID NO: 993251 - protein, 328 aa, Homo sapiens
GRVGRLFAAEAGERSRLVLLSLVLGFVEHFLAVNRVIPTNVPELTFQTQSPPPSPTWRLTYFPWPTVYHRRLYALTFTAQIRGAVDLYPSILEKEGVIQPLSWVKEGLRLSYGTDFSPVPYLNGLGPTSSPSSSYITGSPPSRHPTWTRSGGGALAAEGACQAHAAAPAMPTLRPDQRESCTGDPCWATHGDATTRHRPPRDAKQGHRRNRRGTESTLTVRTEPTLAQPATHDTMRSGPGLTGRGPTRLKGVTHPSPANDPKGPRTGGQRSETHTGQDSTGRRNSEHRKTQARRSKAKTTRPKPPQGQRRTARRTDDENKRNETGTAH

SEQ ID NO: 993252 - protein, 34 aa, Homo sapiens
AAAYYYYYYYCSEFKLLTMYGDMYLWLINAYETK

SEQ ID NO: 993253 - protein, 35 aa, Homo sapiens
GFAGAVQLGLIGTCKEQEKTSDVKSIKASISVHSP

SEQ ID NO: 993254 - protein, 39 aa, Homo sapiens
AAAYYYYYCSEFKLLTMYGDMFIKRIIFVKLLKVLLFSK

SEQ ID NO: 993255 - protein, 36 aa, Homo sapiens
AAAYYYYYCSEFKLLTMYGDMFDFYTEKEKNPGMFK

SEQ ID NO: 993256 - protein, 34 aa, Homo sapiens
  misc_feature (6)..(6): Xaa can be any naturally occurring amino acid
EQTKAXGTVKKRHIEKVYGGMPPSLSLNPLKRPP

SEQ ID NO: 993257 - protein, 433 aa, Homo sapiens
MPLGAGAGGGGVPGKPPSQFVYVFTTHLANTAAEAVLQGRADSILAYHQQNVPRAKLDQAAKVARQPQNRYHAEHAVSRHPRQSQTTPLTPHASEKDTMSKRARSAKQPRTDAATPHPRRTTPDHARQRTHTQTQTRAQRTPDNERTEKQPRHHTPQKHTQQTTATASNTHTARHHRDQRRSTHEKRSTERQPTTHAQQTHSTEKANRPRERRRRETQAETATGNVREDDPEASHDRLGNAPRPRTHTTHKQPNRPESDRDRQAATAPSGRPHTRPTHRERGNKRRQPPPGRTSAAPNPRKNQRAAQRQQTEQKSSRAQTPNNAAESAPSGGQGQSDTRTQSDPRRQNKAPTTTQRQSATATTRRKDAQRKEKGRGQQTRTTNRHNNGEKDQHADKSPTEEADRQRKNETRRQPADKKEQQQRRTKRTRGRAT

SEQ ID NO: 993258 - protein, 148 aa, Homo sapiens
MSSPGRQGCSEAMDHDYCHSEPSTCHNNQNSSAEHIKSNAMDGWHQKMCNPYSYKRINEYRVRLRGHIIAGQSLSRQQRPSVQLFENLAYDQVKQYMSRKIHLNTSADREATIRSSVVVPTTCTSTSAYLCAHNRLSPFTSLSKNTPG

SEQ ID NO: 993259 - protein, 187 aa, Homo sapiens
AIAPYSGTEARAGRRVRFAASGNDASCVSRQYGRAYGRRALVYVRTVGSGAVLGAAVAMLARRRGAGSHLQQERGCSEASVTCDASLSLGTVWAWGPGNRGPSGVRFWEASQPSAVGAVLRGARTPPMGGAVGRSPAARGARRGRSGEGPVITALTPMRSPYVFPNLPVIAITRKPVFPRLIKHYRG

SEQ ID NO: 993260 - protein, 145 aa, Homo sapiens
  misc_feature (61)..(61): Xaa can be any naturally occurring amino acid
  misc_feature (79)..(81): Xaa can be any naturally occurring amino acid
  misc_feature (103)..(103): Xaa can be any naturally occurring amino acid
  misc_feature (111)..(112): Xaa can be any naturally occurring amino acid
MATHGYAEAERVIVLLSSLTFLEITYYEDDRTLWLRAGAVYTLGCCIVRSVIGVYGRSCGXCPGREPQSPSISRSVERXXXGPSNFLWKNPTRRVLPFHKISXQRGNLDLXXPKKVKKPPCVGPPPPTIRLSVVSLGVGLGGLAF

SEQ ID NO: 993261 - protein, 39 aa, Homo sapiens
MDLLVQYNYGLILEFEALLDAAGVASPVNYSRSCSHRNS

SEQ ID NO: 993262 - protein, 74 aa, Homo sapiens
MTCGSYCLDGWASFLCSSCCYGVFWFCGVVWIAVVVKLLLRAVCVTCYLLCDKHTRHQTTHTRDNESTLLRTEK

SEQ ID NO: 993263 - protein, 36 aa, Homo sapiens
AAAYYYYYCSEFKLLTMYGDMILQYICKKEKKTKPK

SEQ ID NO: 993264 - protein, 30 aa, Homo sapiens
AAAYYYYCSNSSFYDVRGHATNSIKLSCEL

SEQ ID NO: 993265 - protein, 30 aa, Homo sapiens
  misc_feature (13)..(13): Xaa can be any naturally occurring amino acid
  misc_feature (20)..(20): Xaa can be any naturally occurring amino acid
GFAGAVQLGLNRXHATYTQXWATECDPVSK

SEQ ID NO: 993266 - protein, 38 aa, Homo sapiens
AAAYYYYCSEFKLLTMYGDMRNKTQYFNKVARFLLTQK

SEQ ID NO: 993267 - protein, 43 aa, Homo sapiens
GPYYYYYCSEFKLLTMYGDMVTASAQPGCAFDFKIKVHPVLCV

SEQ ID NO: 993268 - protein, 302 aa, Homo sapiens
MTRRNPCPRAGGPVLTCGVKFKVLLEQLLQVLQQGPRPHYIRCINSQQPGPEQQTLCSQEECPVATSGGLWPRGDHPYSSAVWLPHSGSLTETLYNWYKLLKGFILAHALSPTAQYLCKGLPEWCPHSEEAMLEALIQDQFSTFWAVLTQAVAITGDSSEAMPVPMHCGRTKVFMTDTMLELLDVGVPVLEHVPADPRWRGGRHRTESTSRVGAVMSFRAGIRPCELGTIPEVVGLPSHKRCCRTEIEWRCLNTDWLPNPSPHRSIPRNSAEGKPARDLSRISATTRAHPGRIQRVSPGNKM

SEQ ID NO: 993269 - protein, 36 aa, Homo sapiens
RPPTTTARIQASNDVRVHVIKVFIVLFPHLCCLNKK

SEQ ID NO: 993270 - protein, 231 aa, Homo sapiens
QCLLPSRCVARAAHFMEPVEAPSLMSWDWSRKPLLQTQAFCSMEQAGAPPSWAGLQPPKLQLWIRASLLLGEPGTGRIVPFQMQLQPRRQEPGQVGALPLPSWRGGSSQVQLWLPPQAQDEGISAACTIGHPRKDSPFTLHPCRLRGVCFHCLASLHSSNCSDLGGESEPRPAAMNGSRRKGVGSPVRPTLRPGGPEFWGLAASPSDQSGNSWSFSGLQWPNQHTLLPVRS

SEQ ID NO: 993271 - protein, 82 aa, Homo sapiens
MNSYRSAYNTKDRLTTIHHCPPTLAAPIHFRPPLKPTTLRRTLHNLRRESHKQRSTSIVFDPDAGVDDQVPYDTRRIYYPQG

SEQ ID NO: 993272 - protein, 96 aa, Homo sapiens
MSTETTRGRQEAQKHTQHQINSADQHTQTGVNDTSGRHEGDYNQAIVNERLRRPGDRQAMRAATNASSSNSHSPLFPSEPRRETKEERRQSRHNNY

SEQ ID NO: 993273 - protein, 87 aa, Homo sapiens
KDYFVGLVPDVTRRLWSRPFMASSEWTVSERCQVFCKAIQPASTKISEDAIEHRVLNRTRRLESRCLSCFHESRGSVGIRTRYVTLG

SEQ ID NO: 993274 - protein, 38 aa, Homo sapiens
AAAYYYYCSEFKLLTMYGDMIPPLHSSLGNIARPHHCK

SEQ ID NO: 993275 - protein, 172 aa, Homo sapiens
MSGSTQPCGGRSTRFSRRGARAKHQTIGANPPGGNHKHEFSQPKMGARRNKVPCEKIWPTGDSRSVVAHEHHDRGPTTTLLAETERAPVIQTKQRGPGRKKTTGAAKDPPPLLKGHHVSAIHNETTSGHNDSKQTHVVDRPRLASDSTHQRTTRSIWWHIPKERPVIAANDG

SEQ ID NO: 993276 - protein, 194 aa, Homo sapiens
MRHKARLRLTVTTGTRQILPGLFTKNISSSITSLEGRLASDACFNGRGNPNGAQVPNHSVPKKRTVMNAVTKGQQSPKLTRDMTYREKEAEHPVEQTPRRRHNEGPQAIKPAGRDSKTSGLTKPGEAPTETNTSTGVRINKPGEKDSNNSRGEQHEEQRITRRAPKQQTQGRANEQIDPIHSARITPHKSMSRT

SEQ ID NO: 993277 - protein, 32 aa, Homo sapiens
AADYYYYCSNSSFYDVRGHVHVFCLNKCKNCK

SEQ ID NO: 993278 - protein, 75 aa, Homo sapiens
TRPELRDIDKLASSSTGPCLSRCVEDRADLSWYTDDFPEKLKSLRQHMAALKRVIRWRSECEAGTEGENKGLPGL

SEQ ID NO: 993279 - protein, 32 aa, Homo sapiens
AAAYYYYYCSEFKLLTMYGDINKELLFLLQIK

SEQ ID NO: 993280 - protein, 225 aa, Homo sapiens
  misc_feature (42)..(42): Xaa can be any naturally occurring amino acid
  misc_feature (105)..(105): Xaa can be any naturally occurring amino acid
  misc_feature (113)..(113): Xaa can be any naturally occurring amino acid
PGSAAWTEPWTRLSRNDCRLAAICWQSHSNEINGLSQTLPGXYMRANTQVHNHMSSASIHVTACACATVSSLQPTNSTPWTGCIHYVPQPIVLRRSASDPLTCPXQATELSSXFDVHTPHRGPPDGRLPMHSYTCEIVGTVRVVGLLTWVQPGQSMALGSKTLERVDAILGAFPYTCAHPRVYTQRYSREITKCLVYYNRTRVVSYFCVCTLCASLKRSLLGVAP

SEQ ID NO: 993281 - protein, 33 aa, Homo sapiens
GAYYYYCSEFKLLTMYGDMLPPSVDNKPFSDAK

SEQ ID NO: 993282 - protein, 135 aa, Homo sapiens
MQEGGTYLFLPPLVSLLRCLVYLVHILCSAYTIMTVHNIYEIQIPMCVYPIIHIWVIIEKSEEVVGTRSINTQCVVVNVPRFLVSHIEDDIIYETDEFAELLSLIYQSNQRHAVGYDRSLVMGATLSCSVVYQTV

SEQ ID NO: 993283 - protein, 35 aa, Homo sapiens
AADYYYYCSEFKLLTMYGDMPLHSTPGDRVRPCLK

SEQ ID NO: 993284 - protein, 280 aa, Homo sapiens
MIGAERKPEYGRVVEWKILVPRTTTAEHRRRGAAEAVIENHITPTIVAVCQVTLPTRVQAPLGEVVIKRVRAEMTHHRTFRTSFLADFFAQQWCDLCDVSDQDRDTQVSACDYIWAFDYSSPLDLGYSELTRSSLAEHAGLAQWNVLVTRCSEERMRVQPPLLGVMIAEAVALMKILGRNGEPACDAGEHRVCCWARRSRVSVTCRLPGTWAFGPWVSPLGGPSRRGGFLCPRLPGAWLPGFTAAGGGVPEMGGSPRRFRLCVNLTPGWFPGPAKGGTRE

SEQ ID NO: 993285 - protein, 32 aa, Homo sapiens
AAAYYYYCSEFKLLTMYGDMHLAKINKCWSAK

SEQ ID NO: 993286 - protein, 33 aa, Homo sapiens
AAAYYYYYYCSNSSFYDVRGHVIKVFIVLFPQK

SEQ ID NO: 993287 - protein, 271 aa, Homo sapiens
EVDMQLLNPAVANPLTHRRDVQEDRTTWKSNKFLKIIQLWMIIRNCFMVGADNVGSKQMQQIRMSLRGKAVVLMGKNSMMRKASRAPVKDNPALEILLPHIRGNVGCGFTKEDLTEIRDMLLAVRCQLLPMPGAIVPHVKSTVPCQEQVVWARDRTSLFQAGGITTRNLQGRIEILSDSAKLINEWRESGSQRSHAAEHALHLPRFSFGLVVQQVFDEWSIYKPEVLEHEETLILRFLEGGRMVPVCLQNGPTVLVPIYINGSTSRAGWGG

SEQ ID NO: 993288 - protein, 279 aa, Homo sapiens
  misc_feature (25)..(25): Xaa can be any naturally occurring amino acid
MALPPFRPNPFQGLGGRAVSWVAKXQKSCGPGLQGPQQPRWAREFQGVDRTGQEKLIQEKGHFRGRRAPFSMACPPREGVGVRGGLGLQFTVGTVAGGAGRTPWALKRRLAMLWAIVDPVGLRGLSSQGCRGALCCRGTRLSRRDNRDSGRGAGEPRAARVGASWLWDLSSEAERLASMGPFIPCGTGARGVSETRLNARLAGRLTPPGKAPRATRVGEWVGSNRAQGADWRRLTGGAPEDFYSRGATSRGEPTLGDTRRVSENPSGTTQMHGAHDRGH

SEQ ID NO: 993289 - protein, 30 aa, Homo sapiens
AAAYYYYCSEFKLLTMYGDMLKRKPGGANR

SEQ ID NO: 993290 - protein, 368 aa, Homo sapiens
MQGDLRGDYLSSLDSSCDPDRIRLPEERAMGVQVGSGLPSDHARRESLAMGNSGRADPMKQQQRACTIVHICRLTQQPSWARLSQRGDQSDAAQPWGEHRRTNQGRALWKQANTIHRATAHTGGMHSTGAPTKRTKASNSVRHNSKRPETHFQLRKGTPLGTGALHGTSFPAKESPWLANRKSAPMQIHVPHRKRSFAPQLGQLVLRHKPCRRTYSNNSVQMKSKEPKEGIEPTSGQGQRRTSTATDTRGTEYPKSRARSTAPDGAPGVDRSPTPQLNSQRAGTHGHGTSATAQHGKDKSGTSPPTRTGARRKARAVPNPTCDAHTDDPNENQYKDKITDTCGPLPQRPPQTCSHSDSRERTGTTGGG

SEQ ID NO: 993291 - protein, 71 aa, Homo sapiens
IASAEKEFTAMGVRYNRICDVRQPQKPLPDLSMGLLIFMLCTWYSFRQLQLNGEGSTAFFGKGPETACLIL

SEQ ID NO: 993292 - protein, 70 aa, Homo sapiens
AAAYYYYCSEFKLLTMYGDMLASSVFSYLRRAQSTGLNGVLFIIIAKIGRACDSSIFGRPRQVNHLRPGV

SEQ ID NO: 993293 - protein, 61 aa, Homo sapiens
AAAYYYYYCSEFKLITMYGDMDKERNCKERQSQTSTQINLTGPEMGDCDRESLIKWLFPPK

SEQ ID NO: 993294 - protein, 32 aa, Homo sapiens
AAAYYYYCSEFKLLTMYGDMMLKANNKDISYL

SEQ ID NO: 993295 - protein, 173 aa, Homo sapiens
MGRFYRDKRARCLCDPPLGQACGERHVQWAYTEGAWRVEHPLCDTVGPTFSVARSDRASVSTWREKSSVGPRERTKKREGAVYNTRWHNQPPHVAYTRGRPTQGGCTPSERQHNRGYNPYKHGETHPRKRRAEKQPSSAQHKHTGWTLTPHKRAPRNTVGTHTGGEHKHPIGA

SEQ ID NO: 993296 - protein, 120 aa, Homo sapiens
MGRPTGRFSPQSFRKTPKDKFLQLEFSLTFHELPIVRTTKEAKPLSGKINQFVPKVLPRVFQPKTVLPLRIGFRGKLNPLYVNVPPSYAFIVVQGYNCAFPQEMCSSLAQEVSFGWGRTQ

SEQ ID NO: 993297 - protein, 33 aa, Homo sapiens
AAAYYYYCSEFKLLTMYGDMLKLVLFPLKTNQK

SEQ ID NO: 993298 - protein, 311 aa, Homo sapiens
GQLTRTADYYHSFWQLLLPAAPLFSMAAKLNWTNISKIHDCHSAHPLSTHSSPSFKHTQLAGLLTPALQQNSPPTRPCHHPYFQEQRNSPLNAQSDATAPNEHATRTGPMLMRTLPKPNTLSARSWLSTLLAPYLPAPNACPAPDALAHSWQNTHCDTTLPALPCSNPLDTRMPLTPAAATRTGSRRHNQAFILNRTALTFFRNPHAPKDPPPPAQLYLDDPSVHFCLPILEPRNTAHPANETGPLLHAPCPPRTNDQSMARHIAPQPNYSLAAEKGHGNAPKTLNAQPPGPAVIETIPEEQPNHPHAPRN

SEQ ID NO: 993299 - protein, 34 aa, Homo sapiens
AAAYYYYCCYEYLLITICDDLDLMTQTERTMHVG

SEQ ID NO: 993300 - protein, 36 aa, Homo sapiens
AAAYYYYYCSEFKLLTMYGDMAEKKIIIKWLYFLEK

SEQ ID NO: 993301 - protein, 536 aa, Homo sapiens
MDQGNLYIGYSAAGRQLHPAPQKHHHCDSVPPRPPHIWAQVFLREPGRPGGALQAGRPGVLEGSTGWAASSSGKRQYAPGKNTATHASASASAPPCVVCCPPNSLLQMDKQDSRAGAHPMVFQCNPRAAEPSIRLLHPNRHTISHPCAPQMDIMHLIADYNHLMRATQIGHGPIPNATAHMGHLTPSGHTTGLRREHAAPGTQDQGPSAGPANRWLQQLPKSHHKHQNIPPQQRGHHRIHRATQTQPQGAKGVKSHHRWENETHNRQSERSTVGRLWEAMMAPPHTHNTARAIIHPQFQQPGEDKASREPQERATCKADTSIQYTHQARPQHIRVSEKKRGPHRKPGHDNPTRGRPWHVGGSDTHRATHSDSPPTPQPNRYTQTTRRTPPAEQSTTNSGPHTPREPVCKPPRRHTTSDNRGTHHPTQRGDRHTDRGHDECDSAQNTTAQTEGTSETPPASTGGRTTHGTRKRECAKATENRRNDAEQRGTECLPPRPYLFSSDHTIRLHEATSVTPTAAQRSGKTSQHTTHENQHS

SEQ ID NO: 993302 - protein, 174 aa, Homo sapiens
RKHTEKHEWFAVNPIVQECSMKEEYHDHCIVSYRKLTLKLQRIYSRVRRETGSSVALNDLAEEDYTEKPFHSRKLTSVPRSQTLPRNVPGKKVMGITSNVPCQGMKEIIVKDLKKVDTKPSSEKKIHKTSREDMFSEKQDIPFVEQEDPYRKKKLQEKREGNLQNLNWSKSRTC

SEQ ID NO: 993303 - protein, 108 aa, Homo sapiens
  misc_feature (55)..(55): Xaa can be any naturally occurring amino acid
MRDCTYMPKDKKLLEIDVAKCITSCKRNMTQERHVRQQCQHGNKNTNVRGITMKXCTPGPSRSYGISALSKMLPVRMQDITHSMKGSRVRLIPGMAARCTREPRMEPG

SEQ ID NO: 993304 - protein, 122 aa, Homo sapiens
MTQDEFTKPVQQHSVNVESAQLIRDKVAGQQLGYGFVNYVTAEDAERAINTLNGLKIQSKTIKVSYARPRLRGDQRRQLVHQRAPADHDPEGRRRHVLTRWADHTTRGVLVGSRLQVVQREA

SEQ ID NO: 993305 - protein, 337 aa, Homo sapiens
VNAPQMGFLVKSPGSLLEIHSPAQAPSDDAACDTRPSPVRGTCYYQHMPYQYPALTPEQKKELSDIAHRICGYPGQGHPGLQIESTVDHCQKRLRVNIGTENTEENLALLPSRLLVTELSTGVNPLHMGGVILFHDDTSTRKAVIDGLSAYPQVDHKSQGLSVGESIDRQTTGGVVPTLARDKWGENKPNQRVWHGAVLRRVCPVYNEGTETEYRQKWPEVVLEDVGEQQPRLKYLAQLTWDKLPIWFRGGRLLPRYSWASAKCRVCCPLRVAHGESPREGRPVFDILLQYLPGTELVLLKGRIRHEFTWNAFRKPTRSPGMWHNTFKRDHENHTLD

SEQ ID NO: 993306 - protein, 31 aa, Homo sapiens
GFAGAVQLGLIGTRIRRLEFDASNSSRDHIS

SEQ ID NO: 993307 - protein, 34 aa, Homo sapiens
AAAYYYYYCSEFKLLTMYGDMWLYYLFKINNKWA

SEQ ID NO: 993308 - protein, 467 aa, Homo sapiens
PEQRTAAASLRPIPGMFVQRVAVMNHGLLLYAYDFLVKNNMSSMDNRMLMVGVYYAKCCVGGGEGKRSLTSLSSGERKKVALMHVEGPAAATERLAQGQTTMEPSSSGARIRGRTILPGQIVVGRSDTHRHQQWHVSQTECQLQYPESYRCSGLLVPGLLVAWASEDGTSHDPHKHVGSLRSSLECAGGRGPWPSPLLMDAFHARVYEPVSVESSPGSQVNNRLPLSCSIILNRSRSSYSLDETDGRYILLQKHIRRHFPSEQLLGLNGDPGLGQHGGLPTVITHSHRRVLDTPPKATNVGDVAVTFIQQAIQTCTTQNLVPTPPTCEHPLGQTSSACGGPQGPLQIGTPHKHTQTFWATPIEGGIPPPSQKVGTPPGGPAMSGEYRGRYPTAKGEPEPRTGPPGATVHQRRPTVHAPRKSSNPPATKKQARRQYHRSRTRPHTTAHLDHPEQADPSHTSPAHHPPT

SEQ ID NO: 993309 - protein, 149 aa, Homo sapiens
NSYYLISAVGTLHPSRTAGGGGGGGGAAPRPQFHPLCHSAHPRLPTTAKTPALNEALAYRVVGLNLIHGAWTSGWNPAPYHALMAAGIWCWRQPVQPRRALCLVDLVRLFLNHAGLPPAQPHPPWCDAWSQQRLRVVAAITSPASLLAS

SEQ ID NO: 993310 - protein, 30 aa, Homo sapiens
AAAYYYYCSEFKLLTMYGDMLISSKSKILK

SEQ ID NO: 993311 - protein, 60 aa, Homo sapiens
AAAYYYYYCSEFKLLTMYGDMYIFYIQKQERRFEPLCQAHSHTVECTFIFNKSPYSFLTK

SEQ ID NO: 993312 - protein, 334 aa, Homo sapiens
MLRTLDIKHEDEVKSQSRVMIHVFSDGEQTGAGCDSHFLGAFVAQHLKTINQERCIEPLAESITDVLVNGHNGHWLVKPTAGWDGFVEFFPCQRHLSTGGQSRNVLLALAGVAAVGAGLAYLNKHSLPVSANQLTSTNPPQHKTSFMQMELHKLYNLPRVAPIGNLSRNSKWPEALSANHGTYIHGKECSPFDVQAVTVWNSITKVQVSATNKLSLRKPMEAGLTDITEHRTPGNRLQYPGREQDRGPQARTRLASEPRTNLIHTPDLTSTATTKATDRGTRPTTHTTAHHRRHTTHDHKTSNPSNQSDQPAQDNRHNKQPHSNTHKKTTQQET

SEQ ID NO: 993313 - protein, 35 aa, Homo sapiens
AAAYYYYYCSEFKLLTMYGDMGLFLGTIKRLNLSK

SEQ ID NO: 993314 - protein, 122 aa, Homo sapiens
MFFTTKHRGILMDRYHRCRKNLNPPQRNDDAARYLEGDPKTTQWLHLPFENIQLGYPETRTDKGTSTKLEGRKRNRRKAGQQKTNKNRKQEDKKKTQDTHNKRQKRKTNKKKKQNEQRETNK

SEQ ID NO: 993315 - protein, 45 aa, Homo sapiens
AAAYYYYCSEFKLLTMYGDMAESALPSRYMPLHSFLGDRVKPCLK

SEQ ID NO: 993316 - protein, 42 aa, Homo sapiens
MDLLVQYNYGLIGTWKLNNLLLNDYWINKKMKAEIEMFFLKP

SEQ ID NO: 993317 - protein, 102 aa, Homo sapiens
MAYKQKPYLKQQDWETGLRGETYDRERNKRWDEETRHSTLSTGKGPQKNTNGDDAKHTQKENKGTEADKNDEGENKKKTDRAKANVQDDPSQNRPTRRAIKL

SEQ ID NO: 993318 - protein, 34 aa, Homo sapiens
AAAYYYYYCSEFKLLTMYGDMISMCFHIKLFSTE

SEQ ID NO: 993319 - protein, 42 aa, Homo sapiens
AAAYYYYYFCSEFKLLTMYGDMLLRSSFLRPLPGINICVCVC

SEQ ID NO: 993320 - protein, 34 aa, Homo sapiens
AAAYYYYCSEFKLLTMYGDMCNSINDLILLNEMK

SEQ ID NO: 993321 - protein, 201 aa, Homo sapiens
QNLIQNTNIENGQEERVMDPVQRFEKLPWKSSMQLMETSLEHVAMRPWRIECLSQGVVTRAKQLSRTLVRHEPPKTPTASCSRDSLPYPQYLAVIKAQISCAKDIHTALLDCANKVTGKTPAPPAGPGGSSVKWGTGSGAGSGWWVVCKGMKSVLGLKHSSLLSSCLSTEAGASRGQQRPTGSSQAGPLRTVPFFLITLLA

SEQ ID NO: 993322 - protein, 149 aa, Homo sapiens
AVYLSWRTRMQVLTDGFDIIHQSVSECGSGCVLVLEEGDDTSSKGHKLGAVLGLKMIPGCSEIFNASADGQLYPNRLRPHRPWIDDYYQTWVKPQIVLLIEWTISLNSSAMLQWLTLLRSLQASDSGRKQRPQGGDFIEIPVPSVALIG

SEQ ID NO: 993323 - protein, 149 aa, Homo sapiens
MDGQRERARSESITDSREGQHFEPHTVCTGGKGRVGIQTHTAEPPPRRARDRQHDHRNPRQDRKQNTQWTEQTPTAERNHRGAALTRSTDQKDPKKTGRPGTNRESERGSNTEERQDEPERGEHTAEGTKKRARQNPQGQQTLRGTPRA

SEQ ID NO: 993324 - protein, 366 aa, Homo sapiens
MEHPNTGTVNTSVAHSKFIGFSGLSRCTSNYQATLERIPNTNSFWATSDSVSILKEKEIFSKLEKRAAQETERLLKESEQNANHPHRIELQNIFEEAQSLVREKIVPYYNGGNCVTDEFEEGIQDIILRLTHVNTWRTTISLRQARYHTLTTNLCGARDNRRLHEKADFPAAIPRMHIPSVATIRFVMCAGEQGQRGPDEHFCMGVNKNEDLAGTSIPGEHTGTARMSRDRLQCVGPEQETPTNRSTAEKRHNTPRPNGNGTRHTEREQRNGTRTQATTDHIDGHKNARKRGQKKAKKKNETQREARRKKQQRKETLRNDRRQQTKEREHRKRTNEKDDDEAQERGKDKKAAHRDKRQHDSHAKRE

SEQ ID NO: 993325 - protein, 163 aa, Homo sapiens
ASGLNVYSALTSRLSGRGGYSAYSKDTGLLTSSSREWKVKFPECYVSGFHAIRLLKIDLLKNGERIEKVEHSDLSFQQGRVFLSLCTTVNSPPLKKDEDMPAGVNQCDLVTAQDSERGIETCKRASNGDAAYGLDEFQILLALLWNIDMLIHVYDFYAQNVGL

SEQ ID NO: 993326 - protein, 72 aa, Homo sapiens
MARKECGCRQDRRLVAMDRPLQEEEPPRCTKQEVGYMTGKCLANNTTHYGTNEQKKEGGGGRVWVVGVLWVW

SEQ ID NO: 993327 - protein, 63 aa, Homo sapiens
MSGIGSLGSDVAGRDNRGKEGTDTTRDEGAYGAARDGDKRDAGGEERDTRTEGDERGRPWWVT

SEQ ID NO: 993328 - protein, 226 aa, Homo sapiens
QWCRSVIEFFVMVIRLLNTPGPVLLVRRMLLSSDLRSLVSGKPVLNAYRQSTSTPKELCQAKAQALIQNLSLLRSGLPGFGAPIQCLAEKFSVDNVAERHELTTSSRPSCCGQRSHRTTGRLLYLWKRCTYCHGLLWAIDLATEGNATNNFVAKPHFTITTWMTHSGLTEHTIIQPGTLARPGAHGKSRCPLAICGQNILDHRRKHASILVRSSVSPPPREERIQT

SEQ ID NO: 993329 - protein, 377 aa, Homo sapiens
RGLAQRREQLNFKHKQLHERASTAPEPCPDPRPARPCGARAETPWPRRSSGRGPPSRRGPSEGRERSGAAIDGRGKLWALCFPGPARSPGAPGAPPMSTIQPAEGVQMRGPGGSPSMKGYPRLGRARMDEDAMRLPEINQPNKYQVVKRRGTHETGHPGPKDLFRYEESREKLASPTRGQGHARGCGQIEQHPTVTGFRAIKSSQTEELCGTGALNQEPEAADVVTVIRRGNAEGQAGAEGRGTLVSLMSHAKATERTTGAVDNDTHGDMPDGPHHTGPRRRNTGGSDKGSHLKAKGPSYRGNRRWHTETALRGGTQRTKTGRTDKQPAQQRARKRKRVDKAKGQERKRNTTEQRRGPTDEAAPGVGNTTTKCADQH

SEQ ID NO: 993330 - protein, 375 aa, Homo sapiens
VAPQSTEPRLCRSAAVTPARSSPCDDDISLRSSSTTGSGMCKAGFAGDDAPRAVFPSIVVCAPGTRASMVGHGSEGFLCRATEAQSKRGILTLQVPHRARHTSPTGTTMRAHIWHHTFYNELRCGSRGAPLCLLSEDPLNPKANAQQDDPASCLTTFNTPAMYVAIQGCSYPCNASGRTTGIEMDSGRPGSPTLRPSTRRMHSPMPSCVWTLAARPLTAYLLNESHPTRGQQPPPTTRRTGEHGAATSRHHTAHRTPRNTRTSAPRRTPAPLAAAPHHRHHAHRTTTADHRTAPQQHSHAPNGTRRPGPHHTHNDTTRAQPPHNQCNNRQHATKHRPTPQQHHEKAKKRHHQPDTPPPTSPAPHTPHREPAPTAH

SEQ ID NO: 993331 - protein, 344 aa, Homo sapiens
KLPRAAGMTPLYAGSVCTNMGSGPPQAQHCPDSGVKRTYSEVYPGSSICKEASMKPERQFGPALGGTCPPLLTCGTGMTIEACGMHQSLLRDMDPRDLHYKTTRYHYRATANSPHAGKPTETHETKASSDHSKDVTKTRRCKFHYYSRDLKPKLNSLDNSESRLMRRRAMRRSSRQDAYPSGKRQGEYGTLKNPNRQAEQHETGHDHMINPEENTSEKEHCRNKGRNRRRRQKRYHQKDRRITSNRHTREEKNCNDRNEREGTREQNAHEACVSRQTHKHETCKTTQAEKDSHDRAKSRHRHAERGQETNTATRPPQSRTRGSSTEPHDKAAEKQNRHRRTNTK

SEQ ID NO: 993332 - protein, 321 aa, Homo sapiens
HQRTGEEDVEPECIMEKVANGFRCHTTAFIKESGRFQDVGPQAPVGSVYQKTNAVSEIKRVGKRQLLGQSTRRRRRTVGWRKSGGRGGTSGMRGSRSRRERELREAARREQRYQEQGGEASPRGRGSRSRSGVQGTEMSRSLPCRRGRSSRQEGGGHVNNCIIQSSGLEAEEPLLQKESTNQRPMFGKRSQLLPVSRAEGRSSLLRSWAKGSPPMAAGSAKERGWVLSEASRGRNLVRRSPNGGKQHVVGLASNLATPFGAWAQGRGLARPDTTGSENKILYTENHKAREEQRGDERRIARDPTQELMRETAHTRHYTREK

SEQ ID NO: 993333 - protein, 243 aa, Homo sapiens
MTKNHSTHSTHQHPAHEQHKQQPNPNHLITLDETEPNVKIQRKSERPCEAQSATRAQSNHNKAQATRQPHNIYQSPRHHDNNRPHRSAPERTPPDNYEPGGRRTTPHTRARPQITRSNTNRNQHEKEKHRTMTRKREAQHRNYPHRTTLNPHTEQNQRQKKHKGAKEQNRTKRTTSNNPHTLQEQRTNPTSNANTTGTLKASKARDRNTKTKRHKTHQTTDNHHSYLHPPTQYNTSRLNTDCY

SEQ ID NO: 993334 - protein, 363 aa, Homo sapiens
VKDLVFEEAAGTTSGGVCVVPSSLQNELRHSSTLPGSSGSGLHPPGTTVLPIMHCYGMYERPELRDYRGLEQLKAQLVAGDDEEAGWTELAEHGSAHALLRTELIGDQLAQLNTVYPSPSYSSLGANLRDPADYQLDVEWQAEVPKHTTDVVEESVRGNNRMDRNPPTGHTDHLGTPVPVSVPAGASMAAPFVELGTSSRAGRRLAGAGGPANDTCIAKHTGRAYDEQRGPQTDAGTTSCLMNQRRTAQQLCTKRRAAGAQANRDTGPAAARPTTLTTPHRQNPTCGAHCPNRRPSTVPLRNVPHKGPGPPALAAITPEAPHTTHTQHAENARHTGASRTRGHTATHTSTHQDNEKPAYTHRP

SEQ ID NO: 993335 - protein, 144 aa, Homo sapiens
VGPYPAVCRQSRVDGNGGDGARARRVVLCVGGAEEASDRHDETTREAYSRLTSATEMTERRTTDKRERTNYTRQRPLFYETISQSIPCYRDVRVTQLEDSTTCTKAYEPPRTPRSSTTDPSTRETNCANPIHTPMRGTPQPINL

SEQ ID NO: 993336 - protein, 33 aa, Homo sapiens
MDLLVQYNKALEFELEFEARIRARIRARIRASN

SEQ ID NO: 993337 - protein, 254 aa, Homo sapiens
KPPKESALRSSWSRKDPDARAVEQMTLETFFFLINGPEIMSKWLVSLRAILCKALEEAEKNASLSDHHSLIELDAILLSIQLRERLMATVRSGAYVSRVVDASMDGLRCSRATCELLWQQPTDPTALTQCLRRFGRFDREVDLGEFHDATGRVQRFFQIHTKNMKLGDDVDLEQEAIETHRHVGADLSETCAQRLFCKTIRKKMDLIDLEDDEIDAEVMKSLAVTMDDFRWALSQSYPSDCGNRGKGAQVAGEE

SEQ ID NO: 993338 - protein, 314 aa, Homo sapiens
REVRRSVGITGLQQSNSGPQEAIGPGPWTRGAQSAPQMPLHVGYEDRGGLRMSAPSPLTDSQEGGSPRSPSVNKEFPHKSIFLCTRICPSCTQKINHGARLCEAIGTRSGGIARMEYPFLDPQGLFVAAPGRFPKKEGTAHYTAAEDHLAGAGQRLRMRDKSGQRSEGSQDQEHNNVLGRCRLHMRQTRPYRGDIASPQEENNLHNLHSGGDPPVGSNEQRHVVACARARKQIMDHAGNQERSSDTSYTARRHPRKEIKSGGDTTTDARHPQHNPRLTQPALHSTSGTTQHAPEHRTTHMPRKNSRQWPHTHTA

SEQ ID NO: 993339 - protein, 425 aa, Homo sapiens
MTAGKIARQRAEKKLTLRDSERGISQKLGKADETKDEQFEQVLSRISNIAADGGRPGLQKDLRTIPGLRLKPMHEASQEADMQLLCTERAMSPHWPRPGCRQHKIAEQQPILRVRLASYPPRSWWHPLAAADHLAQRTCGQIPRTVNVNAVANRRGANLRATTTAARNLLTNGPFQTATTDRTERPHHGPRPDARATLDPNAPQSAAPEPQHCTLLRLMPPHAKPCPNPPGHTTPQRNRLHTRLTHSRSPSKPLRRPHNGHAATTPRAPTAAATCQPKELRHQEQPLHTHRLTRPRDRAPKPNHASRHTPISPRNKGRSPTQHHQPTPATHRTPPTGALRPSQHTSPGPATPGAHRSATTTNATRPPRAGRTRTWGPTAHHSPHLQPPHRATQRDRPPPTLNARNAPPNSNTNTPPPSKQQEAPH

SEQ ID NO: 993340 - protein, 212 aa, Homo sapiens
MPIERTWLPMNTSSVHSCGAFYWSQKGFHTEGRKAYCRKDYLRHVLHHNVCAWLRPGHPERTISQTLNTLWHPECLCVPGECFTPFDERQPYFEHDGQTLTVRCQYQAAARIAVYHGCQKPITGRSTHRPMAQQDTQPRDTNVKRPYSHQSSHNHGTHYTPDAQHTTKTITCHEPCLPQRLLHSSQWHLPPCPTAPPYHPDTDIPLNLGRSL

SEQ ID NO: 993341 - protein, 30 aa, Homo sapiens
DLLVQYNRLNRARIRARIREQQSKTKSPKK

SEQ ID NO: 993342 - protein, 469 aa, Homo sapiens
ILSTTTEPTAALGSEWLVLSPGLVIYTPVYFYFYHTGHHCAHKRSTSSGIGAPNWVQAVPVFWHYGAKQWRLGTSSMGKGGAQASSCTSTVSFALSSRTQCCGSIRGTSYVQQGQAHKQHRGIHHCYSTTPGRHAHPSHDTVGVTQHCSTAPPKCSTGKHSGHTTNRTIQLLTSSTQATTTDTQQQLLTAPPCTHTHQPLLRHTPNGTLTHNHTDTPPHRNHTPPNAQNTYAPRYPPTGPQRHTTALTGLPTATLHHSQSHKQTPYGPPGHKLTGHPGHSPDINTPPGNHDPVHAPHPLNQHGTISPARQHTTWPAPGTNPSPHTGNTNKTTPRRPPPPGHGPHLAPTRPRTHATGHAKRTNRHNQMHSPPSSRTPTTETNRRTPHTTEEHSRPHNRNRHDRGRHTQKGRPAHRGEPTPDPTHPHNQPRQAKKHPAKPTTHDTKTTTHKEAAHSKDTKQQQHRHADSAI

SEQ ID NO: 993343 - protein, 44 aa, Homo sapiens
AAAYYYYCSEFKLLTMYGDMKSYLCYKFFETQYLQETGMNNCIK

SEQ ID NO: 993344 - protein, 353 aa, Homo sapiens
TPPPASPPGLNTITITTSKQQQQQQQRTSSITETLGPPSFLETFPTRHLEVRIDIRNTATPLAATDHATSAWRSSEGPYPDRAQTTRVPPTLQQTTVIHTDTTQGTQMGPFQCHHIHIIYKRRILLSDILQGVHNTSVSQPPFHLFPQRTHQRSADPIAHIHQAVDHTEISRPSFETSPCNPTRSIGPTTIEALPHPANGQGHYKNTRRTITPPHGNSNEPEETDNAKTPPRTHQDGHPTKEKATNNKNHEKIEKNTKRENGTKRTCQSTKERRETPTQHGRPKQATKTKRTRHWQRAPKWENRTNTHRATEPTRRQRRQKWSQPRHKASQAKHKKDRRQHGWTPTNQQMQRT

SEQ ID NO: 993345 - protein, 301 aa, Homo sapiens
AQVRVLSGPPHFHLGQTNRTPEISPANVLAGRIPGIERVMMDSVCLRATPIAYYVSNEELLGKYYHEAADPKVVQCEVLSFADSDIVPPDPVPGCSLYLVAIMHHKKRPREVMQEEDVRRILGLLDALLEDEDFSGGQNELTSGDITVCRSTLSWLYKQVLEPSFRQAFANTNRLVTSLHKASPSSGLSMGEVRLCEKMAQFDATKFEKPNLKRTHHRHQRRVHGKRAEAQAELEEEKRRVPWSAGGDGDVTRAGVSPGHDPRSLADTLCGEIAHCPGNRGGQIGDGKRGPGPKAKNPTRT

SEQ ID NO: 993346 - protein, 35 aa, Homo sapiens
AAAYYYYCSEFKLLTMYGDMPLHSSLGDKARPCLK

SEQ ID NO: 993347 - protein, 34 aa, Homo sapiens
AAAYYYYCSEFKLLTMNGDMQSPSVRAAIKAIFS

SEQ ID NO: 993348 - protein, 316 aa, Homo sapiens
IPPKSHTHLVKINVLHRDQDSAHLPGSPRTLLTGRHPHELVGKDCRDGFYRLLSSEPVLAWDPTVFQNSGESPLCAEKPGPGARLIESGAIQHQMKQPPSKFSIEQAVAGEYRAEVLVRVWVLEVGLDAGNPYQGRRASGLPHCSRCISPIFGLIVAAHKDCAKLKICLSDTENVWQLPRCGMMIYRYCVTTVRKEDIEVYVTVTSAGEARVLLFAKLMCSARVALCSRNPFPTWTCRPWEGSVCVLSSASWGGLASAELIDAMGGSSTLAEYRRLARVGVNVKGVFPLGGSRRRSFGRRPGVPGVVGARKSCPQA

SEQ ID NO: 993349 - protein, 35 aa, Homo sapiens
AAAYYYYYCSEFKLLTMYGDMPLYSNLGDRVRFCL

SEQ ID NO: 993350 - protein, 214 aa, Homo sapiens
MHVKTYRLVNLPSILNMTDRNNTSQHTRPTTLRNNETAATYNDLTKNHTRIPHKNPGQTACIGEHIPVNPRKQQDDNAPTTQPCAQKNKLRITLQHREISRDTQITPEEHKHPSAKLNEAISATETYSNKSPFDTYRNLTPSRIQEHNSVRHESARKRTTPPQGILTQLDGHQASKRPRQSQNVADTAATAGETKVERTRPRPGATQQRNTEVR

SEQ ID NO: 993351 - protein, 38 aa, Homo sapiens
MDLLVQYNYGLIGFKLLTLEALNSRARIRARIRGVFQK

SEQ ID NO: 993352 - protein, 106 aa, Homo sapiens
MQQKHHSLRRRRPNTHAHPTRIFVEKGGRPTYRRGSAPIYIYNPIEERGARAHINKRNGRGGKQEQPREHLGEERTPQSLGEGGEPPTWREHNTHPKHKKYYNKTP

SEQ ID NO: 993353 - protein, 310 aa, Homo sapiens
MPERSGVCQVVSIMFSYNMFDTLFPGLPKPFTPHSSAASLCPCQQALMTGLDVETGGKIIMPPRPGQLSRLNMLFKLTNKNSDLMTALWRAGVCGDERHLLLPHWMMQELLLERRRLIQVERRKHSSGHILQISTTEPGLTEQFNKAPKANKKTHTTNIASMTTEEGRDNKTLMKRHQTNAEWTGEPQTDKNKEPKKEENDNVGKWSTDKATKNRKEPTQEGDHHNERTNTETVEHRAHRKPRPRTEPQEQPGQEAPTDPATHTQTHTTDTTPTRHNGAHNNSKTTDTTAKKKEPKHHTKQHPNVATPQA

SEQ ID NO: 993354 - protein, 48 aa, Homo sapiens
AAAYYYYYCSEFKLLTMYGDMGERVKAWPCALQWGQLGRQQNKGNKMK

SEQ ID NO: 993355 - protein, 243 aa, Homo sapiens
QKKARKSLLFWSPKRGAGTEEGCEGPEARGTSRTASLGVPPIPGHVQGTQLAMPHEDNRKTQTRSPISERGDHPRENHQRGTKRSRANHRNAKTTSQAHKHTKGYPLIRPPHSQTWTHRDKTQEAHQEGKHRRRIREEPIELIEKKGKVQPIIDRNNTKSKKHHREGQYHIDIRHQTEFRGPITTPTVDKRPLRQTGTTSAIMTLSPLEDKQTGNEAQPANGNVSNEHQRENHNADSPWRDPQ

SEQ ID NO: 993356 - protein, 542 aa, Homo sapiens
MRIYLRTRFPMTPFRVQVVHGTGRMQRPQCDNALQRSSESRRLLDPRREAPGLAALAPAPKETRPRDRAMDILTTQGLGLQICVARCVRALLGKQYPPCNRKGAKWHLTHQHGSFTLLIPYHPPATPYLISPHSICRLLLLLLHDHARRTFQEKINALNRGMRDTGQEEQATIGRRRPRSSTRGHHMAAPAARPGDSKAQNPTRARGTTTRTEQTIILPRHNNTNTPQRTTHTHATQRGRPNTAHTAILQTHTQRTHTPHRANMFIITTIAPNTQQHNTNATLTTQATASTQQNTHTATHPPQHNHPHKKKPHTPTPHENKDDNERRRTTQRERQQRPTRRETSRRNQKPKSSKRNRSNHERDDREKNKSNKKRPRTEKTRSNETTQKTGGQGEDTRERRRRERHKRPQKTENQTEPTGTRRNDATREEQEKTQQEEEGQERRKRRRDPEQGKRHRRKQQERGDQQDETGPRGTEGSEQRKSGRERDESGHDQKTSTDKESKTTEREGTQTQKSESEERGGNEKQQRKAREGPKDSRRRTQE

SEQ ID NO: 993357 - protein, 173 aa, Homo sapiens
ALHMLAEENAVIQCQCPPADTRAKRFTTLVAKSLKPVVPDSTAETWTTEKFSNGVQTELLTTTKTKDTLRAMTNEQWRFLVEGGTLRIHVVPLLYHTLSGRILETLHTEDIERQQTGPKREETISPKMTLYLYKSTHVDIDRQKLMLKAKMSSDQAQDISTVCFLHVLPPPYP

SEQ ID NO: 993358 - protein, 36 aa, Homo sapiens
AAAYYYYCSEFKLLTMYGDMQRIEFPITFGQGTRLD

SEQ ID NO: 993359 - protein, 263 aa, Homo sapiens
MLETQVAHLCAGAIVNKIPRGSTYSQGPVVTRTISKYPICILKTRLLIWPKIQASGTEAKIQWNMGRMVEDQTTAYHQRAENYNKARKQHNEKVYTHADRHGKVHALEPERTYQKIDKKGLSIEQLPTRDDEHKTHILTCRKEKSNGRPSGPSTHSTGIGTRKDIAHNPPLKHTTQEKSMTKAPTKTQDCHEMDKHHTHKRTTDSTTGTPATITWNTLQPENTHRKTQCQARQLHLKKDRSEVPRRSRLRAQTRQNMTDKQQY

SEQ ID NO: 993360 - protein, 455 aa, Homo sapiens
MHPSTLQAISIRQTDDFLVIRCPTGAPLTPPTVPVTLNAAKLISIHKRTRTWPNSARTENKGENKTHPNTIMYTNTTAHGKQGKRQKKKEENTVTKHKDRQTGEQREKKRTPPTRTTQGTKDYNSKQQTKAPQQDKQEQKSDTETRPPNRQADTVHSKRHTNKQKREAEKTQKQENKRRQKQSEGNEAETERGTRKEKHHGQRAQKAREKQQPAGERRRQTRRHKKSRTGRENKGEEGSEERKTRGNRTEGTSRAQGGNNRRQRRTPQGEQTAQKTSEEKGKDETMRERARDTDKQQTENTHEDSKEQTEEKSEKPEQRRERRKRQRREGEGKARQKKERERKSKEKRRERAREGGSTHEARANKRRKGKATREQRKAETRRGRQKDRATKTRGGKPKREHKGKQKRRRQEKANTNDNEQETRETDEKEQARKKTRTDETKKKREKKRAKSRKKR

SEQ ID NO: 993361 - protein, 627 aa, Homo sapiens
QNTGVVNTTPKSQNGKGNDLISTLSSLGHVDSRKSTTTGHLIYKCWCDRQKQPLTNIRSKAGCCQHGQKGSFQVMPGYWITLHSCSVQRGHPPIAYLLVEHLQHKPSHYVTIIDDPKDTEHFIKNMITGTSQADCACPDCCCWKWLNLKAGISKNGPDRSSMPLTGVTTTGRRHHRNKSEQHTMDSHVRPPYTPDETHEATWYRKAQHVHKHNGDNTRHKEHGVPLTGEERGQTSWEQRRNSAGSREGNIHDRRGRQGTHAQRDPRGTTTRPTEQHQPPHEVTKGRQHAHARQSKGCTQKAQQTNTAQEHTTQEDTDKTTATQHNKTPRYQHVKNRKGQDRRHQSTTEQKQPKQKNKETTKADKQQDRQHHATKKNHTDKPTDRDNKAASREGRMTNRPHGQPTRTAQARSADRGRGRQERQERAKGQSRRRATENSDKAKRESRTREDQAEGQQARKKARDAERDDATAGTADTRGKQPRQQNNGRKSDRNREKERRRTRKKGKEKKRVRTKSNETRSGRTKKGQARTEKGKSKTGEDTDTKNERTHTQGKRHTEQRKPQTEKQEKHGEKRKRHDEDAEGDGAARRQSESGRRGESASTERGDTRTNTQRTRRRERTKTAQSRRAR

SEQ ID NO: 993362 - protein, 49 aa, Homo sapiens
AAAYYYYYCSEFKLLTMYGDMLFCHLLIALLVMNSDDETPINILIDNQK

SEQ ID NO: 993363 - protein, 83 aa, Homo sapiens
SADAWVDHAIEKTPGSPDHTTDPDHTKTPWQLPLLEAESAFISAIRRLLGQMRGQAGMREAVFIIPEHPNNHTEQTTRNKTGE

SEQ ID NO: 993364 - protein, 878 aa, Homo sapiens
  misc_feature (558)..(558): Xaa can be any naturally occurring amino acid
  misc_feature (687)..(687): Xaa can be any naturally occurring amino acid
  misc_feature (695)..(695): Xaa can be any naturally occurring amino acid
  misc_feature (698)..(698): Xaa can be any naturally occurring amino acid
  misc_feature (709)..(709): Xaa can be any naturally occurring amino acid
  misc_feature (718)..(718): Xaa can be any naturally occurring amino acid
  misc_feature (740)..(740): Xaa can be any naturally occurring amino acid
  misc_feature (764)..(764): Xaa can be any naturally occurring amino acid
  misc_feature (795)..(795): Xaa can be any naturally occurring amino acid
  misc_feature (801)..(801): Xaa can be any naturally occurring amino acid
  misc_feature (850)..(850): Xaa can be any naturally occurring amino acid
  misc_feature (860)..(860): Xaa can be any naturally occurring amino acid
MDQLSAQSSGNRAMSIIAGALTACMHVVRLGMQEYPTTSMGSKQSFYQIHIHKQQNIHISTVPTVISHKTSSIVGPQGLRTSRKEQQEGSYHRHSITRIRRKIKHRAEIPPTRPPQRHRHTLTQHTPGPWRRSPATQEEAGTPNNTVLYANKNPTLTSRQTETPRERHTRTAQGTHEDYEPIDHETITQQDGVKQQTQTPEITPDDMAEARPRSKKQIPHKGTQQGRGSHACPQTSHTKLRHRSRGKITHPYTTNRHQSGATTRTHGKQGRQPDNPPTRRRDVSKQSEKRKGKEKLLQRGTQETDSQLHTSTKQHTQWQITTTESGRLDKLEEPSTNTTDDTTMRNQKTNTSNNTTDNYKQTEEKRTNDEPSNNTKLEEQQETNQMKEEKETQQTRGNKRAHDTDETHTQSKESQHTTDINAQDRANERKNNQTAERSNAKRRRDDATTDTRHHTVTRATARTRRNTDRQTAARQQTVHSSNDRGAEERAREKTSTARERHETRRRTTDSTSTREDEGHTHDKPRRSTHSESRETKTRRENDTTRTAQESDEENSHRXAQGTSRVDSAGHLQEDYTEQHTTTKTRRRLQKESETRRQCSTDNSRVTHRRDVEATQRQDDRQNTRRREAAGREQQLSTVHCDRDQQHRSTYSTRGQAQQRDLTRYDNEQQDTRETSTADTETDASRAXDTEADTQXAAXPSASSLNGQMXRQRHDHERXRRRSTDEQQTAESRQTKTTQHXRDSRRQRRKSQPAKNERALRTTQXTRSHRQRAVDMRCERQQATARRTSTTREPTXQDEHTXDSKRAGRANESTHRNDSEETNRSGQTRRQHSGGSNERAQIAASTRAARXEQHDRRRRTXAHALETTTRTRTEPESSE

SEQ ID NO: 993365 - protein, 408 aa, Homo sapiens
NPEDTPAPLQRVRRGPETGPGICPRLEGAHGSPMGKPLKTPHDPPSMRGGGGHETGPWVCLTSEVALRMGDRGGLDVCEIAMILTFLPICDNGAHTQGQARRDPSPYSYYNKHQKTRPTKPRECGHKSKREDRREPNMRKTENKGHKTTNTRTTNNKTKLEEKKSRNKTKNNRKEKQRTKEKEHHEHLNSTKTKTKPENTKKKKRPHREIKTKENNQAEKGSDEEKTTYQRETVKGKTEDMKAEREDRTKKGRTGERAHDRRRRDSQNTPLQNEHHKTEKHDATNKFRSNINQKNRQITERRYNIEMTQINNLKQTTRKHTNMERKERKRKKRKTKESGGAGERDEGEGRNGREARQGAAGKSGKKRGGRRGSRESESRGRDEQGKGRRGADRKERGQERGRGRRGER

SEQ ID NO: 993366 - protein, 48 aa, Homo sapiens
MDLLVQYNYGLIGTWYWSRNRYIDQWNRTEASEITPHIYNHLIFDKPE

SEQ ID NO: 993367 - protein, 469 aa, Homo sapiens
DAWARQEPAQEGSGVIATPVSAGAWLTALPHAPFLSSRQPEDRWCCSMCWCLGRYMFCDRSSCTANRPCMASDCCSVLHSMTLCGTMVTPQVYLARLGVSVMTMHWGHPMTQRKSRTLLARLWLGTNQIKSTLSCPSASCRSSRALGPSNSLPCCNSHPPVAAASHASLQCDWALLAHDAQCVPALETPWNSGARPSYPTAKQTHLGLNIPPRDHNNDSTVTGRSQDPPLTRLVWHNPLHTLTPMRQLAEPNVLHWSQHGSTKRGEVPPACLTRPRQRVRHNTSRAHSLPTQPYQHSQDGHSPPHGGEDPERAPKARTEGNRPKNTYEAPRSTFDRPITNPGKADAPRTTIDANTRRQNRHRKAWYPGRGSPMAHGTRRHERADTQQKDNKGETPHRSSVGSKRCTNKLQQNRREKRLDRSGQRENRDTEETLENKQHHRVVRPSLRTPNTTSTEQSREQERQGATTTR

SEQ ID NO: 993368 - protein, 46 aa, Homo sapiens
AAAYYYYCSEFKLLTMYGDMEDGVLRPPGRSPPLYVSPIKPFKNPK

SEQ ID NO: 993369 - protein, 72 aa, Homo sapiens
  misc_feature (33)..(33): Xaa can be any naturally occurring amino acid
MELNISAHRPLATYNSSTIRPTHHKHYHSHTQXNPLHSYDAPSHHHNHSTMQTELQIQQRQGHTHSSTSTTN

SEQ ID NO: 993370 - protein, 34 aa, Homo sapiens
AAAYYYYYHCSEFKLLTMYGDMEIQLLASGLPSK

SEQ ID NO: 993371 - protein, 107 aa, Homo sapiens
EISGSMTILFLQLSKLACNGEPVMVDPIEGHSREAHTRLRWTRANDEHESENSASGAPALGHRKHAYARNGWATSIVYIYSRRAPLSERIQNTQLSLQLEDSHKTTD

SEQ ID NO: 993372 - protein, 314 aa, Homo sapiens
MRGRPPDRAPPTSCCVQGGGHIGRGHYYTHATSAAPRKKTRERGEKNSAPGGPRRGSHPTTGGRRTTSGATNTHTHTANDQAPREHKHTTDPKGNRGGRKNPTRTPGRRPPKENTSHPTAATPPAGDTYPPARGMHATKASTEEQTKENKTSAKNKNKENTSKNTEKTKTQKHERQRQTKEKRKKKKRKRNRTIKRNTRQRDTNETAKKRKGREKKKNKTAKQKKRKETTKSKKEQQTGTRTQPAAARGQRDRRRRKQRGESQLNRRASNEKEQQEQQDEDTREKREKEPPPRQGRNPNKRGRGQGAKSAGRRR

SEQ ID NO: 993373 - protein, 408 aa, Homo sapiens
MTCGTTFQGRILTVIQQSKKSTLGRLPLSVVMIVGQTFSQNSVLNKPDIDSHMSDDTLTSAANVGKPSEGTQPFSAQSHHSSERPNNVYLTVAQPSARPRAFNKHQEVHTLTLTKPLLTCNAKRDRLTRQDAHKRPTNYSHGIQPARRQRKSSSAAGAEPGTTEQTALHNPTIHTTPQRHHQSDRRNPPANQRAHTRPAQQPTQHTTDTPHAQHDHPTQSLPPPQDTTRKHHTEAWYHATAQQTDANNEHGIPTHTTTHHQKMIPHRRPKTRQRQTPAHWQRNTQQTTTPTPTTTRNQPPTPTEPNAHHPRARDGDTRQRRAQRAQDSANQPTAHTDNTTAQTSRPHKHPTSPAHTRRTQPTRSPHRPRRKTKNEEETDSEHPAAQTDKPHNTPPARATSYAHTPSAA

SEQ ID NO: 993374 - protein, 33 aa, Homo sapiens
AAAYYYYCSEFKLLTMYGDMWNAGQVKRVLPPS

SEQ ID NO: 993375 - protein, 95 aa, Homo sapiens
MQSNARTNGVTWVNHEYTRSLVSGRMKSYALLTVNLVIILLVMDEAIIKKVSRTAWVRIQSRDVGILDPAYARQELLYQMALNARRTDNGGEPSA

SEQ ID NO: 993376 - protein, 45 aa, Homo sapiens
AAAYYYYYCSEFKLLTMYGDMIFALRPFSLGLLSPLIHKIAFKLK

SEQ ID NO: 993377 - protein, 35 aa, Homo sapiens
AAAYYYYCSEFKLLTMYGDMPLHSCLSNRARPCPK

SEQ ID NO: 993378 - protein, 68 aa, Homo sapiens
RELNEDDSTDCDDDVQRERNGVIQHTGAAASLTASSGSLMGLLIIDGGIVEYFMTLPKWSNILATVMS

SEQ ID NO: 993379 - protein, 35 aa, Homo sapiens
AADYYYYCSEFKLLTMYGDMCFGMSVNKTGLWLGK

SEQ ID NO: 993380 - protein, 324 aa, Homo sapiens
SLSAPALSSSSSSSSTSSPVLGAPSYPASTPGASPQHAGAPQPLSSSRARRARRSQQQCQTVANMSTQPWSSITQGVPLDTSKLSTDQRLPTYPYSSPSLVLPTQPHTPKSLQQPGCPLSLVQVQLLRWAAPKARQSHYGTHVPNMGPGGHMGNSTYHRPMSDFNLGNLEQLHPGEPIRPTWCWIPPWHFCRAWILSGVRGHMGWPPGSHTFTHPEMTHRSRPGLRPNTALPGDRPHQESPTGNAPALRHGLARRRPTRNGTHRRPTNNQPPGATRACTGQPVRAPPRRSRLTGSDMPRRVHPHPTPPHGRPRNSRRTRTPLRS

SEQ ID NO: 993381 - protein, 105 aa, Homo sapiens
AAAYYYYCSEFKLLTMYGDMILAHCSLHLLGSSGSRASVSQVAGITGTDSAKKTASTPCDFIPNQSALLAHWLPPTHQIVLKNSALQTLGETDLSNNKTLVSCKK

SEQ ID NO: 993382 - protein, 295 aa, Homo sapiens
GSRRQWKEHAHGETWPRSMVLERCDTGAGDQWPRHHTADLCREKLVVRLGPALLADPAFEGRIYEASVTSLTLQCRDRSSPQPGGRDQGTVYPLRDAVEGGVTWTATVVDTAKMHTSSPASSPPRPNAPIQACTRPQPQDGLHCAYPGESSHCDMGTLSIFAPSTPWLHQREVTVYPGISGNQGRPATRYVLNPQTRAIYLHRGSGTHVSIERTRLPFGEIKRWPGSRRPTGASFATLVLWHPFPEHWSQDPPVSLIHTARNRCTCIPVRSSPRLYSGTMVFVAGTGHPGGDDQG

SEQ ID NO: 993383 - protein, 36 aa, Homo sapiens
AAAYYYYCSEFKLLTMYGDMTSYCNKSSLFSAVNNK

SEQ ID NO: 993384 - protein, 35 aa, Homo sapiens
AAAYYYYYCSEFKLLTMYGDMLNPIHNFHYSIYFK

SEQ ID NO: 993385 - protein, 39 aa, Homo sapiens
AAAYYYYYCSEFKLLTMYGDMKKIKFLIYYKMNVVPEPK

SEQ ID NO: 993386 - protein, 256 aa, Homo sapiens
LCEDPGAAASLGPRDPHTHTLIAEQLCYECVCVCVLFLFFFFIVSKNSPEKFRVLAKLSKMSVLGKLNPIKTFGELWKQTQQKENKKQKKKPKTPQQTPQTKKKKKREGGRRGTNKNPAGGARTKSPPHPAFFCHNTGRPPTNGGRTTKHGRGRAGRGPQHTERGGREPNTVRRATLGEKTPTPLGGGEPIGGTTPHNEIRLHSVRGEHTPWGGWTGHHHSQSFSGAARTLRAPTLISSQTLFHPPPPHNNPRHDN

SEQ ID NO: 993387 - protein, 35 aa, Homo sapiens
AAAYYYYYYCSEFKLLTMYGDMLYRHHHYSIFIAK

SEQ ID NO: 993388 - protein, 266 aa, Homo sapiens
  misc_feature (148)..(148): Xaa can be any naturally occurring amino acid
QSLSSVLTLSPDSMSFSIRSHLLHQATGSLRSLSHMPTQTTGIPCPRQSSRVASRSNARPRGWLWFLGISRVPSSSQLHTDAVHAGHWVPGASLVITPGVVSAIELGIASPATHASETVQAPWSGADLCRSYAVHRVRGWAWTMRREXAQGCDVRKYAGMQLWEEQEGDAHVFKEYLGSPVNFIEINAEGSLERAFGNPFNRITGETDDPHLLLHAIGRMPDACDARMHVVESQRYEEQQLCDVSQSCGRDRHPMGSCKVLLDDHQ

SEQ ID NO: 993389 - protein, 186 aa, Homo sapiens
AGYQGEITSVSTACQQLEVFSRVLRTSLATILDGGEENLEKNLPEFAKMVCHGEHTYLFAQAMMSVLAQEEQGGSAVRRISPGSAALCPREKGPEAQARINQGPWGKPVCPPYHEGLTGSRGHAVQRSLNPADITVLFKMFTSMDPPPVELIRVSSLPGPVMQSLFQTKGYGSTRTTSTNYIHILA

SEQ ID NO: 993390 - protein, 39 aa, Homo sapiens
AAAYYYYCSEFKLLTMYGDMFMSRCSFRILELNCLNSQK

SEQ ID NO: 993391 - protein, 299 aa, Homo sapiens
MSVGVGESVEETVEILTRKLEMLGAERHGTLCVDCESYHTVDSTLGSQGGVLALMVVARDCWSLLLEIASRDPRRQPHNQGLPQGVGTDHDAVYGPSSIPMGPSTSGQLFKKIRYDTQQVPVGMGIRLSDEQRCQLSLVDTRGTAKEAASADLSGSLDPRNSGRHGHLLIFTGTSDVAIGTEEDEFRIQKKQRSSNKVGTQYLTGITPGTIVDFVAVHNGTYAEGDKWHGPLLRQPCKTVRADKGATPDPTSEGTAGETTNNGLENTSIHNVGTPNAYKEITTDDNKEKEVTYEYDECL

SEQ ID NO: 993392 - protein, 36 aa, Homo sapiens
AAAYYYYCSEFKLLTMYGDMILQYICKKEKKTKPIK

SEQ ID NO: 993393 - protein, 331 aa, Homo sapiens
TVPDTSDTMASFLKGAHVAHQRTGRRQHVEPECIHGSKVAKASVCQLQLSTRQQWPLPVHVVHPVPPVGSVVPSTAANACVLSIHHRGLVTHAPGLLGAYTASSTGSREQPGLCLAGTKAGCVAEGRPQDSAAWEARQRRVEAVEASVAGLAPARGQTAGSYRARQGSAAGASPTQGRARMETPGQATGNAGVFRGKRRQLQAATLMGRCNPRTGPNILKRKARAAGGTNWSRTQRHSQISSQGNRLEDTWEQKAGRARPPLIPLDRQQGKAVQTTTAASRKRNIIRGDTDGRPQGFGLGTQVLAEGGPPSVGSKAPSSTPVTLVRGLATR

SEQ ID NO: 993394 - protein, 158 aa, Homo sapiens
MVKKHRPLYHTPQGTANNDMISDGPLQIQHGRAHTDISFNLALGDTDDLVREEGNTCMAEQASTRSSVAVICRKANLNKAHLRTHLIESEAYHNIPHDEHNYHGLQTDKPVSRSTSTSWHERHSQTTEEKSTHIGNHTTDQWHSPTTGPTTDIPRNTR

SEQ ID NO: 993395 - protein, 37 aa, Homo sapiens
AAAYYYYCSEFKLLTMYGDMIGFKVKEIKVKSLQISK

SEQ ID NO: 993396 - protein, 37 aa, Homo sapiens
AAAYYYYCSEFKLLTMYGDMGLGCECQGAIKVSVVKK

SEQ ID NO: 993397 - protein, 36 aa, Homo sapiens
AAAYYYYCSEFKLLTMYGDMLTPPLFLSIKRSCKQK

SEQ ID NO: 993398 - protein, 332 aa, Homo sapiens
MEFVARFNMVKVSNSSKKNLKELFRKIKVGGQNFSIGLSWRLLKGSPKTKGVTQPLWRHELAAGGQSSYRCLKQKQPPETQVEPTKRKTFPPQEKVNLLCDTHGDICGRKQAPDPTAAIERSQRGARCAHRHGVPHKVIVGRQSCGAQPPHQASGGRYTYGAHYGGVQRENTGESDEAYNKTAWCSVHHQQCGEHHVNKTPRGAGVHPTNPLRSRGAVVTRQWFKEQKTKHRAAEQKTVSNGLDSANTSRQAKDRPRRGRKHNERERRGGDKKSRGEEHKHCKTEDGDGERAERGEKDEEQRANDERTNKTDRDRRHSSSMTAKATDRDGEE

SEQ ID NO: 993399 - protein, 122 aa, Homo sapiens
PSFNVILADVFRRLFAQLAGEDAEISAFELQTILRRVYGGDRMVDKNQEQEDSGDTELWIEDAKIRKKIYREIGVKGHGLHEIPTEMRKDEKKQESRMPSVNPNKVIVCSSMQMSSSVIESR

SEQ ID NO: 993400 - protein, 32 aa, Homo sapiens
AAAYYYYYCSNSSFKMYGDMPQEKLASSPKDK

SEQ ID NO: 993401 - protein, 363 aa, Homo sapiens
ITPKLVGIDGRVTAWGALSGASCVVPMRNVGTQRMSFAARGYRAVGHPASLEFVVPERQSVAAGRSAVEASTEATRSAGVLEDGIAQFTHSWRQHWYTGALTELNDALEGRVYLLYVTVGPVYTEHQEIQLQCFLYLGRALRRARELKGVIERIDAGLRESTNPVPCQRHLGFNRRILVSVSRRLQSRTRRTVMGCKLARNGSVGAHGNPVEGAYSTKGTEAFSNTDRHCAQESILRRGSEESSRGPKRQFAYADGRRGSRVRGLPVACVTGPSSSSVQLQGGQRGLLCATRDPGEPYRKRLDSIDLAVELFRSWSAWGTEPSKCPEGGYEIEPNTCGPETFGPTEADPFWDVASYAKEDLKG

SEQ ID NO: 993402 - protein, 115 aa, Homo sapiens
QNTGVVKTTPNKPPMGKEIVLISSLSSLDTLIPGESTTTGHLIYKCGGFDKISIEKFEKEAAEMGNEGSFIVLPRSLVHKLISSSVNVVSPLIISFLEIGYQPMYYVTIIDAPGH

SEQ ID NO: 993403 - protein, 191 aa, Homo sapiens
MGLGDTILPRKRRGDGMHNKLPGPILQVPTLRGAIISNDIWLIGVEPNRSNGRITGCWVGFITPPQFTGALFTRGAPGVNIIPRWARVLWNMAAVYFLWHEFLKAPRIPIREDPCYVTSREYHPHVQVTGLATHPTTYVRGEDECPASGQEHLLIQYPTERKISTRTYTQCEAGERGRQLVYPIRELNRFG

SEQ ID NO: 993404 - protein, 413 aa, Homo sapiens
  misc_feature (75)..(75): Xaa can be any naturally occurring amino acid
  misc_feature (189)..(189): Xaa can be any naturally occurring amino acid
  misc_feature (219)..(219): Xaa can be any naturally occurring amino acid
WDQKMLILEFFNFKKIIPMKGVCYGNSQITNKVALLKPDPHWASLWWLKQGLSEKSAPSRSKNTSSSGATSRDTXEFRERTISPSVCHLLCGKRHHHAAQRVKCAAKRELWSPSLSAGSPSRREEEVEFLHNKSVECGPQDVPGNEAVCSRGEPCGGGDTLVGKEHTTLLFCGTSQHLLYSPVYKCDLXNIAVTLCAAHCVYILWGPQKCTINTAPCVXRGEAARGSPSESGALYTGQISTRTQQWRCISLYPKSGAEREAHVSVFYPMWGTQKQPRPRGFCPVWGPQGAPHYCARVQPRSKQNPFQALVGWTKRPNAPKAEETSKVVAPWGGGPPNFQENPRGAQRGRGLSQQGSFKVTTLAAAGRDQWEKGAPPKKDPPPGGEHVGAHTGEAEGRTTSGEDKPPRDLCRRP

SEQ ID NO: 993405 - protein, 231 aa, Homo sapiens
LQAPGCPATGHGHLRGGSCHVPCPPEPELPPGSTTNSSTDLFSERLRVGNELARSSVPKYCAIVRPAGACGGRPMWRRFADTGIDFAPLKRKQDPARTSPAQQENPAPKAATRRKNTEGAYTSPTDQDARHDPPTETQRAQREANHAGKATHRQGRKSHESTRNKNHTGNNADQPGTQTTNSGITQEGGETPKHGTTPTHTAEGHTITKDAHKNTAHKNHQTRGSRHANPP

SEQ ID NO: 993406 - protein, 180 aa, Homo sapiens
  misc_feature (180)..(180): Xaa can be any naturally occurring amino acid
MGNAQCETKNLIEGALGWDPNHTSIGPMDTGLGAGRLSQGVRLAHPSGGHSADTVPPEGYTKRDTGGRATHTASSGGDTPWIQKKGETGEHKKTPKDTDRRREQTSAGQQGEPGQTIVTKKQDHNWRPRQTTQGTKGQHDDHQHTQNKRQIGRVKNRQAESQQRPTSRRMAQYIITHRDX

SEQ ID NO: 993407 - protein, 155 aa, Homo sapiens
MTWKSSSEKEADRRGPAGKGLVTEPNSEPQGWIYQIDRNLLPSGSPKPHAKTMKFIVLEPHLSGSSSACMCPALSMLVFVGVLLYSLPTIVSVDRIVNAYKCVDKQARLHFPRVIQGMENPAVCRRTSSCDLCLRTDPSSHGYAMSPSPLIPEGS

SEQ ID NO: 993408 - protein, 47 aa, Homo sapiens
MPTSRLNQTQNTSRRRNDAKNKRNNSNREEDTTVVINTKQVNQTFAN

SEQ ID NO: 993409 - protein, 536 aa, Homo sapiens
ELHVLWNLLQDSQSLIHLHSQHSPKNLTYLMGSIFFFFKCASTSIALPPTRLHIYSIAPVSNATPALDVFRAHISTFFHYIGHFTIFIFINSFLHRSINTTQHPSHCMHQHLTHHFRLLLCRVHHYPTSLFSFTNSLSLALCSQVCPTTLSTMICLQRAHVFSHMAKFAFHRQTPHSHTDYHSTSSPTSPSPTMVIQHPIAVHYLSNKYTRPYHRYVCIFAHHLIFIYFLAYLTRLAYSRFLYTLAPSFNGAPYSLGCSVTITTHSSLSYFPSSTWHYGPTTVHFCPEPELARRLNLTTGGHPQLLSDNNNIQQPEPTPILIQHPYSPPTLHSPSPSHHTHYDAQRASQPNPKLDEQERTGDADGDARLRRDRPPHEQRPRGEVRGVGDERASGTRASSRPTAVCEETRCSADDPWEGREHPIGQDEQRRRAGTSETSHRPRADWLQFNDTLRRIFRACLVSALSSRRRVAVAGDDEIATIASDPVLCGRSEEQVAVLSCTDRITHHNSHNAVMVGLDVSTQRRSYKIESTHTLAT

SEQ ID NO: 993410 - protein, 86 aa, Homo sapiens
LLDALGLQCLRERTVGQSAPSLTNHRPLSPAVFPKCRFLTKLDCMDHSLARSTSGQLRSFISSMSALHMFLMHMTPTQHNQHHTQQ

SEQ ID NO: 993411 - protein, 148 aa, Homo sapiens
RAVTNAHKMKFSDLFSLCVRTMRTLPPMPPNEPAENACSVQALDSRNDMPHMPPNCRTTESWLQQVLHEGGMTSDNRMPTKYGNDKPGPLARLELVTDELDVPLHFHHSTHHRTSDLTYYPHYCGDFQQASIHAALQRRIATGATPPL

SEQ ID NO: 993412 - protein, 298 aa, Homo sapiens
MLDAITALTTLQATAASMLGFTAVVIVGLAMGKLYVQRLQPDDHFPASRPYNLSFKNMCKLKPLLEKWLNDAETMSSGLTALPSPNQLSSPSLGFDGLPVPETHDEDQHRDKRPLRLTATSSSSEPEAYLRGDPADRRARCTCPRKSIRVYVCNRRQTDNPLHPAEAAHAARPRKPASYSPIMRHPKERCVRPYRVPKTHTSLDHTVTYRISQLVVMLYQQHTHEVIIQCAVSSPHALHADLASYRTQPTAGSRKDDTARVTTRYSSAHTCPVISHHAIYPLGLRVSIAPHPVWYPEH

SEQ ID NO: 993413 - protein, 350 aa, Homo sapiens
MTTCCPPRRCCQNYHHVTHECLPSTCHDQPVSSTASYCLPVHVLLLLTAMMWLLKQLCPHTFFTQSHEEQGHMLQQHCMQAAATTCRLAAHLPSGISRQPRLVLTWDQRGCTAPALVHEHLGTTHVTSRPLLDTGTQLAHCPTPCTLHCGADFTMPTQFTLTFIQGELAITTTLALNYVAPACRLVISRPPNSGVAGIFALRKCHPHATHTGLTSHPQSIRANFRHNPMRWPFRIPQVGYVILGDFLYLSHLERILHIPSSTSTRSPLSQTNNISPPPPHPILTHITHPPPPPRPHPTTRQTTLSPHTLSHYSIPYPPQLSPHPHPAITHPHTSYYISTNPHLFTSRPFA

SEQ ID NO: 993414 - protein, 113 aa, Homo sapiens
MSFENTLHTKCTHVQIHMKNRTVEIPYTPMYRFTSLPTYLHFDPHITATPFYTPSHTIHNIPEVPPYFPYSPITSPLYLSHIHSPQTKTYVYTITMSLTQPTPIIYHNHALYQ

SEQ ID NO: 993415 - protein, 159 aa, Homo sapiens
MDPLNAVALQTADSPRIASLWNAQLPCFAAFSLCLITMSTNENANTPAARLHRFKNKGKDSTEMRRRRIEVNVELMEQLRTDDQMLTEAHNVSSFPDDATSPLQENRNNQGTVTYGLLMTLSNVHTHYCRPCGNTSRSNATFNAASEHYFYQQTHTDPA

SEQ ID NO: 993416 - protein, 363 aa, Homo sapiens
DVYKEEMNENEEVINILLILRQNEILTEQEELLCHGMQFLAAWIALPQHNTASSISNALQSVSIVLKIPESPSEPRAKLSTAGVLLTQQRSSAAVECMQRSDACLDLFMRHRTFTSRQQHTAQAACATITMTPHHIIAPSTSHISNCMASLLAVPTYDSCMHGRPIAIHCCVLTTPAIAKTEAPKGPRQAYALAAAKSRARNSRTLQVGLAESDVRPRYQAPQARIDRNMSRTPYERHKHRTRLLTNSNANNGQRAPRNARAKSRHTSRPNDNAELNRHTGRHQSPIPLEAPVTHWRYETRVIIWNDTRDRHTVVHNEATPRYANSVYPWLTLPLDAGALTRDRRTLSLQHIITTLSFGQQTS

SEQ ID NO: 993417 - protein, 106 aa, Homo sapiens
MQCTGMTTSAVSGPISECGLLSMDRETQLCPGVFGFITFTNPEHASVAMMSHELESTLDCVCQILCVIMQASLLWGTRGGGFGAHGRGRSYSRGGGDQGYVEWQVL

SEQ ID NO: 993418 - protein, 162 aa, Homo sapiens
GRAVGGGVVGGPEPQDGFPSEWTRRRRRRRLVVSEEEEEEEEEGDEEEEEEVEAATRTMREDDDEGVLGRGAGPRPGAADRLQSPRLACSPSSPPGARLPVCRFACRRWPGVCSPASRLLFPLSPHSVSPRSGRVSPLLGRSRRVHGPPVSLPAPPSPPPPS

SEQ ID NO: 993419 - protein, 526 aa, Homo sapiens
ARRCELKGHNTLPSPWQRPSHGVSHCCSLRQCAQGNAFQSGDGHHYVHAILADARMRKHWHPVRLSQSTYTPTPPPHGCTNWCIYSPPYEHTTPPALLLDIHSTPHSTSTFTSCNPQLHTSPRPPRTAPLPNPSCPSLPHLPTLRSRPPTLAHPALPTLAGHATRAPAPSHSLPTAHLPSLDSLLYTHAHPLRSPDPFCLTPTPLAPAPCWPSPTTLPPLPPPPAPSLPPTPPTGPPPACSPLPSPALHPSPLPPPYPPPAPLLPACPRAPHPTPPCPPARAPPAPPHTPPPPPPSLLPTHPSPGCASPLPRLAPPPRRAPPPPRPPTPPPSHCLPVPPPPPHAPSTPPPSPRLPPSRLALGPRRYPLRREPSPSVPSRHAPLPDGRPSARRHTRLYPRSRPPLACHPPLRPPSLAPPSHRPQQPPHPPSPPHTPPPPPLPPPLHRLPPLLPPSPSTITHLPYTRLPPPTNATTSPPPTTSFATHSPPLTTTLLSSPPPYTHLHLHHTTTHPSPNTPHPPHSPQPP

SEQ ID NO: 993420 - protein, 548 aa, Homo sapiens
ACACAELDVWLGRCRWETVRLPWGPVGPLPPPGPPAHGPSPPRLRRRTAWRVQPVTLAERRRRSQDVARRPCPKPTISLFKFLAYWKCRELANILLTSSDILKKNSKMTQIITIGVELGTKIINVRGEICKVTNMGYRNGQERYRVRDEKVITGGRRQGAPPRTIDITSPRHLQCRLLIGFTDCPNASEQKHVIILVEKEGTWKQIDEDNQQEGTKNAPEHERQYGNKGPTGAHLHSAETGAATDDTNRDGPKKAGKRERRKAVVSATKQTKEMRSDQYGPHTRRHQYCHQPNECKQEANISCVAGADKGRRRKKQRKTTENIEKRQGKRRKQNRREQKRRRAKSRHGRNETQGKVKQEEGRGRKRKEKEGEKPQKKKRPQREQETKGGPRERTEDTEEDEKKKDGQKENQKQPERRKTEKRKEKGDDSKEKQPREKIEGTKRREGDRNRQTSTEPKNDDRDKDNEKRRRKQAETTETGKDEGKEEKEQEREQREEEKIKTEETEDQTARSKKTENETKEEKKKQTDRRRQANTRRKKEKGDTQHEDE

SEQ ID NO: 993421 - protein, 280 aa, Homo sapiens
IAHLKDIVDEITSGKGKLTDKERHRLLEKIRVLEAEKEKNAYQLTEKDNEIQRLRDQLKARIKYYRMLEQLEEINERRQNMAGQQVLTSLHLQSKDVLKQQFVCCNLTDIAAYLKAKPITLRLSQTVAPNCFNSSTEIHIHDHGYIQLKDALENNQQWLCMITQRDVYVTRTFSPRSCSRITKHGHQLLLHSHSRPIKPELRRLSSHERDARTVYDRISLAPGAKLAILSVWTEQRNNLALTILTLEVGRMKRTHCRNPLRMFPLNPVTTYQPKGTCRNL

SEQ ID NO: 993422 - protein, 70 aa, Homo sapiens
MAPRTLVPATLGGPGLTQTWAGSHSMRYFSTSVSRPGRGEPRFICRGLRGLTRMFVVFDMRLTCEPEDGA

SEQ ID NO: 993423 - protein, 220 aa, Homo sapiens
MTKAGKSEREREQKRDGEARRAAGEEEDKRKRNEERDRARRGRAKQTGKRDKRAGNRTREGKRTEGRERASAEGEREERDTNKKRRRRRQKTERKQEAGEEKRGERKEREREERGGEDRRETGKRRRRQAKRRKEEESERERQRDSSASERRTKREANKRKPRQQRKRRRENKQRTHEGESRTSRRRGERVKEQDEERRETKQQRAKEARSTARGRRETK

SEQ ID NO: 993424 - protein, 352 aa, Homo sapiens
LSGLAEALVALHLLLMTVQGRPECTPPGPKKSVWHGSVTPTGLQADLRATCETVCWTVMCSLWPLGHVPPRCLGGACAPVGQDVAAMLAITAYICALHFENSFMTCLPSSPPALALRMCREAGPGLAPTRDSPRPWATGWRTVPGPHGHQVTLCLPIPLPSNEDITVFPVTSVQTHAITHGRHAPNLNGGYWVCRPMVLNSSTNTDTRGRVRHPLGSVVPLRRGGRPTAIHGLYAPAIFLICDYLEACWCPPFTYVDKHQVIHIKPLVGPVVYPASVYVTHSVIVLALGVTSTSRLRFWCDLSRCKWWQAFTHLLVWVCWKHYILWKRYISFHVVNIVEHKKGERMMMIYIK

SEQ ID NO: 993425 - protein, 280 aa, Homo sapiens
VGGRHQGQQPRRRRRRSCGSSKDINDAEPAQARVISASQIQTTSSTFNAGSSCILTAAASYKQLRKLCCFTLLNGWDQGLTHALNPTTRLTAADEQMATITPERLQPRRGTRSDTSKQSIMSRHLAQLSITLTDLTPHSNVILGPCEVVVDSLRSPHTTRETPTAAQRNGQQHGSMHDTTLAGMITAARHSATPHHNAREAWAYHSGIQPKLMKPASTDNYAQGRTTPHPMPQAQQSPLRHPPCQHYCLIWTESTPGRSRRANRAHVAGSRDEERAQYPP

SEQ ID NO: 993426 - protein, 348 aa, Homo sapiens
VPSPWRDAFPELKKDPDMVKEDALMKKRCSILKTLSRGRRILDRQIQSLGESKTFPEKLLWLLYDTYGFPVDLTGLTAEEKGLVVDHGWLSHEAEDTGPAEITGQGRSWWGKSLIHAGTILPLSKSSGAPGSATSQMPSPKVKFTMLDSSGRYVSDETTVGPPALMAHAPADKQTVRGPTVSHTATHVRSTLALPTGTSPYWPAPKGAARIYERTATPGEAGMTAPNSSHNRSTAHHRPPARTSRRPTPRTHIRRPKRRNSTPETETPEPRPTPGTTQTHVRTRTHAWDRTTARDRPTQNTPARHQQRDDHHPTPPPHHRTKHKPQQTSNSATPPNNQNTNTEHNTRN

SEQ ID NO: 993427 - protein, 71 aa, Homo sapiens
EELLFMKKNHEEEVKGLSKLQIASSGLTVEVDALAKISRTSARMIIGMIESEVPNIDLSLGSARTREGSYD

SEQ ID NO: 993428 - protein, 96 aa, Homo sapiens
MCLSPCAPRGSQVPGVGAQEPPHMPVGRAIPTLQCRLWDAGPHLSLGSPCGQSELQSSPKLDDSLRTLWQDVWGPEPARERESRDRGASQNHKTLG

SEQ ID NO: 993429 - protein, 270 aa, Homo sapiens
MYEHVGSNVLTDYLLTHGVNIMDNHSQHCKGPLALMYQHRLLKIVSSHTSFTNFGIQDRQTFKAILTHSILAERYEGQLYMAWQLTMPGPGYSGTHTTMHFVSMAGSTPVAHTQPLANYPASTRNSRHHLRTTRLHTPAAHTVTHTPQPLAQETITGTLGHQDEHLHVIASAKFWFAPPSRSSGPTSPTHLISDTLNSAYIDTPPTNRFISTSGHQFLVYTTSGVRQSPLSHPPLQPWPYNSTPISGVLSPGPPTFTTGTPHPKSVGPLL

SEQ ID NO: 993430 - protein, 35 aa, Homo sapiens
MTTQKTGSRTGSQQQQEDEKTPTKKQTITTRHEKH

SEQ ID NO: 993431 - protein, 346 aa, Homo sapiens
MLRPLQTERGESSLKTRLAWAVTIDTLQAPDTMQAIKCVVVGDGAVGKTCLLISYTTQCLSLESTIPIVLDNYSMRQVVAIVWVQGNPRCNLGVLMACTVARGRGGTTTRHRLALLISQTERFPHLLFPRLTPVSYENCPDVQDGLPTKWRNLLPQQQPSSWWAPICWTLFWTINGSLIRRKREGTNERLAPMNYPEVLASVPWRLTSGEIPGVHQILTQRMLKYRGSTESSGPCCDPHGQAARKKGVLGLASGVWAEAPTLSGFGLRVRSLGCRAPVAPLAPVGSIRGGSWAGTRWRPSARPGLLVCHPFLFREGPDYTRGVRVIRSDRILGVVTRLPVEAVDVS

SEQ ID NO: 993432 - protein, 59 aa, Homo sapiens
DSRYGPGLGQPRLRAAPVPPVAPRQCNKCQESVKTDVVYGSYRNSKKWWVVVRDTRCGG

SEQ ID NO: 993433 - protein, 169 aa, Homo sapiens
IIFGHNRITAEMAGENNTKKSSLGVTVIRGSSVTDQKLQGVLWLKDDGNEVLEKALFTLASIWYLLCSLKEKHKVSRDLVCYSPAGIMSTLHYGAGLSEQLQSTYRLLSGAEASTKSRRNLNISIYLGCDDVRTTASVGQWDPAIGKYGKQLYMKLPMKSLDRGRDVKL

SEQ ID NO: 993434 - protein, 229 aa, Homo sapiens
HTVRIYEGYDHPPCHPASGTWLGGICLHYLMNDPQRATGYSFTTTVDRELVRDIKEKLCYVALDFEQEMATDGCRSSPGRKRYEADLTAKVITIGKERFPVSWGDSSSRFLAWGMGGPVGIHETTLQLHHECVSVDIRKDLYAQHSAVGGHQPCTLGIADRMRKEIICPGTPAQMKIKISCPPERKWLRVDRGSMLARIDVPADVDHAKQEYDEFGPSNRPSEGLLSGL

SEQ ID NO: 993435 - protein, 155 aa, Homo sapiens
MPVIIYMAMYVKPNATCRIGHEHHVTTKLIGAHGLEKLGEVHLHTVNCAVESYCKYLSWDGQSESLSRDFVYISHMNVLSIVEIALHLDNSWAKTSSCPPRFLATIFLFSKWFTKICQVHCNRVESMSKNQFLSISLTILVKHLYSFIMCVYQTD

SEQ ID NO: 993436 - protein, 373 aa, Homo sapiens
METPSGPTSSCNEERVMWGGSTGQRVGRGLSGWTVGGGGGLPQPSFKFIAIPCDTQDNMCRVCLVQETKGSGGLFNVQQRGKGPRNQSSVAFPRSAHQGAAGATTSFTRSGGRRPLSKRPRGPLVQLGFGEPWEKCKLPLPISLYTGSLVSLLSTSFQRGEGDHEGPRGEIPPGSPEGRKTRGGPKDKGGIGPQRHVGGEPRGGARGGKNTWGLSPHSSPSGEEGGGTSGGTEKPPTNGPWDTTVGGSGVVNYITGGAPFLAKRKRVHPNQKRAVSPHPLSWAEKGVAQSTPRVKRRPMEVFPTNKKVARRETHRESIGGGTTQRTYPGWDLNEGTQGRDQPRRRERKHNPIGMSPTDISQREGATRSATKNG

SEQ ID NO: 993437 - protein, 276 aa, Homo sapiens
FRVESIVQAMKSQFERDSAVVRDLSRAEDEEEACWSDRCGRWMAELEDDEEKQSLDGMWPPGMKLEMDLNDLEAHVDSANKEPGRSHQTAAEAAGPDARTACASLDDTRASREEILAQAKENEKKLTEQMEAEMIQLQEELAGPRSVAKRQCLAGAGMSWLDCRSAKQHAAQGPWRKRTNRGLEGPELASLHGGRLAERPGATRQLDLRPVDARPTCRIDQINSEPELVAQPGPKRTSMRRTQLERPEPGTLKVKHAGRLTGPVNVHINRASITRP

SEQ ID NO: 993438 - protein, 132 aa, Homo sapiens
MAFRGLGGKRAGLAPCVTEDNYFRGISASLMEEDGTQPFVRESQNYYRHTEGADTPKATGTKGHNVHNARPTRGSFPTGNLTVRKRHYSKQVVHMQRHTRGTRRKISRPTKKYPDQKQSDAAEEHNRESHIT

SEQ ID NO: 993439 - protein, 129 aa, Homo sapiens
MAHKRNRSRPEQQTTREDKRGRHKPGADEDAPQTHNDGQRSRTHTHERDSTTVPDKNRRPSGWHATKGRGRKHRAREERRKRRSDARKQQSRGQGRESKRRRKKTKATKTREEEAGDEQQRGEHEKDTG

SEQ ID NO: 993440 - protein, 72 aa, Homo sapiens
CHDYAICKYAFLISTGQRDTVLDPSQKPLQRLSFQTCEITYDNSVLPEEPSVPDNTTNCICWCQTSASEDMT

SEQ ID NO: 993441 - protein, 358 aa, Homo sapiens
PVQVNVGGQAQAVTGSIQPHQCSGQICNTAVVKTQEDQLFYSLFFTTTVYHFQQLSAFGISVPNLDYLQTEPDGTQTLDLLCNFSIIQCPELMMDRHLDQFINVCHICDGKGHHKKHHVLPATFMRKHQDSAAGPEPRCIAQCKDKRGTTNREANTRQKGISRSRSGMLPTASKKKIRTEHESPGPSHEGPSTHTCQDTKRPSKGIHTQQHNSAHRCQKTTMGKKRREGRTQTDHTRKSLGVNQHHEHRPRKYAQGTHARHHQSKPHPPEPPGPTDKNETQNKQDKIAPNTPGHKAPPENKGCETQPENNPTGSSTPQGNHSHEQPTTPNRQHPPQRSNTTQPTHNRHEHTKTQNNAS

SEQ ID NO: 993442 - protein, 169 aa, Homo sapiens
MTGQRSITHQYQMNATPRKTLDRHILPQPYPNPLVHLHDPCWQFHQRTTLSHVTITMNIVDVEQSRPHALGTGKRTKGDIDSGRASTKPIGYPLVPLLHGQRRTSHNTPQLHWTSGNTPAHHTEPHSRHSVDASLHDSDQTITPDACNCDKPLKSFLPTQDYPISNNQL

SEQ ID NO: 993443 - protein, 146 aa, Homo sapiens
MGDCSGKLWSVCVATMYCEASVFISGWRHGHERQECPVCKAGISMREGSSDFMGEGARSPRIPAFKNSTPTTGPETQLRRARGAHSSHTVIRGSIPRYYIMDSRMTYTTLGLINNQRTFQCHMSPIPDREYQSCGILGNHGIHPRP

SEQ ID NO: 993444 - protein, 30 aa, Homo sapiens
MAIEKPGASVIYRHIAGFRAKIPSVRAIRG

SEQ ID NO: 993445 - protein, 259 aa, Homo sapiens
EKAEKGAPWFRKITNASIPAPPPSRSAFFALTRSIVIMGRRGPGLIPASQPQRFPRRISQLIGYLVDPRMLCIQWAGNSSQSYLPHAPAVPMFPQPALWHTRPKLPSTGLAPNAPDARYLLSTGARSAGSIPRVTNWPETPFSPEPATASPQQVPIAPVWPCSPGLSHKCFTCHTHLGRQLSRAKSAEPPVHPLLKRVQSAEKLPAATGRSEKKLASSRKHSFDCPNADLKEGTGGPGTEPPGKKGTQMYLAGQRAVQE

SEQ ID NO: 993446 - protein, 242 aa, Homo sapiens
MACSFSRTAISGAGRCRVSKIGATRLSTSSSRKGGCATCGSFVDGTAVKQVILPPVVRGMDSCSLEIANCEEPPGDFKYQFDAFYGGEEYYSMDIYAGSVQAHPNGTCWKGRMPVCLAYGTHRELGKTAHNAVASPEHTWGDPGGLSWTFLSAPQGMEGAEAVHGPFSVTIVLPRDLPGERYEDLLEPCFRDDPGNPRRLPGGIVLIPGSLPERPILVALLHFEREIPASKYEIGLVGSHPG

SEQ ID NO: 993447 - protein, 350 aa, Homo sapiens
MVAKLDQGIEDQSYGNIQQAGLQGGSTTPYVGVVRCVELYSSTNGPGFGALLQGSPGETGKTSGRLWGISTQRGHHPQKAIFGGANTQGDCGLACVGLTSLLDNPGTDLVFWDPQKDKTPYNVYGEHYAVGAGVGTHTHRAPRGRQDAPLQQGGDDQGKHPENILPPNKRKPNPTNNGPPQGGWGNNAWVQRAHGTPRGANVDHVQITTHTTFGGPTTGANTETKGGKGLYPGIVITLLGRLPGRAKEIRHSGHGEGEPQRKLANTIYTRKRAGGNQNQQPPECSPNNRKMREDVTRPRTILGYNETHHKITTTTTYYTQKQRTIDHHSQSDDTLGQTETKDSPPNTYKK

SEQ ID NO: 993448 - protein, 151 aa, Homo sapiens
AHGFDVSRDRSDADAIEEANKGRLELPLCIMAQLMEDKKESAYGEYSRSYSHVQYHRQLHMGVQLAIYILGAISVPFDTTGATAFGSSRAVKLLARHPDNTYSDVTHKDLLGLCMPTPMRAMPCKGKAVAVVTKHGPRYFNQTHSGASAHL

SEQ ID NO: 993449 - protein, 116 aa, Homo sapiens
MLDPRASDLCIRKRERAQDMNLLENATMQDNERYGERVWALVQIKDQTMQEESESPVERPLNENPTNKMTQERTSTESSTIGQDQTLMERDTEVVQQQHYIAMECIASHLHLYSEQ

SEQ ID NO: 993450 - protein, 69 aa, Homo sapiens
DREVFGPYSRIQRVAHDEQVVESRFTYVLSGGNYTSHNPTLYGPKCIIIVPISIQARSGEATYTKYERV

SEQ ID NO: 993451 - protein, 348 aa, Homo sapiens
MSIHAVRLIMVDGGGCCGCDRSPMVMLPQALSQPILTTNLMAPGASTGPPANAEPESIPGAVVSTVQSIPDQAKQRTVVTVRDGMSVYDSLDKALKVRGLNQDCCVVYRLIKGRKTVTAWDTAIAPLDGEELISRGPVTMSRLTMHNFSTEDLLSAWRTVTSALSYCTMDFRCQTCGYKITTSIVPIQGPHRSVLNEYQPPTVLTTVFQDTRRRLQTAMRHPINTATLNDKAKTTQSTRSASKTRHTEASGEGEATEPRPGAEKTRRERRRPGRGARRGEKRRDEKRGPARTLRRDTEKRRRKKSGARAGTETGQNEGQQRQMRDADGAEAEKEGTNAGRRQRGEKGA

SEQ ID NO: 993452 - protein, 320 aa, Homo sapiens
YRPRKLGDIVGSRPSGMSSVLMLVREKERTTKEHTIDLNSLLVLLVVCVTVISGSPASLTGDTPLRTSSVTEPTLPPYVAAENLVAPRRELERTTLEWTQSTTTHDHSLPSTETQQAKECAGTETITKKGHTEATHQSSTQQTQNRATTSTAIRDTTERKNSRTKTDHNKNTPNTQQTRPPNREHHNSPPRRTTNTGKTAGCSRTAETATTDRRKRDTREETTSHNPRTHAIQKQHNARENRTKTPTATRQTNQCNEQHTFLDRDNKTHNQNKTHEMNTKPRTTDQQQHTAPGQRINNTQPDKNSNHKKLKTTTRQRETR

SEQ ID NO: 993453 - protein, 78 aa, Homo sapiens
GPGDKFTGDYVEPASITITLLGILVYRSDLMFLPTMPRRNNTIAFILATSHNPQQPSLFSQYSAYAHTSLAACEAAVG

SEQ ID NO: 993454 - protein, 164 aa, Homo sapiens
LDQYVTTRSPASISKSIVLQQELYKTTMSCCHWYQPSPVNVVGSNVQLKVSTPSISSLAQPQLPYTQAVLQCKVPFQGHHQPNSYSMDKSNQWFLHRWPQAMFKSDDSKSCFRSMYNMQPILQTAMSSGQPVLQEEEQDNNSDSCGLSHRVSSCQCSQSSPRHN

SEQ ID NO: 993455 - protein, 114 aa, Homo sapiens
YDSFVYLLYYTFHCHFRMYFFYLQNKKVNCKMALGRSFRRYSRSHCYHRRTAPCVLLPLKTVGQDVEVEDSDTGDPDPNVCNVCVRVFILRKRFVQMYSVFEFKLSVISRVKKL

SEQ ID NO: 993456 - protein, 36 aa, Homo sapiens
AAAYYYYYCSEFKLLTMYGDMLLPSSLGNKARLCPK

SEQ ID NO: 993457 - protein, 33 aa, Homo sapiens
AAAYYYYCSNSSFYDVRGHAILHLNKACFLSVK

SEQ ID NO: 993458 - protein, 48 aa, Homo sapiens
AAAYYYYYCSEFKLLTMYGDMFLKGILVFENLYSKSNFFCQIKMRNTK

SEQ ID NO: 993459 - protein, 126 aa, Homo sapiens
MLPGGASPPFFKGGPQMSGVFFNKNQHARAALIKHDWVRSSQQGSYTPWTSVGDDRPPSMVGGGATTSCASTTTIHDSDLIPPLKRYLKYKLSVDGGQMCVATTPVTISFSLPVGGSNTFVAYSSS

SEQ ID NO: 993460 - protein, 437 aa, Homo sapiens
MLLKSHHHSLISSTQGHKNCGRPQGPLPRKARVKVRSSVVIGGQVDERSRGRLQSALRHLKFYNAPIGACKEKHLRGARRHRQSSTVDSQDEANMVTSEQLKLPSTKKAEPRDSGNNYSKLTQCSYDKYLEQHKGDHKPREQYAACHHQLTRYTECSAESNPTKLREQTTEPPSNGPRLTSAGHRRTTDKAGPNRAHDQSTAERLNIAHRVTKSSHSQRHTLTEHPPPHALALTPPNLPADAPPQPHPTPPNHQNHPGHHRTHMPPRGQDASSPGQTRTGAQQPPRQDTKELNRPTATQPPSTPPHQPPPQPTAPTNPPRHTARTPLASEPSKSHGTRLTHRDHRNNAYGGSHHYTSSRNPSTVLVYNSITPEKSSKQSENEARPHKKNRGGNRRRNDIDTNPKREYTTHNRQTYRESQQKLHTHVNSRRLTLTTPP

SEQ ID NO: 993461 - protein, 313 aa, Homo sapiens
QTSESTNHAGAVGGPCCQDPHPRGIGVWQMRHRSRASLRAKKLVELSQASQRILPGCGGGKDLLERDFFCHGETGFPEPYLFLGRERGWEATLLGTYAVKDQQRCVIVTEQVCWGKVRCPLSLRTSGHCVVVITRGAGKVPPLGGSESGVLLDQGCEAAVGGGGEAEWGTASHVLLYLPMLNSKVFSQHVSGSMVPVHESILSTLGNLTVALLSRLELLIQTAVLAERESVDRFRQVANVRPAVDLCLLTMARHFRALSQKRDHGKAKALALRECRLYNLVPLIVQRRSARVPEPTQRRPLYIHGAHPLPSFK

SEQ ID NO: 993462 - protein, 104 aa, Homo sapiens
SKGMWCELRLDGIHTPPLTHIQIQVRKAGLFQAPFQDALASRFCRMRGRRCVGSEGEVPGLAHSRDIWSRHGLRFFQSPKPLLHRAQRLVRKPRWTQPLEEWSN

SEQ ID NO: 993463 - protein, 330 aa, Homo sapiens
LPCHPSGALSSRKAYRKQFWVRYACMTEEVDRNERGTDGKAKIRRNEKLQCRERRYGGAPAARILPRRRPRTSISSAYRDLSNIAIEILRQQSIDSNTQPRKYVPTRYSTTNNTAKSRNLRKWTAIERTKPCHIDRQRQDARHELAPHVRSTATAPISQKRNTTQTQTAIELTNRHNELQRSVKQIRGCTKHNDNSDAIGLTQHIMSTKTNSIGAGQHEPRTDAAPINSSQTQTHLSSSDKQPRYTNTSRQFQATPYGAYSAIKQDYLQSEVQSMHITANPQRNDYVPDHVNNRTKPKSTNTYLYSNTTQKIIRPASLPPTLQSHHHHQQ

SEQ ID NO: 993464 - protein, 185 aa, Homo sapiens
MTEQGIDVPHLRKTTKTHHTTKPQQRTAPTTHTPPQHGADTHTPATPACSHTPPPPHPRPFDTLNPHPTSRPTCKRTTTHRPKNERDQHSSTPPERKPNHNTNTWRQTAPHTRVNIHTTHAQAYQPLRGTQTQHEPKQKTTHRRYPTHHPRTTSYPRLHQPTTRHNCATQTPTTTPPNPTDLRNN

SEQ ID NO: 993465 - protein, 164 aa, Homo sapiens
MEGQKEEKPYRQAQQGDATSYNTTATDSRTGKKRARRPLGGQHLCGQPENHCHQLSVEAGEHHTRAGATKPHTPTERRTYNTPPPHSAASPSIKQEVNQKPGDEKTPERAPPQQRGAQSHIRAKSDRAPRTPTPISGHTHKRESRKGNHLIRQTTQQYKTLTTT

SEQ ID NO: 993466 - protein, 217 aa, Homo sapiens
MHNANPHRTHPNPPPKHRQGAIGKPHTNSNGKPGCDSETTRARIPGGQPPIIAKPSRHTHRTTRTTRSNDTRSHRGRRRKRAGQTTRRHPAHPRSHAVTPDAARTRYEGKPVGPERRRDKERRDRAYDHQRSYSVDEQERKTERQKRAPITGQYISMRVWLQLGQRKQGDDKTRRRTGSGGKDARGEHGPQQRHTTKTRTDRAEQGERVRTNKDQGD

SEQ ID NO: 993467 - protein, 250 aa, Homo sapiens
MTFIFTEVEDERPWPRHTGNVVHHKLSYGLPTDRQDLLSLQRWPWKYDRSSSPAKESGSATWTMTNYVNLRGPVAAAGQLAAHAGRLRRQAQPGQGAIPRPWSWVMLENNVRPVHFCDFVTGGRLASAIRRGLALKMSPWCQRGSLHEYGGRGSGLPDDCEASGYHRGGLLWCAPHTQAGSFHSHWENLQQGATSEAPRAGDASYGCLKTAEATREGAFRGGEQQGRPAMQLTESGVAQAVRAGEPPGPV

SEQ ID NO: 993468 - protein, 225 aa, Homo sapiens
GALRKPLTGQPHYFCTQMQPRSPCSQGPDTAPRTSPPAGGSQRPPGVTTENVRVRSVAEPSEEEEEKRGGNARTKRTQVGSMVGPREARSEAGSTARRKQPQAEHLTLRNRELCSPPLIPLLFPPLEGAALKVDCYRGARGKLSITPRGITFHGPHTLVQNSWQTIPKATHTDTHLRSRPWGGLPSKHPGTGTHLTNKQARDGAPKGTQQGSAPESAPTGCVQNS

SEQ ID NO: 993469 - protein, 320 aa, Homo sapiens
LNDGSQCCWGRGGMVDSITQAINQLDEGPMGEPEGSFVDYQTNYGGTAKDIAVTVQEMVTKSNTRPEELGPLANQHEQLTYGLSGPSEGQACYTVAAENEEMRFPISNTGYRSWAMAVPCLVTKARRLGVQPLSDAYTKKELKSVPGEISEKGLPRPGVRLQAGESVGTQACITVAIADVWYHLLTSYRQHHVRSCGTLNREGTETFADHREGILKLLKVLVEETRSGCTRSVEPGDSWRRRPMLRENQYRARGCGKPGVASRDARNRKPGGIAKEEKVTKPATTKADAHRNCETTVAKNALKTRHRKTEKSRTEETKEG

SEQ ID NO: 993470 - protein, 72 aa, Homo sapiens
RAARLPRTVTLATWPHDAQKCSDHSKHKQPHEHSIQVLPRTCPVTPRQAPVPPYASPSTRSHKPGVSGPALW

SEQ ID NO: 993471 - protein, 124 aa, Homo sapiens
MEKAHHTACTKNSVTKDKQHTTSPESTHGHPHHTTNQDGRNTKPRHPATSARYHSGAHLRVHDRNQEMAHRNNNATRPHHSARTAHKNDGPPTGTPTAGPSTKQITTNNRPNRRATTCNQRYRP

SEQ ID NO: 993472 - protein, 105 aa, Homo sapiens
MSEAWKKPEGVRTSKSHCYRMWTARKASIGRENQEEGELSRARARRVPENTEKTPWRLHRIRGPSRRWERGEKRKARPGIKPDAGRAAQTGQQVHNGEKRGAKKK

SEQ ID NO: 993473 - protein, 153 aa, Homo sapiens
MTRRAEDSEHETTRTTRTETEREQKEKKRRRRKNREEESRGTHKRESGDTQEGGGGKERRQGRGTGEKSKEGGEKRKEEEKRARARHERERDRERTKPDQKRRDEQRDRRARKERGGQQEKRGRARREDEKEEEVKRKRGGREEEERRERGRE

SEQ ID NO: 993474 - protein, 117 aa, Homo sapiens
MENQSNEIRPPRGNNRALRALKDSKTRGALRIPMASERARRGKGDKRPDREQAQGVPTDENRRVGIRQGARQSPEKRPQGRKNHKKERGRPQASHQRRCKTQQSIDEQMKQPTHTRT

SEQ ID NO: 993475 - protein, 32 aa, Homo sapiens
MCPTRRYNTENREGGRKRANDYLREKPAAFLS

SEQ ID NO: 993476 - protein, 194 aa, Homo sapiens
MPHASSDDKDNPHDEATWIRGPLGLGPKWSSELTLGTPEQRGLSVKRLCISSGGEFGGETESPLSLAPGLSMTRETSWAGARRGISPLLLLLRRAWIAPEVETEKPEEKDVQDPLIIFLQSSQGPGRPVGTGHLSRIRLFLVPAPGSAAGWWVSAATSYCVASRGTTSRGGGGRPGRTSRVSRPQTQGALRPFV

SEQ ID NO: 993477 - protein, 146 aa, Homo sapiens
MQNSYRCPHLPKPCSTLTWPTSALNFLASARDTGTQPWATWSRGGLRAPESDNDIRTARSELFQKGNITVSLYWSTGLWGPVTGPMWAQKILAREKHHVTVVNRKRLVNSHPEDKTSKHNCLRSDNDSINDTEPHCYVPTSRRMMR

SEQ ID NO: 993478 - protein, 149 aa, Homo sapiens
  misc_feature (133)..(133): Xaa can be any naturally occurring amino acid
MTAVSWVNLHRGIRVNPMFFVCVLSCDHSSAKLREMSVVAEVKECSQKCIVLCKWFDIIIEQFFLDVDHQKHVPSAYHQDGDQMFHQMTKKSYDVPESLVRCIGRLRLGLLAVYKKTYTSHLVKDTFNRGASXHLETWGESIDAVREGS

SEQ ID NO: 993479 - protein, 71 aa, Homo sapiens
MGTEYTKYDRSAGDTTGLYSYSETNQGHLNGRLRGNPTSQRDCHAVILLPIMGLGMNYSIIMKLNETRQPR

SEQ ID NO: 993480 - protein, 250 aa, Homo sapiens
MLTVETGFDKALSSSWENRGQTTQNTRGCCTNREAHTQRQTHHQQPTSNTIAQTRETKKTQTQNTTKTPFNNKTTRSKHRHTTKIKPPAYGKEHIRRDADNNRIERHRNSNKQRNKASEIRRDVDQPTIHKSQTRTARTHRKHNYRDNPPTRNKRQKQGTTGRHCAALHTDKAEAQGKKQSAVGRQPPTKKKKQTTQASINNDHDTYDRTRQANRTNNTNTHNDHRYDNPRTQDTEPYDAIKRNKSNDNT

SEQ ID NO: 993481 - protein, 297 aa, Homo sapiens
CEERPAGGGWRRAAMAAAEAGGDDARCVRLSAERAQALLADVDTLLFDCDGVLWRWCETCLCLARPMALLWLLLSPAGNAPCGFTHQATCSNDPLLPTAEKLAAALGFWRAPAGGPGCQALAGLLCTCLLAPAAPSLLPGALAWLPPAAQRPYCAVAAQALGLRSCEACGPSPAVGVGARASCRCEGSGDWLHAPLEPDVRAVVGRALTRTSATLKLTKGLALPAASPACLLVEHQHWTTRASLEHGPLTSRGTVDDQGPKPCDNCLPSGQGRPSSGKAQPVYISDFVFQEYGIQPE

SEQ ID NO: 993482 - protein, 283 aa, Homo sapiens
MQSTQSKTLMMHSTGIRPRLRDVCQSVGAREVNRRAVLDQLYRTTKTTSGSYCRRMDEIGSTEQRQLPARPLHLEHRQHQYETAVSRTDSSNNDRQYSKRAEQSETETDKGGAERLQTQHNATITVDNNNERETKRELHTGLTKDTIDGYEESEGVGNERHEEMKKTETVRPAGRTKCGKIGEREAQTRKRMSTAGWDGDSDEEEPRRSHTDIIQSSRVEKDGTHGRDQCDQREKDQGRIGDPGRRYETQEQNVACRERRKIDTEEEKKRIPQQSIKQKATEH

SEQ ID NO: 993483 - protein, 169 aa, Homo sapiens
  misc_feature (70)..(71): Xaa can be any naturally occurring amino acid
MKDELHALVGSFSTHRSCFGLDLQQDSLRHYMWSEQTRTPALSGDSMDGRPGISELVELRQGCVKYCVAXXEYPRNESDSARFDGMGSYPVVGKYTCVRRQMVHTHFTRHAKGSRCPSKGSAWQGYEVRIGNYRVKCGTPCACAEWERTLILYALVVHVQYPRMHDTNL

SEQ ID NO: 993484 - protein, 443 aa, Homo sapiens
NGSGSAFLCASETSMHGNALHSVVCSSPNRVIHVWCGGAGAGLRSVDCCRISNLLFFDSCTFYMSHSNAVSQQWQASSIHSHDTVLTSDRQLFSCWLFSLLSRLRLHCAHTIHTYTRHTSCPRYYAIRLYSNTPRIDCSCICYICYTSTSLNLVAAKRFNQSSPHTKTRHNATCERSHAKLMTVTPRQTTHVSIETEEHTRHAQATAASQHVTTPNTQGGTPTDHTNATQGPRPRTTAPHDHIPPSYHRNLDTALHKRGRSTTPRPQFDSPPRPLMGHTQYMHRPPHVTVRYLHLSLDDTGTIRTRAHESAIQYTSTPRVSNQNILYKLEAANGGNDCVYTGHNTMITLPLLSQHTMTFATLPPSTTPTSPFCHPGPQPANNRLYNRGNHNLIDTKPSPLTIRATLHPGSCMHNNGSILVPHAIPVGCQVSTLHISEHGYTDT

SEQ ID NO: 993485 - protein, 251 aa, Homo sapiens
MRLLVAVHTGVEIAIAAEVIVAPCRAGVVLHTGDHDVYFVNVTLQTLCQGDAIRIGQRSYLRANGGAIVLALPLRETLVIRIPDNTTRKAKRVALNGWGPIGVKPPLWGRNPMNENTTELWVGCCNPPEGRRGKPILATRHDGGPRFNSKHMNTWGINTGGAPPKRGDGHGGSTTGGRPNKNKGRPPACVGVTAPHIGCNAVGKVSRSNMLRGERKFTQRENPVGGRTTKTSFPINTVDKTRKRKEHSTTA

SEQ ID NO: 993486 - protein, 105 aa, Homo sapiens
LLLDRRVPDSKSPVLSGSQRMVHLHGVRAESFLQLYCYYQELTIGLLSPSRKARGSVPGHVQDGCSVTVHRPLLSMSVVCPYCTVNHATSVMAWGPGPPLGGARR

SEQ ID NO: 993487 - protein, 67 aa, Homo sapiens
MKTTKRGPKINGGQPDFVYNTGPTSDTHVYTTETRTPRTHTHEERGHTRRRHSNNKRHDNHTNHGGG

SEQ ID NO: 993488 - protein, 119 aa, Homo sapiens
MVAPKGLPKQTSRDCARHQAAIRETRRTGRDQTVYWSRCPLGSTSGQGLNHSAPPENIARGTSTNRQTKSTWNDSYAAAYDDRDGGGEPPIREHVPGSYADIPQGWTTRRGAPAGPLAQ

SEQ ID NO: 993489 - protein, 317 aa, Homo sapiens
CGRISQFDRLDHPRRSIEEYYILERSVRRFCVEGNRRQAFVGIGSNKTGLTWSSRRGRVLKLGEHRNLHTEGERSDTETESYQAWMQNGQYNTEEGPPSVEKKYRLGHEEPRNTILVDIARSPREDVAVGRHRARGSPPIRGIRVKCQTEDKEQSRRDSVANGMMGWNVSQLNATVMPHVAHEEEGAVVQRPPTDVNPVSEALGIEETWQVSNAAQTIPGNAKCKKRMCVVCRDWGICRLTMGQHSQAAVSHCPVQGHNLVGIAQFREKGKSVGTLLATRKNSGQGAYTGVAANCKPGTLVARVQSRNTSGGGPGAN

SEQ ID NO: 993490 - protein, 110 aa, Homo sapiens
MSVKMLSIARVRITLTRVHAKEVRSLVSTQCRLAACKRGYNEKSVAKERQREPRFQIERLTPVLTYEATGIHLTDDLANTLNTITLRTTDKPTNYRSSYVHTQIQRQHYH

SEQ ID NO: 993491 - protein, 251 aa, Homo sapiens
KTEESRRGRSGTRSCTMHWRLVPNARGGGSSPAFTPAPEDRLDSVPYPTSPPGHDYRRTTGRMETTSSEVAHAECARGYAWNPWDYLMQQQEDNQDRAEGHTPRLMNARTSRDVPEWACEAVVVTLIDEKENVFAITPDVCLSEQELTFRERVQRVLHLSPVRGLVANQSTCCLSSGPWMPPYPNSEGANRLGKSREALVHLSPISALSALASGQTAMKGTYEEETERSQNIINSNATNSLNNKPIIRRRP

SEQ ID NO: 993492 - protein, 35 aa, Homo sapiens
MRQRHDLDTKTRKKAEEKNNKQDVPLTYLFREKGR

SEQ ID NO: 993493 - protein, 322 aa, Homo sapiens
MGQNSGLLKYTRKGTPQVAIRANERAASGPVRRGGGAQADRLRRGDIRGHLSIQVTPFQEISDSLTRTRGLWAGLALSPRQSGPVGIIPGEPGKPQSRNPAGDPFHSSPVVVGGCVNSGFNLPPSRSPIGNSISTLPGTDHTSQVTNQQQQKSGEEKKYTCTVHPPGVNIVALQKENTHRGETTSVTVESATSQTNISRHKNQKNQKRERAPQEQKRARYHRKGDPKKGLGVNPCDKQDAWGTQPQMKNNTIRHITQPDRYFNNTKRDKKKRRRDVATRNTKRDTTDEDHDNRHDRTRRTTNRERRHHKEREETNTGTQKNQ

SEQ ID NO: 993494 - protein, 74 aa, Homo sapiens
DALGRPTLIEDALGYKAVLLRRTCCVKEPNESILSDMSTYLTNVNICKEQASYLSDFDDLTINHVRRGVTCYSH

SEQ ID NO: 993495 - protein, 392 aa, Homo sapiens
LNSRTGWLERGAQMVSSAPVACCLDPVSEPATAAAVPFWTNGHNTEQASGVAPCQVDAHCSCRTLLHLLPVSGHFQIADPFPEAVACWGWPSHSMPTGDIPLTDADWAILHSKDQDNNILWVPSRCPDRSVSNARTSHTVADVHGTTGSWRDADPMPPGLYLLVTDQGSHLAVTATVTFYRTLVTKARTAHQHPRRHPAHMDNRQLPCHSRPKQGTEGLGTDSGTVSATPQAQGAPDGTYPCIESMTQWGTEGHDSHTEPQAHLQDHTQLATGRTHKDTERRQEPAEGATHRRTPKDTQRQKHDNQRGTQTGHSKTDAAQAKTKRTGTTTPPTGHVTHPRAPERAKKIDHTNSVRKTAQSTRANTTENRRNTQLSRKQSAPATKQRNKHNRS

SEQ ID NO: 993496 - protein, 184 aa, Homo sapiens
MVAINEPFIELNYMVYMFPHMITIRMAELLDGYRHTGENGKLVQSMEIPITIYYSVSEIPPKIQSGADAEDAEYVVAVHWRFLGIHGRNGWVTRFVMWGSLHTGSMHSSDTSVLPDAPHVSLDGVVKHAVSMTSMLVKIIRRMPPVTHTNAYIPCDQGQFMTNLWYRWQSELIDHSTHDHDLTI

SEQ ID NO: 993497 - protein, 71 aa, Homo sapiens
MQKQKPTQVPKRTVNQISDSQHNQDKKTYNTNTTNTTQQHHQTTSHNNSSKTPTINTHHSQSPHNCTKHTR

SEQ ID NO: 993498 - protein, 60 aa, Homo sapiens
MGGCSYPDQQHNDQRQDQNHTHNHHTHPEHPTQEKNAQHTLNDDTTETNTTQTDTHNENT

SEQ ID NO: 993499 - protein, 313 aa, Homo sapiens
SRATSRAGSSVGSLVSPRSGLPGYPPSSPSCDSRTASPGEEAGLGFVPEQWLPSGRNGDVVMEPCGKNACHSLQARTSSQRCMCPQVENYVADIEVDGKQVELACGTQLGRTDSDRLRPSPTQIRCYTDVLSIDRPDELENIPRKWTPEVHAFSPNVPHHPRGALKTALGNAEEHKRQLATMKPRSRRHPDEPADLPGHHTREQGYHAGHAKTQHATCNHGTGNAPHPARPHSGKNTGRPGPATLADPGRKPHHEAAPPRPPGTHTPDHQPATTPRHHQQHHGKQDRTKRTTTAQPTEQPRAAHRHPSEPRAH

SEQ ID NO: 993500 - protein, 136 aa, Homo sapiens
MCEHNSLLLGYNYVNWKANWKHDKRLDPLMRTQRAASTCFPSQTNVPSTLDAGHEQLHTGQQQKRNCPLLEHTQNKNLASTRTLLRPTKARDKPQPKTGHDRTEQAKLTAPERAHHYAREGNLGPEQPGASHNWPP

SEQ ID NO: 993501 - protein, 215 aa, Homo sapiens
MGPEIRDPWEHAAGGHRREDSSPQRAEQYTGGRTSERVKIAETMWVSQYGPKNMKGPDTRTRGGGRAPIGRRGHHKIGGTPTIFHKGPIIPEGHKPPPRFETTQEEWPPKEEQRMNKRNQGGATHSCVRGTPQGGVAHQRRGEDTWDNARAVGLPARRLFVPQPHRWVPQGGIEIRPAQVNMPYGWPSDMVLTDDQGECGQQHDVPVNKETLERA

SEQ ID NO: 993502 - protein, 107 aa, Homo sapiens
ITLREILSHWYLAVDLLRSSHGGVSMFGAGRSGPSAEKYMRGEAQLFYWRCHWMVHMVSYSRRLDSWLRTAVGGGLPLLQRCNSILGTIKVDWQRVEQGHEEEPKSS

SEQ ID NO: 993503 - protein, 72 aa, Homo sapiens
MEKANDPITIFNQKYMELNTPKDSSEEAKRSDNEASHSDSIYSNYLPQIEQSTHTTANRSKAQNLTLNNGCN

SEQ ID NO: 993504 - protein, 278 aa, Homo sapiens
MTLRSSLDTRPMQNEHSRRLLSSEGNIVRSHTPKTRIHPHVVTVSTANTLSWTSDQITLAKRHYGPRCSANTICGTSTIEDTVHTTHGRGHLVDTMKSTTFESKFGPGDNGITIWSVVTLAHCTREHVTRSFYTGNLLLVDCSILALCQCAHDQPRFEDDIIVEARHHHPMRDIRIPQAQPKERRRPRTSTLQSDLEREKGAGSDNTIQRHPVGDTRRQTGQRKEPTAQAAPASGANTNHRHPPNAHHKQTAQLSGSTTAPTSHNTTHPKPATTRRAH

SEQ ID NO: 993505 - protein, 108 aa, Homo sapiens
METEEPDPGSCSRELVLDNGNINMMAHLERLNQLKSVNLEYLSRKHVGLITDFKSSPSLPKLTKRLNSDEHYNHKEVLAHVSMTQLPNLTQSNTPSGHYTSNASSTHT

SEQ ID NO: 993506 - protein, 216 aa, Homo sapiens
MTRITSRDRPGTTHNRNNAPTSTRAQRPPTEQRMRTRHTSAQTRKPKREAEDANAAGRAAGHGATPSPHTQHTPTTKPTNPRPPTPRRPQPHATRPTNTGSYTRPQQDHQPAHPPRAPAPPKGRTGGTRPRRLRPAAPPPHTTSADAGRRRPRARPTTRPPAGGSPPHTARRHATRTTPPRPPHRHADTPPRPDARRHPPPPPPPPRPPPAPPRTH

SEQ ID NO: 993507 - protein, 184 aa, Homo sapiens
GSGAQSSCEVPLTYGWWAQPGDMLSYSERPDVTIYQRSRCETRKGKRPQVGGFQGRRVTVNLARLDSCPLDRSHPLRPTRQACSRSSGLHHGSEERTPFNNANNHASMVHRWVSGRTNPTRMHPPKGLSKTRAQAHTDQPPISKSVSYAQSRTREIRSTMVWAGTFSGRHSTIRNTLNYSFGPT

SEQ ID NO: 993508 - protein, 371 aa, Homo sapiens
CRLVEAVDGKAMNTSQVEALGIQMLPGYRDPYHGRPLTKGELGCFLSHYNIWKEVVDRGLQKSLVFEDDLRFEIFFKRRLMNLMRDVEREGLDWDLIYVGRKRMQVEHPEKAVPRVRNLVEADYSYPDEEGPKHWSDSRYEHVMKLRQAALKSARDMWADYILLLDADNLILNPDTLSRFSKMLPVDEFLPVMFDENQCPSTRPLLPPELDAFSVEPVLIYQKYTGDDGMLSDTENSSRMGPLSTSRTTVTRQVQKMREQLVPVVTEGFGALCDLGVAPERPRVGGGWLTKPLVLQHLVVQGTKYGGGHMLLHHRGVRGQSVKTPSLLYVETTKLDEQEQGHLNNRGDEHKTSRATDVKLDSRVQQEKKST

SEQ ID NO: 993509 - protein, 172 aa, Homo sapiens
MAEEGTEEYLTGLFRPHWMAIWNSELISWREPRREPCNLYGRVGTLIVDWHLSSSTGGPRSPKDGGQEWIDEHLGGAGSDIGWRNQIDVFHGRGWPRTKIGMVNHLMMGKAHQSKNTSCMSKYKRGNRYNDRDKTAGNQTSGGETRREGDTTGGRQKRRNAEETDKHKNSVL

SEQ ID NO: 993510 - protein, 112 aa, Homo sapiens
MWFESTADARLGYHHREAHGTEGGSGAVGVMYRHNRAMPTMAGWTTEPGTQVTTDYGPKVGRESRGSTEQGGDADQDEPRAQGRRENRRRSHTREEQRTRERGGKRGTSNHQ

SEQ ID NO: 993511 - protein, 542 aa, Homo sapiens
SKYSESRVEPFKNVTVNRPPVSSHVAMDFFGVMTSEKKSSMGACDRGPGLGVSGKRPWMSPTSSNYCGVFSLESAGYHSRALYRSSQIFRERVSIQKLEGVDITRLAVSYLDVSIGRACSFVRVVSAEVATRCYRAVHIVKTTICCIVKKSNGASVGVNGSRVYITSIHIVSCLRRAGSRSYSVHNRIYRGLIPKTPTAFQGRIWGATRTVCQPYYVDEAGKAKDQHCKLRGTAKARGKRDTATDEEGETFSHGAQKRTLPHTIPKFGHQITLAQKDRTQSRSTIEETVGTKEHHGNGDKHSGYLTPTDWVLVPLGERTIWYANGETTKTTGGTQIQDREYQKREHTLGHWGKDTARHSGTGPTSITTRGKRSLVHTRTPDKSSTRIDRLTRITQEGDMTVTRGVFHRIAVGEQQKIVREQQAEITFETNSGLRGGETQHSTHVDYGEIRTTRTMGTTHRWCAHHSSMGLGVKNEAKSTPAVKQADTPRRGPTNRGKLHKPRGNTNATQGNGSTQRTRRAKEMNNPVNSAEADKETTTKEET

SEQ ID NO: 993512 - protein, 451 aa, Homo sapiens
MKSYLTTHSSTSAQPDPNILRMMKLRLTPWRLPDPPNHHRTYIHRPCTTHQNASTDFSSIAHITRDAKLWLKSSATFNANWRHPYSYICPHSYTSKRGLYNGSISLLRHLKHRHYPPASNIYTTAFIGYSPPVRPNIIHAGSHSTLTQHLTIPPYPITLRTRPSSTDICRRHTQVDQNPQHNTTQPRTITANYYYATVPYTSQPHSTERRNSLMHATTHGDPKPKHTIAKVEHCHKCRDNTQSSNRDPTPTNSNHTTDNERTEHHNARYTKHTRRESTRQKKNPHHTTRLEQQSPANTYTKRPKQPDQTKLSIARDSGPRHARIETSRRPTHPEEETKDRERTEDNKRSTDRGTQKRTIAPRNQRDGNNDTPKADRQADEDHDDESRKGNANNDGTSRASAPHKDNYEKQAARPTPKETPTDPRDTKRGTTELRGHTESDETDITMTRRTR

SEQ ID NO: 993513 - protein, 103 aa, Homo sapiens
MAEEVTEDPTTARVSRRRRALKRTPIRREQKEGEDTDNTQGATKRKHEKSQERRERPTQQHTTEDKTRKKQHTRRQDNEERKGTDRQREKKRDDEKEPARKPV

SEQ ID NO: 993514 - protein, 155 aa, Homo sapiens
SSPPPPWHSLFLLLRLPRCLRCSRRGARSPRRAPGSRCMLPGGAEGWEPCSASPGLRCAVCLRLVRAPAWSDDGTRMEPLYREPGLCPEEAEQGVLLVHMPVGHAFSPSRRTATAHGARMRRPSRRGQTQPTEEEMTYWPEKLHRKGVWTSTHRH

SEQ ID NO: 993515 - protein, 582 aa, Homo sapiens
LSSHRNNEGVNIGTRMKKLTSGTAYSIQKSAPTCIPSPAVLQQQVTIASVSGGNRVYLSQSTCHFANQNLVNLHHNTVHLRRWHCQHLAHHCTMLQQLFTTQTHISQGTSSVTILAVNRNQRHQFADTTRQNSAFPTPIHRHYSHTFQHQFKPFCSHTSTPYINSQQTETRTADSQVTQIGRPKDKHSPSDAPGQQRPSFTDTEYDHSLHLISNQNKGKRQQAKSRHRQASHAHTHLITYPKANRAQPRTSRSHKRFFTQDIYRYHHTLGYTYLSRAYITGRLEQQHITNINRHTNWPIFSKRHNNTIAHTVEDIQPIPPKLQTNNPIMTTQNPPIMSAPPSTEQIYESLAHLHNLRIISDSESALAPSTHKHKSKHGAATLTTHIHTRTEAPHNIAATHGPHHESNTQTEITTQSATDRHRREQQPQNETTDENHDTTTTSVSTTPQRTTSTPQMPNRNTDAQLYTSATNTTRQTPQQHRSTPAHSTTEQQRRASKPTNATSTTPTGDRSTRQQQPSDRPHNHKQESEPPTPTMSSVTRHTSTITTRPTKPRRNANTPRAQATTARAITRKQHKRPNALST

SEQ ID NO: 993516 - protein, 219 aa, Homo sapiens
IGIVQPENIQPPLQMSKKPRLDQIPAANLDADDPLTDEEDEIQTDYSDVPEEVRNRDFRRELEERERAAARRRKIGDRPTREHTTLLFSVKKDDNYAAEANLVEPVPEVEGEKEKVIGGQRVKAVFIARDLPSHAKITYRHDYSGCPCEEVRKAVTCWRESEERERADCKREKVGYRSKPSNIQAPLSDSSGRRGFWEPRVVHGVCMIFGACCIGPRQS

SEQ ID NO: 993517 - protein, 120 aa, Homo sapiens
  misc_feature (54)..(54): Xaa can be any naturally occurring amino acid
MCATWHSSRGATKEAKFSNLPQKQQQTKTHMRHGGVWELTRTFKKGAHTQISQXTYNLYNKCVNKVGGSRTVAQRDLSTYRSRKTGRQPSNNISTRESPKRSRDETGIYEHNTQRETNST

SEQ ID NO: 993518 - protein, 84 aa, Homo sapiens
AAGSVRGPAPAPASSLALSRSEASVPYGSCRAEGHAMDGSQGACPWAKMVVGVLPVVPPVPDSPVSSHHFPYPGAPHPWKSPVC

SEQ ID NO: 993519 - protein, 236 aa, Homo sapiens
MSYYFDRDECGFEELAKYFLQQTHEEREHAEETDEGCRTRRWPNPTYRDIKENAELLTDWQRAGLNKQWSRPHYHLWTKQNVESGHYLELAQKRALDKNDPNSVNFTGDNNQLDMNTVKANKRNWGDTSEQLAHNNGSAPEIWLGEDYLQEKRNTRSKRNKAKPEPNAPNQRETHEHHSKAAWEDPTAIGTHKTPNDNEPTQTNAPTKTGDNTQQKHPKHQGKPEQPNNKKRKHNN

SEQ ID NO: 993520 - protein, 321 aa, Homo sapiens
YGARDLNGPALGLPLPPPALGQVFRIPTPELAASRSRGRGAPEDRLGLMGPGPLGGSAVLLSNRLRSWLTEWRDEATRSRHRTRFVFQKALRSLRRYPLTLLQRDRKLRSYSTFGDGLCRMLDERLQAAPNIGAGPLPRITIVERTVQPDRGRLREVKDSSSQCLPGPKREALGSYGQLGTQDPSDTVGASTGSTEFLMVTMLNKEECWRGVLSSPQVARECPPEQAVGSVVQRNWSGKEPAGPIDPEASGTSWQSSLSVTVDGQGPGEDARRRKLQEEAEHLRDADSVVMDRRARDSGTQAIRVNSKDERGDNKDQTIVA

SEQ ID NO: 993521 - protein, 232 aa, Homo sapiens
  misc_feature (232)..(232): Xaa can be any naturally occurring amino acid
MRQGAPPEKDTKVGRTWPINTGVRQGGGTTQRTTIEPTGAHNTKHSRKGGTPKERRKRIKNTKTTKARANCTNPEHPLDTAEDTNERIHTQQGEAKKGEEGNNQEGDTQRIRLKKRRHNGPYNADTHLWIARLTAVHNTQRSKAHENPPREQQKPPFANKNNKGRPKNAEGDDTHTPVQDPTASKQRRRKARDKKATVTHSESDATTSTNAFDAVTQLDTSSTHAQSTPSPX

SEQ ID NO: 993522 - protein, 96 aa, Homo sapiens
YSTIFAGTLITALSSRLMVFIGDVWHQKYDMLAFIPVLTNKINPRSTEAVSNVFPHASNRVQNPSNSYPLQQYTLRTMIPEANTDLMQVLIDVNRS

SEQ ID NO: 993523 - protein, 218 aa, Homo sapiens
MVVGAYGVLEPFADAMKLFTKEPLGPDDIKRSPVLTITRPDPVRVSPSRCVLPSEPSRGPILAKSLGEDFSNREAPTNTSCSAHVKNYSGCESIVRRGLQGCLVTTFGQVRAVQSSQQNGRRQMIPRRQGMAICGSRRSPFIHTIKIFVTEAGVPCETLLCRRSESSTKEADICPVFSSLVRFMHALAGDYNMMVVFATVYEYYPTDSRCVQVETEPE

SEQ ID NO: 993524 - protein, 99 aa, Homo sapiens
MRELTRDSGFDDYTLNFYIDNVYINTPKFCDAEFLFYSLIMTGEREELESIKVTPMERSFTSPPGNIMHVVHADLGEPDWNPDPFNSPANMGGRPQHSG

SEQ ID NO: 993525 - protein, 127 aa, Homo sapiens
MDATILLGKWVMKNTLTQLQTWIENSATERQEIYKPPYASSSRTIPETPTNPKTETYSTPGRRRRHRQERNITHHKHNYLKSQQTTPQEPSQYHNTPPPNWITTDSTHSNKNDTKTNIKVTDNTKNI

SEQ ID NO: 993526 - protein, 461 aa, Homo sapiens
  misc_feature (209)..(209): Xaa can be any naturally occurring amino acid
WSRPADGALELACLPRSPQRVRSAQGCRAALLMKAGEPWCCPIWPAMAAGRGCWLCCGQLAAAAALCRCTVRNMLLVLCFRPGPAGAGACLCCACASARASYTGAVLLTCLGLCPERTPWAACWLFARCRVIEERSLALIAQTFAGEEAIGFGPHTIYPGPKRHRHTVQRPKTVRQEFPIANDQPVFSRDLQFHLVKRYGKTLGSALAXEPCKPAGASLHFASGKRYKIKAPEPRTAPCSKQTKPHGALVEITLAPQVPQAGPRTTDEEEPPTRSYEVLGWSFKNKPWKSHGGPCGSAGVYEHNPLVLNVWAGTHTTRLSFCYRPCVYERPPGARHFGSHNGVQYSRGTVAVTEAQVVDYPHDQRKGREAPPEAGGIYTSASVNTPQYDSITPFRLTPQGRGCVDTAAIKFNSVRPGTAHNSNCNTGSNGRTTFGDPRSRVYNPTARVSLRSAPSGRDKHN

SEQ ID NO: 993527 - protein, 111 aa, Homo sapiens
MITDIIRKCFKRCTTQDTWVACHTKGPAQCNAPYDSLNNGNFFGTRLMWSPNYTYDIPTMRPTPSNCIGAGAPDTLTTQYHPPTHMCGPHNHVFSWRIQPGCRLPWIHNKC

SEQ ID NO: 993528 - protein, 150 aa, Homo sapiens
HDVRRCRCHAMSPHAPPPAVRLDVASSSPHLSTLSVHIREDRTRESPRKMLMDTISQEDYLHTPVHEPGSVVLLISLVLFGVIHGRITEIYALSDQRRLSVIDYLLDRCEEYPHDGEGALESRARRSRPLGHYALLFTGILVYGSTYVET

SEQ ID NO: 993529 - protein, 71 aa, Homo sapiens
VTRWGNASGSETLHPGCEAFDLLLAKRKGGCFYLQTVKSKFCGVHLAADPEVWLQEAKSKGGAERVNSDLL

SEQ ID NO: 993530 - protein, 135 aa, Homo sapiens
MGGHIPVDPSYWGDKRPEIRWTRETEIAHCTQPVTRAKSSQNHNRNCGSLTQIAGDTYRVPGGKENGGREVNFVTILFPSNRERHREGPGGGVRWGQGVRGGTPRRKGDGHRNQVGGATPRDRQGRQDSSRKGTE

SEQ ID NO: 993531 - protein, 148 aa, Homo sapiens
MNGPLKESYNTIDPPLRHKMAHEEYRTPICMLNRITRLQAVLEIITNKTSQALTVLAWQETLMRNAIYQNRLALDYLLAAEGGICRKFNLIGWARWLTPVIPALWEAEVGRSRGQEIGTILANTVKPRLLKKNKKKENLTFTQWWSTH

SEQ ID NO: 993532 - protein, 98 aa, Homo sapiens
ICPVTFGEKSRHRMKRCCDLFELLRWVHNLCVTSAKGFELGFAPTRTAWRSSKSYCTSLKKSSAIECSDVVKRCIARSLDVRKLVTELAYGVAHRECD

SEQ ID NO: 993533 - protein, 202 aa, Homo sapiens
MPGSFTAKARGGHTECHTFQGAYPFPTQNRRGPVSPPVDKAWTSIAIPVKKILRNLKSNPTKTPKAQRKQRGSLGVTETHPPNQGDTTNTQHNNYPLLTSTTKNRKSGRAAATKQRTPTKEGRQTHYDRPTARSLDPTKTVPHNKKELSKEYDETADECNKPFSRAEQNYERRERSSKAPPHGGGIYDTAHTTQTSDPRHKA

SEQ ID NO: 993534 - protein, 39 aa, Homo sapiens
MRRANVMLPSIASTTGRNHAPRSVASSGRNSLVRLTKIT

SEQ ID NO: 993535 - protein, 104 aa, Homo sapiens
MRLEFYHPVTHVELSHSNPCIINPGSSYTLLLIYLIHVKLENLTKVGRYIFLHDYLITPRTVEESLVSSALESANGTMLRIDDFGKINCAIHIHVLAHCIEHGH

SEQ ID NO: 993536 - protein, 89 aa, Homo sapiens
MATAKARARAQTKNPRANKRTPTGSSPAPPAKPPPTHPPGAHPPPATCETNPRQTSPHDTIHQPQPLHGARTRTDPPTIPPYPPATPPP

SEQ ID NO: 993537 - protein, 294 aa, Homo sapiens
TETSPRSSFYVTREKGTEPPFSGIYLNNKESGMYHCVCCDSPRLQILVGYPERSLEHHRIKKSFHFERQVAYDSEVSEKKYCSGTGLCLSFSEAHGDVYVRLMKDHTGDPETSGYLVRISSRQRLSASSVEAHLGHVFPDGPGPRCVRAFSIYQVWLKKFKPKGNQLTMLSRSPVPLSDALHVQPSIFHNSLGMTCVNTATKNLGLETCGKNHELGSHNTQAGTTAHSKKYSPPKGAQEHKALYPEYFVNANGGPLKTEDRNETQKNRGRRLYKAPGMHTLLTGHSRAPNHNHD

SEQ ID NO: 993538 - protein, 122 aa, Homo sapiens
MEKKQMMLCGSSGREEMWERRKKAESPECPYVYSDPNSNRCELMTEFLGLPAPLCDSKGSLVAMHAAGFAYTYQNETRSIIEFGSTMESILLDIKQRHKPWYEEVFCTIKQDAKKLMSDEDL

SEQ ID NO: 993539 - protein, 512 aa, Homo sapiens
  misc_feature (196)..(196): Xaa can be any naturally occurring amino acid
MWIITTGILSYIYMCLSYFKTHSYRFVEKETPRRDIYTLYSGYQRGALAGAHSVFLYRHNLRQTFHISQFSLSPAEETIHTFIDGVSTPLSCTKHTPLFQKCEIERGEEKHTIAVAHYIASITHRGGVSQRAGPRDKRQHNRAWPPVGLEKPIPECGHPQHGRCPCWRTPQEQTENTTCAQVHSPIIILQHHEDKXLTTLVLRRKRNSTVDTSRTARTQHVTSKETKRLQREADSDLIVQYDTKQHPLAGVYTHNRPSENTPDMRQYNHKLRSEERPITHTGAGAANETSTDETALSGVAYPTTTEPRDDIVAAPQYPTPFQSDWGDNGVKPPIVYTGRRGTIRTHQHHIVVSSAKSHIRASKPQNKQLGVSNRHTQQNNERAVETTTGVAETNDEGHKSAPQERENRDAPPQMTIGRRSIPSHSKQISVSSPTNMCPHQMMCRRYRVHRSGDNQRRTTTSATTNQQVSFDRGAHKRLDADISTYEHTATAGADSISSSDHNTIVAQCERNL

SEQ ID NO: 993540 - protein, 266 aa, Homo sapiens
EAAGPSGKAVFSLGTYRLYLLSHPHDPTEHPPPHYHYYSLSSCKVSLLNKDFTIAYEKEKKKGGTPHKKYIPQKEAKKTIRRVPHASNGYKKGTPKYGDRTVHLHTRQRNREPAQRHHTTHGSGNDNGQKTTQRKATYDETTMQRRRHTLTPPNTLTRVRTRADPNNPWENQTPKPPNPGKNSTKKSTQQRAQQQLKKNSPTNSVPPPNRETTQKPTARSKQNAKEQSQENKKKRANNRDSEKEHTHNTTTTTNNPKKGENQPANK

SEQ ID NO: 993541 - protein, 585 aa, Homo sapiens
PILTKFLNHLKAKMKVCVMYEHLRQFCLAANMALCSSKLPELTCHPAYLHSNMTSYLTPMAFYLCCSVIKTPNTAVVHSYIALHHSAPPPPCTGCLPWSFLAHQTNHTSYLPKTSGFSYHKRIIASLISCTHISAIEIIAQFSRISPPAHSSLSNNGVSIISHPTHGQAIHLSHSQSIAHTIAHPHISLLVPSRLFTSTRSYYAIAHIYDNLLALRSPQRPYTTLEYSTPHISITHTGSAHVTTKFPQVNHCGAHSCHSRLHTGTPPLRAHPTRGYLAIPIIQYTTHSHATWSSHFTPISKEPHTTTSTLVNTQSLQSALLPHPRLIARLLTRPPWRLGRLIGPINHPTNWPANHHTILTTLTFHIDSLDSNLHTTIVLIDHTSHLCHTSKTLTRPLNPLTSSSLSIHTLANSVEITHIHKHGHKAHRRDTHPQGHEHNTNAHQRARHTTPDVTATDSRRLEDNKQTKKRTKTEAEYQQRASPKIYRIPTSYRTREPSKLATQPRCTHGAERRAAANHTTQQPDESRPHSKRRYAGRQSSAPHAPHNVKTKLKQTPHDKRRREQTRAETQALRHRREQTGANNQM

SEQ ID NO: 993542 - protein, 147 aa, Homo sapiens
MHGARAHAYIPRGVQRSLPRSYPETQPPQTGGAAEKDTTKGAKASATRSVYQGSPKKERQNKPHRTRQRKNNGADEHRPQTTRASPQPTRSQSVHPHSDHHSEHQHSTGRTSRCASAAQNSPHYDCDTETSTKREPEPKSATKARPA

SEQ ID NO: 993543 - protein, 125 aa, Homo sapiens
GPGAGLSPPPLLVLTLPGGSIGGRFDPEVLGGCFYNADYLVAEPGGRRTAGRKRRKPWRGAGDWMYYLRYSGLHLFTGPVEPGLVQKFSLRDCSPLVSEESTPLPHHATWMGLVGGRAHAGYGSL

SEQ ID NO: 993544 - protein, 386 aa, Homo sapiens
HCFNSAWTEPGARSHTPDRTAHSQPIRSPLHRTLRTAPRTPPTAPAPTQHTAARPPTSPIVAASDRPRYTLQVRQNYHQDSEAAINRQINLALYASYVYLSMSYYFDRAACGLATTLPNTFFTNLHAAQGTCCAHCMQLQQPTQVAESSFRLIKKTDCDDWESGLTCNGLCITYGKKCESVTMWTAQTGHMPKMTPNSVTSIDATLPDTDPVKRIQSIGLNSDHIGANDGDQTNFLAWQRKITIDTENAGTHSDEVKAKPPGYNTKAEGLTILVHQDSMQGRGTPKPFHTVVPHHHVSSLGDYTQYKPRLDPKTPTATQENQKRTRTPTRPRGPTTTQREKSNRMTGERKKRRDNHKENKTHCHNKEQVRIYRKQSHRIPPTPKQP

SEQ ID NO: 993545 - protein, 552 aa, Homo sapiens
  misc_feature (65)..(65): Xaa can be any naturally occurring amino acid
MQSERLWTFTRIVASFDTQASTTSTVWVPLHSVIKAHTVAHIRKSAAACMSQEHNVPCRVLIDFXQYKAIIAFAFTYLYPGELSYFKNILTMNQLQTAGTDVNNLRLHSGSGFPTFTTAYYTILDKPISTHQFTPNFKHSTTQRDRDLQLYKTPIPTQTNDIHYINNSGCAAGNTETTITMEQLLTIPLETRSTHLTHTIVSTNNNHIPWKIITYDSPNTKRDDPPHRKDRERQDITTTTITRNAQSDPEDPSRAHIQTNDYAPVPQGCDDQTTTLRDQYTATANRSHSSDETGTAHTHYHNPRWSAGARATHTTQKASRTMPYTPHNVNEQVQSKPNARMGTHVRSHKPHPPSCDSQRSHVRPSRQTIHDPHTNDQRARRARKRTTLPNDHDTMIHEQHTSIPPPATSKTTTQARTHPNRPGWKDKHTHRRAATESNQHHERKTCVIHRTSTDPRQIEQHSLHEPNTSTAPSSTRRADGDQSKPATDRDAGPKSHVAGSETKPTRAKNTAASCSENQPQQRYLLHHCSDTHHKYEYTHTAEQDAKPASHTR

SEQ ID NO: 993546 - protein, 258 aa, Homo sapiens
VLDLLNAEDEIREEERERATEEKESNAFHSFNPGKQSAHGTFFQPFALVSIPNPGISLTQLPAHSFNATSNIMLFKQHSTTSTSFTKRQQHTALHHAFSVTTGTIIASPRGHSSNTLLQASCKLVFICSHFILVAHQAHNTSSFPTSTASFQHLTEDGKQQICGSITKQAKSNHGQKCSNGQQKCPKMYYILGGHLVDMRKDMWLHSYKERCTYYVGSTIQGVQVSEQFTMSVRDKNPKDIHSYHLLASYISFTTWSS

SEQ ID NO: 993547 - protein, 328 aa, Homo sapiens
MAHMGESIHQQEKRDPRRHDGTTYKKDTEDCQHAHNQGMTTYRTATDEREPKMDHTRDDQGGLGNANSKQEIAVANRVTSGQERTYNNIMDTRQSHKKNKGPEKERHITQKKARPGARGKHGPPKEQMTEMQPARIQPHIHKQGQSQIIGRRQQMQPGHNEHNDKEQKNNTETRRKQNTKGEQKALGMKPPQKRNNPNGQQERRKHTMKKKRTAKPERTNQTQTRQFYSKPKQQNREQKQQQPHTPPELKKTGNYKQKNETTRDTQKCTQDNKHTPQQTETKNRPKGENDNNGTPEPPNKTGTNTPQKRQHRTKKRRNKTKKTEKRKK

SEQ ID NO: 993548 - protein, 468 aa, Homo sapiens
NYLEEAAERLNSCGAWSGSPSPAARTPGVHALSNAAHLDVQTPLRPDDLPDPQVLGLEDPYKHNSLTGTLANHGSERALHECPEDYPRNVTQPLSRTYLYRLAHWLSPGVMSCTVYELQPMLDSPGREAAQDLLGTQEFSAIPVRLADTVPEDPRCRHRLADRGPPDNPQGHKPRPIGSTRGRSTPEKTQQVLWTPGTLRRRPATITRDTKDPGNRATRMHRASALGSRRSARRERDIEHNMPPERQRTETREQRHTAHTRDNATPTTDVGTQQHPQATNIPPPLEMHRNRKTANTQAQPSTPLHRPTTDNEESHEIDPRTTPNATAEDEPQRQQTPNEPHHAGGRPRGESAHTRTAARRKQKQHQNRGHKNATANTPPAAREEDTRDTSTNPADHTQKEQNSNKKQQQQTKAEQTTKGAETAQRRPHGERKPETRAQRRAPGSTNDPRRAPAHNEHRHRPPGHGRPN

SEQ ID NO: 993549 - protein, 187 aa, Homo sapiens
DPESPEQPSDAAGLVTITPRGGAAACRSLDPVTITCNLSSEAETQQPEDEPTRKKEQRNKRKEKTQDKGKKRDQRNKWNTQDRSTTHTHYHTDDTPPPQRNNNKKTATQARTRENKDKNETHTHPGADSERDAPNSRQQRTRNTPQRRDRAHTERKTQPRAPLDTQRLKKEEKPDNQRDKDQTQKAE

SEQ ID NO: 993550 - protein, 133 aa, Homo sapiens
MFLIKSSLLCPLVSSLVPSNLGGRGVEKPKRPEISVCLSVPGVPEEGRRKGVVCSEDAPRHLRKNGNITWRAISPTPFLPLSPRTGATCWHGRQWFPRWAHSVLNVPNLTTQNISPNHTYHFRVSSEKTTKTT

SEQ ID NO: 993551 - protein, 210 aa, Homo sapiens
MYVTALSPPCEVGYHHDVYAAGYNHSVYFRLRTRTRVGSTRRKDERRTRLIIAGIEGEPWVEQISFIPQSGSTSWENRCVYACGTLCEAKGRTPPDRATEDHTTTAAAQPHTNETTETAPRRKNPTTLGVLGAETPAKQGARRLQRSRPTQDTSRQETKETATRSCQKRARIASPQHLAPRRETANAMQRTKHDEDRKQDRQRRNRTTEA

SEQ ID NO: 993552 - protein, 145 aa, Homo sapiens
MKRKKKKEVEKRRRKGEIEGSENKGEEEEKNIERIEKNRRGKNEEEKQERKKNTRRKKQKRKIDEKKTRKGEENRHGKRKEKGAKRTEEKIQRRSKREKKRKRRQEQRREQGKKRRKKQKREKDKRTSKKETARKGRGEKKERKK

SEQ ID NO: 993553 - protein, 431 aa, Homo sapiens
PTVGTAQIPHIYSSSHSTAGQQAQIPTSTVRDHTAGRVQIAHIYSHGILTAGTAQIALDANSSSYSIGGIGANSHIYEHSMPLQEQCTDSHIIQYGTTVSVNSADSQIYSTAAQCSETAQISRDLQSQHLSAGTVLDSQHLAASSATRAGTAADCAKSSSASDPLAATQCQISAQSNRQTRDRHLAGTQCHEFTSAVAPQASTAKSINMNGKSTPGHGPPRPYATRGTKTNTTSAPHVRPNATHLRPDKYITHDNTPPRSPTQSHTSARTSMKQHKYATRMNDNKDRATPTRTGTKQPKPTMTTRHKRNAHCKRIENTHRTQKRKERPHEQRPQSDHPETPAQKQRRKVHTTRHAATTAPENKSKTQMKEDCKRDDRKAKQRKPREHKYTNNTDKYNKRIKAKTPASRRYNMPATTIHERTGHHNATRTET

SEQ ID NO: 993554 - protein, 296 aa, Homo sapiens
RFSPEVAPAARPHSDPPFPPPPHGARRYPPTWHYLTWAPRFPDPVPIMETCQLHDRPAHRYPGAQSFQNALSHPTMGHPSIAIHRRPHFLDSCLDPHPCTTHKPLTIGIPGAEDALAAVAHGFHVPSKTAGPEALAGDSRTSCETRTNDPPGTWLKEESSGTSEESILGIQSPGDFHHKTSLRHACGAPAQAGIQAHQMHTGTRARGTPWGPITHSHQFTLDETNTEQDLGQPAVEQHLCDRYKEIITHSVGHLPMGGHRSTSKGPKQDQSLEAETGFIHTIVPNRSGDPECNNAG

SEQ ID NO: 993555 - protein, 162 aa, Homo sapiens
TRRQEQEANLSKDSSPSVPKAKNAENRPLLICVVVCFAGPPGSLLAILCLCLTILVRPGGLAAVDTPSGWITGPLSSTPLNLEFVHLSYESFDCCDQNKDRRIECPVLETSVELYIDLKRHELCGDYIKDILWQDVLRPYASTNSYDAERNPEDLSGISRAI

SEQ ID NO: 993556 - protein, 330 aa, Homo sapiens
TGVNSSHAGCEETAGSRFLRSCGLGPRQPGSWCRTPVGTICTGARQLQDAAASRKLKQNAVPGTPSSAFTLPFQERSSSLRWGQRTRNLRRSQLHTINSIRTTRYSQFQVVSASNEPLALCFLWRRGISECHRRAQASQPRQQAIARSGESSTKGRDPIRVVVKGLGARTLVLHCTDLIMGRPGSDLKSTEKEPNSNEGAAPGKGSEAGIGTGAACTWNCPQASVPLELVNVPGRVSDYACWESLRRTESFAPPSGVLTQVGWVPQLADSYRGARERASPSGEYIVPATTGANTRHSATEGRQQTPRNRATTHPVCTTTMSRLNTTHATQ

SEQ ID NO: 993557 - protein, 410 aa, Homo sapiens
LLTMEDEGNSDMLVVTTKAGLLAVDNIAANTNATDTQDSTLFKVQLPVLRTQAQQHNFETQVGRMDKSNLTDAAKQQHVTNCKRELNRVLLKSTQSFNTWHHMKQFQEEVLVHATSKAHQLAGKMIVSSNTIKPIANKQTGNSAQYSTGHNSKQGTNHATENELDMSVLQDQQHRMHHRNYHNGTFHSNTETRKIPSLCPEVQHFKTNLDRDDKGQAVHHLTFTRPQIGPALQPMVGWTTAHLQTHTHLPYQPQLTERIRSTKRSQTSEHDNRETGYKSKARAHDSAISGTTETPVKSGQLDRTQDRRATPAQAPSANPAQANQHQTEQRNTSDHARTNHEQQAPVTNQKNRHANKKKRKDKTKKARRTNTTDENSRTQGRRSHKDTENRPNRKAERENKKPRKRHLNER

SEQ ID NO: 993558 - protein, 81 aa, Homo sapiens
ATGAEEGEMKPVGAGADAPPGEGISCCSDQLSPVPGRLEGGAGKRWSDVSGGLETESSNGKQITLEGGLRWMKRMADSWVR

SEQ ID NO: 993559 - protein, 148 aa, Homo sapiens
QPPTPHCTHSNRNGIPNVIERGKFVGYIQLREGPKRVGPYGLLLTLRCRHKIVTREPLKPVRSTITLYITGPNLALTQSLFYNETPLTVYTKSPGIDPSGIRAYHNLIRASVIGLVVNVQDTLESTGDASAQGYVLIGVLVEVESKAR

SEQ ID NO: 993560 - protein, 77 aa, Homo sapiens
MGAPNSYQRLGPEPHWVGVKRNANGEGGPPLDLQKGNEGKYTPRSGRGAETTGARSYPGEEEQKEGSAIEESREIYG

SEQ ID NO: 993561 - protein, 174 aa, Homo sapiens
TRGYDPGHRGVERGRLIWPVPSSPASCPTDGTAPDTADTEHPRECPRTTERARAMRARAYWGGQVTRSAPPVSVLCPRARMPFPRGLGGVLRLEYRKSSFPRWGRRETPGFEKARLVLHFSFRKADVQAHCIEGEDRQLRRRRGGTMGAFPLLVHSPDTIPSQNPLAQIHAIHD

SEQ ID NO: 993562 - protein, 111 aa, Homo sapiens
MAFLMLTERKILGYIQLRKGPNVVGPYGLLQPFSDAIKLLHQRAPKNRQASTITLYITRARAYPTHHQLFYYRTSHSHSYSQTHPEINTSTNASSYLFYSNSSLAVYSNSF

SEQ ID NO: 993563 - protein, 206 aa, Homo sapiens
NATAGLRALHVKLPHTWGLATRLDRGNASGQLGGIISTVLTWSADVYLRGRTVQPMRMKDMMAQQHLLPMALSQRGYASFDVRLRRRLMAIHDALGLIELAYFVLYQEGESCTGVMSEEARPSKGMIDNLFYPSLCVRRDEYCFYNPWHVSNIDWFRSSVPRVGVWAEGECALVPVTRLENHSIMILWPRHIDMGACSTDYVLWEP

SEQ ID NO: 993564 - protein, 118 aa, Homo sapiens
MYGLDYVHKSLNLRPMLKLIVPTIILRTTAHDRFQENGHKFESTQTPTGVIISSHPIYYCLNQIKNNLFELFPNLLLRAPENPAWLILGYSESISITIMGNANRRLIQVNRYQEEKRC

SEQ ID NO: 993565 - protein, 383 aa, Homo sapiens
ALTRDPQFQKLQEWYREHRSELNLRRLFDANKDRFNRRSDLVHLESPNSWAYPGGLLQKNLVTEDVMRMLVDFGQVQGRGGRPGAGCSMVRRSTDTEGEPCCDVALRNRSNTPILVDGKDVMPEVNKVLDKMTVFAASVSGGGDWTGDTGKSITDVINIGDWRLQTWDPIMVTEARYSHTRSGGPRVWYVSKIDGTHIGKTLAQRGTPESPVCIMPPRTVLPRETITSAETGKEGFVQDGQGSLLAGRKPFVCPVYYHNHSDGALADYDAQKMSQYRTGGGGRNNKGGNESEDPDTEVNTHRDRAPGGTESATEQYNHVLKTPPRSYSRQVQTHGVRPRCKQAPRRNTSRTANTTHDKHAIEYHTKTSTDAHATARGRDATDE

SEQ ID NO: 993566 - protein, 208 aa, Homo sapiens
SSARGDEVAVNVEEVFSHLGHMHLTERADRAVVQQGASVCARSAGQVPGEHGSPWEPLGQEGRCALQVCRVAGGLMLSCVRLGVPERHSLCVGDVMQHTAGSPECSYLSKRVSDPDVATYSVQEASQQWAAMNHQQRRAKDQVGKKAACKGQGPIMGALSGQSQDQGATVDRIGKSQKEHGGGNRDVQRTRRTPTTTVTVVLSNDPLE

SEQ ID NO: 993567 - protein, 385 aa, Homo sapiens
  misc_feature (28)..(28): Xaa can be any naturally occurring amino acid
MGHYKDKGEGYIHIRVNAGEFYHYGGHXDAKIWETPTIVGIWQALPHTSESSNILTPEHLYGRNYISFLQVLPPPKFSTLRGQSEKPSVSYKYPLKMVLSHIPLERRKYYSPSQNTQRCTEQSGPNIAHTLSLNRGGNITSARVVNKRLKRAQVGTTHRLEALNGGPEAHKDRQMRPYKRKNNSPRGTQGASPPSLVSTSPFGSFTPTSSPTLNHNQWGALRTYHPLLKNRLLQHSQGGDGGQHNGGLRPNIHQQGHPQQRALSRRIRGPLETLLETYSKASQTHHDAGTYKQGRQEGGPPFHEPPHNRPPPHYTDNQRRENNEHQHTTYHYKRVQQGGGSNKGHDTTQQTISNPQPQDQRDVTQEDPTHNNTEAEQHTHSHEQH

SEQ ID NO: 993568 - protein, 247 aa, Homo sapiens
  misc_feature (124)..(124): Xaa can be any naturally occurring amino acid
MCGLKASLSSYFHKTWIYRTKVLTTKPCVPLCERYFFLSLFLSQETPHVEQKTPIYLCVCTLQNTSHPQSSLYTRIHPYLSTCVSNSVCRVCESLYTQCVCVFYTKRVLHTESESVRSVIYTQXEWRDTGVGTQCVRNTLYMCVRFSVEIFSRDICVCVFIILHHTIMFSPRVYIKNTTPLRAGVHSPTIYYHPLFIYYKRRASYITPDATYIHQYRSRAIYFHPCVGRLSTTYISPPVSRGGYTGA

SEQ ID NO: 993569 - protein, 144 aa, Homo sapiens
DNSTNTFITKRSYSAAWEKEGLPPFPLKGIQRAPFPRGRPAGNKRTPGFASRRGTQTKGDSGLRGSHCDLCQNIVSLPSLFHLQKPPVERGPGVLKPRRITTEALLRASQKNTGLFCGPRGEPVLTEAGDKISQHLWRVSSGDS

SEQ ID NO: 993570 - protein, 446 aa, Homo sapiens
  misc_feature (147)..(147): Xaa can be any naturally occurring amino acid
MDHKTQAKNVFWVWPGTCPGGTGPGMAGENVALDLGREKGDHAQVGISVLAAMNRGWFLQTIGEHLGYHGGGEITWVRMWANLSKIFLFCAAKGNARETLCGGVVLCGASDEDLAALLMSPTGTNSLRCGESGGHESPVGAHLREKXIFRQRWGGLSRQTQRFIYITGGVRWELARNRQRWGAHRVLHKPKNFCLRASYPAITRVGHTFPRDGGGDSPGVLNTTRVDKPALYAVGSQKYRRARVDNKKGGTSPGEYSVTLKQPQGSRPKHVGRVAPKLLTGCSSFHIFPKGVARRKIFVVDITPREGLIYGCGPNPPEIPQLPPHIQGEAPPGVVACTGISRGVSPHNGGHQGAGGEGGHKGEIGGSRQKQHNLSNDVYARKKSTGGRRRRHLWNKQHTTKAGGGGDGWPLGTQDPTPRERGERENEVRKHDGQRASRRLDCTPTV

SEQ ID NO: 993571 - protein, 218 aa, Homo sapiens
CDWISILAGAMSCVGNYLWQASEVHHHVSLVLVLPADIQVEKFICHDEEDEDLLWHEGLEVGQFTTTASVSSKSFQLLMHETSGPLVNTDRFIRAPGSQVRSCLPMGTNELITVLEPAGVILGVRYGLRQANRYHRRGNGSYCKRQMSPKPWNRCTFQAYGSLASRPQELDGASMSTFWFAYGAGLAFVHLSVRLASEDDARGPKGVTFMNKDERDHG

SEQ ID NO: 993572 - protein, 156 aa, Homo sapiens
MCVPILIPKSLVVAVASTIYLLKQNPGELRNPSFRSTPGGREDEPPLSNLQRIYYVEVIPGTLGSSILGYPNQGVPGIVFQIGYLNKGPEQQDPLLDSTRGFDRSALGIHWGPRGLTACDANILRRHVRYPTDVVYVGQLYRRTHGDTDIATTATE

SEQ ID NO: 993573 - protein, 220 aa, Homo sapiens
MNQINTRSNTTHDNNTHTHAASNKPRHAQPHARKHEKSTTPSTQQAAPTNNTKTRHANNNMPGREDARQVTRPDTASQPQTHTHTTRQTSQQYREPAQHNTEHGKTQHTDTTTATQRPQARTRATPNTAHKHRQTDTRQTTNANTAQASEEAKPDHKYLTDTTQTNGKSHTTAAQTPLTRTPEPNAKRHYTTRRRPRRKEHDSQRQDQQHTKKQGVERAD

SEQ ID NO: 993574 - protein, 107 aa, Homo sapiens
MCHMLHLEIPNAGRGVVGSRLYSQLPKMLEFTGHEPSRLAYSLNSQQVQKVDQKSLENWAYKSSKGHVLINSSSQMVSGTVYIGIGHNDKLVTHILYYYNVTYTQHT

SEQ ID NO: 993575 - protein, 210 aa, Homo sapiens
MSSPQDSLSRGRRYCRTTNKGAGETQHYRQQRQNEGSTNKKTLGHPTQPPHLAYRDATRLCSILLHTLSMHSVTFVSNRHLLGVEGIVKTDSAMTSGHLKRHTPRGGMKNEIIDKRQVHSHARHMKIQGAGERRGNAEEQRTKGGERAEVTESSQSKRLPEMGGSEWAGDGRRREIPLEKEADAETLRETQRRGQETEREPDESHGKTEE

SEQ ID NO: 993576 - protein, 219 aa, Homo sapiens
LISMDLEECRWSQTWRKTDDQKCCEMMNCNTQRPDPGALPDDPIVGASTPHACKLHCLPNACCASALNVMWLSALEYPCGTSSERDTITPHTPVLFTPCLFTSAYTEFIGTGIHTPVHATLGGALFPRNHACTYFYHESVQSACYLCSGVSTASLPRGVFLLFFENSRLVVIHKTINPDHQGYLFHRWTIASSGNALSPDVVHVDWSREWTLVTQSRLQ

SEQ ID NO: 993577 - protein, 226 aa, Homo sapiens
VFLYQPESPDAHIPGFTLNGSMPEWWSTKPCRDTCLLHPANLYVAGPMSSRDTLIELCNYKASHPSEVAHVPPLTAGLESTPLLVVSVLHSGFRPLPISYLTQPLKLILNFTCSTSWAALECMRRQSGEVASLVLPVVLVSFALSGHTIHHEKQGLSGSLPNSLLKKTWQTPALLCIRCQIFIYIYRLSTSFKLQTTNVHHASSWTSQLCQYNNSLLLLHSPDINV

SEQ ID NO: 993578 - protein, 438 aa, Homo sapiens
AHLRTAAAGPAAPAGPTAALWKWSGQCQMALSVAYNVYVLVHVFPESQCAFQSPELTAAGPPMHPVVAAVSGQLCPSSGEQAILLWRVDALWPWPALWLLSLFCCELDAHLASSLPDWQRHCVAWLSKAIIANCWSHSDAAVAGAPSYGLARHILFIALSFHKIIHGDDLPIELTHSTDVKHVCTAHIQLLVRIPHVPQPLLLARCNGTRDNSDTSTLTIGCARQDQHNHTVFIRHTTFLRTSHNPPACGLSVNRLPHLQTAQKMPAPQPTPYFHAYTDNFLTVDLYPQLPNRMTESHLPDPGQPGKVGVHEMYESHDNSPSSCGHLRWGAEEHSLPPSFENRKYHHSRCINLQHVLTCRSLSQHRQRARQQMKFHSGPANPEHRLYEGAPNERSNVRSESSSSQSSHRGCLPAPPRDIVSPSRLQLSSPAFISLQST

SEQ ID NO: 993579 - protein, 241 aa, Homo sapiens
VTACMHASGVGWHTANRVTTDSARAAQAPLPTLPASLKSSINTSSPVLTPWQPLTPLCTSQDAEICAGPGIPEKLASCDIVVDCGGADVQTLGDTPDMTIHHEVFHRDHDATLYPWECLWQTKLSSCWDSSICTYGHKLAGPVCLGTSEEDQHGWAPYYAHSCIDNYCGGGGMLVDQWDLPVCQTGEPRKCTMTPLTLTCTQSATKYVPTRGTHTQEQEHLEGSDTTSVNWDTGDHQEYLA

SEQ ID NO: 993580 - protein, 147 aa, Homo sapiens
LKVQITPKRLVHGCAPDVWVLTHTSPVSVLSVICPCVILICIPKPNYVMVFRLLQITEEPAKITHGACAPRWATERAYEGRMQKQTGWPGSPSHASVWQGSASGHGRCPGNEHELHKTATSASMLQYSTLYFDTCSKSVIPRGITAK

SEQ ID NO: 993581 - protein, 211 aa, Homo sapiens
MGSSTTASEDGGAAHKKPSAHRPAGRHPNKARRRLRTQADSATQGGEERPAPTPGAQDALGNCCEPAERGGSGVCFSASGSRVAWLSHDSTVCLVDADKKMAVATLASEILPLLALTFITDNSLVVVCTIASRLLFTYDAAAGILSFGGRLDVPKQSSHCGLTARERFQNPGQESELRVWHVSGACLYSLHKNSVRHISVLSGGNDKCSQF

SEQ ID NO: 993582 - protein, 47 aa, Homo sapiens
NQSHQKTHGDNVRGRHRLDNGSKSGRTTFVGPDVSPRFTWRDVWDLG

SEQ ID NO: 993583 - protein, 313 aa, Homo sapiens
LKGYNTNYAKAPNVVSTYGLLRPFGDAIKFFTKEPLKPAHLPSASTSPPELSSHHRSSTMNPPPPYPAPGQLNRGSYGSSQLYDPRQVHSNSVSIRWQHEKLRRVTPLNQENWRAVAHNYSSYRSAPRTRMHNSGIKHELISGFLSAVSDLITDNLNDSDILLPSMNAWHNTTTTVQQRQEENESAAHIRTLTRRGSPNQNEATDIRPRREAAMSQSCKNEYGNMIQEQTLAESSAWKRYDAAPEVKTDGTRPSDTRGRTKAAQRETKPESDSRKEKYAKTPQNPQQHKQKTHPSTHQNDPPHAKHNRDKPHS

SEQ ID NO: 993584 - protein, 35 aa, Homo sapiens
MTADKQTTTTQAINLDRTPHKDTPKHNSQKTYINQ

SEQ ID NO: 993585 - protein, 48 aa, Homo sapiens
MYLAQQSTGTCWELLFLKNLTFTLHGGSRHTNNASNPYTSDGSKLTNY

SEQ ID NO: 993586 - protein, 338 aa, Homo sapiens
NQVWSKSVESRDGARDGAPCTVSQAHLPRARRSLSGTVQLGARAVMLDHIVLQALNRAKSTVGTILYRMPIVWLNPDFESRSLQPGSRSGVSGETLEASNMSTKRLSKAPAMTRRLRTCYGNDLLHGQSAWSSVTSVTAEGAPCEYPFSQGTKTVETKRRNVLPGQNSFNSGLAILGTLPLIDVTAHNSWTAGIEVHTRMEYVCCGNKVAIITEQRSNASPSNDRRAIETCCGHETTDGIDHSTNSAPLELHDENDHATEQRPVPLRARTALGVTPGQTQIERKAITHRWYSQMMPTARGDNDHSDLGAIKPQKCAEQNMKHRLSRHKTREPQHSQLV

SEQ ID NO: 993587 - protein, 105 aa, Homo sapiens
KTAHSLRKMILKRRKEVESILKKNSDWIWDWSSRPENIPPKEFLFKHPKRTATLSMRNTSVMKKGGIFSAEFLKVFLPSLLLSHLLAIGLGIYIGRRLTTSTSTF

SEQ ID NO: 993588 - protein, 102 aa, Homo sapiens
MTSARSTISPTKVYTLTGDQHKTSPYGRLKTRKGTGKTSGVQDNPTAPISRGPTSYPRGAHRRGTTISKTESTEQHKQPRKRHKKEDRTQQRRRTPKPRTPD

SEQ ID NO: 993589 - protein, 199 aa, Homo sapiens
MALGRHSVTILEHRDTSGHQAHGCQNTLVTPTQAIIMTGASEHQRCSHTRRHATYPTRIKYDNPKKGGRTANSAAPTGGRLRERNTSQLVPSGENNTGTKTGAENKQHIQRERAEKEPTHKADEIKRLTPRRGVLVNNNNVVVVLAKQKERKEMDDKTEASFTHNMTMSVRHFNNDAEVTQVLISLLLLLVFLFLSVLF

SEQ ID NO: 993590 - protein, 193 aa, Homo sapiens
  misc_feature (8)..(8): Xaa can be any naturally occurring amino acid
MWPLSRKXQLILENSDRYCNHWRNFAEHVVIPGKSITRILGPGPSILTPWEDMVACCLDAAGSWHYTPTFVGEWATIGHKGWNSQHSNGPLGTIRRHQTDVKAPAKNSETTPPTKKGSYQQGPCRPGAHTGNDYAGRPTHIAAGVHHAGMVSQYPSRKHTNPLQLVDATGRPRFGFSSFAFLLSKMREKRKKE

SEQ ID NO: 993591 - protein, 81 aa, Homo sapiens
LNCTILTNSPLLLRDRRESSAICSSVQEHAGLRCNVIRLKENEMMRNVGMSRKHRSLPKRQTRLPRSVNMNLRLVHGYVGV

SEQ ID NO: 993592 - protein, 51 aa, Homo sapiens
MVTRQNDHKSGAEQEKGRGEPNASSTTQEHQDNRGVRSSSKDANVVRPKRG

SEQ ID NO: 993593 - protein, 148 aa, Homo sapiens
MRAKEDQRSTVNNDTKTTSRGPPADQPTRKAINEYNNTTQAPTPDAQFRKRQSNITPRRQRHNTNPTSNNTPQGAQQQPCTTDNKQLPTGQHNTERTADTAQYHNHPAGVNPGSTTTISPHSTTQTAHHTLAGPTVINKRKKQGAANI

SEQ ID NO: 993594 - protein, 286 aa, Homo sapiens
MTSTHAKTKSTTSKSEHRTQPNVDPYRTLAPQHTEQSHAENPHATKRSSKYTNTMTKVHSNTATQTNHNHMQKESCGATERRREPTSQPQTLPHCQDRRRPTTTRRKAPGHPTRTLTPQSHNSSRKISGHTLRARLYRAPLTHPAHTAPKNNTHKDTLNQRKRETPPHVYAKHTTTMTPQRSTRQSQDNQQLCTQPPAPHHRTDLKHTRETERNNQQRTPPTQKEQETRQRNTTRKHQSQATDDSQPVERATTMSNPQTTTARQPTDTRATHTHRQEPKHNAPQQT

SEQ ID NO: 993595 - protein, 217 aa, Homo sapiens
KKKGKQKGTPRGKGGFPKKLGFFQKSAVPGNRGKSTGVPKRGWCVPLNSWDVFGERPCAVLRPVFCCAVAPAGAGAGGVGRAHYSFCQNVCGATPPGERGPLSPGQLCVVVGAKNHAILVFSPRKKGFRVRGWRRQQQFLGAVTTPNRCVDKTQHKTGGRARDKKITPRGGRQNHRLDHQVFFGTTKERPPKGGTVIKTTSGQRGRLKKQTEREGTN

SEQ ID NO: 993596 - protein, 87 aa, Homo sapiens
MLTAEKSSRPGVACRRHSSHGLCRHTLLSITRPTDKLGQHSLKPPHATRYTPYGQLAIPGPHTVIIRHYTASNHSTKKPTSMLHDSQ

SEQ ID NO: 993597 - protein, 207 aa, Homo sapiens
MEVARPLPAPFHSARGRHTGAGSLPGRPSLAIPGLSCTPNCPLPAPALAPCPARPPWQSLGSLAPLTAPCCSGTGPGPAPGLGPSQPHVPCRIPPHIPGPPNREPASPEGDALGPMTSPFARLAEQQNEIRIQWLPPHEDGHHNGTNCEATEGTPTPAAHNLHQSIHLLNDKGDSKQTSTLKATGQAHNPMIKWKRRSSATPSTRDT

SEQ ID NO: 993598 - protein, 146 aa, Homo sapiens
MNSRISYLAAASYSLVSSGRSLRTPIAQLHSMSEAVVRSAELRSPRYSRINYMYDSSEDCSYATSIEHGSPNKYGVKILECQFRGRSKSLNLVSTGNTTRGYYYWSTALTIVCEQNLRVCQCASRCLSNYIPAKKSCRTYGRVIYA

SEQ ID NO: 993599 - protein, 429 aa, Homo sapiens
MPAPCEPWLEMAAICSLGALQPCALSPAAALRWCCPMACCHGECVTFNSCSVPRRRPRMEMPNELCEEALIIPPDAVAVDCKDPDDVVPCWPNEEPGVGACALDYIYACRCYPRRSILVPTISHFNQMTCTTVAYKYTKADVILTWALCTMPQAALYQTIEEPIHTSLTAQNEVRHHQSCLSQDVWELSESLPTICLIDFTHAQLTCLSTILPLALRAHVTPLCNHFPIGPGQPQKTLLARYTLFTLQGPGTPTLAHMLPNTEIPDAPLALTHTELAIFDHTLCIYHHRAYYPHHSPRAPLFVSNLTHSGQQHTATVDRRLPAAHRLLSPRPHSRHAPFVAPLRSTFCLPAQSLRAHSAHPHDMLRVGFPHIYTPRSLSHNRICSEHSPVAGSTPSIYLVIATRSPNRVRPHIPMRTTCDQVRTDTRML

SEQ ID NO: 993600 - protein, 251 aa, Homo sapiens
SLQTFESYLLFEGEKKITIKKDTEMVPQCTVYFTIQPKKTHILVKHPLNHNISKRPATVHHICWTTNMSLSILVMVVTKGVHTSRMCHERRPRNYRLAARQALYTANAQCTRTASIQREACPLCYEERCPHVPRCGPNKEMTHRPRQRAHCDGQGVVRMNAGASLLFEALFDATRFWPKALLGLCNSPTGGYQCDKSKQPRTRTKAGVAWSFKPKVRNLGLPWHPCWSMWAQERPPPFAKETPPPLRENPK

SEQ ID NO: 993601 - protein, 35 aa, Homo sapiens
PRGGGGGVEKGRGGRAGGGGDSGREPGPSRDRPSC

SEQ ID NO: 993602 - protein, 82 aa, Homo sapiens
LRRGLRGVALRTPAPLRTYAAAEWCGACWALARAPLLLRSLLACLPPVPWLMATVQLGVVVCACPVLLAHLDPALLSVRKFT

SEQ ID NO: 993603 - protein, 238 aa, Homo sapiens
ESRRGVPAFNSARREPGARSPARAAAHSQASVTSSPQPRTAPRPLAAAPARAQAPRRRRLSLVAAMRPVHGSQVRQNYHQVLTRPHIEAPDQPGARTPPTLPVQSRYYYDREDVAWKNLCQNTCFTQSHEEQENMLTKLMKLQKPSEVAESTFRNIKTPDCDDWDSGLQCNECGINIMEQKCESVTNWTQHTNCALETNDPHKVLTSIETTLPELAGENASQEWMTSEPTSDKKGRAE

SEQ ID NO: 993604 - protein, 739 aa, Homo sapiens
GKALDKDRKSTERTERYLTETGYYKYMSAAIVHSVQTQHVQHSNVIAIHGRHATGTKPGSEHKRSRHLTHADLHTVLYSTAQTCHDTRLTSGMLTRKGYQHNLAPHPALGLPIAGKHNASKQQTETEIDNPSCMTAYNNHTPPELGDQSKDHHQSWTHTNMTPLKHIRQYTRGTYKMSQRWHHSSPRSTHPPPKRHNNDLNTPLLSTTHHILTTIARTNTTVHIDTNKHERPSFSTRVHQQCGHRATDLHIHQQRPQFTLLRRIMHEKQQHIGKVANQHLVQAQAHINGHKQIHDITATWTYQTTSNKLTIAQSRRSATPHRTHPNTKMSEGDEQQTHITRYNSEHYIATRQNPHHQYTHNHSPSPGEIDTHTRIYTSHHTAHNHDYTNTRTTQLGDSINSQHHNDDTYTHRTENNHPHDHRIATHTNDKATNNRIIQTIDNPQPTSREPTHPQNRDNHNTAHHDSQDKHAIRQPKTLQSTHTTHSTNTATNQMKASRNNAETRPDQHTTTQKRTHRTKNADQPSHTNHTNTQRPQNTHNTHTRAATTLTRTDMHYSTTTARTKTQHTHSTYRHQHNRHLPTPTSTHNADYTTTTAQTTPHRSTSAHYDRADTEQRSHRTNTLTTRTKHNKHQPTERRRTQQPYSQPRHQPHTTQPDTARQHQHTHTRTPQHRAHTSTTQQHKNSETHRQSRSQQQTTTHAVQHTTPQPEQHQQQQTQNTDQTHNTHSLRHRHSARPTS

SEQ ID NO: 993605 - protein, 104 aa, Homo sapiens
  misc_feature (56)..(56): Xaa can be any naturally occurring amino acid
MTTTHALSRDDIVQRSYVAIPKVGSCLTTTISLDDGDIAEHNRPKLARTWHSEGRXSFNPYGTGPPIHGRCTSGCKEDVKAPLRSQALTLTQGHLVLWRHEQLL

SEQ ID NO: 993606 - protein, 295 aa, Homo sapiens
ARRSRLRRGRPRSLALPPAVRVPPSVTLVSTTVWSSATRTSLSELLRLADGYPGEEAGYGSLPEQWCIRKKLVIVGDGACGTTCLLHESSDKDQFPEVYVPTALTNYVADIEVDGTHGRVGFVGQQLGRKIMIAEALSYPDTDVILMCISMRQGLIELEQIPEKWPQKSSISVTKVPIILVGTTKDLRNAEHTRGEIPQMKQAQVTAAEKDAHHAHTDGNRSIQEQTRTDHEAVLTVVPSSTQRQTNRQQHQTAARTLTHPRHKPHIQRAPPPKQPPHTTHPPPTKATNKLPHEQ

SEQ ID NO: 993607 - protein, 156 aa, Homo sapiens
FSSSLEKSYELSDGQVITIGNERILLSEALFQPSFLGLESCGIHETTFILPIMKCERWNILAIHESVMPNHKQLSCVRQNPPMLTHATIVRPTANAINGGIIMPYGDPWHKRTNQRIIRSPPDQHRYIRLCESGGLHVLAVVCFTLSIRMMESPTV

SEQ ID NO: 993608 - protein, 105 aa, Homo sapiens
MLPLTSPRVRSRRGNKSVSEARAQTRHGYLRYRQNTTVELEVSIHRIRITPIKPQAKYPCEEVVLLDIDKRKTNRKENLKCEEDQFECHYQDFGVIMYLYKYFLW

SEQ ID NO: 993609 - protein, 210 aa, Homo sapiens
QGQGRAKKTKGTKGKTKPSKTRKKVRSGGGSGGSGGQVSLKKSKADSCSQAAGTKGAEETSWSGEERAAKVPSTPSPKADLSNRVTVHSGLEDQRTEGGEDSTDGLLSCPRRPGEEAGVRGGAEEEEEEEDEEEEEEEEDAQQKPAYPPGSDQTLLQPPKSTDTQSESTKERENRKAEGRGQDNHGDIQDWGNAWRPERMRPGKCGQGDV

SEQ ID NO: 993610 - protein, 70 aa, Homo sapiens
AVVVSTEKVSEDSDIMHDYVVCRVLKAHTTYDRITPTLALDRTSFAPVEELLLMRRHTTRREISVDCRSK

SEQ ID NO: 993611 - protein, 128 aa, Homo sapiens
  misc_feature (66)..(66): Xaa can be any naturally occurring amino acid
  misc_feature (71)..(71): Xaa can be any naturally occurring amino acid
MDTSGAIILWYTWTQNGQETVCLASQSCLMQEAQCGCSQWKMRADARMTTTFQYQSNPVKEVEVEXIRAGXIVEFARARVALLLLRDPKGVATWSLALGGIQTLSRGVSPREPGGIPGGLPLQGANMP

SEQ ID NO: 993612 - protein, 393 aa, Homo sapiens
AQLRVSDGSLRVQVQATSATTFFTRGFLKAVTREFEPLLKPHVAVKKVPYVDEEGNLVKPLKPNGTTRLDDTLCVLTVFRFANEPLLPWNVLREEDLFPTDTNRRRQTDRDRSPHRHRTGPASPQTHTGWDICGPGHRISWMPNGGLDSQSCTRLPPNGDPPDICEISPIGCLTSGEGEEVYLQRPGKSQVHRLNPWMKTKAKGAANCKEIHDHDQEHAHRGTTQRENKKDHRAILDRHTKDTNNTPEQSTRKNQEQGRDKQDKDTLKHMNKNQHDSTTRGQENRTKKENKRQTHTPKRQGTRHDRQTRKNKTKPKAGNRGQNQRKSRTKRRGTETKTGDNEDKTHTKEKKTGKQSNEEPKEQTKRKTVREGPQSSENKQGAKSSRKRDTQKM

SEQ ID NO: 993613 - protein, 288 aa, Homo sapiens
MQGILLFTTNVQMSILYLHHFHETGHFLLWYCMGGSCAGKQPVAMHLTHNKQHAGSPSSRAVHFPNTNKHPLASNSTVSKESKVTRKYYSRTIPTTQSRGGTRLFHAPRNAHTLAKVHRARKNGPAHQQVPQCTKRHDHHQSTQGARSTQTQTCGSQASPHTEAGQLRTPHTKTPAQACHQTRKTQDQPIATTKTVTKSDAHKTHEEPRITAEKENKKNQTHKNRTVRTPHPPQQEERRKQTQEREGHRGTRHNKHQTNPDDHTHTPKTREQTNRKRKQRNNEQTAEE

SEQ ID NO: 993614 - protein, 321 aa, Homo sapiens
MSGHSSEHKAAKKTATAIEETPSCYPRYTTQTTPDYSVRTTNWHHYNTTRTPIQHPWGQPRRGQLSSTSAKLTTNRAPGGLNKNGHTKLAQTHSPVKNKQRHAVSGLTVERLTPQDDHHKIREPKLTHTETEINRGVHRDNGHNKNKCGGTHKYAIDAAKSDPTIATTITIHHNNPDDNRSDKATNVPATARTTNVGPRTTRSSRRTPSAQPPTEQRGYRDNIDGHRTVAHQTHLQVTANTYQRQDENTTRAVPQHNGEQTQQPTAQWKYNNVAKCAQQKQPSNQTRQKSRPDQNKLAEPTMVVDRHIGSNCSETQSDQKE

SEQ ID NO: 993615 - protein, 453 aa, Homo sapiens
SGDRVSLSHPGGSAGAPSGLTVQPSNPPGNFRVTPSLHSAFREYSLRTIAHTTRAQHNFFFIFFFLCGEKRGGWRQRVAQEAGLSKHPGATRQHPHPTQSLPKEAGESGGGEPKVPPRAPIVWRLNYTRGGDTKQQKTETTTHKCAPSSARTTWWAQRSEQRGLNHPRGITPIVGTTPRPHRRPLRGRSNTPVRRTESPTTGGENTPKTRDPARVKPAAKQARGGGTRAPKTTDHSSRRGGKRAQHKEAIGSGPTQNRRGRNTSEWDHTHTGEAHPTEQKDAPPGTTKTGGNNTDRGARERKKNRKSPKRPTTPALIVRERAQIRNKINSPDGEHNPPHQQAGGGNTRTAAATTSAIVDQPTSETNKDPPGGESTHTIKRQKRGVQQRETGPHNQTKQSRRARPNRDTTHNSTRETNETNQYTPRPNREKRRRRKNTNKAAADERKQHKQEGS

SEQ ID NO: 993616 - protein, 500 aa, Homo sapiens
MPTTFGSFNCGDAQEDSTLVRRTSHSFIGKGSTANGAVNEYRTPLKRRGIRTLRGEAMQCRWGDFTGPTLKKGNPCENPSFKGIAKERYSSTHNFFVVCHLNPNVNKPPPFPFKRYLQPTPVSLGFKSTTSFLVEGGMAYINAYAPEEEMAKWGKRTLRGRVPILLRADKSKPSKGCGLNHRTKNAISSRAFNGKGQTADGCHRNTNHDWLFEKIRKMSAQKFKRGQKERASFWIEKKGQKKEHQSATKNCIEGGEKTDRQWLFHTKGGVSQKKATHPPKTDWSCPLTHRRACVFRPRESYKIKFNKAVGKQAFRAFAKPIAASKILLGETTKRGSINFRSHTFKFKAKKEHRVKNSEIHKESMLNGFNNTQLGNYDKANIFVALDNIIRVDKYSKGAPLWAEKYHTANLLDSRKTARQLRNKPYRDTQHSDVRNERVPPHTLIKHRLGENIHQTRKKPNKGASHTIYFLKEPRVLHTMVGRINTPLYSETKEHYNRCRS

SEQ ID NO: 993617 - protein, 179 aa, Homo sapiens
RTRWANDKHTATLKDEPDRLYVVSLIIFIATDITSIGRPASLIDTKHPTIYEPSHGTSPYERARDDRLFARECIKNVPRRHFLPSEGIDLNRPVCSPITEYYYSKSHQAYSIYRTQIALARDAYSRLNDYCKATYRTMQRYMEARHSLDDINDEASLYAYRSSAISNTSRDYPRNRCRA

SEQ ID NO: 993618 - protein, 83 aa, Homo sapiens
ESYIERLLVRIMENLTQAAADARRDPPIVVLLSLTPGGWAWTYGDCPSLLLNSLMPAVGHRSVFGLVTPGSSPIHASAWGLLQ

SEQ ID NO: 993619 - protein, 237 aa, Homo sapiens
MRFLTVKVLAFVRAVWPLLSAVWVDRAWVAGCRRVAGMGMRGIDAARCSRVWGLHRHWGTRGLMNLNECGASESLKPLSVRCVAMMESSEWGDLVWEVKRRLSWNCTDGVWRWNCESLSDEYAGVTARLGVGIGGLAKDKKSKRCEIAEIRGSEEWQYHYAEKRRQKGTDRTEGPVTGKSDEDHVIPTGVLPFNTENTITWSHLNEKYKTRVECNTTNRLKSKEVTTGARHRTHAPE

SEQ ID NO: 993620 - protein, 140 aa, Homo sapiens
MANTPTRPRGKPNNRTLSEHKNDAANNITTVGEGRQHEERLLRNRNQLTKAKEAKQEWTTVNQSEPTAHGTRTEQDQKQKTQRQKTKKETTSTDKTTPTKTHNTHTDARTKQKTRTTNLENTRQTKQYKRHHARANKTEK

SEQ ID NO: 993621 - protein, 449 aa, Homo sapiens
MVRCRHLVSARGGCVGVEVTDKLGKEISRPTHYNFFNVNHSVQDGRITLHKHALGLGLLARHDITAKRGNYVKGRVDRRLIAGLLKYGDVPSENTSRDLVVRPFHSAFARAIYVVTEKGLRTMMLKLWHGGRTLLAGIRDTPSNASGRLLSVSCCLSMCSPLGLQGSRFRTTVAAAVQVAILWVCERNVGAVPELTSRVNHHQSCCLEYCTPRYTPSWLAWVEPVRTLAAKFEEDNRPADGCRSAKLHSGRPLEIRRVSWLLNPQEGTTYDPVDQQQAEESNNSVQPQNQIEFEGSPKTKPLNLVNEPPITRRLQYYLKGALNPKNSKPSSKWRTLSKTQKNREQHTYPEKNTMRHTYLPRAPQHNMTSKPNLANPLRLKHPGTQDTENQGKDEQQEHTITSRRQDTNQRRRQHVDVVSLLVNNYTAQTPTKKTAHKDKHADANNNTAR

SEQ ID NO: 993622 - protein, 250 aa, Homo sapiens
  misc_feature (108)..(108): Xaa can be any naturally occurring amino acid
MRSLDSDSGTTAVVALIRGKQLIVAKRMMILAVWYRRGLAKALMTVSYDHIDLEDDKYETSTTRECWCARLTRGVGEIRRGSQASPGAIGDHILSREDKNRAEREEQXDLQSFRDKSMVLDSRLSRGMQFNGSLALCSGDSGMWLEQPGEWYDFDSIREISAVVMINGELRVVSSIVDELLDQCLVPDSSGDGTGCDNIELHSSWCFKPLNRVESPGREWEAKTTRRCSSTEGADEDGDRTYKYEARIEY

SEQ ID NO: 993623 - protein, 357 aa, Homo sapiens
MSRHTLLPAAAQAPGKCLAESRGQTDSGPARVERTQSRSPSNRHPGCLDSQSIQDPLPSQQHYSSSKERVPCLTRQTRRLTTRLTNGSLHEPHDYPQTTSYPSEAPKRRRPRTLWSPGPPEDTGRPALQSTCPLTLHNDTRSPHGRYVTPSTPNCTNSTGGTPTKKHTNIVSPPIPKGASDTATRASTLAATAIRLWGRAPPRQAYLPTHGAPNARTLTLHITTITTHDYKRHYPATDTRLTPNHFLNSAQHHAPEHSTTTPATAPPTIPGRRDTTPPPTPTLNHDPHNTLASLPAPHNPPQHPTTHTNNPTPPPPPHYRHPNIRYHIPPHNTNTPYTIPPHKKQPTHHTLYHHTTQ

SEQ ID NO: 993624 - protein, 146 aa, Homo sapiens
MVDPAGPGSAVAWAARHAGTRTQQQGWQGAGPKHEMREQPGPGVPEQPGLESPHDPPRRLWNAGPSHWIGGRKHSKSNRRDNTWHKHETRHITHRPTITACFRDHREARRTNPGIMANARHRHSRGRNTGTNTERETADTPQGNEN

SEQ ID NO: 993625 - protein, 407 aa, Homo sapiens
EDPPCFRFTNSMNQEKLAKLSGSGPDRGQGYSSQTSKKVVHRTATADDKQASEFSKKTGCEVISLVLKQVNMINACMGTDSFHFNNPKVQASLSANTFAITGHAEAETNHRNASWNIKSACVLDSFNKPIGKLAATSSHGKSWPSKATNNPEAHCMQEACMHVRASCSKIWMRHPTHCKLHSTVRLCWKQAWTQINTNQLCGSKSPLQTIGATSPVHKFSHSSPLRASFTSHGRTDTRTHTRDQSRNNAHRDTYPPQEYTQRATHNEARTATRTQAHRHTAYRQNKGQPDTKRKQGEKQQTTAKRKKHNNKYKETDTGKQRKAVEPGAQRHANQPTRHGNSAQHTPMKKTGRRVTRRKRQHDKTSSERQERTNREREQPRQARARITRLANGAQMQNTEKQGKLTQQ

SEQ ID NO: 993626 - protein, 106 aa, Homo sapiens
  misc_feature (88)..(88): Xaa can be any naturally occurring amino acid
EVPRSRIVAPYLLTSAKGLIFKLEVRDVHNKGVSARTQSFHVKSTRLVSFNEELQPTRRQHHMTHNVREWSLSEVWVLVYFSFSLPPXTLSCSVTLELVDCKLGTM

SEQ ID NO: 993627 - protein, 95 aa, Homo sapiens
MTEPSTRQAGSDTHKDRKEDTGDDQKAQRVKGALEDTTRCDMKTLNTSQEQDQAELERKQPGERRKRRKKRAKTTTQKDSSKWKNEHKRVASYEN

SEQ ID NO: 993628 - protein, 471 aa, Homo sapiens
YRCDLSVFQLYSPAGSGGRNLTTTGHHSRRRHQQGGVLVTTSCTRPTDKEDRWGMVDDRVCKKCPPQRLARPRGTECRNVPAHTSSYNGLCSSTSTLRRSYATPHCMQTTHGPWNLNGSTPTLQLAAYTSHRTTGCATIHAKSASADHRAITPADEDLTTRWTAARPAEHPPNATHPTTCPPTPLAKRPGSRAPTDTTTGDSPKKNMHEGRIAEPVTPGQDTLYQTDNIGEADQYRRRGTISMRHTHAYNGPLQQNHAMPKQPPPHLDQDARPCTPGPPAPPRPHLNRMEIDNESGNPNGQHPATCENEHPPGVETVTTHYPRSDTLLPRTPQPRRHMPRLSKPTREHDKPTKNGARINTTCKPSPSLTAPQHTPSHDPPPPRHTTSRPHTCPPPQPATTCPMQDTDTHHPLPARTHTHGKNSTLDAPPPIRQPHAAHSTAANTAPQHRQHPSQNTHAQLIPHHKERHTEY

SEQ ID NO: 993629 - protein, 147 aa, Homo sapiens
MRMMHYTYVAVTFMLTINHIYAVWSTPHAVLVHFGPLNHHYDTTAACGADGQTYSGPTPAGVRDTPDRRRTQESHKSTRRGADATHRKGQTKQRLREVRSRATGYNPSANHTPHIPCGDPQRSGPTQAQTTQSVRPHITNDPTLCSC

SEQ ID NO: 993630 - protein, 168 aa, Homo sapiens
MPLEIASYLAEHGAPFLMDFQSTALLARERILPPCTMDVTKLLGPTGFSLYHLLCTYHMWGLLLPQRDPGPRWVTHPRGRPAAHISTETRREQPDPRHPAATDNTRTSALNMQTGAAPRHPIAAAVPDSRTTGTPPAPVATKCKPDRHTTKTTLAQDRTRPPNTRAAP

SEQ ID NO: 993631 - protein, 429 aa, Homo sapiens
MSGTSCETNGQPSTAHWTLELIGSLMEPLRYSCVGRKPQHNPTQAIAYEVAHLASIPRSMPACIAKSCSSVSMRTAHTSCCAWPQLHGGCANLYDTIASAHTPPGTANTHFGWDNIPYTFSRREHGTPSLSARMDLNPATPENARVTIPLPSRGPLADTISLPHAHQAAQNALILSAATLPVGNRQRWLRAFTSTKERNLQRQEPRTERSDLSRCHHTGRQTNHPSQPTTPGTTQDTPPPLHTAPPRNTSGSTERDFTNKNTGGKPEATRTHATSPHNQTAGDEPNARNKKTNTHNRNARTNKRNTRNQSPDTPPGTATEPPPHHHQDRDHPQPATAHHRHGPPQHQDNRILTLHRPTRPTDKPDANTTDTKRHNRTTETHLKPRQPERGNNAISARKQTQEQHATTTSTATSAQTPPHNKPPQTSITH

SEQ ID NO: 993632 - protein, 152 aa, Homo sapiens
MYIGPVLPSSICDSSNRRNPLANDSSTVTHLLSLARHWGRHQASYGTDLARLTIAQRPPHDTRGDNGVTWRMDQQPRIRTRSQVQIHNRPGYRIWTSSSTKRTPERRTEYTKEPTRRRPCVATRRMKGPIGQATYLSPTDTAPHHTPDTTHT

SEQ ID NO: 993633 - protein, 296 aa, Homo sapiens
MPGFHSTPHIILASSHSRSRHSCLDNSRSNNKRLGPTTESILRTQVGITQHGRYARKHNACLSPPPQRTHKPRTNTRMLRTHHPCSTAHSACAARLLQNDADKPITANDYAPPLRRLRHRVSIAATLNEVSYESETPPSPLVTTGKPLTPYCGPTCVTLVPRCRNISRSFPWSHDTRRGDKRTFYPLLTPTPSYLACLHTHTTEKYPLGHVLRSLIASPTGNFRPHTPGPSNAPPSSEIPSYHSAFGAVIPDLPTRFGSHWATRVSYALASGLVGYPGPSVARGPLGMVPPVDSAL

SEQ ID NO: 993634 - protein, 214 aa, Homo sapiens
MSLVYFNSYYTIVMTTGVRKRHERVNNLPVVDYDISRIVPKTGFTNDCRIMQWGSHHAAMNSLSPNPFSASLPPPSTALTTHSRPLSCSATPSRNILASTPEHMMSLAHLIFLPHSYTKPSEVSTNPLLRNANEPTNPEPSAGQPGAWTRNSMLITPMSSTVHTPQGHRLTPSQTVDPSAPHSGRRPPTGGRMSFDSAYSRRHPPGPPAPPPPL

SEQ ID NO: 993635 - protein, 203 aa, Homo sapiens
  misc_feature (73)..(73): Xaa can be any naturally occurring amino acid
MGLCREMADLMDQLVEQRYDVFHTHMVIVETLSEDHNSLVLWSFQYIIITIIYATYDIDYCPLCFKEFCYYLXIKAAKIMSYSYPDELVIIFTSMDTLVRGEMTELCNNNLLGRDESGGTQEASRREKTRCWLYLLVRPKNRKGRSWAIGPRAQGEELLARLLGMILRDVGHDGWRVEDSSLWRNSEGGSTKDYFVGLPVIYG

SEQ ID NO: 993636 - protein, 249 aa, Homo sapiens
MGKVKVGVNGCGRMGAWSPGLHFNSGKVDDSAINDPFMSHQLHGLHVPSMIPTQWRNSMAPSKAENGKYDRSMEIPITIFQERDPVQEIKVVALTVDRRRTIAIGGTSHLDDLSSANDWDDKGIGENYNFLHQGERRPQQKVDTSSSFHGSHKYPGDLNLDTQAQEGIDQITHMATNGVETTPKMGKRQTGSIGNHAAHHGDPAFPKKDQSHTASQQDNTVGTITPSASTHDPETLGMINQHAPVGPKG

SEQ ID NO: 993637 - protein, 445 aa, Homo sapiens
MPVLSGCSHGAAYFYLRPTSLLPKCVPTTDGRYDGHGHEPPEAPELLFSDCELKADTDYHFKVDSLMTTEHQLSLRTRPVQGLVHRMSRTLVEAERGCNYRRQSHLHSTPLRNSCNNVCTAQQVFPLGRHLGNNTHQLVFKVYSVRSRAHVHITCDSTLRSCGTGTNCTDVHEADPRQDSARDTHLYSIICEQRATGPLPTAANTTGTTREHSKNPACHACTECMTALTGCHPGMPAGRLPDSSKNNTKDATTTPQDNKTHTTTQATRTHPNHKTRHNAPKLATGSSHTPPADQSPTAPGPPKKATTHTTNRTRRPPRKRETGTTPPHHSRPYRQATHNATQRSEADRKTAGHESRRTKERHAARRPTRRPRRNTGRQQDGETETRRQSRERTGDRGRQDRGQGKRTTRTRTGPEPAASPHPTGEHAATQQHRRRTEKPTDLPEQ

SEQ ID NO: 993638 - protein, 376 aa, Homo sapiens
EGSQARLRWRGSRALTPDHGPRVPTTVWPGTAMIKAIRKSSSNARARRGLSKLLPGPTVRDTQQRHHQGDFPFWYLRENAHTASLTLPSKARTHHIGTDLTHNTALYYDIYRNVPTTALLCWTLFSRTADTLPHLHTHSTLPTYLCLDNPLSTTMFKTRLLPLQAWDLGLLTHMPHDPTSRFTQNQLTIRPTTTLPPACGGAQCATSAKNTTSTSTLKNLYTTKAFELDHHHTTRPGTTTSSHTQWASKSRPMTSRRPQVALGHSQRRSVTEQSTQNVLSPAEKIALRTIHTNHYGMTHTSSTYNEYAHTPPATISRNTHPTSHPHRGPPNTSDKNTHGHHQKAPTTRSPTVTPKQRTHDTQSADNRHTPHPDPRH

SEQ ID NO: 993639 - protein, 220 aa, Homo sapiens
  misc_feature (94)..(94): Xaa can be any naturally occurring amino acid
  misc_feature (98)..(98): Xaa can be any naturally occurring amino acid
  misc_feature (139)..(139): Xaa can be any naturally occurring amino acid
  misc_feature (143)..(143): Xaa can be any naturally occurring amino acid
  misc_feature (202)..(202): Xaa can be any naturally occurring amino acid
  misc_feature (205)..(205): Xaa can be any naturally occurring amino acid
EKVVSIKGNSLQVASTPPGTQGPPNTLESSPAVSSGWKELGPSRDETGLAMGELFPIPKILGMYAPIAHTTYNEMGDAGPMFWCFKQTRLYHTXCGFXVHTLDTQKCPHTYLWSHRCVRHMCVWTETALRGSPLYYRVXDRVXSQSPDTLSASRDIARGVCVYVCVDKCVNSRCGVHVQTPTKAMYHAGEPQTLYRKIYIPXARXGGPQESMIAAFNPQD

SEQ ID NO: 993640 - protein, 242 aa, Homo sapiens
MADDCRCSGGARGPWWTWDGEPAVASAGGFGSGIRGRGLRPVDWGRGLGRRSSAGGKAEDKEWMPVQPSWAAWSRHMKHPSPWRQHLISSPCPFRNQQIIDFFLGASLKDEVMKHYASARSQHPCRPSAPGSRPSCMHNRGHYNVQRQDLGVHSAPPEVATDTSSGAHPSMDKLIHRHPCAEATGRNKIGKDPKTCPFAKGEQAELRVLVLVRLIAGTTGGTGASYSGTLLPSKGCSMMGWI

SEQ ID NO: 993641 - protein, 135 aa, Homo sapiens
MTTASTSQVRQNYHQDSEAAINRQINLELYASYVYLSMSFYFDRDDVALKQHFAQITFIHRISMRQQGTMHEKTACKLQNPTQVARHLPSRIIEETQTVHALGSSGLECNGSVHYIKAKKCAIQSITGTRTNMDH

SEQ ID NO: 993642 - protein, 337 aa, Homo sapiens
MRAQNRRTTNKRKNQTKQQKHHETKKRGTREEGEPNQSDEHDEKHRENHRNHNTTQYTPNDDTRTKTKPKHHQAEKTAAMYHSKPQSEKTKATPKKTKDHHPTLDEHSSKHKHKRTRRDTPGGNDTEYERTHKEADTNTKHGNTTQHKEKNKPTRTATIALTQMETHKTTTKTEDENTAHTKAPQNQKTKEKKTKKRKTRQTTTHTQTPQREHTQKQQTPRTTSKHSMISNTRNTHKKEGSEDRTTRRHRKSTQSTDKSRQRRTDRKTSHTQRKPRRTERRHTQQQREARQKHTQPPDDTHAPQPQKQAKEHERHSHPHNKKRTARRTQGPRRRADQ

SEQ ID NO: 993643 - protein, 219 aa, Homo sapiens
TRTETCQTIQGQCCLNIHIAASSARMCCLDPQTYTTGVCCLDAHMCRYGIRRHTCTDMRPGHTDNAALTRTSARNIALEHPHTLPDEQILVVWHPRYCNMTEYGVPRTTSNVCAEQQRLPTGRRVNNAWPWHNDVKIMRVIAQQLSRKTILVRYHSHSYDTGNSRMIADITSSGEHIEQHCGTTTTMNKCLAIQIATSTVQGVFAMDRNKQCCSMSNAS

SEQ ID NO: 993644 - protein, 248 aa, Homo sapiens
NRVNGRTGIMSDGPALLLDDSNGTLALCLMQIPNREEGEEYEKISMDVFDDRRRCPALLGTLRNIHSPAFLFIPTRLLTADELTIEEHEVLASDDDGDHGQTGYRLEHNSWPSGYMCPEKYLQFPTSNSAPEHAAEPMDASGQTDTQRPAIHGTQNSYSGSLNGDARGMFVQAPHSNNPPGQDKTGCKLISAPEGRTKSRIIDTTDTTTDEAWLLWKANTNERMESTTRAKRKTTSNNKDETPRMRTP

SEQ ID NO: 993645 - protein, 113 aa, Homo sapiens
MSGQTHTTKEPKKADSKKNNNKKQKDQTTGEETERKIQEETEQRGGTHREGGTNTHSKTQGTDEARRAGEERRATTRETRAEEKNRPRERSSQDKNQHTDKRDRESKDANKRR

SEQ ID NO: 993646 - protein, 237 aa, Homo sapiens
MTVGPWEFKYNISQVAASANFTLFGGHTGVKLITWLNKNTNTKEGAAHGYQKRRVYRPLGGGAPPRAYNARLYPHTGYIPVGAPPQGGGPPLIIRAAEELRHNYTNESALKGPHAWGPPENRIYITHQQGGSESGKRVREKTNAARTHTPVGREHPPSRGSKQRRNHPDYNPIHVWSGGGVTPPLHLLGGRNNNNTTPIHQREQIFPTNGAPKSGGTHHFHHNTARPQQRWQPTWRL

SEQ ID NO: 993647 - protein, 387 aa, Homo sapiens
VEHLLPYSSNPANPKPKRVYRSAYDYEHSMTWQGNAVKRDSGIWINGFDYTGSFITVTPSAFLRSMIVSELTVRRSAPLCGCSVGIFADALSESGKNWISFLPQKFHPRNRSIISELISKRDRAPWDCYNKLTFEAHRTKPYVRSSVRAHKGSTHFSVVSMAMAPQSQVKEETTLYFNSHGLQAICMAGQDKKCRYQKNILTEWSPWTLLPISVWGRQEIPSTGCSEGQRSQIGHIHLPGCAHYEHIEFHSGGMKPKRIATGDSPMCTGATNLYVHDATTEQEYTDTSQERTARRRHEDTNRQGKQITHNQPENDSNRKRQHRKTNKKKNRKDRRKGDDATNDEAPANKTEARQGKGNSKEDTDNKTRKPRREHNKIETIKDTNQKG

SEQ ID NO: 993648 - protein, 142 aa, Homo sapiens
MTPEPFSSHGEARRVMQLNATIREQESIFSYDNVPYNYRTLELKSIATDAQSNLIQYYNGRVITNDPQVNSPQAECDHLSTDAVCIATKALEIGRLKAVEGNNIVYLISNNSLGKGSPIHRKRTFGYLNLCIINEHALGTFI

SEQ ID NO: 993649 - protein, 227 aa, Homo sapiens
MARCNTRKHIPRPPHTTCPRKACRVRDNPIYYLRSFLASRGFFMSLLPLQPSPYPRNIGGHMDPNRHHPVNPRRSPTPKHIRMTRIRSIKSPELHPISLIENNRNQIIARHHAILQLELGLYLTLLQASEYCRVSAFSISDGIYGSTFFVATGFHGLHVIIGQLSSRICSSANKYFTLHPKHHFGFEAAPDTGISLNGGRYFRMSPTYDGALTHNPRTGYHHLRAKT

SEQ ID NO: 993650 - protein, 145 aa, Homo sapiens
MELLPELWLRARSNEHAPAYGTKYSDCWPLDNHGVSTMPIQCSEALSGEKNSTVCILNLTYKSTCEVYEHCTVRTELNAMISMIFLRNHSLIPGLGYQSPDEAKQSERLKARQHTFPMSTTLVGVPVRLLNRQHDLGLWDRPRLS

SEQ ID NO: 993651 - protein, 188 aa, Homo sapiens
MACKKNTETSSQQLHSALDEFVDDNGQPLYCVKEHEDSGEAPFSSTKVKNKGKNKKAKDSKAMSVGVWNNFSNSKELRISLQVKNLGHPKFEYWKAHLARALSNLREEGNKKLVDAPLIDNTPRNGTNVARQSKTSHMVETNSDTKQKQGFAHIRSRTLNRGGEEHRQHHYYEQVDSRRIIAVNSKSH

SEQ ID NO: 993652 - protein, 248 aa, Homo sapiens
MPQLLPDFSWRIPRFPLVRGHSPRKHPAGVLPATKDISTELCAVPGSDQPCGYPESGKVLSAGVLLALSLFSPSFCFVFLKSLALLQVQVPHGLRLQKNPSVWQAYGEDHTEKMNAETPGHGSEPQRARHQTDSHGCHPTVAAFTFTWNFQNLRVHLHPCCPSAAPTHLYAVPAAFLVLSSIHLPILDKVLTHLCPPFLPLFPASLPPTIFRSTPHSPSTTLLSLVSHTLYGHTTFPLSLTYVSPRHL

SEQ ID NO: 993653 - protein, 268 aa, Homo sapiens
MVLLVTNNILIKNFCCEPVKKQSFSHTTSLILSHVALSDSIFSILPAPPTLSHTEVNQEYLITERDPPGDYRKSGCVLYLDSNTENYHHYKWQTSTYNDTLSKHVGNVNNGISAPVKIILCHVTYIFGSYYSYIIIYYLILRPTRYTPIILMHRTYCVLPGYKILVRDKTRDNTNTRRHKPAQHNERQEPQDYHDKGTRRETSARNAKSRGARKTREGRGGERRRPGRRAKNTENGQPTQTQQAEKTRRGGTKDTTAHGAPPTGAGQK

SEQ ID NO: 993654 - protein, 154 aa, Homo sapiens
MAIPNAYRTNKFLGLYYNYATGPNVVGPYGLLQPFLLTPIKLFTKRAPNNPCHIYHRPRLHRPLPDHYALTDRSFLLMNRPSSPQLPQSPCSKLQIICLHIYSKTASSLFRVSTKPSRSRLKASKIKIYTHEAGSSLEKRDIAEMKSFILKIIP

SEQ ID NO: 993655 - protein, 282 aa, Homo sapiens
MQQRAQEQSGGKNTKSGAKQQVGGQHTVWGERGETPPPTHNTEAEGGGGRGSQTYMWGGARHHNSYPKTKRGADLILTQTRPPDGRGKNSHLSSQNDFTTNEASGAIKPGGGGGRAKPPTYDGRRRGKTTTSGTDARAEAGTMQAQKKNHAGRYAHHTLRQGERESQLNIMLRYNKKHNFNHINTGGGGEEPEADCTRDKPIRQQNKTLPTQRKQDHTPGHHNQAKPNELAAQSAATDRTTRMRHSATAAATHLHNKRRRQNANDTSHRSTTHTVQSSQHKT

SEQ ID NO: 993656 - protein, 305 aa, Homo sapiens
GLTVARSFSDGPLPWARGLCSPHYNSHGAAGAAPLYPPSWPGRASISRSGPPAAGTRAMGGERWRMWSVGKRHMGGGNAADFISHDHHIPVISRVIHDRKVSPESVLSRSTEGRRLVLSGHRRTRVSLFIVPSHAIPTDHGSGKDKESTDLQLIDPNICTVNSEKLFKFLADILPTEDFTLVTLPDTIAYRDTVQKDMSDRRGRYSDEKMARGAWKNGGKRRTTQKRHENDRHDRKGCGGQQEQERPRELLARGATKKIGRLMTPQKIVLAHTGYTNKMQRRPCVRVFLPEHLGGTIYPTIGVLT

SEQ ID NO: 993657 - protein, 227 aa, Homo sapiens
  misc_feature (56)..(56): Xaa can be any naturally occurring amino acid
  misc_feature (164)..(164): Xaa can be any naturally occurring amino acid
MVLAARSKVQEFKLGNELIPALVFCTARNDVGLLFPSDETRCECNRLEDVEVMWSXPEASMVDSGHRIVHESERIPLSGGDLVCTYSAMALASIASACCVLFVPYVMLRASYYSRHASPVRLCRVWTPHIKHRRAMIRTSRRREVNPTNWRKVRKRRIYAHSGXQSYRPETGRHICLTERLVYREPSPRLHRTEPRITGLAKGSVSVLGVGAVSRYRVRTDTQGMFP

SEQ ID NO: 993658 - protein, 109 aa, Homo sapiens
MWAQSPVFLGVFFFILPGVPQFILGGRKYLVSNNYTGEKKSLIPLFVSRMSFYTPFSGLEQKRVCVEHLQHHTGAFCGGQKQKNSLLSLLALVGGKPGEGCYSARGVLV

SEQ ID NO: 993659 - protein, 113 aa, Homo sapiens
TSVLDGPDGGSTDTGKHIKENDYYTPTGEFRVDREGSPVHAQLPHVLRCVELSLGQVYTEAKRPPGFEAVSENAEDGNKDFELDVLEEAYTTEHGLVRIYKVKDLDNRGLSGT

SEQ ID NO: 993660 - protein, 231 aa, Homo sapiens
MHLSRIGRLWEGGYTLIGCHLTGEPPSSGNFFWSTLERNRSLEPVGHRGIPGQVSLAIPQRWGTRMSARVASAGNTTLMSTVWSFERTPVTNDSQGAGTTLRIKRPRGRERAARGHTADTILGSTRISQGNPAPGYSGTNWRQRGTAERGHLEGRDKTDAPTTKIKTNTSPLVPTRNTEAKAMRIHTTSDRPPHHGRHSSTHTQQEAPATTALTDEQATSRTELTPEHRQP

SEQ ID NO: 993661 - protein, 364 aa, Homo sapiens
KQALLASDAGRCNPWKEQRPAMSTQSMAWGLLNSERHSVLTWIDQTRFRHRLFDELNSDPFVGVCEWQQRTMKKEAGGGGVGGPGARGAARSGSLAQIQSPTSGTAKQRAHRKSQKGPAKNPYAPQRLAMCGRRKDGDVSACTVSGFDEDDTELNDDDLDTTWTVTRDNLTGVNGTNNLEGMTSKRSRHLRDIDSIRKSHLKTQGERTAKFSSMTRLDLLNRTYCEGQWVVLWNEVEGAVDVEWAEETGYDTRWKNGEVCIGIVEVEDLGLKHAGQTVEVGDLTIGEPVRENNCTGFTSMVMWKHRRAEPGYPKCRTCNIGDATLKRSPEGPNNTGPPAGRTNARRQHTHANTRGRQARATHKD

SEQ ID NO: 993662 - protein, 172 aa, Homo sapiens
QIRLLIRQEGRGGPEPGQEGRGDPEPGQEGEEDPEPGKKAEGAQNRQEGRGGPEPGKKAEGAPNQARRPRGPRTRQEGRGGQNQDKKVEGAQNQVKKAEGAQNRRKERRGPEPGKKAEGAQNQAKKAEGAQNQAKRPREPRTRAKKEREPRIRYKDRRGSGQKGRQESQPTQ

SEQ ID NO: 993663 - protein, 174 aa, Homo sapiens
MRATRREDTHQNTPEPPHATNTHQPIERAPTKAGERRDNHQEARKNHTPTNDTQSSLQKKTPTQKKYKTTSQTTRRGNNQSQDDKKRKERRPQKQKERDKRTHRDKPKRSGEKTNRHKKVAQASNREQATNKDEREGNKDTKGPDDTTTNTTTPNKTYFQHNQNKKKKQETTQT

SEQ ID NO: 993664 - protein, 329 aa, Homo sapiens
MAKTGQGVGVTGRYFLALWSTAEPVSQSTTSDYQWDVSRNQPYIDDEWSGLNGLSSADPRGDWNAPAEEWGNWVEKKELHILQSQEPIPDDQKVSDDDTTNRERELFQLGNPKKKKKTNKKHGEDNSTAQDTDRLQNHRDERRPSSESPLKTVQQPGKSFCLEDHKALVIQRSTRRTNSQPIKTLPSCYYYRASVILSKQVILDRSSYQVPHILKKTDNSHGRITSKEVCSLQTVGNKRIPCHYKEKQRAERKLSRMAWSEPCLKKSEHIGTVRGQTEQLEPGSLTADNTERNAESRAMDVYHNAGRNATRHREERRSADQDTSEILIP

SEQ ID NO: 993665 - protein, 480 aa, Homo sapiens
  misc_feature (345)..(345): Xaa can be any naturally occurring amino acid
MVGVSGIMVVVWAALGHQGLLVKLLVKDGYLLPSMTPSVDLNYDGVTCSGMIAIPWANSSGRPVKVVTNGRALSVNRKIPSLTRSRMLRSPPEDQDGASAGADVASWSPVAVFDRPVAEGWRLICQGGSLERVDHLLSPLLDCRPMYRRCGVEPDDEVLSKRLKTRPGMATCDANNCLGTPVAKVHPMDHFGVFVRQDFIDTSPDAFNVNPKRSVGWAPSGENCGGEKGPPGVSQGKVFSLGATRGHGTRSEGGPGGKPRKIRNGGKTPNGDSALPRGTPQGRHFATMWGTTKTAVLRKTRARLLYETHTINGEDVHNRTDQQESLIQTKNNEDINHNKKDELPXQAGRGGTATTRLDLSDKRTEETREIAAVRRKAAHSGNRDAGCLLLLVSFQWGLSRAVRGASERRYNYRQTEKRQLRRTELTREQHEQQNTAYTEETVARLQVGARLANDSDELSTSTERRGGRLRNKTQQRTYTQ

SEQ ID NO: 993666 - protein, 109 aa, Homo sapiens
ETVSGNTDLRVIEGVGLDTHLCVVPNYSITHEAEILRKSVEPEAARCDASIICQKNYKTGKGVRIIARRDNENIQGGYREKSLGGGISLCNRHSIEIWRFNGEDVKEII

SEQ ID NO: 993667 - protein, 50 aa, Homo sapiens
MTKEKRGKEGGQTEERQARTAAPGRREGERESGKPARPEKQADKRDLRKQ

SEQ ID NO: 993668 - protein, 104 aa, Homo sapiens
RPTRRHASGSQHLHYEFPHISSGCREKTEEDPNKKRKQEKKKEQEKKTQKKGKKRTKEEKREISKDNQNADGPCTGSAHTTVTPDGHRTKDTQVTTQLQGSHWR

SEQ ID NO: 993669 - protein, 358 aa, Homo sapiens
PPVTSPKAALHSPVSEVAPVNSPILCAPTFPPCCPGSGTPPAAADHCCLRMGTPVPQNWVTLEGDFVLMLASRAATYAPDLVARIRMQRIRPTCLVHHVHRDAVRRNHRGDMRLHDAILHLAHGSVGKTTSGHGACPATLAYSQKPPDAHSRHRSRRQQPSRGSSIHRMTHACSRCDAMRRLQATLNDTMRHREHRTPGPYPELPGCGEAPEQEKQAKANPARESRADNIIPDWKTEALETKAGVDHAQQQLAERSETRPPHSGTDAEIQGNPEQQIDAQARRQHNGTREQEAADEEADTEEDHATDREPDTGTERRTQPQPYQAGYVRATKTDTQAEKHGRKRKPDENDTKHQRHRH

SEQ ID NO: 993670 - protein, 342 aa, Homo sapiens
RTRSRKPDRSEEKANAVKREERRITAGGTESRDEDNDMMKVRKNIVALFKEEKPVCKIVKYNLKRSIQHRDPDAFLMRCTRPQPSPCRADHVRYCAGLLTLASEPASLPGQAGLESCPCTDSPLVFADWCTFYSLFISVSRFSQRMTIQQHSSRVIRAFTSYYFSALLANAYLHTKPSARHPAAVRLATFSQCQNHCVSLCPTNKLQHANHNGKSGFDFLPLTAELDQTLTHSPTNTHGTAYCVRILHSSTPDGLTPAYMPARTPLRRPITIKTCQLELTGPLIRLALSPPKWLHFKLIAIWEANVSQNTLLSITRHFKLVDTSHSPAPHTRNTLPTEHTLY

SEQ ID NO: 993671 - protein, 143 aa, Homo sapiens
MPPATAPPTLHHPALNAPSHPAPTTPPKPTQRPGTVFPLAPHTSTISPLQTTSPLPITTSRPLRFPGNPASSLGDSAHPSSATTAHLHRPALATTSLGPLALPLREAPHAHSSRHRVNSRTLPPSSPTHSCATPTQPTLPRPT

SEQ ID NO: 993672 - protein, 274 aa, Homo sapiens
RAHVHRLGAFRLLRECATRPEAWGYTLSRARCLPSVKVESLTDCCECNSSPNIPYALCSRPRWANSAPGLPTVFLDEVSPMLPTKNVTVTYGGSSCNPQRTNSGNRLLRWHAMYQVVQTIWLVMEETSVCKLLAIPNVFWHNLYTTSPSRLSHSLECFDKGSPGKTPVQRTVSQALKDLHMHLPRKVLSTWPTWPAVYDKVPCLPSFQILLYLCTRQQLRTHLEHNRVEFTVLLGTWEHFVITCQVTRGGRHQWCAHLLRLPNAEQLLSAPREQ

SEQ ID NO: 993673 - protein, 104 aa, Homo sapiens
MVQFGLRARGSHLVIPALWNDNGRGCTEVGVQTRRANGKTRSIKIQHSRLGGALTDRGRTEPDTGGGCHNRPRGRTSHNRTVKSGQQDELSTTRHAQEARDTQG

SEQ ID NO: 993674 - protein, 137 aa, Homo sapiens
AHAAIMAYQCLTVPLISDERVLGLRSASWCLGSSLRVLRRRKLSCTMLVTCSVCCYLFRLIAISGPSQASLGDPQMRKMKSHLVSEVSIGLEEEDMLYRAQSWRSARMRMPSRCKITLQSRSLYLDLPVRPLCALKR

SEQ ID NO: 993675 - protein, 135 aa, Homo sapiens
MRTLEGRRTLEATPKRRTEEGRHQEKREPIINKQHERRADETRDTKQEREDGEQTRGKRRRKREEGGPPQAEGEEWKQQRGEDNKQPRRKDTRANRRGKNKHPEKKERTEGAKNKKRKKKTGGRKGEKRRQKGET

SEQ ID NO: 993676 - protein, 44 aa, Homo sapiens
MPRCLQDHGELGASGKPLVPGPLKNKGENFPNWVETPSTGGCQP

SEQ ID NO: 993677 - protein, 90 aa, Homo sapiens
DEGGCNVTMIIQDLQILPLHPVREPRRNVLEFRDRKVMEYENRIRAYSTPEKIFRYKCAPGKVIRVTSLAGKQNGVFMELPSKTFSAESQ

SEQ ID NO: 993678 - protein, 230 aa, Homo sapiens
MFPMKAGSHLSLRQVWQCRWLDRDSRAFSSSLGSGDCPTLGLWQYLVPIGMHQAKTGSYGYEDDRSLTMLPKAGINSGLKQVLQPWAPKVHGIPGMKPFIMARKIHWKTWNTIGSLIKQKIGNNMNDTTVGENKEKEMETANEREVGLPQNKGGMKPQRTRKKNRKRAKKTRTKGEDTTIHRKITNMNNVQHQPQPTKATIQRRQKEAENQQTDTKQKGDQQQRDSSEAD

SEQ ID NO: 993679 - protein, 401 aa, Homo sapiens
  misc_feature (280)..(280): Xaa can be any naturally occurring amino acid
PCRRGPSAVELYNAVLHCFHIAAPKVDNCVVPHMYLLVLMSAVIYGMVTMGYGADRHAIVVSALIMINVQQVVLASQKTGEGINMGLLEQIVGDTHMQHTLYTTKGFAIILIAYKLYLGTIEPYIGIGKRHIGYDQAAQQRPPVGPETRDLAIERPSPTFRSPARICLNVLHEDRCVEYSRRSKEILNTNSVVCGKLKRKINTLKRIATYTYVRKKNDNTGTPYRHTDKGHTQENRALWGVVPLHYIHCLKPAPFSQFAFGRNQGNPLKPSGNVVNVATXRGGRETKEGTEGKTCDKTVKAPGGPPTCCLREEPPVAGGFPLPNRERKGRGGNPKFPEGNHAPTATLFLGGDTADLHTERCDGCRPQLFLSNITTPNFKPQCQRDFQKEIGSPPWIERRRS

SEQ ID NO: 993680 - protein, 233 aa, Homo sapiens
LREERVPPGFVASRDPQALREERGPQEGLGRKAAWVKQAPQDTKVAQEEPPVLLVLVGRAAWQEPPDLLDLPGHAAWAPMGPLGPWTRPLDLMTMEGSGGPFWSTARSADGPQGPPALRATYTGDPGVPGLPGATGRSWTQMESPGFPGLPGREGIAGPQGPKGDRGSRGEKGDPGRTESGSGLLAPGPRDLWSTCRSRTDRPERAALRAAGSQASRTADQGNWAEGERAPGQ

SEQ ID NO: 993681 - protein, 128 aa, Homo sapiens
AKNKSKASALLLRNKGFFKNSVLHELFHNVKEGPRIQDHLKDNVTRRVCSEAQRPPLCDKIEAQAGTCDSPFSIFCRYKRKTRRKRHSLRTRDVKNQRAWVSIKKHRIVGFSKKNTIEERTHERARDI

SEQ ID NO: 993682 - protein, 106 aa, Homo sapiens
  misc_feature (51)..(51): Xaa can be any naturally occurring amino acid
MSRLSSYPTFLDTNISTQSILYNQSVDTLKDNLYYSTSEGENPQSSEIAVXKIHPNARAIQNRDIRVRTLRTKCIRSLTSTMHFHSNQSRHLISISIDNRMAMGND

SEQ ID NO: 993683 - protein, 32 aa, Homo sapiens
KLGDDIDLIVRCEHVFLPSSTSAFVSVPSGFL

SEQ ID NO: 993684 - protein, 480 aa, Homo sapiens
HALDRPQHATSLRWSKYAYVQWLSSVCDKFYMASPDLEIQEINAANIQTADSQWSTSPHHHTEHMLFELFKNAMRATFGKAMRSSTHISHPSQVTGRPRRERSNWTIKIEVTRQKERDVPHIERKNKNQTTIQTNKTIPHANKTNPRPGTQQGTRPQETVPKEKNGTYHKHTDHYSKSKKPNERKRKTTIHPTGNRHTRKPQKSNKQTTKGHLVTTGTIRARRPHTNMEKTTKDNNTEDAQQHTQKKKQKERREDTGSRHPQEKRKTKTTRNHPQHEHQKKGQERRHHRTPAKQKKPGTDRTDKHTHKTETPNHTHPRQQPRAAIAKTRGGTSEKERNKKTKTENSNETETKRTVKQTDTKDASRADERKQSDKKADTGTHTGKTGRNTHRRAQTSNEEGNREEGGKTRKQDEKTRDDENRHSNNNHTKRGQHGTKTTTHRTTPKSTEDATEASETEQKAHSTAETQEKAEDKANRHNRE

SEQ ID NO: 993685 - protein, 206 aa, Homo sapiens
LPAPDVFGISENWQTNQTWGNIAMLRIRPCVNENGDAGEEHPGRPYETIEQENAGVKFPKILEDFRRHPSSFEHPSRDAGGRAHLQVWTRATSCTVNLGHSAPMPPDCGSLKGPAHPQSDCQILRYWPRDMIENYKNDPHLHKINSKTPQLDPPTDTLATTTDSRHETPGKKKLPQSETRRRHTPHRIPTVTRVKNQSNLQPRSPK

SEQ ID NO: 993686 - protein, 77 aa, Homo sapiens
MAWVAHLGLGGYPKLHSRKAGGEENIPWKSGEGGSVAHAKSGVSWPIWPSKPGRTQSKRLPGPHKQYKNNKISNKRR

SEQ ID NO: 993687 - protein, 130 aa, Homo sapiens
GQADLELLTSGNLPALASRNAGIAGVSHHAWPILLFIYFEMEPISAHCNLRLLGSSDPPASALLVAGIAGTCHHTWLVFGFLCGDGVPPCWPRLVSNFWPQVIHPPWPSGHAGIAGMSQPPRGLFFYFLF

SEQ ID NO: 993688 - protein, 148 aa, Homo sapiens
MSDTPLSVPHGRPYTALLQTQHRTGTPRRRQHTPRQHLWEGPHTGETTERQPPRKPRRHDTNTSRALRHPAHSRASIGPHTTTTTTRTVPKPTQQTPQTQPQNNKPLQQHPLAQPTAANKHSTQTRTKHDSNIHQHRPHNSITLTPHH

SEQ ID NO: 993689 - protein, 327 aa, Homo sapiens
RAVGRVPAVTSASVTGSAIAATRLVCPSCGATSPRAIRARTRQSNASPPDSCLVVSCACLLLEQRSLLLSSQKAGWVTYESQKITHNKVHDTRCAARAASRHYGSAHAGIIMVGAQYREFSVAVHMVCKMLVQHVSKVSPIPVQEVAQTGGCILPGTRKSNIASYLLETRPRTPHRSLDWDTLAHQKTVLDESLNRLFGGQPIIEANPINWQTICTQPTNLDTFEAIRARCHTPAKQAVGISPGSFPSRRNLERPHESGGQPHFARERTPTRKQAKSKVQAKTTSSPSGKRPYLALRKGLYRARPPRQGPRTFNYGGTPCNPGHPVP

SEQ ID NO: 993690 - protein, 183 aa, Homo sapiens
MSSQIEAKNMLVYTLQLTQESVTVHLETFLQTGSEYPRGLHNSTLAVPGTQMIFLGGGSALEWKHKRNFVVHQVSGKTQLCMHVGSRCADTKNVSEEWQVNAVPIDTEGTVVWLIEWKTLRLPAVQRPSAYTQYKAKGEEHRKAWGGCHLLIIFFLILLMFAVVTTTELTGPKLSCLQNSFQN

SEQ ID NO: 993691 - protein, 124 aa, Homo sapiens
MALTLRTIGLPTRQPYALCDQISGVGMVTTWLDAYVGNMHLGSQVIGKVHPVTDWKRHTGTHHWLKESGLNYSQQTVQMDETLAHSPYRDVPKIGRMAIVVYAEATRYTTRVRHQAQTYKTPTR

SEQ ID NO: 993692 - protein, 46 aa, Homo sapiens
MKRRARRIVTKRRTVGSHKHEETRNQNRFWTHKKTILLYTSRAGQN

SEQ ID NO: 993693 - protein, 126 aa, Homo sapiens
MLRAPAPPALHWYTANPAEPPKDNLRNPPAHRPRTNTRTTTDRARHTPPPQRRITNLTGNTHKRRHPHGTPPPTKPPSAPHSHTTALKHRTPPSHTTNRKTKDPPRKLPPPPHPRRPTHTRPTTPT

SEQ ID NO: 993694 - protein, 320 aa, Homo sapiens
FSEAHFIRSGNGASVEGFEMVNFKEEGFALISLAALKAEISMQWRFHEECAKRLLNLRKQIQMLCGPVYSGRPNRFKSSGKHRSWPFRIRSCERARPNSFWQPYIQTLPSEYDSSCSTLKEDEVRYLQSITRAIHDVFSQIIEITQLRQHAYFYKVIQTHPHANNYPGRILLTYEDYRWAVSSVMTRQHKYAQRMASRVTLALIPLWDMCNHSKADHYWLHLEDDRCDSVALRTAGWRRSTYGWDRSSQNRDPPARLTILSDRGISRGLSKHTHTPADAQIHQPADSTHARCTNGTQTRPPPAHPDPPTTKTTPQSRSRL

SEQ ID NO: 993695 - protein, 115 aa, Homo sapiens
MVGGPQIKGGSISCGFVDPPPLFSPCAIYSGEQQNTGLWASTEFSLSPPILIGGRASGGSCAVSSLSEGAGNLCDRYNKQPGGVLARYPFIPTTLWVSPRRSRDKENTREIFHPL

SEQ ID NO: 993696 - protein, 72 aa, Homo sapiens
SSGAKIAVIALQPGEGCRKPPWHTFNYVMELHILHMYPKNLNNNNKRSLEVRSSRQAWPTWRNLTSTENTGS

SEQ ID NO: 993697 - protein, 343 aa, Homo sapiens
LHPGIHRTSSPTVLEACSRAGWAGRARSAESAARVKIWRVIPADKIVPCPPSLLDYAGSEFPERVVVTYRRRRYEMPGALRAALAVVSRHPLAFFKASQGWAQVPRRQVTQVASRTTAGLIFQVITGKYTTGDCLNPPRMSVRHRVREIALCHDLGESKRYRDVAPICGTVLVRRPFSYTFWFFLWNTPGNAPLALSISGVLWRDGDVGVEALEGGVGRSRSVVLWHGVSRFRCADVARGVVDSTLAALLLKQDNCEGIPIGLDSLLGVGFAGGWSVVPVVDSDRPTWDTRCKLRRCGLNGRAAAYGGALRKPSDPFSTHLSTGPCTWVVPTRSSRSRFSPLE

SEQ ID NO: 993698 - protein, 301 aa, Homo sapiens
TWLPTLIEHRCSYEERGGFVRRLHEGTWPGHILEHVTLELQNLAGLPGGFGKARETNVRGVYKVVVRARHETVTRAALFAARDLVMAAMENQPYDLDTTLRKLRRMVDRLCLGPSTACIVDAADERRIPTIRLSEGNLVQLGHGCKSRRIWTAESDQTGAIAEGISRDKDLTKSLLETCGVPVPEGRLVDSPADAWDAARTSALPVVVKALDANHGPGRFIDLNTRERNRDRYKVRWKKAGGVLVDRFVRAGTPLLIVRRKLACAVVTVLSSARHPGRLCEPSDRRREKLCPLWPTAVMAT

SEQ ID NO: 993699 - protein, 58 aa, Homo sapiens
MRYTSTPPNTINDRNMTEQRPHISSRTNFALRLIPALRITTTRKRENYDARTRHIYSE

SEQ ID NO: 993700 - protein, 47 aa, Homo sapiens
METHRDSKRADGALTGTLHQQKPTDKEGEQKREKEETKQEHTRSEES

SEQ ID NO: 993701 - protein, 292 aa, Homo sapiens
MQSTFGVKTTRQISEVYNCDLPRTLPSVIAAEQPVKIEGFPTRDTGEGLGSVLITTHWSEWSPSTKVAQLLQGALRTAPSCWASDVTCIVILVRSAMLCICQKSPRLRTAMVGSDSQPSPETASMAIIIQDAQGSQWEKRSRGPRNQPSARHWQEVALKQAHRPGNWQHKTEKGMKIHTKGCKEMPIPGHQPEPSTLLAQGATHSNEQDSGQRRHKQKGQIKKIETQKQCKAERRHTTQRTPRRPKRDRRHKQEEERTKADKTTNDKEKGTEKTRKRKNKKDKNTPNKKTTQ

SEQ ID NO: 993702 - protein, 368 aa, Homo sapiens
MGESSEDKTKMFSTYMLVERWIFMTSEFRMLTLSLRPDRYSTQSVNLTTVWGLNDLNESLNALVKTEDLDALMADLGQQTISEAEQRTIQAQKESLQNQHHIEQLYKHQFSVVQPLLCYGTNVAATGIRQYEDDLPAPAADPVIRPSTAIDSIREPSLIRKRKKPKPRLIQIKVALEKLERRPRVKEARSVKGGNMNDTKDYNVTDVVDEREVAEIVLENIIRENVIVTGNVELVVYENLTGKVTNETVLKDHNTGSEESSNVDMNDATQIFPWKRRENAEKNRKNREATSTTNQATNENEPEPGPPEKAAGTRSSSKQHHREKAKQKRRKSIEDRTPKATEESRSTGREEQNKRSSPVANPPRQDHK

SEQ ID NO: 993703 - protein, 157 aa, Homo sapiens
MLVYPQLTHFSQFDTEDVGPLATIWFIICCLSGPDETSHLKCPFRSKWVLELYKTLRGRLSRETLSCGRPSWTYISFHGDNTTGGLQRIRRAHNDTRLDRGPKGEKTRGDKCNERPGMRDTSGTGQRKRHKSCSTAYYTRQARALCRSPPSASEEKE

SEQ ID NO: 993704 - protein, 143 aa, Homo sapiens
MTKCHMDNKGLVLSGVVVVEGDGEEVGRRGDSRRGRTPVWEDCPGCMTKLRYTATGHTDLEEADTIVTPEEDTHLETYTPPVDQRGDQDFYSAQKWPHRASRGTECRPQGREGSKPESMHPTVLVTKTQSVRLQSRGHTMHEP

SEQ ID NO: 993705 - protein, 256 aa, Homo sapiens
MVNPLVSSTQSSPDFGMLHGGTHRRPLRHYGYLAVLDRRFQTAWMIPGSQIHLLPLQFLSAEPERQRIIQRNRHVRRLSDLLGPAKYLGLVLYVYRCEDGRCSHAPFQRHFTYEPNYGGERPIGYRYRGPNIGGQQLGPLAMLTQNVPDPRTKVRDQRGTPRNGIRKHEKRRTPTTSDTHKHQDTCNRHSTKQYSHRTLTTQTTLDQGETNREEGALKVNDDREGREPLVRLKKEKHDQEARDKTAQSKRGEQRNI

SEQ ID NO: 993706 - protein, 168 aa, Homo sapiens
WRWRGARPTTLTLLPAFSQGPRAASVLHTGNCPLGLELIIVPIYPCVTCKVVRGSDKTTDASHGLRCSIARGKAECAPDICQLLGPLRGNTAKSDEVIRVLCATGHCMWPLVCRKNADVRNINAIKNDKGAVDVDEELQFTNVYGVNREIHVTTCAKWPEHKIHLVLD

SEQ ID NO: 993707 - protein, 404 aa, Homo sapiens
  misc_feature (53)..(53): Xaa can be any naturally occurring amino acid
RTPMSLALTSPEWRLDQTHYSPLSSLDIVDAGWSTYYLVPLIYKMTVGISKDXNSLQKEFRRTVRSHVWTIGGTWASYHVMPGVKRNKTEKPETVQAVSHHSMKTSLTLMGNIWTIMASTYGARFIRVAHREPTGMNLYTLDDYACVQVPTYLRMHPELVIWFPMTIVVPLDLEARFVDRYSSYEYMALNPFAKRLCGTQEHPQERPIGALLLGAFNNNPCGDGLHDSLNLNTLVSRDWPIIRHNKFAVPFHQPIVTNPKTAISKNSPGKPQGPFLEGAHNLGSLGETRDFTPRTCYIIFSRGKQHPGCDLTPQPPGTTPRYTTTTRVPQTKKPHADTGPTTGACTAHTVRRRKPPPGATRPIDPSGGAPTGRAHAHTTVPHPTGTQAPLRHEHRRPEFGRSTH

SEQ ID NO: 993708 - protein, 63 aa, Homo sapiens
MDPEMKCSPKHDRVVMIRVFSNNSWLRTGSKMQGDFGGVYSLAWVQWMIDYGQDRMGPGSINM

SEQ ID NO: 993709 - protein, 110 aa, Homo sapiens
AELNGEAHWHGLPDVTIANVSVVDLNCRHRNNPAQYMMTSMKVVNARQSEGPLKGILGLSHEQSSGGLLMSRSISDTLTHSHLRELGLAVALNDTIFAAKAQLSWYDKRN

SEQ ID NO: 993710 - protein, 144 aa, Homo sapiens
  misc_feature (55)..(55): Xaa can be any naturally occurring amino acid
PRVAHAFGKVVAGEVVVLVLSKSIQLPSSSLQTDMTLIDRLRSGLVARMTHSVGXPTSQRGVPTKTELRVNPQDRLTYSSEFSGDYDPSTRSSSEDYRSESSRLLDNRGTHAGIEVANIVGAILLTKPVCFWRRGSIFSYLSRY

SEQ ID NO: 993711 - protein, 144 aa, Homo sapiens
  misc_feature (123)..(123): Xaa can be any naturally occurring amino acid
MFVSWFRSRNVDSPVHYIEEDRYGQTLLLLHIPYHTDGEQDEQHGHEKRLLLRFRRSSRPVTSPINPGRFPIPRPDTLKFSTDTVNWNFRQSHRCPSGSQQKVRANPWQTIDHKRQRVLRDLXTPTQKRDNNTKTKRGAGARGS

SEQ ID NO: 993712 - protein, 58 aa, Homo sapiens
ADLAQHLNEVSRPALVQLRDVLAALETWDAAAINGAIKAVIGELKIKMPQLAIPLRVL

SEQ ID NO: 993713 - protein, 342 aa, Homo sapiens
TRTVAFLLPPICFQSFFQWGNSAEYRHRYEGEVTDGSARYRYEIDREPGRTAGYGMGHASRATRRAAAIRDPQAKNNNKEKTPTKKKTTQNNQEHPHNRKAGTHKRTTPEHQHTRTTENPSPTNHKQTHNQQQNTHNGQQTQKALKNKDPNKDTNNKTQHNHDAYTATSNTSTGQTKTTYPLKSIVQHDSITTTQHRSHTDPPKDEHNENAEKTGTAPDTPENAQDETQQQSTQREQNRKHDKHNSTATHTRRPNTTEPPSNKQQRRKRRKHQTQRIHMKITRTTQTRIKTTLTKHTECTNNKQTKQERQQALTQENITKDKHIKTTKEHKPNRTHNHNKDP

SEQ ID NO: 993714 - protein, 109 aa, Homo sapiens
MARRPCKICCTEICYESFDAYAFEPRTAEPPALCSVTDHRRTDVPLRITHSVLTQDGPSTNGSIRAESHFRLSDQSVMEELNSAPVQESPPLDMRSWGTHMVLEGGSMG

SEQ ID NO: 993715 - protein, 82 aa, Homo sapiens
MIFTRRIDVDPGAYFARYQNIIAITPGQDELTRKGRKQYKNRLSAGPKNFYNEGRGRIGPTDGQTQGATSKRGRKKSARQTK

SEQ ID NO: 993716 - protein, 314 aa, Homo sapiens
MREGISSPRWPWLVSRLVNAGWELYCLDHGIQPDGQMPSDKTMGEEMSSFNNTFFSWETGRWLASVPGSVWVDLEPTVIDEWFAVARYASGLPRREQPHQQAKEDELANNYSPRALHHGKEIIDLVWELNYVKRADQMLADLSGLLVYLPQLWWGKLVLGSACLLMEVSESDYGRKSMLEFCIDPVNAGCTGVVGPRDPSHYHTTWSDADGAVMGRPEVIYDSPRKGRYEGQQGNVTVIKQMCSIVVLDGGPGCAWRDSSSGATPRIPGNSRDCGTHGGWGRTTVWATMWGPRKIGGGGAQTRRTGQGGPDNSG

SEQ ID NO: 993717 - protein, 331 aa, Homo sapiens
MGRDKTRSQNERTLRETKKGTRVCQTTPIDQTPAHTPHNTTHPHAPPTPNAPHTHSPNPHTRAPAANDTPTPNKPTRPTHPQPTHNTAPPEHHHQPPTTQPDHAHPPTPRTNHNNQLHGTPTPKAAELNHTARHRHQSQPQQPPPTPPPTNNPRHTTTHPPHHTNYTNTQPPDTLPTTQQAHALHQPTPHTHTTAHPTPPPPTPHHQPHTNTPRTTRHPPLDPPKHHTHHTSTHRTDSTRPHTPTSEPLTHGQTTTSNKPTPQQTHHKHTTTHTNDPHKQPAHTRNDTHQQQPHTTQQPTTAPPTSRHTKHTPTTHPEPPPTPTARSYPRP

SEQ ID NO: 993718 - protein, 101 aa, Homo sapiens
NPPFESASHNETYRRIVKVDLKFPASVPTGAQDLISKLLRHNPSERLPLAQVSAFRGVMPENSRRVLPPVCPSVGRRMVPCHSVGCVCMYVCVCIGERRDP

SEQ ID NO: 993719 - protein, 133 aa, Homo sapiens
MRVRAKRHAWAPKWGETCSPTQARHREVGERQKIYPQQTVEYDQRRDTRPQKNYHLRNEQNGANRKTVAHTTMSAANEFEDANRTTRSEPTEQAGEEEARTQEDRQMTRRETSKLENLASARPLRASLASPSP

SEQ ID NO: 993720 - protein, 298 aa, Homo sapiens
QLESEDDTSYFDTLRSERYHRMDSEDEEEVSEDGCLEIRQFLFLLSSGFNKVYSQHGAGLSCSRSAGYQPRPMRSREVRRRRIIHMALAGLNEAESGVWVIGLPLGDITGMRHVVMSEFVSSTESDSKPSNDSAMPCAQASWMRLGSRRALRRPAAPSGGNTLGVGIWGPDMPHLKRGVSGPVTEALRLSNGQSWMRKLLAGDMWFQSIYGEPRPWDLKWPGGVKSMATVNWPCVGPPRMLSGDSKKSACSPGQGSSRRNKPLNPSGKPPGPGAARSHSRHPSGSRGLPRQAPPPPRS

SEQ ID NO: 993721 - protein, 111 aa, Homo sapiens
FPFSSDWLTRAQRVALSMLEQIDPSDDIPQDEDTTVTDVWARRTGVCPVKTRAWSITDALNDPDTVPVLAPASIPKAPTIIRGVMVESDSFMNAVLWLRTHLGTLKPCHSA

SEQ ID NO: 993722 - protein, 114 aa, Homo sapiens
LVVEHDFIMATVSSGSRHRFDGVPSKNTGCQTDPQIPYGLGTEYKIVCLSLKLHAARRSNINYRPRMKRNLEFNEGCRTKEEWKLLFSWMIRHDSEKYDKPFIKRSIYYEFLVI

SEQ ID NO: 993723 - protein, 156 aa, Homo sapiens
MACVCTSKLGAPIQFCPSVPAARCILSRAFRQEALLDEDEALAGVRKGRPDVEGWMLMLMIVPQATSTCTIQESYTGMKVGCISSALCDSTEGARDPFEANSNGHDEDVRVTSALSESTPPHDSYLVDSWKVESCARTNYVAMHAPLYTPWIPGPS

SEQ ID NO: 993724 - protein, 142 aa, Homo sapiens
FSYSRAAPGGSAASPCHRMRYIELHRKRYGYRSGFTMTKKRNERKVERLMNVQEKANENDWSEGYSVYHKQTSMLRNIQMKKTIKMHDTEKHRKAKEMMKRHHREQYLPICWTERDNLELKYFPTMIKQKRNRVRRENGKSL

SEQ ID NO: 993725 - protein, 165 aa, Homo sapiens
MFVSYSFTIGGGVDNRSGDIRDITEVGWYTGALRNAFELCVVMVLASVRFALDVCVELKTLGQAMIVKLDSCHLALACVLIVRCGLRFVPKGKARGKDDLEEAAWRIICGFQTSEPKLAWGPAAGPHFRFPVPGWGRLGPAPVFRPFHVPLWASATPGFVFPQRG

SEQ ID NO: 993726 - protein, 85 aa, Homo sapiens
IRKGVGLAPTVGDSGTRRAGRLQDDAVHAIIQPAGKTAAAKMVPGHSDKERKKMVASSMQVVLARKPRCAVPGIVGTLMLAIRDM

SEQ ID NO: 993727 - protein, 69 aa, Homo sapiens
LKRPTCPWLRADWYMYSASRGEVTYRAMPTVGVIADPSDLWDNASYCVVGNNVILVPWNIPCNLRITRI

SEQ ID NO: 993728 - protein, 81 aa, Homo sapiens
IAILGNVLVRGALARANPFKHAHICLAGARWSRGPPSVSSPGPTGQPRRPRSLAAGAVEEYKYVNLAPRSIYASVCGLVGS

SEQ ID NO: 993729 - protein, 69 aa, Homo sapiens
  misc_feature (4)..(5): Xaa can be any naturally occurring amino acid
  misc_feature (7)..(7): Xaa can be any naturally occurring amino acid
  misc_feature (59)..(59): Xaa can be any naturally occurring amino acid
ETPXXVXRGATWNRDIVTRSERLARGGAEQVRWSARQCNGSNPPTAFYKPLIYFVNFIXCFRQGKRFIL

SEQ ID NO: 993730 - protein, 136 aa, Homo sapiens
YSQQVRLSMFQKMSDVTLKGRTVIRERAPRGALRRDFNHINVQLSLLGENKKRLAGGHNGGVTERNLAYRFGKYLVEIMVPGTMYRRVVATGLFRLQDEVMCMHHFSQSNDCCAQREWVVVGGKPKFHWGEKYKSA

SEQ ID NO: 993731 - protein, 83 aa, Homo sapiens
AGPHGNPDEVPLACRGTNLAEYYCGVREGVLYRYVVVTTIKCSHNDAIEDRPSPSSHVKEAGYDCMVNMHLLLIIIVLAISSD

SEQ ID NO: 993732 - protein, 110 aa, Homo sapiens
MGIERGNSVYTTAILASAIEEALSSWSNGTDRIDTGCRDVVGGAKERTWVIWTVVRGQLFNKCRKRKLYRHRLGNFGRGVEGVEKNPLVQVLVERLNEIERKIMCTQWSL

SEQ ID NO: 993733 - protein, 369 aa, Homo sapiens
AVEECLHNRLFPVCGNKLTDPKASHYANICAEASFRVTNTGEDGFQELRLSDAFPPNGYGLYNIVGGTAWEWTSELVDCSSFCSKKQLNPKGPRFCGNDLVKKGGSYMCHRSYSYRYRCAARSQNTPDSSSFESGIPAVQPTDCPLWTDNQGNVCPQSKEQSVSDLPSGLAQNFERSHAMNPTLRWVPYLANGQRKPLGGGPTLLTGVSACRFMSVVHLRKPIAFLPFEIFQLTDVTWQRTLKLRSRIDPRSTQGMARGYKPRRQLMTLPWLTVASISLQVSPTDPCVVSATSPYHTGVRTFGGSTTAIHNVYVIPGRHVALPIHHQPVITCDGVPLTLPAHFHRYSFSLSALHPPKKLCYQISIRSRR

SEQ ID NO: 993734 - protein, 119 aa, Homo sapiens
MLILHQSKANYYTQCDPIALPTEQVTLGITAQSLFIEVLISYNRVHEPRMLDQEHPDGCSRLLKVRSFKIKVLRDLSSDRSNPGLVSIYFKFLPVRKDRRNQAYFNEVRHSPVNDIIST

SEQ ID NO: 993735 - protein, 313 aa, Homo sapiens
DPFAMGRVDPWTEWRAPGLCSSAHVKHRKGACAAMNYRLWIAAETARYIKGIVKDIIHDPGRVLPLAKVVFRDPYRFRKRTELYIAAEGFHTGHFCVLRLERPSSNIGNVLPVGTMPDRYNSCAAGRRSLVDRGKLVRCIREFASRYLPEPETKKTRVNSALRVPRRLSPQQESCAWCGGWNVADLTIPILNVAWRDHNYYRNEELVATKYGVWHESCGDILLDGGNHQDIGSRHIVEMPLWPHVGFIVPRLTSREQRGAKTRLGSKVGCQHQGGSIPRASSPVWRARAKRRHGGPGWDLEAQGRGRGKTQNT

SEQ ID NO: 993736 - protein, 154 aa, Homo sapiens
MGCGINDRVLGSSFLPSRSPQVERVSPPHHFPEEADFKYALTGDEVKKIGDASGSIKIDGKVRTDISQYHVAGFMDVIETLTRRERISVLIYDTEGSALLYIVLHREEAKYELCESEKDLCGHKEESLILVTHDARPIRYPDPRFIKVNDTMSD

SEQ ID NO: 993737 - protein, 142 aa, Homo sapiens
MRFHGDGKSPDKDGNARWEPRCLRLMDCILTTARPTDKTLAPALSRMSTHNWWYSVLVLLGPSATNLRVPQNPGYGTVNPLAPVNAYNPAATHPVRNCPIDAFESTLLPGETIVRPNCPSNVSRTDVPHAKFDADLNAPHLN

SEQ ID NO: 993738 - protein, 33 aa, Homo sapiens
GSGRQVPAAARQLGTAEGGGTGRHAEGGCRGDR

SEQ ID NO: 993739 - protein, 71 aa, Homo sapiens
LKHKASTSERHAATGKQLEKNQLEKIQKETSLLQELEDLGLGTLKIYGKQVDDQKSVQYTSTGKPIGIHMN

SEQ ID NO: 993740 - protein, 106 aa, Homo sapiens
  misc_feature (50)..(50): Xaa can be any naturally occurring amino acid
MAKLKWGQMGIVQCNAITEHCKCKTEELTATSQTLDQGQGQLFLDGGGKXSTAIFYLHACKDEPLLGGEDAFLILDIGLHIFDGVTGLHFKGDGLASQGLHKDLHF

SEQ ID NO: 993741 - protein, 112 aa, Homo sapiens
  misc_feature (4)..(4): Xaa can be any naturally occurring amino acid
  misc_feature (6)..(6): Xaa can be any naturally occurring amino acid
  misc_feature (10)..(10): Xaa can be any naturally occurring amino acid
SRIXLXCVKXRSLLLLQVFWKKHLGKFIAKGSSPRHIVVRLSKVKMKERILRAVRQKHHVTYKGKPIILTADFSAETLHARRDWSPIFSLRKQNNYQPRILYPAKLNLIYGA

SEQ ID NO: 993742 - protein, 66 aa, Homo sapiens
MISNGYNQAYPINPAEPVIAIKLYPDKASGGYMTWPSPIEDTGRRGSPGAYGHAEETLIIMEALKY

SEQ ID NO: 993743 - protein, 100 aa, Homo sapiens
  misc_feature (23)..(23): Xaa can be any naturally occurring amino acid
KVSSVLTTKFATPMTTLNSTTGXHIPYPTDVADTNRRQGRYWVVEEQFPSKASSLETYGPKWEQAFLFLHPNVAFWPATPPILYPYKLQTPGSMSRRAEK

SEQ ID NO: 993744 - protein, 57 aa, Homo sapiens
MITMSAAYLLTALYHESWNTEEWEKSKAAADIARVYIGKIAHQKQISRNAFYTSNPP

SEQ ID NO: 993745 - protein, 64 aa, Homo sapiens
  misc_feature (5)..(5): Xaa can be any naturally occurring amino acid
ACGTXALAPCSTLVSNYNPKVFEILIQYYSGKQCGFNMRKLLQKKGKKSLVFLSNANPSLLERN

SEQ ID NO: 993746 - protein, 74 aa, Homo sapiens
  misc_feature (1)..(1): Xaa can be any naturally occurring amino acid
XRQICVYCQSVITRVEAHIPSHYGRGERRGLQACPTLELSPHTSREGRVIFEHISFILQTSFGYLEHCSGFQDL

SEQ ID NO: 993747 - protein, 68 aa, Homo sapiens
  misc_feature (6)..(6): Xaa can be any naturally occurring amino acid
  misc_feature (11)..(12): Xaa can be any naturally occurring amino acid
  misc_feature (50)..(50): Xaa can be any naturally occurring amino acid
LSSTNXDRACXXNITLQIPALVSLLRNFCNTLLKPEFDKISKLLYLYVDXTTDKVPYLDSRSLTVACR

SEQ ID NO: 993748 - protein, 42 aa, Homo sapiens
MKLQGDCFDLGCVCLCRVRLCHPTGVSSPEAVRSDAPVQGPP

SEQ ID NO: 993749 - protein, 58 aa, Homo sapiens
RFQRVGYSTIAIGDPMCRPERKQHLQAMDRGLRRNQPTDTLVSSIQPPELLRKYISIV

SEQ ID NO: 993750 - protein, 67 aa, Homo sapiens
RPIQFYSFGICDVIMTGLAVKKCPFNFGGVAWMKNPKVPSWILRWFPGLINIRLSRLADLYSMAIIK

SEQ ID NO: 993751 - protein, 69 aa, Homo sapiens
  misc_feature (20)..(21): Xaa can be any naturally occurring amino acid
  misc_feature (27)..(27): Xaa can be any naturally occurring amino acid
  misc_feature (30)..(30): Xaa can be any naturally occurring amino acid
  misc_feature (50)..(50): Xaa can be any naturally occurring amino acid
EYESRRVCVVNTGSKQRTEXXSSALTXVPXIFWCSNQFPADQNEMEPHSXTVRGLTSCKPRPWKTLNKK

SEQ ID NO: 993752 - protein, 75 aa, Homo sapiens
PPRPQSSSILKLSTLHKYISAVVQRVTVLTTISIATQHVTPVAKELNYDLDTHTSTGRIKAAEKKEARNADSHTK

SEQ ID NO: 993753 - protein, 177 aa, Homo sapiens
FQDYSARIKFRCCRSLPVRSRTGNLQAGWIVLLLLLVGFFFLEPQGILVSAIAAAGAAVLFVVAKRGHSINTGKVLRGAPWQIVIFSLGMYIPQPAAIRRLREPLMISGLARSFIVIELMMASIRTSTLSSICDLTLSGICTMPGSLPIRLAMPPIFFIWRSCSRKKETLLKSINNW

SEQ ID NO: 993754 - protein, 52 aa, Homo sapiens
LEGLEMEFMLANQFSSTGLNQGYIKGAEVILNYGRLRGTLSDKIYWRHLYNN

SEQ ID NO: 993755 - protein, 105 aa, Homo sapiens
  misc_feature (61)..(61): Xaa can be any naturally occurring amino acid
  misc_feature (73)..(74): Xaa can be any naturally occurring amino acid
  misc_feature (80)..(80): Xaa can be any naturally occurring amino acid
MGYTFAARTYNAFSLSLHGRPKCEKKVAGDLPHHSLSTPKHAPLKHAQTYVCEKKAPPNSXIHRLGWRGGRVXXLCLLVXLSNHSSYPWENSPLKANSFVIKTTF

SEQ ID NO: 993756 - protein, 120 aa, Homo sapiens
QTAHRFRVQIAASTGRYIIQNLRQVSMLSDGFEVLIQTFLRRTIVVRGYRQAADDTTVIEALRQANGFRSSVSAGPGNYRNAPISQIQRHHHHISMFVMIKVADSPVVPTETIAEVPLAT

SEQ ID NO: 993757 - protein, 226 aa, Homo sapiens
DWDWDAVQPGRSGPGADDGPRHCSAPGIARLLVSGDAVQEAARWEEYAWWPSWRELLLRARRARMLQSAADVALGGSARVSHVTLPGLGSWACSVSSPAPWATRGSGGHDEEAVQICMRQLGQPDGGAGLKRQKFLSEDLLQGGGSVWSLVKQVSHSNCTNEAHRMSAGDSKGQRLTKRSKKLPLTTLAQCLDGGVSYPWENDTLSLGRCLKTTVERRRTSLDSGS

SEQ ID NO: 993758 - protein, 217 aa, Homo sapiens
  misc_feature (209)..(209): Xaa can be any naturally occurring amino acid
  misc_feature (211)..(211): Xaa can be any naturally occurring amino acid
SPDSWNNPVMMTLTKSRSFTSSYAISAANHVKAKKQSRPGALAKISPLSSPCSSPLQGTPASSLVSKISAVQFPESADTTAKQSLGSHRALTYTQSAPDLSPQILTPPVICSSCGRPYSQGNPADEPLERSGVATRTPSRTDDTAQVTSDYETNNNSDSSDIVQNEDETECLREPLRKASACSTYAPETMMFLDKPILAPEPLVRDNLXSXMEQLNT

SEQ ID NO: 993759 - protein, 117 aa, Homo sapiens
MRDPNTQALQGFGFAHICHVWEEVDAAMNARPLQGGWKSCGTKESCGPSRRFSSVPGAHFNCEKRLFVGGMLRRLLIEHHPNEIIPNRYGETLDRELTISDVTEASGIEEGLCLCNL

SEQ ID NO: 993760 - protein, 53 aa, Homo sapiens
NELDGIPLILDNCYMSDRDPFLTQRVIYAVRDLTEDNSQNRHLFAKMEEQGLA

SEQ ID NO: 993761 - protein, 210 aa, Homo sapiens
MELENIGSEHGATQGAWEGGWWKSLKAKQEMVADAPVPSTSASAEELRAQRLEREYHRPVRAGEPYWAPGVPRSSVPQNGREHETSMRLSHFSVMVVAEYEVTPDDKRKACGAADVTARIYSEADSRSPDRLSLRYPPVKHGDERDPAAGAGSLSTRPFPGTSTRYDPREYLSVAPCCRTTSRAVYFQRGFLHGTVGWKWQPVTKKSLGK

SEQ ID NO: 993762 - protein, 204 aa, Homo sapiens
MCDKLIWRKHSASALVLHGHNQNCDCSPDITLKIHVFEASSELQLTYPRWNNVACIRQANPGCLRWNYIVHDRRLQCATHTPDGANALSVQMHLNSGVLGCCSIGAHAWVPSFNSGTAGEVMHRRSQPESVYSRSSAPMHLVLLAEVSLPRGTNLLCRPDVLLKRGLLEHILYCIVDSECKSRDVLQSYFALLGELMKFNVDAF

SEQ ID NO: 993763 - protein, 205 aa, Homo sapiens
ACANGFTARQASWLPTMIMASSPDMDLATVFLRLKEEMGVKLIEPHKQGRRCSTVHVLFLDCEVQHIIPFILVVKYGADIEEQNIIVSSTLTSGRERSTTTGIQCGRSKACQADYQVHVPRGSCRRDNGLEAAPSRWVRGMWGPPMYSPTGANCQQTLRLRKVTGKRLLCVGQCLASMARLLASFLATGRVAEKRDLEFGIARIK

SEQ ID NO: 993764 - protein, 109 aa, Homo sapiens
  misc_feature (69)..(69): Xaa can be any naturally occurring amino acid
MRGVLLTQGQQRSCGIRTGPTTLRLTRGNGRTKLGLTKLGEYPRLASRAIRDGALAWRVARRQFSRLNXNPKRVVASSKTCATLEKALLFVNGAQCATTCSPDAALVVC

SEQ ID NO: 993765 - protein, 31 aa, Homo sapiens
VYSQVNHVSSTCVDGEPGRVSLSCCRQGPKD

SEQ ID NO: 993766 - protein, 75 aa, Homo sapiens
TILYKPQRHGNSIPIDSAHELESLGAALSLLIRAELGELRQASVGNDHIYNVIRSQPMDCNNLLHSNTHHNRRLR

SEQ ID NO: 993767 - protein, 52 aa, Homo sapiens
MIKGKTPEEIRKTFNIKNDFPSFFVKQCLPSLFPVNFSDLLKVGIVNKTGCG

SEQ ID NO: 993768 - protein, 83 aa, Homo sapiens
STFFVSHRLPRTSRHNRLNLYSVSASSVKLTTFILYIHKHSDLGFEVGDVTTGHSRDCGCDIVSSMSPSIDEGSSITTGRASR

SEQ ID NO: 993769 - protein, 189 aa, Homo sapiens
  misc_feature (57)..(57): Xaa can be any naturally occurring amino acid
  misc_feature (102)..(102): Xaa can be any naturally occurring amino acid
TPSCPEKAIQIRDNPYCITSRSYWFFGMDLFVSLMTTSMPSSLQPAMRSEGELAPSXSASRPPKHGHLVEVHTSLEPRVTLVDVAIEEVSSHTGVSTEYIYXDSYQPDIPRIYSSDCFITSMTGVSIVSLTTERSEVASQSSLSPVCPNGGIYDINDFICRPSSASTVTSTFIDWTRTFLTICLQSSAT

SEQ ID NO: 993770 - protein, 61 aa, Homo sapiens
HGGNAGQTPMNINPQQTRFPDFLDCLPRTGGDLRTLESEDLIPLFNDVEAALNKSEPFLTW

SEQ ID NO: 993771 - protein, 260 aa, Homo sapiens
DPERSYRMNSRNSALQESCCRCCAWIQHSRLKLTTQDKWTSQQDPDHPTRLILRRDQTAAEDDDLSLVIRRLTSLRMAEVRGNNKPLLYAHTLKAELVYARPNSLRTHQRQVNVVKTSYNQLVLPCTLFNCALPTSHLYTCATTTSSTQPKDPLLSLLDMKYTVQCTHSRDAHLTHCPRQKPTADDRAVPPTGNPIPYPRPTQHTRIPPSDPPHTSKTPTHCRLHEHHTPNTTAKPQRSAPQAHTSTPRHKAQPPHEDSK

SEQ ID NO: 993772 - protein, 69 aa, Homo sapiens
APKGSSKQQVVRMDLALAGLSGRKSLGQDPPRLFFEKQSFIVSAIPIWFILDEYRRYGYLIQYWLSCIV

SEQ ID NO: 993773 - protein, 135 aa, Homo sapiens
SEASFLKPARSQTQGEEQTTLDLPPLRAVTLTAKVCGFTPEVSETRTHQKEEIPDTSEHLKEQTPATPFLRTVTLTVRVHGFIPEVRETKNPLEGINSRHSGSWHCAAYRSKTYRITRHVAEKEKGRWSRHVEHV

SEQ ID NO: 993774 - protein, 127 aa, Homo sapiens
MVDLKWARRICYEHLRTIDPETWSDVRWSIRTSIIEPSWGYMPTKRRGSHRFSRITRPEEPKSTCQKITRFLSVKDVRLCHDRMSVLPLKSGKRFPSQADQEAKELDKGRNKLKGKKVQFIRGKDYL

SEQ ID NO: 993775 - protein, 162 aa, Homo sapiens
  misc_feature (89)..(89): Xaa can be any naturally occurring amino acid
MSRKDQERPGFDCTIRQTLDSFRVMADKMISARGTEHLSVSPEYSKMPERRNPPVTLRDLTQLRRLDLLVHIDIGTSASQNRLTSLVEXTRIMDRDGMREEEDLSSTYQPCGIGASMCDENCIRWIRLSQNLMVDNDAASVDGNRLLDAGADETDGEAPCFT

SEQ ID NO: 993776 - protein, 31 aa, Homo sapiens
MPCIMVNLPKQTTPVRWSCTSQPENSFGDTP

SEQ ID NO: 993777 - protein, 287 aa, Homo sapiens
MTREGHPTVRTEHHSGILLTERLGQQYEVEGLMTRLCPCSRVHASARAYGGQGRISYKEVSGYHSCDALAQVIILTPDVVIMLSQQMVTRGDNAVETRRTELCNRQGNKTRLHVVCGPQDRLSSPGGLIPIIFGEPGRQYYRKLSYIQHTGGKNATHKGTSPRRNPGHTFPTKTPEGPTQEGQRRTTYTRGVHQPGAPPGRECTTATQQTAQKPNEERANPPTNRSGPPSGNTPQWSATPGATHSSWQRKNEQQRSNKTDKTDTEEETPHTRRTTNAHTTPRTQHDK

SEQ ID NO: 993778 - protein, 70 aa, Homo sapiens
  misc_feature (23)..(24): Xaa can be any naturally occurring amino acid
TPMKIIRTLRNGFCGTGGRRPQXXIICGSGLGGVTDKLTQAQIFDYGEIPNFPRSTVPGHAGRLVFGGGS

SEQ ID NO: 993779 - protein, 326 aa, Homo sapiens
MRTKRTQIKMVACRVKGILSRFSAFRILRLPRLYMPQFYRVFCLLTRTHINYGVKGDVAVVRINSPNSKVILSEERATFRVLRSYDMHLWASDQIRSAVLISSKPGCFIAGADLNMFSRYAKTLQEVPTAITRSTDEYADTLDERTTNALMWLATQLDPACEEALRLPLQIQLQNSNNQTEKTLLRKPCTLLARRALTRRHAGHHKGMPQRASQCMQSIATMKARTGYEPNAAGPSRGANEEHAAPGIEPPLVNTTWRPQDLIPLPEETGTQHTSRARSIGKKIHAKAQAAQAEPTPTTPGIAPPTTQPARDPPASEQDKTRRNEP

SEQ ID NO: 993780 - protein, 115 aa, Homo sapiens
  misc_feature (5)..(6): Xaa can be any naturally occurring amino acid
  misc_feature (8)..(8): Xaa can be any naturally occurring amino acid
  misc_feature (10)..(10): Xaa can be any naturally occurring amino acid
  misc_feature (12)..(13): Xaa can be any naturally occurring amino acid
PWRAXXLXLXIXXTACYYFKFFWKKHLGKFIARRSSPRHIAVRLSKVKMKERILRAVRQKHHVTYKGKPIILTADFSAETLHARRDWSPIFSLRKQNNYQPRILYPAKLNLIYGA

SEQ ID NO: 993781 - protein, 87 aa, Homo sapiens
  misc_feature (25)..(26): Xaa can be any naturally occurring amino acid
  misc_feature (36)..(36): Xaa can be any naturally occurring amino acid
  misc_feature (86)..(86): Xaa can be any naturally occurring amino acid
PRIYKKSCTLKPDSLVQTSEGSPLXXNMGKGEFSLXKLYLDKEEGAVICLGHIYALIRGNQDKDDVTNSIDIQALELEETGGVMLXN

SEQ ID NO: 993782 - protein, 229 aa, Homo sapiens
MTKRRKARRLPHRNLQTGPLPMRFYNICELIPAHEERTRTAQTKPDTIPTKKRGCHEISRQGDHSDGAAAGGPQKEEQADRDSYRTTATHTQHHPIRPRRQRTESTPKSAKRQYTTSRTSQITHGCTPQTHAATSKPKKTTTEAKGETPKAKPHTTTQRRSKRKGPQTQGDGAGEEKKRTRQKEQANRKDNDRRARRLRQNRERTERASANGGRRRRYTREQSRKPDGT

SEQ ID NO: 993783 - protein, 68 aa, Homo sapiens
MKGGRWNEFISIMAFTAKIEAMKTDPNGRYEDATDENKLAHDGMELKNVEIIIHTFKHREPESVPDKF

SEQ ID NO: 993784 - protein, 101 aa, Homo sapiens
RMKDWQEIIALYEKDNTYLVEVSEPPGFDNVSYEIPSLERKQIAKCQQAAVKKRDRKGGGVCRPGAAEMRESVLPSSCKHVWLSRRENVRGELVALVKDLH

SEQ ID NO: 993785 - protein, 177 aa, Homo sapiens
MAQSYARVHINHRVYDLDVGSRHPDGACAIKGSFVQRLKSYVDLSSDRSTPGRSLSTSNSSTVRGGQGEITAYLHKGAFPRRMIHLNLALYPHPPKNRVREDGRSPGNRDTNFINFTSPNVQFLFLTNIHGQNSSFLICAILIAMGFLMLTERKIVGYVRIAKAHVVAQGNKTFVKP

SEQ ID NO: 993786 - protein, 234 aa, Homo sapiens
MAQSKSDQAKSTQKEHRRPISTTLHNYATLQISKDRTTTSRLHTHYNQYKQRTDNRRHYYTVANPIRKTSIIVNYPQHTHVNHSAEHNDNKHRTHMTDKTLSRHHHNKHNLTNLVYNYNRRTTINNTKTQTQQEHDKKHIHIHHQYRTAEEEKPKKHKIKRRKKNIGETEHKDHNRQAEHNREPTIPTTPQHTPQKKPHGELQQGKQKQETDDKDKELRNTKNKHKHTTHKQDK

SEQ ID NO: 993787 - protein, 122 aa, Homo sapiens
  misc_feature (35)..(35): Xaa can be any naturally occurring amino acid
  misc_feature (37)..(38): Xaa can be any naturally occurring amino acid
  misc_feature (46)..(46): Xaa can be any naturally occurring amino acid
  misc_feature (48)..(49): Xaa can be any naturally occurring amino acid
  misc_feature (96)..(96): Xaa can be any naturally occurring amino acid
  misc_feature (105)..(105): Xaa can be any naturally occurring amino acid
NVKGWVRKKEEGGQTTYLGELRRELPPDQAEYCIXRXXRYGGPNSXPXXLDYMCFSTGLYGESTSNPPRPGGLVLCAVPCPAPPASPISWRGGGSXPSLHPEGAXGPRWDRSSLPRKGQVTK

SEQ ID NO: 993788 - protein, 126 aa, Homo sapiens
MHCCPPSQSCLTRTSRDYAANRSTCPPPGPARPSPGTRKTASITTISYPVNPAGPPTGEPRMTHQQLGQTTADNPTKPTRPAPRTMRKHTDKRHRPGPTDHDSRTQQNNHHSPLTQDTTKHTNTHT

SEQ ID NO: 993789 - protein, 141 aa, Homo sapiens
MSVGHQLAEELEKQERQTKSKHQQRQEGTPNAAIAPQKENRRQKAPQLENKQQHKKTQRQHDIEVHKYHNNNNNKRRTTAGQNATHRNHTHRKQDQRQKKRTSNKENNKDNKPTRDTQREQPRNYTTTPQKQKKEARSSKR

SEQ ID NO: 993790 - protein, 96 aa, Homo sapiens
  misc_feature (83)..(83): Xaa can be any naturally occurring amino acid
PAHQHLFKLCTVSALSYALKIQGDKEGACSHGASILMRQVVTDWKTYHRWGRCYEKKGSLLRGHSGIMDGHRCLGAKKLVHKXLLSRAQSGCGAPS

SEQ ID NO: 993791 - protein, 44 aa, Homo sapiens
MRTHTHKSVLPEDAAGKATASLGSQIKAFCPNVTGIGGFLVLLT

SEQ ID NO: 993792 - protein, 75 aa, Homo sapiens
  misc_feature (36)..(37): Xaa can be any naturally occurring amino acid
SETEAERLASSWGLYSGIMGTYYHGFRESVGGINIXXSFFKVYDEVKNAWRTANLDNNLWGYIFLKMGFSCMNWK

SEQ ID NO: 993793 - protein, 160 aa, Homo sapiens
MSRDCATAFQPGQQPDSVSKKKKKKSKFSSPQKFSRQAISTGTSISVYILIWVSPYFSIDLILKFGLLKLDIRLSTWLFTGFNGPIPLVVFLEMGVSAWCHWFSKPGATSQTPVSKKKKTKKGKFPSLTNIYDRGERNILNGEQGYFSKFIMSNLGLHNV

SEQ ID NO: 993794 - protein, 72 aa, Homo sapiens
FRLLVDNPLGIRGGSVLFGLLLVLAVFSHSGHSLQCYTCPNPPADCKTAVNCSSDFDAWLITKAGLQVYNNV

SEQ ID NO: 993795 - protein, 246 aa, Homo sapiens
METEDPGRLTPFSPLGTRLSSPIHAYSGPNPADHVLESETQGLTFKDRGLCVYGERGGPQTCWNDCMLIQLSRVEASGPRLRTRVPCNSQNYSMNDPGHRMIRGKMGRNRRESRPERLRDERNREELHGSERLQKAWMNELKLYRPDWVASRPVIPAPWGGKAGGLPEVKEFDPAGNMVNPVYYKYKIAGRNSLKPPGSRGDTGGVAHTAQEPPKHNPVGTSDEGTSEETSRRTKKTGTPMTSKYV

SEQ ID NO: 993796 - protein, 271 aa, Homo sapiens
MDVAPYNRDITRAIYFTRRDPVCWPGTENYGTRGKDPGPLRPTLSSVIFWRTEERQVARGTRGTEGEHKRADRAVGWSRAVEKKVRARKRPHSHGVTQLSFTGKNRGPWPEDTQFVATRAPGQWGGTAEGENTGGGTQSCQKVHRGTVDKKVSTESQAVREREGHKKSRARGGKGERGKRGTRTQGPPTGWYTSHIEVGPPPREAHQEVTNEKTKWGIPRRSPRKEKEQLEGGPMGSHQEKPHGKRLCHSTVKREANGCEKHAVTQSQRCP

SEQ ID NO: 993797 - protein, 76 aa, Homo sapiens
RAYSAYTIIVRRTVHTHQATASACKTYKICYTTTTSPNTNAASDLKIIEMTIQAKNATNPPCQIIQLCMTSASSQR

SEQ ID NO: 993798 - protein, 235 aa, Homo sapiens
MHVTHLNHKSERLCGDTYAHTATVCRITLTLDNLGITDPMGAILTESSTNRNTATLLEAFELYQVYQCLKDTSHTHFCANIYHRRIILPRHQTMACATTAVQHDERQEYTKSKTILRGQTAEQNHQPDHTWGQRTRHHRTQQQRLRQPARHQVHHLAKTAPTNSSPGHNTRDCNETTHTTSPAETRNAHSNQHRKHTHNGPTTPPVTHPMHVRTAHNSNNDGEQRSRETCTAMRH

SEQ ID NO: 993799 - protein, 114 aa, Homo sapiens
  misc_feature (6)..(6): Xaa can be any naturally occurring amino acid
SDYQNXCHVKKQIKQIQKIFLFECIMGHKAAETTCNINNAFGPGTANEHTVLVVFQEVCKGDESLQDEKSSGWPSEVDFDQLRPIMEADPLTTTQEVAEELNVDHSTVVWDLKH

SEQ ID NO: 993800 - protein, 397 aa, Homo sapiens
TRWVDPRVTGRVGFLTLTTKLTNTNISDAQDHRTRLTISVPDNHPSPHRPSHPYASLYITDEVNDPSRYQSNHMGHHMVLTTYEYTEIRRTINLTTPYILADHNTVEPGELNIIERYEQYEIDTTRMRSTTYDNNNEQSTKQDLDNSMTLDTHHTYKTHITTPGVAKYTTAEPTSTPHNTHHYQTRVTHAADTRYYDKRDPNSHQQHVHSGDNDTDSNTKDIAIGPQGTDPSKDTVFKVTTHFKQSCICEKHIRASHRRIETHRPYANPTTIRKTHAYINKTTTADHRPDAKRQKKTRENKKKEIPQNKQQETTEADTRKTQNHTAVKGRTQTQNSRQTTTDREKCESTPERPPQQKRGERSTRKHRHQTRRTPSPIVKELRSEDVRANQTKYRRGP

SEQ ID NO: 993801 - protein, 31 aa, Homo sapiens
VISIKNYHPKIRIITQMLQYHNKAHLLNIPS

SEQ ID NO: 993802 - protein, 30 aa, Homo sapiens
WSVSFVSIVRSVRELQFYLSLDPDFLPRLI

SEQ ID NO: 993803 - protein, 52 aa, Homo sapiens
MSRNNQNNHKTDATLPTPPITPPIPKNYTLISTTTPASHQAEHPTELCKNRN

SEQ ID NO: 993804 - protein, 101 aa, Homo sapiens
  misc_feature (23)..(25): Xaa can be any naturally occurring amino acid
  misc_feature (37)..(37): Xaa can be any naturally occurring amino acid
  misc_feature (41)..(41): Xaa can be any naturally occurring amino acid
  misc_feature (75)..(75): Xaa can be any naturally occurring amino acid
SGRRAPPLRPTRPALYLWRLKAXXXGRTGRLHILSTXSERXIFPGASLLAQPHKVTGFLHLDQQPHQPRRPLGVXGGGCQSPWPSSGGGSWPKRERDSSGH

SEQ ID NO: 993805 - protein, 194 aa, Homo sapiens
MENHLIACSFLPSQPHRRLQRGEWSCPFISPTSPVARTGTPGDLYWTCLAWRLVTRGLGGERATKMKPLRKKPFQGGPQNKINQYQDITKGARAPFAESKVLYGRGPKATYAHVAPGLSLGDAEFWGPPKMMRAVSEFQEEEKGALGARTNLAPHVVVGRGEPRVAQPFGRRHSVVDAPARIHTLGGALPLDCG

SEQ ID NO: 993806 - protein, 74 aa, Homo sapiens
  misc_feature (25)..(25): Xaa can be any naturally occurring amino acid
  misc_feature (42)..(42): Xaa can be any naturally occurring amino acid
WGRMRFDACPGKERKNFRISISVLXFDDVKVNQILKTLSEVXGGVGGTDQPPKLKMMYEGVGVVETKVSMIPPH

SEQ ID NO: 993807 - protein, 357 aa, Homo sapiens
KTPAPVTDWESSLPLVFNHCRDVSPCLYPFSAFLGKGQVPQPLLSLSLPLLCFSGEGASTPTPSLLVSTPSLLFWGRGKYPNPFSPCLYPFSAFLGEGQVPLKPFSFTLSGKSRFLGQGQVPLKPFSFTFSGKSRFSGGGASTPQPPSPSTLVTSPAFSRGQEPPNTLFPHPKLLSLCHYPLFPVPKPPSRFSGGKEPLNPFLHVSSSHISGFASFNMGNFNPQSPSLPIPWFLNTLKLFNPPDLNLKVNTSCCGWTHNNRQKSNAEKGLDCPTWENIKFVRKIDMSLVPNIQELTNASKLVRKSQSLSPVPSHPGAYYINEPISTPVGSDNTTSSNSRRVPLISPSHISSSLLHDI

SEQ ID NO: 993808 - protein, 73 aa, Homo sapiens
RPPAGVGLGYRNPVCFMIILYLGGDIWVKENAVICQHRALHRLWGMNGVCGVPSSPQVRAFTTMAYSPGADNG

SEQ ID NO: 993809 - protein, 64 aa, Homo sapiens
  misc_feature (11)..(11): Xaa can be any naturally occurring amino acid
  misc_feature (18)..(18): Xaa can be any naturally occurring amino acid
GCLACLSVLGXLGETGGXSRCQRHGLVKMPGNTSLQPIFQQPPINTKEVPKTSHKGKGTRQGSS

SEQ ID NO: 993810 - protein, 72 aa, Homo sapiens
WDRKKKFQFSFNVWSLSKRVTYINTHTLYTTRTYSSGGSSGSDPPREEERGEKKKRITCLVIRNFGHTFKSA

SEQ ID NO: 993811 - protein, 69 aa, Homo sapiens
MVTFGHPSRTDSQRRRIPAYALLTGRPTHDQHLPTANTCISRLYVPLYSSKQILKQKLSLAIKTKNFGF

SEQ ID NO: 993812 - protein, 50 aa, Homo sapiens
MTRTCVANTVGPAPDKCRISDESLINRKHLRKKDSNPFSDSHGEDSPHYC

SEQ ID NO: 993813 - protein, 53 aa, Homo sapiens
LRELIERKTSSLDRNDQVDMGRQWLAIQKLRSKIHKIVDRRASRGRKLRVHVL

SEQ ID NO: 993814 - protein, 67 aa, Homo sapiens
LERVRIYKNVVAPYIGGSFLVQPSALDFQFCRNQAPYAIVCAFPYLLAFTTDSMEIRLVVNGNLVHT

SEQ ID NO: 993815 - protein, 102 aa, Homo sapiens
  misc_feature (39)..(39): Xaa can be any naturally occurring amino acid
TGGGAVRSIAGEAKGLGGTVAQYWQHSILPHQKWGTSSXPSGSGDRNQTSDLSSNIQWHPDCSSAWRTAISGRSHENERLESNKEKRQGWMINSENNGAIKQ

SEQ ID NO: 993816 - protein, 209 aa, Homo sapiens
MSREWQDNPYRPWAHRWSRTPGPCVETSARVIEWCCRCCVAPGTRMGLLCEILSIVQDWGCAFRGQYTGAVGRHCACHGGRSRGVSQKRYFSEARINVRDRARVFSGSESKGSIPGSGSRHVQCTYLIARSIQHVWQEYRGRSCLSFAFLTVRPGEVKFEPRTVLRQIEGGCSMAGMLNEKLAVLMNSGGGEVVDRDEPQCHFGAKLGS

SEQ ID NO: 993817 - protein, 67 aa, Homo sapiens
PDRDDAQVKEEQQPLKAGKGKEMDSSLTASRRNCVPDRFLLMGSWLADFKNEAADPRENINILNGHF

SEQ ID NO: 993818 - protein, 265 aa, Homo sapiens
MKKQQQKTYKINAPRHSYRKNNKKEGRKAQKRKETRKRRREEQSQGKAKREKENRRKTEKKKRRKTKGKRRKPRTRRRREEESTRGTERRKKKRQRSRERKKTKQNNGKKEKNQKTKKKRKKQKTTKKKKKRQKKKKKEEEQKKEKGERTKEEKERKEGKGNEARTTTKRKKKAEQRERDNTQERKTRASREKKKQKEKKREKEENRDNRKRKEKEEERKEKTKAEEKKKERKDREEEAREKKKRQKTKKTRKTERKEREEREGE

SEQ ID NO: 993819 - protein, 71 aa, Homo sapiens
  misc_feature (26)..(26): Xaa can be any naturally occurring amino acid
LEDEGTYVQTLAFRRGGDDQPRRSTXRGGGGYNHPGLGTNRKRLFVKKRASDLKHPGENLLTDLPLSLQNK

SEQ ID NO: 993820 - protein, 83 aa, Homo sapiens
LITMRLLILTCLVAVALARPKLPLRYPERLQNPSESSEPIPLESRGEYMNGMNRQRNILREKQTDEIKNCVVAEPEKMESSIS

SEQ ID NO: 993821 - protein, 151 aa, Homo sapiens
ETDFHSVWLRLECNGMILPHNNLYLAGSSASPVSTSQVAGIAGMCHHARLIWCFIVETGFLRVGQAGLELLISGYPSASASQGAGITGVSHHAQARIIFFGDAVLLCCPGWSAVAQSRLTATSTTGVQAILLPQVPAAGEAEAGEWCEPRG

SEQ ID NO: 993822 - protein, 429 aa, Homo sapiens
ASFRLRLTTLGTPRLLRKMKPDPGPAPEWTAPMMGVSVACGCVPLPHILLCNCNAMCSVCCECGCACDACLKCACASCVHVVHADGDADVCVKHLLHVPVMSPVMDVPNFVMHVAFPMWSLDGDCLCANDLLNVIARFLCALQMCMCCRSLKPCLLNPNAKEQDACVAVCACVACGCLVVPELCPNLSGLSGSAKSPPIAPVLGCPSMPLCGLTPGTHGLMLDSCESMPDEGTPVNAVLLLPVTHVACCWEFLPVLPLDGRTGLCTLAARVVLRRTEPDAAVSCCCRARVGLHLVMGPPRVPTVPSWAALVSTGPDDQRGVARSKDRRLSRLSLRAMAIARLPWLHAKHRGSGPELVTAGRCLRPAEVQHRDIEPAHMALQGPCVSPATTRPPPGTLSPRQGHGWPSQRTGTILRKGFPPRRCEHANSG

SEQ ID NO: 993823 - protein, 110 aa, Homo sapiens
YWFCINVKQLTSVTASNGQAASLALAAFPVNLSNSLFFRTCSVLLRAPKLGLQILRKTQYYSYSKLVQKSRVMKKPLVNLFNDVIVSASRKYERTTIPTSYALFSVLDAG

SEQ ID NO: 993824 - protein, 50 aa, Homo sapiens
LKETLCEDYIKKVAICKPGSEASPDASPADSSSWTFSLQDRNKFLLFKPK

SEQ ID NO: 993825 - protein, 413 aa, Homo sapiens
RDAWVDPRVWEAGAVCGVRVWKSCAVEPWSGQLSEGAIAAIMQKWGYKHKAQSSKLINILSHYYGGIVRRVIDCSCSDGLNTLSSFMLGDTARNPPRWSEEQLRPATCCTATTSQTHSLEHSCNHRTAHHLPTPSMRTPTVPRPSPLAPTPPAEPLAQLHLPLLPAPRPSAAAPPTLGPLPPAHPAHAPQPAQPARPPARPHPGTRIARTRGSVPGPLNGPHSRASPHQPPRHNRLPPAPPAPAQPPHTLPAHPHGPTRWPPPHQPTPLTPPQPQSPPTAPHPRPPPTPHPHTTTARLPAPPRRHTSPQAAHTRPPTRPPAPRHPPARREPPHPTPPLSPHLPTSPPPPPPHHLSTPPPPPPSHTHLPPPHTTAPPPPHLQHLSHPPTPPTTPPHPHTPHLPPSHPHTPHPST

SEQ ID NO: 993826 - protein, 63 aa, Homo sapiens
MRLAYQRDCLKESPEPVLSLGVGRNPIQSWRTRCSCCSRGWSKAKAAGGWEPCPDHPSRTSAE

SEQ ID NO: 993827 - protein, 122 aa, Homo sapiens
MYIQPLFLTCMFTLSINVIASRAHCPRRYNRPTATDLHSPTWLTPTYVPFTLLPIALRNGLIIMTYPQQTNTPTTSRNTHANTTRNKATTPARQNTHGTTQQPHHTHEQPGPTPRTHHPHQT

SEQ ID NO: 993828 - protein, 239 aa, Homo sapiens
  misc_feature (170)..(170): Xaa can be any naturally occurring amino acid
TVSPYATLTVGDSCSENQGVIIRNTSDTLSGMRVPALGLSAGNATHMRSLEERVRGEGTGLCRVSLIPDTLVRDSLGADQLLDVDRWLYSSDKCVRGRRCYWMKLDAKEILEVPALRDVEAHSDSYSHSSSSLSDMNQELCGGTPLTLPLQPQSVQCRALNRCWTVRTMXVSSAGLVEPGEYLILRDLPVEERKLGRALFMVCWCPVIDRMDRVSLLISMCQVGYWQTRSEVARGGLSV

SEQ ID NO: 993829 - protein, 80 aa, Homo sapiens
  misc_feature (7)..(7): Xaa can be any naturally occurring amino acid
  misc_feature (70)..(70): Xaa can be any naturally occurring amino acid
  misc_feature (72)..(72): Xaa can be any naturally occurring amino acid
FLPKLDXDSHCAQLKRMVRLGSCSSASWVHAILLPQPPDSWDTGPRESLTTKLRIIALAFRRRKGSLDMXLXLKGMIRLT

SEQ ID NO: 993830 - protein, 245 aa, Homo sapiens
ATRSKDSRNTYSLLFGAWSVESVEHSSKPPYSEPSGGQAGNLLGNDQIYNVIVTAHALVRIFFIVIPIIIGGLATELVPPNKSVPPIWRFPASKRTSKLHDVVDLPLSLLLLASAIVEAEQEQVEQSTLALAGNYSHPGALRRPNTCFSLHLAGVSSILGAIKFTCTNKLIQVYNPAAMNRNTPNAPLRLIRPNTQQAYFSYLSQSYCGHHYTTKQTELNNTLFEARRRRRAHFYSKPSSDFSVT

SEQ ID NO: 993831 - protein, 72 aa, Homo sapiens
GGNSHLTPRKGEGEGFVKSPGLRGTRPGCYFAQKQVTEQTYELQLPEGEEIRAAVTLASSLNLFRSSEPACQ

SEQ ID NO: 993832 - protein, 413 aa, Homo sapiens
AAQVVPVSPPPFPSPVAFPGPLHSTVPVPTCPRKPSKHSSNPAEADRRRQQAGHAGASKVICLSRAEAGKAQQAKYPSLGTTTPGRLRTIRPCTADSSKGKKSYRLQAALTPMATSHSMHRIRRLHTVHGTRQRTLAAPGCITIHHPNRHLPPRAKSISTVITDKTRRRWHKARPDCMNRATSDQTTMTHAHTHPSHPHRGYLTQETYMNTHTHRTTTHNQKEIQEKDATQNKKTQDKHRHNPNPHHMQQQSYQKTTMQQPQRRHCTTTQPNHPTTHPNRTHTPAHKTYPQRKRQTLHPSKTPGNKAQDDTHKTEKTADDHKHRHAPTQTASSTHSAKTNTTAQPTLYRDPNKATAEQHTCTTTETRNKPASPQSQPKTRATAHLAHAQPVSPNTPHPTNNTDDTTLTTTPQH

SEQ ID NO: 993833 - protein, 114 aa, Homo sapiens
SLVSRDPEYKKLGRNPRCVEEEKTSANPETLLGEDGGESTRELIARSNRTPLLEYIRNRLIRKAENYREEKREERRQERSLGQRHHGGAGESRQNTWKVRRERRKRAHHTEKQK

SEQ ID NO: 993834 - protein, 84 aa, Homo sapiens
  misc_feature (14)..(15): Xaa can be any naturally occurring amino acid
  misc_feature (48)..(48): Xaa can be any naturally occurring amino acid
  misc_feature (50)..(50): Xaa can be any naturally occurring amino acid
GRGGGAREIGEKKXXVVPSLLLAHATHILWPPERWQKLESGGLGSAYXYXEKRNDCMNLPELLALGGQLLERNGKKKPPKGKNF

SEQ ID NO: 993835 - protein, 101 aa, Homo sapiens
MPNSRGQKELGIKRDFKGTALTGAESACAIQLESQVLRQDVQMPQCRVLLINTCSPVLISNLTHPTLKAHLALVWRSSASVDSATADGKYSENKWLASLAS

SEQ ID NO: 993836 - protein, 113 aa, Homo sapiens
MDLYSYTVMAPYARPHNHHLSLMLVSLDITALPYGLDLHYYAIIVPYDIAASLNSLSFGLLRQIQDTISSGVCPDRYLESRLTLMKDLNSGIADIVYVDKIGPRGLKLSLQVQ

SEQ ID NO: 993837 - protein, 105 aa, Homo sapiens
  misc_feature (98)..(98): Xaa can be any naturally occurring amino acid
MEEFFTVLDLYSLTKDARFVILCGFSGGSTEVVVGRRGSIDHYLNVLCASCAGPYKLGARTTSIDSLTWPLESSRSYTEADSNRICCVFLDKHMCHRXDTCHRNS

SEQ ID NO: 993838 - protein, 217 aa, Homo sapiens
SHVREIHVAGEVGERILGQLGELERLIIHHAARYALGFVIPCGVNDTCRGSLRTYRGNVEDLASAGHLLDYQSLPTCGVVLGTRIERGTKLMYHLGLTVFDVDLPASTFMHFPVAQHKPITGLASISISKLPYNSPSPSGSVMKPFLDSIVGNPIRTIPRCRACQLPIGGFNGKAKALIPIPRIYGDSGLDSKTDVIESNTVSDTLFSGKLGGHIQY

SEQ ID NO: 993839 - protein, 77 aa, Homo sapiens
RTIRYNFFKRKERLGGLIHCYTAILYLNEEEEEEDFEKEAEAAAAAAAAEEEEEEEERGRNFTKNLKYFKIFSLLCF

SEQ ID NO: 993840 - protein, 84 aa, Homo sapiens
  misc_feature (26)..(26): Xaa can be any naturally occurring amino acid
  misc_feature (37)..(37): Xaa can be any naturally occurring amino acid
  misc_feature (84)..(84): Xaa can be any naturally occurring amino acid
CKHYPLYSLNVASMWVKLGRLYMGLXHGRGGRKQLKXAIAIMEVAHGKDHPYISEIKQEIESACDYAAFQFSFKHLVQKPGGGX

SEQ ID NO: 993841 - protein, 73 aa, Homo sapiens
MTTDPRTRRREQTYAATYRNHTNHARSTKRNQIEAAGRHNERTAAQTSTTRHTSQGLTKNRRPDKRRSSPAND

SEQ ID NO: 993842 - protein, 434 aa, Homo sapiens
MTPTKEGRTQQNKERREKENTRGGGERNKKEAKTRKAAVKKRKGGERETKGGKARTKAKKERKKSTGERQKKKRKARTKSEKEKERNTKRSRKDKGAAQKVGGSDERDTSTRGRRAEEGGGGGETEHKKERERGEGEDGRERGTEGKGGEEGRKKRRKREGRDAKEGGRSAGREGRERRGRGEKKQREKRERGEREKRRGAQGEKKRRGRGERRKRSKDGRGGERRGEGETEQGRSGEHEERSRSRRKEGERKGGERGREGREEEGGERGREEKERRGEKKRRSRESERGEEERGRKKRRERGRRKEHRRGKRKRRRRGRREEREGARIEEGGSEDRKGRRREGGRERRKKERRKGKQEGRGGRGRNEEKEERRRERERKEGQRSSKAAGEGESKTRGEAERRAAREGRERRDEEGRGEEEKRREEGERQREAK

SEQ ID NO: 993843 - protein, 94 aa, Homo sapiens
  misc_feature (5)..(5): Xaa can be any naturally occurring amino acid
  misc_feature (10)..(10): Xaa can be any naturally occurring amino acid
  misc_feature (16)..(16): Xaa can be any naturally occurring amino acid
VLWNXWKPAXWLHKAXAVTPWKYHSILPYLSVWQLAMKKFSDLPCLIADHKTLVPERSCFTPRERNVIQKGQEESEEMLITFARGCPFFIEPKH

SEQ ID NO: 993844 - protein, 110 aa, Homo sapiens
IIQENFPNLARQANTQIWEIWRTLQRYSLRRATPRHLIIRFSKVEMKEKMLRAAIEKGQVTYKRKPIRPIADLSAETLQARREWGPLFNILKEKNFQPRISYPAKLSFIS

SEQ ID NO: 993845 - protein, 33 aa, Homo sapiens
MSAEQGFYRCPVNRKCSSLTGLLLSNRMVSRDP

SEQ ID NO: 993846 - protein, 328 aa, Homo sapiens
MSAGGASVPPPPNPGVYFPPARVIPDRLAPDILRTYSGAFVCLEILYRGYFVWHFWLPTSNVPLTYYYKDGLMKVYQLTAYPLLTLPLIWDMFLSGMVAQIDANWNFLDFTPTILQYIAFYNRSLSHRKQQPHPCMIRIAINHNPGTPLLSDNQYTHNRTSLNHRLYDDQLDMVAAGLALRTMATANTPYTLPRRHVTPTRSTHISDHPAYKTTHDANNTFHTVTRPPQRDPNPSSAPPSAAHQTTRPPTRTPNNPPPFRPRNKPPAHAPPPPNTNPQRLPHTHGPPPPGTPIATPNTRPTAKPRRKPQNPTHPRKTPTHPHAPCHTP

SEQ ID NO: 993847 - protein, 92 aa, Homo sapiens
  misc_feature (24)..(24): Xaa can be any naturally occurring amino acid
  misc_feature (26)..(26): Xaa can be any naturally occurring amino acid
  misc_feature (35)..(35): Xaa can be any naturally occurring amino acid
  misc_feature (76)..(76): Xaa can be any naturally occurring amino acid
  misc_feature (84)..(87): Xaa can be any naturally occurring amino acid
WPATENPVVLAVLDEEKEGVVRRXTXDGLGHRIIXMAAVAAAASVPSSLTSTKDLCTTLDRDRSVWDIPEKSALPXSNASGVGXXXXTLSMS

SEQ ID NO: 993848 - protein, 90 aa, Homo sapiens
MPVGPEERLCATCSFRRNLAGVIRPTVGPTCIDPIHRKSPLGQEHKSYDLTAYRGNSDSASTPSHCSHPHTSHIYTRPAHTHNERPPHQH

SEQ ID NO: 993849 - protein, 74 aa, Homo sapiens
GVVGRERRRGGGALGETAPTILLWSSVGEVMASQDDPLGQRSRGTNHPGLGTNRKSRLFVKKRARDWNTLVETC

SEQ ID NO: 993850 - protein, 214 aa, Homo sapiens
MGKKMRWPSALEDSGPLVGGPAAPNLQAGQMLPGDKHQANRSQTARAWPGPPVPGPQPNQPGLGEERGRVRVGESGQVPKPKPGPQSIIREGGSQLKAVPTGVSGASEIQEIRTGPPIWRRQGLDFPVAGAFPLVPLGLQGPPMGSPWDVGGRRCVGGRRSPCRVVCEEDMNEERNRIRQGVSTDQTGAQARPDMQARNSRYSRVYNKTSAMGG

SEQ ID NO: 993851 - protein, 59 aa, Homo sapiens
MPLSRVLLINTCSPVLISNLTHPTLKAHLALVSRSSASVDSATADGKYSENKLDGYVSI

SEQ ID NO: 993852 - protein, 104 aa, Homo sapiens
VVLRHHRSTKKTTACVHSPGPWISQVSQNSFSWDSQRIQNCSLSSAWLSLSIYLVTVLGNLLIILAVSSDSHLHTPIYFFLFNLSLADIGFTSAMYPKMIVDMQ

SEQ ID NO: 993853 - protein, 57 aa, Homo sapiens
AVQADLDTLGSNHLPTLASQGAEHLFLKDEPAVIRRGGKTGLGKNLGQNEAKTENEE

SEQ ID NO: 993854 - protein, 150 aa, Homo sapiens
  misc_feature (21)..(21): Xaa can be any naturally occurring amino acid
  misc_feature (127)..(127): Xaa can be any naturally occurring amino acid
MRSRVYRKYVGRLCLHSREMXLVDSSPDDSSSLSHNQENVAYSGYYSDMAFTNTRPGCQKPLIAFVEWRHDLTHEHSSRWFIEMFWQTKPVVYAHRSFFYTLKVVILNHTEETTLPYVHLEITTHKXVSSNCRFCLKKEIEKYKNCAIIQ

SEQ ID NO: 993855 - protein, 279 aa, Homo sapiens
MLQHQTSQGTSRADAPNSTKPPLRAPSHADRARAKRRLTSAPCGLPPSKGHRKPHRIPCEPAPRSQPGTAGTGCQHTRWDHTTPMTSRPTTTPRTPRHKRGTQRSDSIERYAHPRTTHPTPGTTAHRPPTQTAYISSRVRAKTQSTHQPGHLTAHRATPHALHKTQHAPRAMMPTHKSNASPLSPAPWSRDWTKTQPSPKPTKKHTTTTHTHRLTTTPPQTGTQAQTADRSLLSVANRPTTDPQPRTPHPTPLTTHSSTTAEHEAPNNTHHTTQDTQST

SEQ ID NO: 993856 - protein, 322 aa, Homo sapiens
  misc_feature (90)..(90): Xaa can be any naturally occurring amino acid
MFGKHQAPWANVVEHPHIFLTKQYHQQWLTPKRYVVDKGPPWEHPGGITHQGKRWETPGIATGVHKHLGGQAVARACLATTEPRRKLSLXRQLGDTPQRSLGGTTAEVGSKPLRRSAKYKRRHVTTTTEGGGAHARHTEQELSPPPEEGGPPREIYQRADTPTRYYILVREPQKSGGRHQNKSQRSAANIYINRAQLEQHSGTHERGTSKTPRRVIGPVATTKTRTDPRGATIGGAGSSTPTSNTHTERRRTATPQLWRAKPPNAYRGKAYFNGRPQEAAHNTITNVLTRRVYSIVGATNKQQRQILTEQRAAQAIWPTTAL

SEQ ID NO: 993857 - protein, 78 aa, Homo sapiens
  misc_feature (15)..(15): Xaa can be any naturally occurring amino acid
  misc_feature (25)..(26): Xaa can be any naturally occurring amino acid
  misc_feature (75)..(75): Xaa can be any naturally occurring amino acid
MAGIVILHMQALTGXKAEWGEGYVXXTQKDEGPNQLWVQQRLLKRPVHVEVMDVGGPWMGLGGRSPYTLGGVGLXWMG

SEQ ID NO: 993858 - protein, 559 aa, Homo sapiens
MLLSVAENREDGDDTKERRRQRHIQHQNATERRDTHEKKQQQQPQRGRARETSRAPRENKHNQATEKASPLHHSHVAEERTEEHAPHKKHTRSATKDTTQPTHTKEHDKQEEHTAHAGAERDRTTNQHTPPLTPQREQTHTRATDTTHTNQGPETSTTNTHTPAQAHKQETTNTTRDQTYTRQSSAQQRATHSADIEKQDNQLIITVDRQKEQDRNIQYTKTAGPPTATQGAENRTHQTNTPEHNTTPPKKQGNTDNTTTTTRKPENTQHSQTRTGHRPRRASHTSKLNNRHKAQHTHTERKKQGNATQTSPPQRRHHKTHNRTHNHTTHKTPTHSSNPPPPENTDAQKQQNTTSHIATRPPTPTQDRRKSKMTRQSKTKKARATEKTKRESSTKPGRTEGERPQKREHRHETQDTQDDRGSRTHDRRADAKTRTKTKHATKTHDREHEQTKQGEEQAQTTEQTEQRRETDEKKRNKHRRETRRTEPPPNTRTTKRTKGKNEKRKKKTERTRTHKPQTSEVATDTEDKSQKNDQEDTRTKEVQNNKRQTKRRRYNSNRE

SEQ ID NO: 993859 - protein, 125 aa, Homo sapiens
MRYESHPVCADLQAKILHDVTVRTPTSTLKCSGSGLPRYMHVCRIDAQTEHAGEGRINNFAGMSKRPSRVNSRDGSHFLYPSEKTRQFEEKTTNEKIDYRETIKNGFSRIHFTFLNMSSFEGPKC

SEQ ID NO: 993860 - protein, 119 aa, Homo sapiens
MKTIRNRIIHRTVNYKVYRVADCTAAYNASEYLTKSPLSALSDGMRRLSMVVATGLPTEFAALWAQFCITDRDSVTATKYFSFDNPKAVYLWVSKGSRLSTGILVEWWVWPNCVDGARS

SEQ ID NO: 993861 - protein, 84 aa, Homo sapiens
  misc_feature (34)..(34): Xaa can be any naturally occurring amino acid
  misc_feature (37)..(37): Xaa can be any naturally occurring amino acid
  misc_feature (64)..(64): Xaa can be any naturally occurring amino acid
VWDFDALLPVLSILVSNYNPKEFVSGVQNYLENXWLXHEKAPTEEGKKELLFLSDAIPSLLERXCAYLYSQDHKKETLTVGFCF

SEQ ID NO: 993862 - protein, 44 aa, Homo sapiens
AAAYYYYCSEFKLLTMYGDMNKFFSTQCFWTFSLKQKINFKKEK

SEQ ID NO: 993863 - protein, 34 aa, Homo sapiens
AAAYYYYYCSEFKLLTMYGDMEINTHAALGPCKK

SEQ ID NO: 993864 - protein, 46 aa, Homo sapiens
  misc_feature (33)..(33): Xaa can be any naturally occurring amino acid
AAAYYYYYCSEFKLLTMYGDMNHHAQPKLNYYXCVRICIKCDLSSK

SEQ ID NO: 993865 - protein, 41 aa, Homo sapiens
AAAYYYYCSEFKLLTMYGDMSLLTLFFSLCNTQTIKCYTNK

SEQ ID NO: 993866 - protein, 30 aa, Homo sapiens
AAAYYYYYCSEFKLLTMYGDMEINTFLEEH

SEQ ID NO: 993867 - protein, 45 aa, Homo sapiens
AAAYYYYYCSEFKLLTMYGDMVATLVEIVPLHSSLGERAKLRLKK

SEQ ID NO: 993868 - protein, 64 aa, Homo sapiens
AAAYYYYYCSEFKLLTMYGDMPLIPATGEAETGESLEPSRGRLWGAKIAPLHSSLGKKSETLSK

SEQ ID NO: 993869 - protein, 36 aa, Homo sapiens
AAAYYYYYCSEFKLLTMYGDMSFPIKKKMTSCPVQK

SEQ ID NO: 993870 - protein, 44 aa, Homo sapiens
AAAYYYYCSEFKLLTMYGDMIIIERSQNLCHYSTVLPNKEWKFK

SEQ ID NO: 993871 - protein, 34 aa, Homo sapiens
AAAYYYYCSEFKLLTMYGDMTSGNKVLDFIKAKK

SEQ ID NO: 993872 - protein, 33 aa, Homo sapiens
AAAYYYYYCSEFKLLTMYGDMKRQINDDFPQKK

SEQ ID NO: 993873 - protein, 34 aa, Homo sapiens
AAAYYYYCSEFKLLTMYGDMHPMGATINNRSTKK

SEQ ID NO: 993874 - protein, 62 aa, Homo sapiens
AAAYYYYYCSEFKLLTMYGDMPVVPATQEAEKEKRLNLEAEVVVAEIEPLHSSLGNKSETPT

SEQ ID NO: 993875 - protein, 34 aa, Homo sapiens
AAAYYYYCSEFKLLTMYGDMKTETKTHRKKVVLH

SEQ ID NO: 993876 - protein, 44 aa, Homo sapiens
AAAYYYYYYCSNSSFYDVRGHGETPSLLKYKKIAGQQSKTLSQK

SEQ ID NO: 993877 - protein, 40 aa, Homo sapiens
AAAYYYYCSEFKLLTMYGDMQTPPKSSILSCTINKVLCTQ

SEQ ID NO: 993878 - protein, 35 aa, Homo sapiens
AAAYYYYCSEFKLLTMYGDMPLHSSLVTERDSIAK

SEQ ID NO: 993879 - protein, 67 aa, Homo sapiens
AAAYYYYYCSEFKLLTMYGDMVARACIPATQVTEAQELPEPENCLKPGGGGCSELRSRHYTPAWGTA

SEQ ID NO: 993880 - protein, 33 aa, Homo sapiens
GFAGAVQLGLIGKKRQKKRRSKEGKQGEKEKGK

SEQ ID NO: 993881 - protein, 38 aa, Homo sapiens
GFAGAVQLGLIGTRIRARIRGNITIIDHFLGHKTHLNK

SEQ ID NO: 993882 - protein, 79 aa, Homo sapiens
GKFVTNTHLGCINDRKEQLRQLFRSLQVQKKASSWPPAGRNEALAGAALASSSVDPSTVHQSSPSSSMAAVLLERQPQL

SEQ ID NO: 993883 - protein, 88 aa, Homo sapiens
DHASPGWSPFGPNYGTCTDSLLGKNSEAQPARQILVLDNAAIVCNFGSELSLVYVPSVLEKLELKAGQLHYAFPPSQGGALGIATLWT

SEQ ID NO: 993884 - protein, 53 aa, Homo sapiens
VDGRSGCDICHPIDQPGLIRLIWLARRVSPSSLTAPCASLPKLRARSKRTTIP

SEQ ID NO: 993885 - protein, 536 aa, Homo sapiens
MATADCPHATVNSPHHNRQDTMTNQGTDIRPQSQHATRRQDTGYPADAHRTPRRTQSQTIESRSTQEVTSESTTQQVTKRVNTKHTTRTKRKQQLRDQKEKHSENSDKQEHKQETAQNTASPIARPPPQKSTPPHAPNSTSTTPQHYATDTAQQSRAPTNTKHHPSTHNPNTTRYHHRHNNPTTTMTNSRTQERAHTTKQTKPTTEKKHPHKAHDEQNSAKNRNHATDNRTQPKKHTNRKNTYQRANPKEQHDPTTPQALADKHSGDQTTGRRRRQPTRKEQNTKLNHTTTQVGKSTHQARGGRDHRTPEHNPQSKDETSAESTRSRPRVRAQARQQRRQKPTKTTTRTEEKIKHREKTTQQTNYTEQHKQTQTHTQRHNAATRTPQEDKQDKDTTQNNREYAQKQKKQRHRQPTTKQRGRRSTANYISKNEHTHTNGTTHKNNSKKHQQRVRPTANQHDSTRRHTDEQQPPHERPRTQYTRTHTQPQPYRPTTKATAQTHHNPNQHTKNTKQDTTIQTKRTQSKQKTRQQQNRKG

SEQ ID NO: 993886 - protein, 79 aa, Homo sapiens
LNTNEWPSIITPDTPLQLFPHQPIKNIKHKLTHSYRPRHTNNHTNNIRRIIAKPENQNERKSVRFIQLTPQSGRPYAGR

SEQ ID NO: 993887 - protein, 485 aa, Homo sapiens
TRQCKKFIYGGCEGNQNRLESLEKCKKMLVQRDNGKQGFIKKTTLAHKENAKISGFCGKERSWEYGQRLYYQGILITQSRNKNSGEPFTMYGWDGSGQLWNQFVEELWERMAKNLLVRKMGPRMVFPQGGINLWRTPGLQWAGENKSPPGSPRQSQPKGFPKLFWENFLSGVPLEWVLFNSPSRDQEGLGVPGAQCETTRISILYKFSSSIGGNVAAPYLEVYEGRSGWGGDTVPKPNFYNFPKNTECALEGASCYTTERFSIPKEQIIPTRGGPKSIKTQKRKHRAKGTARRSLAHNSPLLDTPTVAGSHHTLAATSCLINGQSWTIIFEMSPTIKHISLISGANRGPPRKWQKLYPKNNEACRKKTAHRTSTTSRSRNKRCDKAANGDTGRSLTHATQQQRGAGGAQKKITPPGEGGHRQIVAHPTGFCYRKGGPQNEGTTRNQSKQQTRYTTQLQSGAKATPRKRGRKHNTRGEQTKDRSKN

SEQ ID NO: 993888 - protein, 101 aa, Homo sapiens
MRGGSGENNSAHQADYLGGTDPTPGGGGKQTVAEHHPTMTENTNTRPEENKIQHSAHDVHQWRVNPTDQRLEDAPARTSSWRTSRDLSLEQTLYPGSDKEK

SEQ ID NO: 993889 - protein, 428 aa, Homo sapiens
ACPFSVNPITIFQEEIPPIFKLGTMSRTREYVSGVQHGRASPTDGMQGVGGYIMLRAGSHKRVIISAPFCMHAPNVSSMGVNLGRKYALTAFKIIRQSDTTLRHTNHAIATPCAQRVNPGLTIRIFVDRTHVPTKYHSTYICHTRIDCEDGALPEKLDAPVMSPAGGLTTRQHTFPDTTTCALTKADGATGQSLAAADVDSSTEHGPCHDVHQRAKNVIEYGVTVHHAVLAKIWQNMMHITERVSESTGVRKEPPVKGQILGYHCSHTGWNHLMTHRRGKPITQQPYDRKGEEKAIKRTQTDKSHHPWRGRGNKGTAEKEGGTNKAPTSRSKQEEHVTEGAERKQEETKQQEGRETGSEHARTRKTTEGREIDKEKETNDRRKERTPASKTRRDREGKQPARRKEVTEREELEARRKKIDTIRGEESS

SEQ ID NO: 993890 - protein, 239 aa, Homo sapiens
ILFSLSLSLSLSLSLSLSLSAVWGEEEEEFFPRHTFTRDTTSLHVSSLLQGASEAAPGCPTPESPCRERSLMRNSNSLFSSSPRRLFPSLSSLSTLPLVQRDHLPPPDTTPSAPRGGTRERLPSASLSLPPLPSLLGQPMDRCGIEGDSGRQYKDNSSPRQRASVALAPGWCFPAYITLSPERLLEQSQGRIEEKRVARREEAAERRQDERTLRARRGSVQLQPAGTILAAPSDSKRET

SEQ ID NO: 993891 - protein, 230 aa, Homo sapiens
GSLVGCHLRSIVTWVLHVVLRFLDDYPVYRCPTLLTGLVAVGYPAGPRQARGCTYVQTTTPGTVLVVGPAICSLLHPHAASAAGRSTVVREAAAEPPAFLVLFSYFTSAELVRAEADLVETQRPSSLHGAWCSLTLEETVLGVPSNQLKGEPAMLPFKDRCWITYFPDQLVNKLRVAFRDPDLVGSAAMEHPSKQLPACLSEQQPRGDAALQQTPGRACAEPLPCRCRKS

SEQ ID NO: 993892 - protein, 103 aa, Homo sapiens
MRHPRSHILVSLHFGRPHPHQSSTVVTVLITILLSRLNNTTRPIIQSQIDKSLMCLKVTSPQHLSTATYDQAFLCNAISSVHRPSHKPSSVSALIEFEPLLGQ

SEQ ID NO: 993893 - protein, 94 aa, Homo sapiens
KWKLTVCRRLEVRYQQQLRQLNSMGFINREGYSLQGLHCHRMGSHQRSYRETAGVPDSPNPWDPVPSMLVLPRPYESRAIQVFYLVKYPLTPSC

SEQ ID NO: 993894 - protein, 37 aa, Homo sapiens
MDEDVQEALLQIIQIAARGLLCQPLATALTVSCFTLA

SEQ ID NO: 993895 - protein, 48 aa, Homo sapiens
EERPEKIPDLKLLVEKKFLALQSKNSDADFQNNEKFVQFKQQLKELKK

SEQ ID NO: 993896 - protein, 173 aa, Homo sapiens
MVGCDYEIDSNATEDRCGVCLGDGSSCQTVRKMFKQKEGSGYVDIGLTPKGARDIRVMEIEGAGNFLAMRSEDPEKYYLNGGFIIQWNGNYKLAGTVFQYDRKGDLEKLMATGPTNESVWIQLLFQVTNPGIKYEYTIQKDGLDNDVEHQMYFWQYGHWTECSVTCGTDQRSM

SEQ ID NO: 993897 - protein, 200 aa, Homo sapiens
MLTMKFYLSLYFDTGKGQKASEIPKSKLDINVINNANKEFYLQLYFDPGKGQKNITNSLITTYALQSLYPGPPLATLFTPPYPTWISPPSPRAALQSRHLSCGAHYSPPASSLRQAAGRRPGPKRHEPALGRAPRSSLRTSRLLATRTPILSPEKTSDGPSCHVLASGVPALAQSRFTCHCLFFPDVSVPPPSTCQLPPT

SEQ ID NO: 993898 - protein, 88 aa, Homo sapiens
  misc_feature (25)..(25): Xaa can be any naturally occurring amino acid
  misc_feature (41)..(41): Xaa can be any naturally occurring amino acid
  misc_feature (44)..(44): Xaa can be any naturally occurring amino acid
RVPTKNPYNPANAKKNLQFGSSCLXLGDFAKPENIDLALHXLKXRENNALHHIPDVITYLSRLRNQSVFNFCAIPQVMAIATLAACYN

SEQ ID NO: 993899 - protein, 68 aa, Homo sapiens
  misc_feature (25)..(25): Xaa can be any naturally occurring amino acid
PGETAENDTMRSILEDTFTCAIESXHGVGGKVHYTNSSTEIPEFPIAPEIALELLMAAELLRLLNKIN

SEQ ID NO: 993900 - protein, 103 aa, Homo sapiens
SRENSSEHPSYSRSPHQVARWEFQTRAVSWDVDTAATLIGVGAAPVGVAGFGPGIGTAFGSFVGYAGNLFHKQQLISDAILGFAVSEAMGLFCLVVVFLILAT

SEQ ID NO: 993901 - protein, 109 aa, Homo sapiens
MRTVILTAEKADTEMGHERGGKGSDYQFEGLNLTSNLYTSVCVASIKKQRTISCHDCLTAPSSYAFPVPFCTEDEPEAKAIQMTTIFGIINMIFKEHFSHFEKGHSCEQ

SEQ ID NO: 993902 - protein, 34 aa, Homo sapiens
RALIFNRHTPHVCLVYFVPPRRLSQFVAHTLLSR

SEQ ID NO: 993903 - protein, 41 aa, Homo sapiens
VGSVKYLTWVCHQGAAGPGSSEGWCCCCPVQDGSASSSQKP

SEQ ID NO: 993904 - protein, 33 aa, Homo sapiens
IGIFFCPLLPFIQMIMLFIMFYSKNIEAFKLTV

SEQ ID NO: 993905 - protein, 32 aa, Homo sapiens
MSDVQENEEVKKAGMNEGRKQPQQLVPTREAG

SEQ ID NO: 993906 - protein, 53 aa, Homo sapiens
WLRNPGPQHDKRTLIGDMVCFLFITPVATILGTCIPQMKLITIMAISVVCFFF

SEQ ID NO: 993907 - protein, 79 aa, Homo sapiens
QNTESANIEQFLQERIKVNGKAGIPWWRGGDNRKEQEQDHRDIRGAFLQKVCDISNHKIFEEENLRDWMRVVANSKYEY

SEQ ID NO: 993908 - protein, 70 aa, Homo sapiens
MGVGANAGGGGGEYAARIRVYFQFICSLFYGFQTLQNTLQGAGGPNENQKNDAWNFIGGSGRMRKALLLV

SEQ ID NO: 993909 - protein, 77 aa, Homo sapiens
MRERVKGLKVEVRCRGWFVEMFKERPMDPLSVPSSCARENCRLSQQRQEKQLDIREKCLTSEGQLARRIFHEESQET

SEQ ID NO: 993910 - protein, 162 aa, Homo sapiens
MHPLYSSHLLQTQHRRLCRLCLQHQHLKLTLPLHHIVVLLWKYLQLQIRKFTVSSIPCHLPIALLPLFLHTMKLIRLKLLQWQLQQHKHLKELRRKSVHQQMTSAMQTSSQSGMMASSCSPLPMVLIFNWLGFCSSFCTTNSIPWKVRLYLRISRFLDQLDP

SEQ ID NO: 993911 - protein, 55 aa, Homo sapiens
EEGETASEETEEIAVEGAEGEAEEEEETAEGEEEPGEDEYTSGLSMRSFLTLYAE

SEQ ID NO: 993912 - protein, 59 aa, Homo sapiens
MTGLTNYQQKAEELGGNFKASGSTVCAPTHYATLPLTMRKQGHFFFFLVTKKIRVQVCG

SEQ ID NO: 993913 - protein, 56 aa, Homo sapiens
  misc_feature (17)..(17): Xaa can be any naturally occurring amino acid
RYKYTASYGLHEKPGQXRRPGDDFKEYSVFLTMLCMAYNDFFLEDNKSPGLPSTLT

SEQ ID NO: 993914 - protein, 71 aa, Homo sapiens
DSPNRAKKKASGLLGFPEVHSRPCLPGCHQQRLYNSEEGVLLLPLEASSQRSTCQMPAEPLLYEASVNPCW

SEQ ID NO: 993915 - protein, 85 aa, Homo sapiens
  misc_feature (85)..(85): Xaa can be any naturally occurring amino acid
AESSTAEADEANSLLSHRYFYFNAGRVATLFLNLHFEGYLILSSVLQIKIMITFLSYTYNMIQVFKSKCFGLTGGAFYFVYILMX

SEQ ID NO: 993916 - protein, 63 aa, Homo sapiens
  misc_feature (46)..(46): Xaa can be any naturally occurring amino acid
ENTREEIKIKSQDSYERRKTSSSTRDPDDGTSLPSYQIQHSQSKRXIAPLRSHHILANRQNTP

SEQ ID NO: 993917 - protein, 67 aa, Homo sapiens
  misc_feature (3)..(3): Xaa can be any naturally occurring amino acid
LSXEQESGLHYEPDHAYPRNIQIKPMSTHVAGGGEPDINPQASLIPPIREVEDECGLPGDQNYFFKA

SEQ ID NO: 993918 - protein, 31 aa, Homo sapiens
  misc_feature (31)..(31): Xaa can be any naturally occurring amino acid
MTNSEAKFVDTKHPFHENKIKREIKNKENAX

SEQ ID NO: 993919 - protein, 53 aa, Homo sapiens
LQGTILIASGTNQGKAAYVLDTPLMRRVRQTQRHISTVKYHEHFDKHKGCFTP

SEQ ID NO: 993920 - protein, 81 aa, Homo sapiens
DVASWDGDMGEKSNIGRIVVYFTWVQAGCPKKESAKGGEITSSYRFGIGITKYILKGGGEYIVLIRVGQEQITMVECHQLR

SEQ ID NO: 993921 - protein, 74 aa, Homo sapiens
LAERGYFVRVRTRAHDTASGSPDDLLPKVVRAQLGFIHFRETQDINQYSKKYTGFVHKGGENLKQGGVFQVTSR

SEQ ID NO: 993922 - protein, 47 aa, Homo sapiens
LAPAPMDHQSENNDIDEVIIPTAPLYKQILNLAAKQNAIEDTIFYLG

SEQ ID NO: 993923 - protein, 53 aa, Homo sapiens
QQGAATTVYCAAVPKLEGLGGMYFNNCCRCMPSPEAHSEETARTLWALSERLI

SEQ ID NO: 993924 - protein, 150 aa, Homo sapiens
MALSYLFLYLLVLLKLFKLWPLGALSHWLLCTFGMPSSTLYGSTSSFWHHRMLQAHLVISSPDSRLDLDISPRSPRPLLPFLSLSQTALSNPHPAEWSRLCSRRRQCCFPFSSDRTPHSLVSPPPPCFSPPAICPRHLLSCLTITPCIQP

SEQ ID NO: 993925 - protein, 115 aa, Homo sapiens
  misc_feature (2)..(2): Xaa can be any naturally occurring amino acid
  misc_feature (4)..(5): Xaa can be any naturally occurring amino acid
MXWXXFLPLGKQERNGSRNRSSAGLLSVTQILNSSKRAIANQFEDRPPASPQGELNHVKSSFFISPSCILQPVIPHLGHSNSLKIPRPKRLRQADLRSPPVSLFGSLMIKLPSLL

SEQ ID NO: 993926 - protein, 104 aa, Homo sapiens
MHQLDRTTRGTEGGAFSADWGYYFNEFPDSWFKTAEFHFFFIWGRGKKCCITSLVTAVFSTHIEKPEKKNISLRMFSNLFPLFLKANISCTIYSKGGDRIFLML

SEQ ID NO: 993927 - protein, 224 aa, Homo sapiens
  misc_feature (101)..(101): Xaa can be any naturally occurring amino acid
IIFYDTAGQQRWWEQELKINGNIQKGESFTYNLTQLIKPEAYEVRLTPLTKFGEGDSTIRVIKYSAPVNPHLREFHCGFEFCNICLFTQDDTDIRCGTKQXTATRNTKYAPPTGPNADRSGKKEGFYMYIETSRPRLEGEKARLLSPVFSIAPKNPYGPTNTAYCFSFFYHMYGQHIGVLNAYLRLKGQTTIENPLWGFSGNKRQRWNEAHVKIYPSTSLPLNF

SEQ ID NO: 993928 - protein, 53 aa, Homo sapiens
  misc_feature (21)..(21): Xaa can be any naturally occurring amino acid
  misc_feature (24)..(24): Xaa can be any naturally occurring amino acid
KDPTLLCKHIMSSEWSSQEQXLLXKTALETYFNNTHDNTLQICLPSFMTTKQS

SEQ ID NO: 993929 - protein, 54 aa, Homo sapiens
  misc_feature (49)..(49): Xaa can be any naturally occurring amino acid
PGIRGSPPQDDPLSENEQKNDDDILFGTKIPEVDQEALFELILAANYLXTQSAE

SEQ ID NO: 993930 - protein, 108 aa, Homo sapiens
  misc_feature (18)..(18): Xaa can be any naturally occurring amino acid
  misc_feature (21)..(21): Xaa can be any naturally occurring amino acid
LIRAHCPASRTGSPPVQXTPXGQFSLDLSELTDTMKLSGMFLRLCLALFCFLTGVFSQGGQVDCGEFQDTKVYCTRESNPHCSSDGQTYGNKCALVGAIVKSGGKISL

SEQ ID NO: 993931 - protein, 56 aa, Homo sapiens
FRNLRAWIRNTLLRREIGKLTEELKHLTEALKEHEKMRPLLLCPMNCSASASPGRT

SEQ ID NO: 993932 - protein, 84 aa, Homo sapiens
FLGTPCTSVKRSEPELAKDVIELWICMCITLPCYKTPTAGRHKDVSVPPFDRYEEHFKRCSLWKWIKLELICHTRYECYDTYDV

SEQ ID NO: 993933 - protein, 47 aa, Homo sapiens
MQRQSRGEPPLPDEDLSKLFKPPQHDCQDGLTLLIAGQINTYCQNIK

SEQ ID NO: 993934 - protein, 103 aa, Homo sapiens
  misc_feature (8)..(8): Xaa can be any naturally occurring amino acid
  misc_feature (10)..(10): Xaa can be any naturally occurring amino acid
GGRLAERXEXPEFRDLTSTSLVVGHTKSQTPKSAAGPTSSGRINPYMSSPCHIEDDPYGKGTDVVLNQKEEVAQKKKISQKKLKKQKLMGTGVKSALKKMVLK

SEQ ID NO: 993935 - protein, 41 aa, Homo sapiens
  misc_feature (6)..(6): Xaa can be any naturally occurring amino acid
  misc_feature (21)..(21): Xaa can be any naturally occurring amino acid
MSLLIXGSDALSMASSSSSSXESTADSGNPLGSISPASLSV

SEQ ID NO: 993936 - protein, 117 aa, Homo sapiens
  misc_feature (10)..(10): Xaa can be any naturally occurring amino acid
  misc_feature (48)..(48): Xaa can be any naturally occurring amino acid
MREIVLTQTXQCGNRIGAKFWEVISDEHAIDSAGTYRGDRDLLLKRIXVYYNEASGSGYVPRAVLTDLEPGTLDSVRLRPFRPDLSGRRTFSWDSPVQHGLEIFPCSSVQIWLRFPA

SEQ ID NO: 993937 - protein, 72 aa, Homo sapiens
  misc_feature (16)..(16): Xaa can be any naturally occurring amino acid
IILPSKRASLFDTPFXFVRQKGLSKKQERNNSYHHRAFYKAPSSLSSPHRLRSEIKSAPPKKKTPPNTHTKK

SEQ ID NO: 993938 - protein, 51 aa, Homo sapiens
MINGIGVTEFELEAKLSGGTMIIKPATQQQRTNKGFCAAEIITEATVARWP

SEQ ID NO: 993939 - protein, 66 aa, Homo sapiens
  misc_feature (33)..(33): Xaa can be any naturally occurring amino acid
  misc_feature (35)..(35): Xaa can be any naturally occurring amino acid
  misc_feature (37)..(37): Xaa can be any naturally occurring amino acid
  misc_feature (39)..(39): Xaa can be any naturally occurring amino acid
CYIKEDLDPCARPKRRQPYNAIFSPKGRGRETXTXKXKXKDEGQFFAFLVIYSESVVLNIDFFDLL

SEQ ID NO: 993940 - protein, 77 aa, Homo sapiens
  misc_feature (10)..(10): Xaa can be any naturally occurring amino acid
  misc_feature (12)..(12): Xaa can be any naturally occurring amino acid
  misc_feature (16)..(16): Xaa can be any naturally occurring amino acid
  misc_feature (77)..(77): Xaa can be any naturally occurring amino acid
CCTPPRPTRXIXSQPXDGLDLFAAVDLMTAQTPEHWVLRGVPFCVMSRNMWGVFPPIALENARSKLLKTKKTAACWX

SEQ ID NO: 993941 - protein, 153 aa, Homo sapiens
VSNYHRYRTIKGFKIAQHYVKRKKMKIMEEYEESGLLETDEATLDTRKIVEACKAVKMLFCKPELMTFTSLMINITRLHDYGQRQPLTVEHMYENISQDHVKKTVTIENHPMCSVHPCRHAEVMKKIIETVAEGGGELGVHMICTSCHSNNRI

SEQ ID NO: 993942 - protein, 62 aa, Homo sapiens
FQPHITVLMQALWMNFEESLQTTGTHSFDGIWKASFTTFTVTKYWFYRLLSALFGIPMELIW

SEQ ID NO: 993943 - protein, 52 aa, Homo sapiens
  misc_feature (38)..(38): Xaa can be any naturally occurring amino acid
MTAVVKFVDYGNYDGVLLSTIKPIQTEAWEEEGTYDHXLEFRGEVMASLDDP

SEQ ID NO: 993944 - protein, 103 aa, Homo sapiens
MSCCGSRPGAVGRSETPAPAVPYAGEALDRTTSDAMLPPDPTRLSPCNWMPKVPSRGNPRPLESPDLYSYLGSHISPFIPCGGGRQTSIKILGNKKKIGLSQK

SEQ ID NO: 993945 - protein, 68 aa, Homo sapiens
  misc_feature (3)..(3): Xaa can be any naturally occurring amino acid
MTXFPRLTTIGSVTVALLLILLLTLVASVVTSNKRATQGTYSPSRQEKEGSRVEMWNLMPPPAPERPT

SEQ ID NO: 993946 - protein, 87 aa, Homo sapiens
  misc_feature (20)..(20): Xaa can be any naturally occurring amino acid
GGGREGGGRGKEAFSRDHGXIVWLIRPKEEEVVVLFNVAEGAGDFKKSGSSPKWTHDKYQGDGIVEDEEETLENNEEKKDRRKEEKE

SEQ ID NO: 993947 - protein, 71 aa, Homo sapiens
LDAAYTKLSYETCHMHSIHEYSWKYGIPQVVCEGAERTAGHVQSTVWNETALSEDPTSGVIIFMEDDCVFQ

SEQ ID NO: 993948 - protein, 41 aa, Homo sapiens
DEDEILPVLLDEHPIFVVGLDFDRLMKGRGSINQIKSVYKN

SEQ ID NO: 993949 - protein, 183 aa, Homo sapiens
  misc_feature (30)..(30): Xaa can be any naturally occurring amino acid
MPAVTYPKNESTPPSEELELDKWKTTMKSXVRGEGVSTISSRKDEDPLAATREFIEMWRLLGKEVPEHITEEELKTLMECGSNTAKKKYLKYLYTKEKGKKARRIKKEMKAAAREEAKNIKLVETTEGDKQKNFLFLRLWDRNMDIAMGWEGAQAMQVGQPLGFAWVTKIYETKRIGNTGSSF

SEQ ID NO: 993950 - protein, 76 aa, Homo sapiens
  misc_feature (12)..(12): Xaa can be any naturally occurring amino acid
ECWCIAPVCSPXDRAPSYHGVAELSCVPLQCNPKGIIWFVGTDPSKNHTTYLLSEVQSVHEEWDKEPGSTNAFLSK

SEQ ID NO: 993951 - protein, 84 aa, Homo sapiens
  misc_feature (18)..(18): Xaa can be any naturally occurring amino acid
TEVEYGRVDGGLQSHWSXSRGSTRKGNPRSTSRESKQPRRGGNTSHWEKESQAGNYIFKLFDLIFAKCELLLAFTFPIKSTMIM

SEQ ID NO: 993952 - protein, 76 aa, Homo sapiens
LTYPLETDVDPMSHAKELSTTCLSCDRNTPEKTRRYESCVSILYGLMTITLRVPENGTTGGLGLAIISLVHGPQAH

SEQ ID NO: 993953 - protein, 71 aa, Homo sapiens
DSFTDILRAILLSLEVLIEDPELQINAFILIIDWSNPSLQTTAPNLTPFNPLNLAIRRGSTDSNPLAPFVT

SEQ ID NO: 993954 - protein, 167 aa, Homo sapiens
  misc_feature (48)..(48): Xaa can be any naturally occurring amino acid
MGRTGLMGFDNLLWDWAALAQIVSGHGDKLRTLVLWMEVEAMREGEKXNNGLVCPQRGELWRPVPFKGGEMQEPRFLESLGSVVRVGGTGSTPWKGGIRLSADIRGWRREGGVSQGAAGGGNGKGRVCWGFHERRAAGEVKMYAVMPGREAARLEETGRVPRSERRS

SEQ ID NO: 993955 - protein, 68 aa, Homo sapiens
FRTHLRLIYNICDMASHGSYYLILYLSTLRWRGSRSLASIAIVEDLLLTVILSDHLETYLSSSKRSEF

SEQ ID NO: 993956 - protein, 45 aa, Homo sapiens
MKPVQFGTVPLLCTETEKSGLEVEDAAHQDRTTVLQDGHQSETLS

SEQ ID NO: 993957 - protein, 48 aa, Homo sapiens
MALLDGSLTGWTDSVSLNHCMEDNWKLPGTPALDSYGTRNKLLASLAS

SEQ ID NO: 993958 - protein, 80 aa, Homo sapiens
  misc_feature (18)..(18): Xaa can be any naturally occurring amino acid
  misc_feature (48)..(48): Xaa can be any naturally occurring amino acid
SYQLYGPNSPEAQKFIGXLMPFSGENYFDAEKNSISLCGQLFPSSHTXENKGHRYPCFFNTLQCGRYNKNCHKFLIQSNR

SEQ ID NO: 993959 - protein, 81 aa, Homo sapiens
EVHMRKTSTKRKGLACERLHSTSRGYLQQQNHLLLVNSFGRTVRFNVTGTPEQYVPYSTTRKKIQEWIPPSTPYKKDNEEQ

SEQ ID NO: 993960 - protein, 101 aa, Homo sapiens
PFRRVTFSVVSQPQDPHQGSLQSCYDSGLEESETPSSKSSSGPRLGALPLPEDNYERTTPDGSVGEAEHMENGVAAITTFPFLPFPHGKTHGRRVLLRPLH

SEQ ID NO: 993961 - protein, 55 aa, Homo sapiens
MRTAPGGRCVHYCTGMWVYPFLDTLARSQIIFFESTTILMNFLYLLGEVLNNYLW

SEQ ID NO: 993962 - protein, 88 aa, Homo sapiens
ARNTHEVDGEKKKTGVGLLQQLRLSFAFTMQEKMVGCAFHILGEGGQRTIIYYLDQMEEYDKVEEISSSKHNCFCIHEVVSGLRQPVG

SEQ ID NO: 993963 - protein, 56 aa, Homo sapiens
PPSQCETFQTRSELVDFLMETLIMFKDLIGKNVYPGGWMAMSMVQNRVFLRAMNKF

SEQ ID NO: 993964 - protein, 70 aa, Homo sapiens
  misc_feature (65)..(65): Xaa can be any naturally occurring amino acid
ALTCERISSKVVARVDHNDDNTIYESEESSEGSKTHTPLLDFSFYSRTETFEDEGAENSVSIAPXTDFTG

SEQ ID NO: 993965 - protein, 47 aa, Homo sapiens
  misc_feature (1)..(1): Xaa can be any naturally occurring amino acid
XTQCCRPSPGTFWLWLYRTTVWTATAWLWVQHVRWSADPVVTYFGGG

SEQ ID NO: 993966 - protein, 75 aa, Homo sapiens
  misc_feature (15)..(15): Xaa can be any naturally occurring amino acid
PPPSPPPTPKARQKXAQHTQDPFLLVLPYLHVHTALFSSKDFAGKSQHRSLRGMLVEEMDCECAQDLAPCYRDPA

SEQ ID NO: 993967 - protein, 32 aa, Homo sapiens
LGGDILPDSWQHDPKEQWACYTLAPFPERLHV

SEQ ID NO: 993968 - protein, 43 aa, Homo sapiens
MWYGVFLWALVSSLGFDVPAGLLALFTLRHHKYGRFMSVSILL

SEQ ID NO: 993969 - protein, 33 aa, Homo sapiens
KYGYLSLPKPMKNNANLKSLKPDKPDSEEQAKI

SEQ ID NO: 993970 - protein, 103 aa, Homo sapiens
MWTLLDKYFGSVCELDIIFNFEKAYFILDEFLLGGEVQETSKKNGLKAFEQADLLQEEAETPPRVLEEIGLTYLSSLVDDFLWHFTHCEMVTPFMSMLAHGVR

SEQ ID NO: 993971 - protein, 49 aa, Homo sapiens
LLTLADGASLKGKFKVQAGCCSTGLRTRGCGYEGASAAMPLAPGEAVSV

SEQ ID NO: 993972 - protein, 56 aa, Homo sapiens
SGDAALEVGTGYGCGREKPKEFLLYWKKTGNWKDFVNGLKFFMNKVLSAVISSRYT

SEQ ID NO: 993973 - protein, 66 aa, Homo sapiens
  misc_feature (20)..(20): Xaa can be any naturally occurring amino acid
SNYHRYRRHLTCRGDLELLXSGDGAASASRSAVMTRVGTTEFHSCRPGWSTMAALGSPHPPPPRFK

SEQ ID NO: 993974 - protein, 46 aa, Homo sapiens
PYSIFENVPNKKNVDEDGESIQNGYTWNLEADDRAEQKVQAKTSAG

SEQ ID NO: 993975 - protein, 71 aa, Homo sapiens
MVPAQRSMTDHYINKTGVSHVAQAGLKLLSSGHLPASASQSARITEGACFPFTFTMISKFPRGLPRHVELT

SEQ ID NO: 993976 - protein, 153 aa, Homo sapiens
  misc_feature (90)..(90): Xaa can be any naturally occurring amino acid
CVTLKYEIKKLIYVHLVIWLLLVAKMSGGGGRLLSHDQVAMPYQWEYPYLLSVLPSLLGLLSFPRNNISYLVLSMISMGLGGGRSTLYGXMEMFPAAQQLYRHGKAYRFLFGCSGVSIMYLGLVLAVQVHAWQLYYGKKLLDSWVTSTQEEEA

SEQ ID NO: 993977 - protein, 76 aa, Homo sapiens
TEAEEPAQQKLKGDLVASFFVVIVNAAAMNMVGTNILKSPGVQCFEIHTHTWDYWIIGLPFPYPGPKKDQLTEQYE

SEQ ID NO: 993978 - protein, 32 aa, Homo sapiens
  misc_feature (1)..(1): Xaa can be any naturally occurring amino acid
XDYVYYLYTRVLLNNAKIIFLRKHNAISLIKL

SEQ ID NO: 993979 - protein, 61 aa, Homo sapiens
VPTMTTLSISARNSLPKVANATGMGWVIAICYAFVFSALIEFATVNYFTKRSWAWEGKKVP

SEQ ID NO: 993980 - protein, 83 aa, Homo sapiens
  misc_feature (5)..(5): Xaa can be any naturally occurring amino acid
  misc_feature (17)..(18): Xaa can be any naturally occurring amino acid
QAREXTQLLSLRLGVRXXTAGLLEGLGGESFTLLLLLVEWGRALMLEATGWTRPEVGGLIQLKEAFGNGYEKIGAWYIGIGTR

SEQ ID NO: 993981 - protein, 62 aa, Homo sapiens
SGGRKGRGGEDASAKDVVFFKISYSALGNNYFSDYPFNFGERTRFLNSNTVVWNKRMASLAS

SEQ ID NO: 993982 - protein, 52 aa, Homo sapiens
LKFLVFAFILALMVSMIGADSSEEKFLVELEDSDMGMDLIRQGQKQHYTHTH

SEQ ID NO: 993983 - protein, 46 aa, Homo sapiens
SFLLLNTSADSKHTILSPWMRSSSEHCTLAVSVHRHLQPSGRYIAQ

SEQ ID NO: 993984 - protein, 71 aa, Homo sapiens
  misc_feature (3)..(3): Xaa can be any naturally occurring amino acid
  misc_feature (5)..(5): Xaa can be any naturally occurring amino acid
NPXSXAPPPPPRPPPPRYGLSEGFYAFDKKSVDTGFAPVNEVLKAVPILYYEMWKRMKSTSKRNIKRKNRK

SEQ ID NO: 993985 - protein, 77 aa, Homo sapiens
  misc_feature (17)..(17): Xaa can be any naturally occurring amino acid
RSRNMTSRTFLPLGKQXEERQQKPQLCGSTFSDTDPEFQQKSFANQFGDRPPASPQEELNQHENAVSSSHHPVFFNQ

SEQ ID NO: 993986 - protein, 84 aa, Homo sapiens
MSGHLPEQRVSYGGTPGGFRSCSILLVDLLASFFLHSKNILLEKYGSEGCGGKAGAHSSVRVFECLQVLRPHACQLVCEGVCLS

SEQ ID NO: 993987 - protein, 58 aa, Homo sapiens
GFDDDGSEFHGHIFLGVTPGELFKTRTIFSPFMELVTCGLCKNPYLRVKQNGRTHQSG

SEQ ID NO: 993988 - protein, 47 aa, Homo sapiens
LDTVRAELYVWALCRDQDELNPYAASPAPGHLGLQYRAHSLSVVPEP

SEQ ID NO: 993989 - protein, 56 aa, Homo sapiens
VQQTLAARSLQLERKRRDFTSSGSWKLYIDTHALVCLLEDNGFATQQAEIIVSALV

SEQ ID NO: 993990 - protein, 59 aa, Homo sapiens
MQGKTIQRTSTLLCSLHGWNAEPLLGRSGYRKAKCSCCDLIQLTTPAAPPLHLRHLLPI

SEQ ID NO: 993991 - protein, 62 aa, Homo sapiens
LFVSDPLTIQRYRMMISYKGQRTLSWLSSATGGCSLEEFSYASREESLLNEHGDCESLSASP

SEQ ID NO: 993992 - protein, 108 aa, Homo sapiens
RPHLGTPMMWLICESLRCEGSNSLKLEPTVPVLHDGVLTEAMMDTHVLDAAQPHASNDALAEEGEAWALGRTNLMLVCMADDHTLTGAWTMTPSHACLCCPAHLGNAA

SEQ ID NO: 993993 - protein, 39 aa, Homo sapiens
  misc_feature (22)..(22): Xaa can be any naturally occurring amino acid
MSQIFAYCRISTLDQTTKINAXEIESAGFKIKPYQIIEE

SEQ ID NO: 993994 - protein, 70 aa, Homo sapiens
SRRALCGYARGGRKGLGGTDSCFVLKLTEMSLVLSDTLIRLSVGLEDEDDLLEDLDQALKAAPPPSGIHS

SEQ ID NO: 993995 - protein, 69 aa, Homo sapiens
MKFQDELESGKGRGPGQSFQEQVEHYRDKLLQREKEKELERERERDKKDKEKLESRSKDKKEKDEGGPT

SEQ ID NO: 993996 - protein, 148 aa, Homo sapiens
  misc_feature (14)..(14): Xaa can be any naturally occurring amino acid
  misc_feature (28)..(28): Xaa can be any naturally occurring amino acid
  misc_feature (34)..(34): Xaa can be any naturally occurring amino acid
  misc_feature (37)..(38): Xaa can be any naturally occurring amino acid
  misc_feature (58)..(58): Xaa can be any naturally occurring amino acid
MELCSCFPGMECNXTISAHCNLCLLGGXGGCYLXLLXXLGLQPQKQGDKGDIMVGKRXNKTHMCHCCGSKGYHLQKLTWGGWGYPGKRKRKYNGSAKGKRQNTTGDWGEWRHLKIVEPTFRHRFREGTPPKPKRGAGGSIQVILRISR

SEQ ID NO: 993997 - protein, 66 aa, Homo sapiens
LLRDSLLCLSEATGTSVIVGVPPDFQNLSMTPMLLLTGRTWKGAVLGGFKSKECVPKLVADFMAKK

SEQ ID NO: 993998 - protein, 38 aa, Homo sapiens
NQEVVDFEKLDDYTSAFQGHDVGFCCLSTTRGKAGAEG

SEQ ID NO: 993999 - protein, 51 aa, Homo sapiens
  misc_feature (12)..(12): Xaa can be any naturally occurring amino acid
  misc_feature (16)..(16): Xaa can be any naturally occurring amino acid
  misc_feature (24)..(24): Xaa can be any naturally occurring amino acid
SYNSPSCKYITXTCLXKVDTKMLXNGLLSIINTNLAQVEKDQARLIMPSAY

SEQ ID NO: 994000 - protein, 66 aa, Homo sapiens
SQRNRLKILGNAGGIERKASGSENEGDYNPGGKHGKTTSKKPKKTSFDQDSDVDIFPSDFPTEPPS

SEQ ID NO: 994001 - protein, 88 aa, Homo sapiens
SDRRIIIRKKAKRKKTQHYLLITSLPTGGWAGDSVKASKFRREAGEEIEDFRLRPQSLNGSDYGGDIPIIPDLEEAQEEDFVLQVAAP

SEQ ID NO: 994002 - protein, 89 aa, Homo sapiens
ARGFRQEAYSEEYPRKAEKKFQATALEISYGTNSSRWSGHTGISYSQQSNVAATQVTRALKSSCGDPHDLTTHILKTGKCAFSGEEETN

SEQ ID NO: 994003 - protein, 116 aa, Homo sapiens
  misc_feature (1)..(1): Xaa can be any naturally occurring amino acid
  misc_feature (8)..(8): Xaa can be any naturally occurring amino acid
XKAMAVSXKFVAKLPEASETTNPPGETNNFRRITLRTVTLTAKVCNFTPEPPRPRTHRKEETPEHIRTSEGTNSRHAAFKNCNTHREGPRFILEVSETKNPPILDTPPCPSTFHRY

SEQ ID NO: 994004 - protein, 71 aa, Homo sapiens
  misc_feature (4)..(4): Xaa can be any naturally occurring amino acid
  misc_feature (31)..(31): Xaa can be any naturally occurring amino acid
  misc_feature (47)..(47): Xaa can be any naturally occurring amino acid
RRTXEAVVLGAPSEICLQFSPSRCENGDKHXRELFLNFTYCLDYLVXSYRGSFVRVLSVPERPCPMVLGFD

SEQ ID NO: 994005 - protein, 85 aa, Homo sapiens
  misc_feature (33)..(33): Xaa can be any naturally occurring amino acid
  misc_feature (46)..(46): Xaa can be any naturally occurring amino acid
GRGEGGGGKGQLPSLSFAHKRTTRDRAMMKWLXCSRIQEEGADNYXQLQMVRLQGKITFFPTIPFPIPHSTVSHIHCPIKSSTYT

SEQ ID NO: 994006 - protein, 80 aa, Homo sapiens
  misc_feature (9)..(9): Xaa can be any naturally occurring amino acid
  misc_feature (11)..(11): Xaa can be any naturally occurring amino acid
CLELHAVLXGXNRFWCSPLGLAVEHGPYVPDFLQRLLCALYGQTNCPKHFWITLYYTNSLLMSHGSSCHIIKIFPSRYEA

SEQ ID NO: 994007 - protein, 75 aa, Homo sapiens
RRTSSTAEANEAEPFIVTDIMIDAFEGYVGFAINHHLFNIHNPIFNQLNGDEDKIIVHVEQKICQFYESPGYYFR

SEQ ID NO: 994008 - protein, 89 aa, Homo sapiens
ERNVMECNGMESTRVQGNGMEWNAMEWNHPEWNGMECNGMDWNGINPSAMEWSEMEWNGMETTRMDWNIMECKGIEEEESECNEREWNG

SEQ ID NO: 994009 - protein, 173 aa, Homo sapiens
  misc_feature (23)..(23): Xaa can be any naturally occurring amino acid
  misc_feature (51)..(51): Xaa can be any naturally occurring amino acid
  misc_feature (56)..(56): Xaa can be any naturally occurring amino acid
AWSTLNQQYHPNNYFTASRSDWXKHNIEVLEGNEQFIYAVKIIRHPKYNSXELMDXVTLLLIKTLHTMPFINSPECPLISLPTTPSSVLAHELPPSLDWGNTTELLAADYPRRAACALDAPRAEPGVSMKPPYPGKTTNNVLRVGNLEGGTDALQGDSGGPKVWNTQTREVVH

SEQ ID NO: 994010 - protein, 90 aa, Homo sapiens
GRGEGFGRKLPARANEAMALLFFWYIRLLKEEELEALNIPEIVTVFFRTFSNKSLHWLMKKKMTEKGYTSWSSTILRCNLGGGVMWLDMF

SEQ ID NO: 994011 - protein, 92 aa, Homo sapiens
MRSFQTHGNYTSKLNSIIKEETLILPVITEYLSTLKCLNNLGFSRMVGKGFLKLCGSYTLCFLENTLNEHFKEINGIYKLSTSRHLKIIKAD

SEQ ID NO: 994012 - protein, 52 aa, Homo sapiens
MITGILLGVVTTDVPVKELLKTIPKYKSRDLTVIAFCNHKIYGHMPDVILDL

SEQ ID NO: 994013 - protein, 64 aa, Homo sapiens
LLRELSTNLTSPAPSFHACLLCSGGDTLSRITGCLTPQLVIAGAVSTARETYPWPEGIRGGKTY

SEQ ID NO: 994014 - protein, 33 aa, Homo sapiens
RTQRGALVPLSRLTGKALTRRPPSLDTVNFAKH

SEQ ID NO: 994015 - protein, 48 aa, Homo sapiens
MIIKDPLTHESLVRDNPPILPDDGLDHSPCHLDRLHIAARARTKAPHQ

SEQ ID NO: 994016 - protein, 97 aa, Homo sapiens
KFAAVHSMNAVTGVTMTSKSQMPASNSDAIMDEQSTALPLSQPHQERLAEYGDAAHYSDVAPDPTDCSVPLPMESISCVYGIAVLGNVSSIPTYDRA

SEQ ID NO: 994017 - protein, 116 aa, Homo sapiens
  misc_feature (24)..(24): Xaa can be any naturally occurring amino acid
  misc_feature (26)..(26): Xaa can be any naturally occurring amino acid
  misc_feature (30)..(30): Xaa can be any naturally occurring amino acid
  misc_feature (41)..(41): Xaa can be any naturally occurring amino acid
  misc_feature (46)..(46): Xaa can be any naturally occurring amino acid
  misc_feature (49)..(49): Xaa can be any naturally occurring amino acid
  misc_feature (57)..(57): Xaa can be any naturally occurring amino acid
MRGRVDVIFSMCESQRKQNWPWGXGXHACXTPPLWEGRGRXDWLEXLAXGEPAQATXVRTPFLQKGAKILAAHGGMCLWYQLLGRLRQEDGLSSRGGGCSELKSHYSLSDRVRPCL

SEQ ID NO: 994018 - protein, 66 aa, Homo sapiens
MARLPKAIYRFNADSYQTTNVIFHRIRKNYSKIRLKPKKTQVAKAIQKPEIKPHTYSHLIFNKGRR

SEQ ID NO: 994019 - protein, 77 aa, Homo sapiens
RRDLAATSVTPLIARVDSADLAGLGGWSPSSLTAPCASLPKLRARSKRTTIPDRGGPVFGQGYTSSCAPLLEPPTSS

SEQ ID NO: 994020 - protein, 130 aa, Homo sapiens
  misc_feature (67)..(67): Xaa can be any naturally occurring amino acid
  misc_feature (76)..(76): Xaa can be any naturally occurring amino acid
HHPISDIGQPEVLGLGFYLETTLTVSCMGWNSPGHKAFEPGRRDEPSKSGPFGWCLRREQRTHPWQXEGLPQPLIXRWEQSPQPTIPIVGIVAGLVVLGAVVTGAVVAAVMWRKKSSERPKELLLRLQES

SEQ ID NO: 994021 - protein, 98 aa, Homo sapiens
CLPKTLASFPLSRWHLCATSHTGSRHTACAFGAEITRFTLLIFVLQVKPRGRGEGRGDHLRVPSTDLRLHKTSDFSSALKRVTLGTGLEPHLLIDLAP

SEQ ID NO: 994022 - protein, 33 aa, Homo sapiens
KLLTMYGDMTGIERVHSNGIKLILSQELEPEAK

SEQ ID NO: 994023 - protein, 71 aa, Homo sapiens
  misc_feature (50)..(50): Xaa can be any naturally occurring amino acid
  misc_feature (55)..(55): Xaa can be any naturally occurring amino acid
  misc_feature (58)..(58): Xaa can be any naturally occurring amino acid
KLLTMYGDMPDLWISWDSEQGLHERGAERAAGVCHLCYSRHKASAPTAPXDRSSXWTXFIQKTIKISLSKK

SEQ ID NO: 994024 - protein, 51 aa, Homo sapiens
  misc_feature (33)..(33): Xaa can be any naturally occurring amino acid
QASNDVRGHGGLTNIMQSQKQHSNSFQSNASTXHDFSSIFVKNKKKLNPKK

SEQ ID NO: 994025 - protein, 71 aa, Homo sapiens
  misc_feature (29)..(29): Xaa can be any naturally occurring amino acid
  misc_feature (40)..(40): Xaa can be any naturally occurring amino acid
  misc_feature (56)..(56): Xaa can be any naturally occurring amino acid
  misc_feature (59)..(59): Xaa can be any naturally occurring amino acid
  misc_feature (65)..(65): Xaa can be any naturally occurring amino acid
  misc_feature (69)..(69): Xaa can be any naturally occurring amino acid
MATPYCRACGITSSSRRRLPYLLQLLRRXRRRGGVYNLVXAKSEEVMNVYSVSQWXDYXVLAYLXLRIXYR

SEQ ID NO: 994026 - protein, 35 aa, Homo sapiens
  misc_feature (30)..(30): Xaa can be any naturally occurring amino acid
  misc_feature (34)..(34): Xaa can be any naturally occurring amino acid
AAAYYYYIRGRVDDLTQLIITLPVIQYFLXSISXG

SEQ ID NO: 994027 - protein, 58 aa, Homo sapiens
RLTLYRYPLYIASTLTLYRYPLYIASTLTLYRYPLYIASTLSLYWYPLYIASTLTLYW

SEQ ID NO: 994028 - protein, 32 aa, Homo sapiens
STSWALTEPMYPMTPQEERHAITTHITEEASL

SEQ ID NO: 994029 - protein, 84 aa, Homo sapiens
MEKSHNHGVVGNFHLYECFGSVWILFDSVYERVGYQDSGAVNDATDGEVRTDSSSGQWDDEYRPPGLGDGSVSFNYEEPMLGPS

SEQ ID NO: 994030 - protein, 113 aa, Homo sapiens
RPPTTTKFAAASTFDRFSLCSQAGIQWHDHSSLQPQLTEPKRSFHLSPPSSRHHRHAPPRLANSFVFLVEMGLHHAAQAGLDLLDSSEIGLPKCWNYRHKPPCLAHLYNFLIQ

SEQ ID NO: 994031 - protein, 148 aa, Homo sapiens
  misc_feature (144)..(144): Xaa can be any naturally occurring amino acid
GRLLLLNSRPRRRLFQLTFVTREPLFMTTKSNVAEVLKSSLETLVKGDSSPVFGRGGNSEEIARESRRSHCRDYGTFGEGGAVTVHSRKQRNNGLYSPYFLIAKIDGGVRPILDLHILNESVATKGPFECLRQSICWNVSTTDXCIKG

SEQ ID NO: 994032 - protein, 140 aa, Homo sapiens
  misc_feature (84)..(84): Xaa can be any naturally occurring amino acid
ASTNAIQYSFRGLQLLLNASKTKCMLFNRSLPAPASPTSITTLDGSDLEYVDIYKYLGVCLDCKLSFQTHIKHLQLKIKSRVGXLILNKTSFTHAAKLTLVKLTILPILDFGDVIYKIASNTLLSKLDAVYHSAIRFVTK

SEQ ID NO: 994033 - protein, 62 aa, Homo sapiens
RPPTTTKFAAASTDTILYTFGPSLDTGYLTSKLSFNAIQHSFRGLQLLLNASKTKCMLFNCR

SEQ ID NO: 994034 - protein, 46 aa, Homo sapiens
FRPGERGERERKECPTPLNTDKSNMTLTGSNDTGASWQSVVAVDAA

SEQ ID NO: 994035 - protein, 91 aa, Homo sapiens
MEVLLFHSSHSHLQYDDEQQNTFKDDVRIFPESGQAICRCEVVRGLLSISFIAIISKRIFNASSNDMKLKPELFLTQQSLSGHLPKYEQVR

SEQ ID NO: 994036 - protein, 145 aa, Homo sapiens
CQSGEPGLDGTCPQLVTQSLSQDSPSTKQRQSREKRRMAGSKGLAGFVCFLVCVIFHTGLFFTSLGFSKSPFSCSFSTISSGVPGVVTFVYSIRGAKGTDMQKVCSKKHFLTSPKRAFFPKCPKRVPLSSCELPEREGQRAEEFG

SEQ ID NO: 994037 - protein, 81 aa, Homo sapiens
VDLESWKLDYPTLLLQMDLEELLEVLAGERSYSYTLDRRPVLLYRGWSSSSTERAASGGTHMELVREEGDTRLASHISRIN

SEQ ID NO: 994038 - protein, 69 aa, Homo sapiens
  misc_feature (51)..(51): Xaa can be any naturally occurring amino acid
KLLTMYGDMHKREVLVCWLRPLFLLPRLQEEKRKGLQEGMFRSGGKAAPKXHSEVNDELGNHLNKHILD

SEQ ID NO: 994039 - protein, 54 aa, Homo sapiens
  misc_feature (35)..(35): Xaa can be any naturally occurring amino acid
  misc_feature (42)..(42): Xaa can be any naturally occurring amino acid
FKLLTMYGDMAAIRRASAILRSQEPVMVKRKRDPXPPRAPEXPCPQSNKVSWLS

SEQ ID NO: 994040 - protein, 60 aa, Homo sapiens
  misc_feature (25)..(25): Xaa can be any naturally occurring amino acid
  misc_feature (44)..(44): Xaa can be any naturally occurring amino acid
QASTMYGDMVKAVVLEKATGDEDRXLKYELTLMEYELTRSTESXLKVQTSKSVANKKCYL

SEQ ID NO: 994041 - protein, 42 aa, Homo sapiens
QASNDVRGHDIQLSLPSSPEPEDGDKVYKNEDLLNEINSLKA

SEQ ID NO: 994042 - protein, 42 aa, Homo sapiens
PPPPPPPVIPPTENEHDEHDEKHQKQLERAQLENEKKKREIA

SEQ ID NO: 994043 - protein, 180 aa, Homo sapiens
VAHTRWTNYAYPPWHQPSSVHIPPEKKKDVESNCRAHGIGLIVFADPLLSASYDILLAPTRKSPHPADVEDYLEKRLKAADLAALKSRIHELELSILMKIIVVFNMRGGIGKTTLAVTLAEGLAQYGGSKVLLADADPQRSASHRLCLLTTVNECGQPGSGRNISKYLSDAIVRNSLPDP

SEQ ID NO: 994044 - protein, 42 aa, Homo sapiens
FKLLTMYGDMYIGPDAFSTPPLDPVATLFHVFKVRQKPPQAK

SEQ ID NO: 994045 - protein, 38 aa, Homo sapiens
QASNDVRGHGETSESKVGQVDQTLIPAGKLVESRKKKK

SEQ ID NO: 994046 - protein, 33 aa, Homo sapiens
FKLLTMYGDMIILEKEEKSFFFADENKGVFGQK

SEQ ID NO: 994047 - protein, 39 aa, Homo sapiens
ARIQASNDVRGHDVLSFLTFQLTEPGKKPPTPDKEISEK

SEQ ID NO: 994048 - protein, 40 aa, Homo sapiens
  misc_feature (14)..(14): Xaa can be any naturally occurring amino acid
  misc_feature (24)..(24): Xaa can be any naturally occurring amino acid
MYGGHGPTNAQESXNFVYHSSPTXLRCENRINFTQKTEKK

SEQ ID NO: 994049 - protein, 34 aa, Homo sapiens
FKLLTMYGDMPYHKYLFYLSTPHRLGPSNKAVLY

SEQ ID NO: 994050 - protein, 42 aa, Homo sapiens
  misc_feature (26)..(26): Xaa can be any naturally occurring amino acid
EFKLLTMYGDMRWFQQKDDGDHPFLXNKFPFSIQKSNKKFSV

SEQ ID NO: 994051 - protein, 33 aa, Homo sapiens
LEFKLLNDSTGDMGLKQRVIVIENWSQKTIDQV

SEQ ID NO: 994052 - protein, 42 aa, Homo sapiens
  misc_feature (21)..(21): Xaa can be any naturally occurring amino acid
ALNSKLSNDSTGTMTVTPLYXTCSSDSTRPHNVSGVSRYFGK

SEQ ID NO: 994053 - protein, 48 aa, Homo sapiens
KLLTMYGDMRKEMLLPPKVQESENRTVLVSQRQGGSPNALSIKNIEPG

SEQ ID NO: 994054 - protein, 290 aa, Homo sapiens
MPNSEHFGLPVLSNLADLIWLRNGAPEIASASCQCYHWDCCGGAPNSWGTSNARSLRGGLPAAGSQLLPRGGGGRGGMNKQMRVAVYPYIIQHIDVLMPPDCVARPCCGADRSYCEVSSLCDCARSLLLDVLLPVLYDLTLKDTEHHESLSLKQRECSTAIAHKDLPVVLPTETRQLNGLGPKEPGRLSDGEPGHGQAGPRGAESSVSQRIWPLSIMTERAGIPSVPPARSACSGEPETAGSNLTHRTRRYREEDRNGTETHTNSTNEQPLRFNPCSATHHNGPANTPGT

SEQ ID NO: 994055 - protein, 58 aa, Homo sapiens
MENFKVAARSSPLVYTKRAKEYKRLLNYRYNTKREYFRATRMKYVPRHKYMVRDARCQ

SEQ ID NO: 994056 - protein, 466 aa, Homo sapiens
  misc_feature (29)..(29): Xaa can be any naturally occurring amino acid
  misc_feature (167)..(167): Xaa can be any naturally occurring amino acid
MCDPGSLQPNVRLTGVAARVWRTGFSEIXSRGRLAQKADALMRFQRRAEVSCLLRTGVVTSPDLVHGGECKAKLSIRYDESDEHCVCDLEFSSEHKKDLCSALMCRLDWTRLGSTVTLVARDFARNDREFDRQFGLSGGDGQGVAWDVTYQLSAGDRDTQIHFHKGXAEKSMALEDQINVPNGAEEGSVNSHRRAERGGSGGEESNWVLDFIGSCWDGLRRGPIGVGPLQEGTGLVTVNVKVSRTRLQWEGVWLRETPLSRAHGGQLDVEGSLTCGGSPFDVSSRLWAFGPWFNTAERTRDGRTIPFGRGSDGLPFPSSFDQEGRTFAAKRAGTTQQQWCHFEPIPGYVGVTPRGVRAQPTARRVNFWEQQARRRMEGAPKRNRGGGGEGATGPQGGDHPSTYREERTRNFLRTTTREIDGRQQIRRLVRKTNKRRPGSERRESDTARHTVTHTRQAGEPQVSDAK

SEQ ID NO: 994057 - protein, 242 aa, Homo sapiens
MHRTKAPDAAQVPPPWEGKPIFKIRQAPFPSCPKGGPTLAPVGRQEVKGIKRLKKRATEVWFPSLLFFFQKKTREVDHMTRSHKHNRTIHSKRTSTKEDKQKHPGEGKRYSHQKRDGDEGADAAEHNKTGAMRDQSTQHTKRGHTTTQGACPEQQNTGRWVVHSRRGTAPSGENVISGGGNNQRARRGDNHKRSCQQAGLDPPPVTCRGAKGTDQNRTHTMDPATNDQAPRGHNSTPRGITH

SEQ ID NO: 994058 - protein, 206 aa, Homo sapiens
MVNNEGVCVESAVTIVEHHHPWVVVGIVGYVEDASYDSGGFCDCSLVHAQSVMNAMSACALIIGVNLRPKVYYQSYWDNIALDDRSVAAIEVKEDFGDSVDKVRCQSLVLVVIGLGNQMLHCFPLRQKEEALADREIQSEGEGLGAEKLDLGPRQTLDQRGILWKHRVLGSDEDDLRLLGVSMAKLQRCDQVLGNKEVRAEPRRLR

SEQ ID NO: 994059 - protein, 168 aa, Homo sapiens
  misc_feature (33)..(33): Xaa can be any naturally occurring amino acid
  misc_feature (36)..(36): Xaa can be any naturally occurring amino acid
  misc_feature (40)..(40): Xaa can be any naturally occurring amino acid
  misc_feature (63)..(63): Xaa can be any naturally occurring amino acid
  misc_feature (66)..(66): Xaa can be any naturally occurring amino acid
  misc_feature (76)..(76): Xaa can be any naturally occurring amino acid
  misc_feature (80)..(81): Xaa can be any naturally occurring amino acid
  misc_feature (105)..(105): Xaa can be any naturally occurring amino acid
  misc_feature (113)..(113): Xaa can be any naturally occurring amino acid
  misc_feature (120)..(120): Xaa can be any naturally occurring amino acid
  misc_feature (137)..(137): Xaa can be any naturally occurring amino acid
  misc_feature (151)..(151): Xaa can be any naturally occurring amino acid
  misc_feature (154)..(154): Xaa can be any naturally occurring amino acid
  misc_feature (157)..(157): Xaa can be any naturally occurring amino acid
  misc_feature (160)..(160): Xaa can be any naturally occurring amino acid
  misc_feature (162)..(162): Xaa can be any naturally occurring amino acid
  misc_feature (165)..(165): Xaa can be any naturally occurring amino acid
  misc_feature (168)..(168): Xaa can be any naturally occurring amino acid
METGLAAHVCVAFRESKPRVTQVMSITMLWWRXLDXVRPXDMSYLLAVIAKRQCTSNTYGSVXTRXGTSARHTSGXRRLXXLKTVGPTPAASASWRGTCTGDVVXVPFSRRSXVPWRILXIYGNDLCVKGSDAMMEXKRDPLCTYDPSQLXTVXARXSVXKXTLXLGX

SEQ ID NO: 994060 - protein, 85 aa, Homo sapiens
RERSPDRPIARRRRCIPASSRSYIPLPIAADHQCPKRKAEGDAKGDRERKVKDEPQRMIRVGLSVINPCLRPNARRPTPKKAACT

SEQ ID NO: 994061 - protein, 123 aa, Homo sapiens
  misc_feature (84)..(84): Xaa can be any naturally occurring amino acid
MLKGVRQSTNRQKEASGTSTPRFRRPEDTATPETSRKLSLVMERVPGETELDHVCYSFIVIRLIQLMSAIEEDTKDKQRQLVVXLVGVLTRLSEAPGLIAGLSKQGCDDDVMLAEGQTTLIRA

SEQ ID NO: 994062 - protein, 104 aa, Homo sapiens
SERGSESGHERRLLAQIQVSVRLVVGADSMPKNGPRCGPEAGACNGRRVAHTSLPDGRWCALRTKRSKKTSMGVRRASGQQGMSAGPRRPGTGKASQELRKAKG

SEQ ID NO: 994063 - protein, 396 aa, Homo sapiens
MTCLPEDASVGSRNELQAIQRDKHANRGTCMLADIVLIMTFFYLRGCFITVYGGYLCSVRVYQYFQWQQDQRQAVEREAWKIAQEVMYEREEGFVRPVGTRVPNWHCLLEEDFRHVHAFSQAQTGLEPLMSYCKTLFGKKACSNGYLWFYARFDKSYGGLLNRNSQCRGVRVHRTSTVRINFARGPEKNTENNRRHNLNRPKRRKGGKKKAEKTQAAREDTKTSGVNCGPHSIEAKTAGPQANRGDPIGGGHHEEIAQEAQKKHQANKLSSDNTETRHRQHNDKAELNRSRASEPGPDEITAVAKQHNPAIPTPKDQRARETTRSAPPRATQTRTTPGAPARETQQRTRDPHRGEGTRDTKYPPDTAKRYARQKADNRERDTSNTPPRVRRQKVEQ

SEQ ID NO: 994064 - protein, 96 aa, Homo sapiens
MRVSLCIAQVSDEWISGLILASLQKTPTPGFKAILLAQTSRVAGDPQVGVHQSQLSIVITRSRWGLDHFAQAGLETPDYQITSICLRLSKVLALHG

SEQ ID NO: 994065 - protein, 369 aa, Homo sapiens
MERRAYKRGCNGLLPIGAPGPSSNVQGSNSEVSKSQWKVAGGVGWTVAWRIHGAFGSSSTTRVVAAAVGPSAVGARCVLLQCAPTGLRSSSGARNDAGWDIFLTWCLSRQALLSTLRCGLSGPPGPRKVFITRCGPSHIIQGGLGMLDRWKPPADWMAYNQVCFLFGLPHLGTSLKRLGQCSTQFSSGGRLFPECFKLVPEERDLQNTGGLGHPSPWDRTGNAKSRSRKTTLLGSTSGERNSTEPSPTRGDIRHKEALRTPPLWKKGNSSPRTGPGPLCLRPANRGYNYILFSHPRDGAATDTEYGYTCGHSENYSERHQKGETQNVMSRQPHLNKAVAQGQSTIRKTQRDTVKLVRPNDYLGADTTTN

SEQ ID NO: 994066 - protein, 153 aa, Homo sapiens
MKEESAPPQRREERNAHNNEERNRVGRGSPTRAERLGSKTNTTRNMTEQQHPTEQPTKQEKRTTYSSSASPKQACKTTIMYRSTRREAEAQQHNTMRAGGRQNIRRGGETTRVMSTTNRIMGRSNSQQQDTHRTTFHGRSTYQEVREKHPGAD

SEQ ID NO: 994067 - protein, 86 aa, Homo sapiens
QGVLVVRPKPSRVPMGSASRTKTSSCKWRRTTVREGSYEASCPIVNVNHLVPETTTLTGVPSRWGIMSCESKGGIPHMEVVDCERE

SEQ ID NO: 994068 - protein, 227 aa, Homo sapiens
  misc_feature (33)..(33): Xaa can be any naturally occurring amino acid
MKLGNNPLVKRFLQERRIGTGFCLRRIWSAILXFQTRTLVMSGIFYINDLQATVVTISTHRITYLSTGACVGVLIEEVRDDSGNTFLKVQKCLYTSRDIRAARGLISYQCREQSRYRRVTRFYVPISHGDDAMILYYHSVCFRLTCDNILSGELQKEQSKQAEHEECIKSREQEQSSSSVTGRDETNVKMRESEGACRVTLREGRRNMTGMKIDHASTGVARPAEPA

SEQ ID NO: 994069 - protein, 216 aa, Homo sapiens
MTFSARQDSNISSLPHATSGSSERSVQACQNTCVPVGSTKRPPSVLCPAHGWRLRPQESSRWFLGCGPSVQEGQAMWGSGGGTWPNTENYAGGVGWKWLQVSQIEDQMEHHATNCEQNDLAILPGSRSEGEPVEHREKTGHRSGMSWTHHGPPMLEQQGERNPAGVQEGLGESMYCKASHTSAPCKGSDDPFAGSGAVTTSSRQSVRAAFGEMCSC

SEQ ID NO: 994070 - protein, 54 aa, Homo sapiens
  misc_feature (19)..(19): Xaa can be any naturally occurring amino acid
MPAVRSPVAGQYDAAPPKXKYRMLRRLKEALALSRNLQGKIWPREPLGTGYSAT

SEQ ID NO: 994071 - protein, 126 aa, Homo sapiens
  misc_feature (125)..(125): Xaa can be any naturally occurring amino acid
GRGVVGVSCFNSALDRNPGRSYPHPGPVAHSQPSVTSSLAPSDCPLGPAPAASMRPRSPTGLPPAQPSLLGRRSSGSRRVSRSRGLAAGTSLEPGLREGPRQSKHGTKDPTRESLCTPSVLVLPXS

SEQ ID NO: 994072 - protein, 344 aa, Homo sapiens
LLVELPHITLLTQHGPHGPFMVMLAFSLELLHTGSGCSPSCLHPAWLSEPFASRPRNRTACLLGQAQMQTSIGKNYSPVVLPLYPIVYSDPRRTRRERLSHAHVRGEGCCVVTQGPNGGYRGLAADPTARRRIGLWGNAHWMVLVQLVKNAERSSVPRCDNPLRQQFTGHTMQRGGDNMVELPMNGRNTVGLARIIKPSGGNESKFSLLFRSWFNVCLHNEKTWVSSCVLMPAQWDFGAWGYFAANVPLCSHFFPTPGCTPLRFLGRPLCSCIAWCKWGHQRRTALLEDWFLSYKGEAGGAPEGLGTAGLVGLCPDVLNPPGSFGGCHDDGGCPLVGPMIRGPV

SEQ ID NO: 994073 - protein, 217 aa, Homo sapiens
MCSQSNLLTSCKTWQKLIIKPRCQDQHLSGEPKCFLAGYWSPTDWMHRSCCSSGRAESDGVKPLTFHIVAVIMIKNSSFCAMWEHCASHAKKKGKFAQCGFLDVVGIAGSAESTWRMRWCHYPREHPMRKGLCLLSNFLRRVLHRCSETQTMRCLLNKDVTRGISLNRVAPPDFQGTPLLWGTGFDVVKCPGLLLSSYLNIAARLGMVAAPPPLRLA

SEQ ID NO: 994074 - protein, 78 aa, Homo sapiens
VTTTPREPLWVKEKGLISHIVDIVTHTFGASAPLLGHRIYKCDGIDKRTMDKFENEAARYGKRASLSDVMHCSRLDKA

SEQ ID NO: 994075 - protein, 459 aa, Homo sapiens
WRCPGGARRAPGSAGERTRLREVSFTSRLNSPISVCRCVLTVIIPDHNIASVELCGARHPRPMKRGTRDTQRTEPGCPRTAWFSVRTCNNIGAVVTRVELANRVSLANCALISALTPRTFSRPRDDEPLVCRSNYVRYGSSPWCHCAGPHGGPRRLAFSVSGYYRIRGQEIASMGTTTRPWSPLPSSCRTEHGTKEQPTRVVNRQFGCRGTTSDDRSHSHSPNDVCLRNPVKRWVTDKYLAPITCALSLNGPFSKWTSDGHYPPFVRTQGRRQAAPARHTATQGCTHLVPPEDYSCICTRTGHTSAGHSWIGRTPGTGRHIELHVPGPPVSPSRHTSYPLEDMPDGRPSQDANHGGKYQTYNSDAVQRNISGQVTGDHHVVGPRPRPDGNGVHPKFTLWTPRNRGSHSGDTVFPGGTDGETPGRDEHKVALTTIPRRDSETTRVSDDRAKSVSSHTEHH

SEQ ID NO: 994076 - protein, 259 aa, Homo sapiens
DYVPLLLRSQYDVHIAQSTMGKVTVRSLPDLARIGCLDQQDKLLSTGEVDIVDINDPFIDLNIWYHVQYAFHAIGKITMVTRTRGMQNGQAVVIDSEIPSPSYRGARSLSKSSGAMLALSTSWSPHGVFTHHGIRLGLICRGEAKRVIISAPSADAPTVRHGCDTMTKYDNRPQDHHAIGSVHDQLLRPLARSSMTTLVSVGRTHDHSPCHHLQPEDCGLAPPGETCGLMAGGLSQKHYSLPLHGGLAKAVWPKGIPEA

SEQ ID NO: 994077 - protein, 154 aa, Homo sapiens
MRVLSVCGACVWLCGESSFFHLHAGRLTSSSLSGHHRCTAVIDVHGWSLASDAGVRDSSDGLVRSFRYGCTFWDTRGWPTHCSREAQEKGSTKARNHAEIPCVPANRAVAPLEEICSWACRSRRLLALDGGWSTTGAAHCVARRLCLVYITFYS

SEQ ID NO: 994078 - protein, 383 aa, Homo sapiens
AAALRPPIHHWTILSTEMVDDCSALPPLQADFVGRDPGVWWSGMTRQGWLDIALQDRSIPCPPGHEDLGLLLTIFRACISTHVQLKAAEGMDIPGTLEDPSESHCYVACICTWTYSSKVMRYWEPIPKGPVLWEARAEPWASWVPLLCFVLHVISWLLIFSILLVFDYAELMGLKQVYYHVLGLGEPLALKSPRALRLFSHCATSVCGAADSAVVVVTNLGTDVSTWFPPYTFNWAWVTGLIRRTSELRGQVQRKLHLGLHGPTDGRRGEEHTLVNRPDIASPEKQKRKTRPGSKPQRHTSRVEGERPSKQGAEFYQEKTHTVHRVYQRNRQRPHRRGSGEVSPVKRTHRERESPRTIAEARDAKRGPTSSAPPSELTLVIYR

SEQ ID NO: 994079 - protein, 271 aa, Homo sapiens
MSLSEQPIVCHGIQVSPSFRDDVMTPHIESCASSNDIRQNCFPCSRRCQTLHEPIPDYMPRVGCTRFITGISILVVGSVILLIVLHDLEAAGPGSEHTTVMTPNTPMALPVADLNPPNGEAQEGWIIYSGGTPLTWTLVLKNWPRFCSTDRRHRKGVLRTWWHKRATPRGASITSGGRKDGQGRRDNTTETEENDQQERANIKRGHPDGTPPTTLIPQQGETATDKNTYCIKRKRRTTINTQTWKQNTEELTTEITSNADDGRERRELRRD

SEQ ID NO: 994080 - protein, 276 aa, Homo sapiens
MSGVTSVDLRYTMSGFGGPSPWGNQWMETPSRDPSVTQLTKAPAGWPESECNRLSQSTKCKRRRMLRVVMRTLACGPSSDLEAGISKGIHDEKPNRRRCPPRCDGCSVSPQDTGHASGRDERRENWKQGKSVSDWKRRGAVRLTESELYDANLGMVRHETKPGSLSGTSMGVPVYKALSFRSHGCPPIEIPVEPIQRIVSMNGSTNLWDVTFSDLCFLNLVNGLGVVSRAHHVSNGKLVILSFCMAVETDLHSVWLAFGWYRTPSYKRALRSHKIF

SEQ ID NO: 994081 - protein, 106 aa, Homo sapiens
GYLRKDGAEAVGVQLVERTYACSGAWAEETGCKRSIRDLRWLKRAPPGADWSVIRVEGVGGAQVEIGNRPEAANHLAVRGSCEFFTVFHAQGCTTPRSSVVLVGES

SEQ ID NO: 994082 - protein, 200 aa, Homo sapiens
  misc_feature (41)..(41): Xaa can be any naturally occurring amino acid
  misc_feature (123)..(123): Xaa can be any naturally occurring amino acid
  misc_feature (131)..(131): Xaa can be any naturally occurring amino acid
  misc_feature (135)..(135): Xaa can be any naturally occurring amino acid
  misc_feature (137)..(137): Xaa can be any naturally occurring amino acid
ARHVLGGPSALLAVTYERSNVASACNSLYLASGEEYATDVXAHANQSSDKYVVRLSTDVVQGDATEQCKTCGNRLHVTASSCLPYSQVIVDENRILLLIIGMACPRIAGTSMRSDDVREAIDXRFATSNAXPIEXQXRPCVCVAVALALIGFKSALDDRWTGAKASSRVRSNDTWGSSFTLSESEVVAKFLHKDTTLDLI

SEQ ID NO: 994083 - protein, 119 aa, Homo sapiens
MIEKILSGGAAGGKMPTFSAGQATRTESVARRRHSLVAARVMTCHHYHNSRVQVVQTPGGSSTRSMALPRREARDEWGGHPWLRRRNLCQFATRTTGRPRPKGRWRMETGFSALACLKR

SEQ ID NO: 994084 - protein, 70 aa, Homo sapiens
ARLSAPPLWSFILNGLAGCRRRQQQLGARVGSGFLLQGVVLIGLLYDVGAVTVTTSQPKSVASVRAVGDY

SEQ ID NO: 994085 - protein, 245 aa, Homo sapiens
PVYSVQHGHAIHHGGAYPGGAPPHPKVVTCADTAGPSSPVSFAPCHCGHLSASLLALRCVASLPSLSSVVLFCSIITRPFHRSSSSSLCVLVHAGCSARVCAHPLLKSYSDSGRLPISSGSTSFSRIQGSQSHTAHVMRADDSASSVTICTVARLERPVGQSQAIQPHILESPVTMVEMGRLPWCGRVSRVGVCEIGLGDVLGSHSCSHGTQKCAACCLGYLSPQSVPTSWRPGLSYNPGPASLL

SEQ ID NO: 994086 - protein, 569 aa, Homo sapiens
ACVSCFHDEAEHLLPSHLRCQNTHCKWTDERKLRTLYEKRMATASLLLHALACNAHGNGLTLLRPAHSRWLAKRTHTTGLSPTATTRAAPLDPKRLCSRPALTDDYTRRITWPPTAPQSAAHMAPNRNTTTHLPRHRRASATSPGTRQHSLTPDPVNTLRPPTRQPPQRTTDSGKYFPHSRPIGPIDITSHNARPLRPRPLGGPTQTQRRLTASEHFPRQKNTSSTNTVRSVVQQTQPAPSTWRHPAGKDSFGQDKTGNTSPAYKKAKHNEHLRLKANDPTKRGRPKTSPTPPDGTFTTGPEPFRLQHIPQPGLDLPSARVATTKTPRPAPSNHERAYLARTTTQHRPINPRSRDTPNTHATAHATPPLAPARPTSARKPASHSGSQPALRHTWHTRHGHHHRATHTSPPPTDHPTNSRPPHRQATRHATDHRPPHSLAGPTLAYYPLITRSSEASSRHSARTDSSTQLPEESYDNTQTTTRHPRHAPEQDRHRSTDSKNRTPTGGTTKQRGASARARPDTEKTRRRQGKQAGSRHTTRRVARAKREETGQSAPHATARTHTPPEPQPI

SEQ ID NO: 994087 - protein, 267 aa, Homo sapiens
QEPARGHQGCSLQCWAAGRHATQPAPTSTCTCTLAAARRASLARLAAWPLLLTRRPADRSNPGPDALTSAPPAPLPASRSTPRAACPLAASAGHLPPHGSLTAQRCPQPLALFTRPTNHATGSSPHALPATAPPLHTAFTRPLLTPAWRAARTTSPATPAPFIDLAAWPCARARLPHAPPHAPQIPSPLPSPQSKPCVHETRTLAAASAWPAAPAPVLRHRPHTQHAAREPGALLHAETRPLRTFIGGLATPPNAKTQARSHRAWAP

SEQ ID NO: 994088 - protein, 38 aa, Homo sapiens
AEQAVKHPRLLSFTSQLKAGKGLTIVGSVLEGTYLDKH

SEQ ID NO: 994089 - protein, 280 aa, Homo sapiens
  misc_feature (89)..(89): Xaa can be any naturally occurring amino acid
  misc_feature (91)..(91): Xaa can be any naturally occurring amino acid
MLLTRQSPCGECFSYHAGHDSVCPYLGPRSDWRSFISGPETVGIPGWMCARVTAVETTYHRCCAVRQRTTLLRITTSLRVTISVNVTRXSXYSLTHAACLRLNLAAVSLRARSYQSLGIGHSQASLGRWVPPVTLDTETSIRLSCSLVITSPLRAYRRRTVFRADNYIVIVTPGGGATVNDHEYEATMMGKNYGSVKPPTLRLRAMRGNSPAYTPSSLGNATFADQGAPYTTRSFSSPVLGYPLTKDRSWVLAPCRQSLGTCVGAISKLFSNFHLGKLEV

SEQ ID NO: 994090 - protein, 112 aa, Homo sapiens
FLSFHREMGGACGCSPGLPAALGSASEARVGTYSTIGACELVSAGRRGRRHLPVTVPALGGHRKPQDFVILVSRAGRLVTRVVEPLCQSRVEVGHAAQDHRETPEYRGGETL

SEQ ID NO: 994091 - protein, 76 aa, Homo sapiens
PRGKNGTLLIKHTADNRMHLPQRNANGLDTTGASVCHLQKQQRFYNKYLRSNELDDKYDNMQQEGWLRRTAATHKN

SEQ ID NO: 994092 - protein, 303 aa, Homo sapiens
MAPSRNGMVLKPHFHNGLACCAACALWFNLCLALEDPADVMALAMPMAAPDSAPRPRCRVPSCAHRSAAPRFGYHTKVRAGRGFSLEVSSGWPAFTRMVARTIGISVDPEECGTMSTGVPAGQRAAGLKEYRSKLILFPQEALGPQEREHRLLLMKLKLGHQLTGRVMPRPGTSIRQDHSSKSSLEARARLSQAFRLVVRNGPRCTTRQGIYGTYRGKNAAQRNSTQNNRESETTNKNTTVSPYPTHIPICVATKRIIGVYPRVICGYKTSGATIYQGDRGQSIQTYCRPRLEPVVLKRKSNA

SEQ ID NO: 994093 - protein, 508 aa, Homo sapiens
WKKSWRPGGGLETSLGGFDSFHFWSRISCTSGFLSKCVRRVEKRAICAVKCNRAELSEGPAGPVGWVLDALVEQGRGRRTWSQCNRCLRYKLFLVACLRGRVLIKRCETHITLLRIYYRMLFSYCGTFFIKMLSICGCWERGSQRKPRHRTGERVGAVPSNSIFVAKGGGRKDISIADYIPPRFISWVHKGGPLSIRGTSVFTKRPLRTSGAPALFSIPKLARDASGIHTRAHTVWTNICVTNGRPPYPTPVVQAAHLLGRTHTLPDHEHLYKTGRPHRRTLSPPPSPRRADKHGVFTPTTTARPSLQCKSYGTTAFGNPPGHIRHLVNYATDISLPPPGPPWRTKTPQQRDTRDTPIHSDTIVANPYALHRNDTRDKLPIQRDIAFTTEQLEYKAFSVLTENIDSKYQKQYRQGDIKIKWGSTQRDTRKASGTNRQEARLSNTDRTLQQCTMQGAKANSKTDRHERYQMSTEAAARRLDRSNGMTTQTSSIRESNEVKDWVTQGDTR

SEQ ID NO: 994094 - protein, 143 aa, Homo sapiens
MSRDLNICTLNMLHTSLLLTGITSMYNHIDYLNCTLSLNYLTETLTYCSLTTGFPRNSPSTLLGLLPPHEDSGRENLTLHTESTTLALLEPLRASRALHPVSTSIHNKLISRSAVLYTDRTVLQNTYQSSHSRRHPGRSAGLS

SEQ ID NO: 994095 - protein, 187 aa, Homo sapiens
MDTDFYLTSPSFILISWNESRMPPRHWPRSPRRDAHNKRRKAPLTHGRQQLPHVTGPSPGSWPGPEVKGLTPGLQASGAPAPYTAAALQRTTKRSGSFTLPLSQRASKPTVCHRTCTLALPALLVKQHGPVRPLTLHRSPRPAGGSSAHPWQAPAGFPFPGLCLPQFSLSFPTSPLGCRPGSRPRQA

SEQ ID NO: 994096 - protein, 328 aa, Homo sapiens
MLTLYKKPQKENRTKEREKRTEEKEQHKKHTKNKETRGGEAAREREKDSPGKGEGPHSSMQGGTHPSESFVEHNTEGGAHQNKKDRTCINKTRDKETRRRHPTYKQPRPRTQTTEAKTTGIHNRGKNLLEKKNTPPTHEGGEPATTHMRRGNTTTHPTQEDKHTTPHSRGRPTSKHMHKQGTHGRPTHPARHNITPPHAKETCATKEKIIITAHIPGGTAHKLKTRERTTAPTTHSREPTTAAKTDRGSTSQTTATSRAAQARKHNTKNSYPQRPAATTEEDHTRADQTDRQKTRRQKTEERENTQTDTKAGQQKIKQLKKQRSANIQ

SEQ ID NO: 994097 - protein, 224 aa, Homo sapiens
TEGDRMPTVTAAPSVHTQRCSSPLSHPLPNPTVKDTETKVPLQMALPSSCKSSAHTQLAAHSVSFFQKHSSSAGLQKAWQGPLARASWLNAPSVLWPKLTSLTLSRKPHKNRWTDTLELSSQNCRSNQMPLWTRRCRVQPPLPKVMILTREPLAFLLTVLCKKSKHSRMPLSWGSPAGACELLIRAGQSWAPAHFVQLTCQVAYTCVLKYICIPKLVPSVYHSN

SEQ ID NO: 994098 - protein, 102 aa, Homo sapiens
MERLARALLVFPQKKSLFLRPLVAHRGGNGWRGNFVADVHTDDPICGERRWGPSFLELARPPVLAVEFIWGDRKEPLVEEFSTVPFLVAKGVRLNEGRPGGP

SEQ ID NO: 994099 - protein, 118 aa, Homo sapiens
MGSNNYSSHSFLSFVLRCGRHCTAFLHLSSGHLHRGVKPAFFFVHLLIGVRGILFRYTRGEFPQQVDAHYVLKFVGIYSCAPISSCGVSQILHDLKLRFKVFVVQLTHKFFSRCLYTR

SEQ ID NO: 994100 - protein, 188 aa, Homo sapiens
MRSLGWSSTRETCLSFLRSRAEQSWRRVLPVFSQVTVIGAFACHEVMGTSDVSTVTLCCVRVRTKEGNVNVLREAWTGREGSAGFNDWPQEKNWGRWCHLRPRKKLLPKIVFPKNITAKQVKAGIEGVGNQTGKTLAPHRDHQGLTIRCEAKDMVGVRGHNSSYIPVLHGATCKSNPRGVDNMRGKGL

SEQ ID NO: 994101 - protein, 423 aa, Homo sapiens
ATRQVLQRWSVLPCAYGSRIPDGIRKRSGPRTLAVLPRSRGSCYRSLYSLIVLSREDVVYVSTKMIVIRTVWKTVSQDVLGKRSTTRRRSVIEHQSRFDNTVYLDQLTSSEIVYRVKEHLRFVEERSKAQIRCTSTYHDLPSQETTFEESGVLLGRTLPTVGDSNEESTNKYMDTSRGITFPLALKDVTLCIIKPTSDESTEFRIAIGAANRTEGTYHTGLLKAIKAWAPPARLAKDCEIRHRYSLRGTYIPGNASQGQTARVGKVFLCLQSILQFHGCKLGEKNSKEPTSKGPVVYGLHRQGTLIGWRARQEAGGTRPNDAGTSFSPYPYTHCGEGGGGRGYTCGRLDRHFESKFRAHTTICGATQFEQNAFPHRVHQLGPLGVARRSKGNGPNANIPLLPFQRTMKENQHIHIMRGKTIKH

SEQ ID NO: 994102 - protein, 189 aa, Homo sapiens
ETEFGSGCPGWQWQWAQSWSSLATSGLTGSMWVLLAYSLLSTLGITGLRHHGPGNFGIFYVQKTETLAPLLAPGWVLEFLDLRWIHLAIGLPNVLGFNRCCRGTHTLWANLWLFIRVRRWGVFSQRGWGLWNLPDLQVDPATLLGLPQNVAGRFTGACRRHSVAPGLRWYLLEWIMENMGVKPALLKHL

SEQ ID NO: 994103 - protein, 217 aa, Homo sapiens
MASRASADSGTIEGEYVFMELSVKTVRMWNVHILNTCQNYIQWSREESDHLKHLNEIDLFQLYGIQMIPSIMEWTDQFYMVVNEIRRSLGQISVQRFKIDERVKVKWLSVDFHNWKDWEDDSDEDMSNLDRFSEMMKHMGGDADGRLYADSRWEQTDDSTRHGIADNNGRSRTQGPLGTHRARGENTQSRWRITTERMRTWIAKRDIVGIRPHKREC

SEQ ID NO: 994104 - protein, 294 aa, Homo sapiens
LLLLWNRGWAERLIEPLTNFCIHSDVLAVSLLYEVCEQTDSRLISLSSGPCPIHSRRAIRRLQCSEIKDIDRGLRSELEDDLGLLGDVQDPERSHPKSVQSHKDLILQCLEHEDECIRLRALEPALWDGVQRRTLMARMREEAVMIPRRQGYVGYHLPGRAVSMIIDICQSSAYTQYITNYEWYDQHPGGADRWRAQGRPTHRAPNSWTVAIRVKGIRKCAVSQMSARLTVHTWWPAAPKRKGSGKVSSWRLDAGGSSRSLWGNAPQLGGWGAQAQCKQTGGFGKGEAGQLREG

SEQ ID NO: 994105 - protein, 112 aa, Homo sapiens
LEVRIQQKYWGVDLPSGVWLPTTVLITVKADMKLRSSPVLTIKRRTEVPLMNLLVGDKRLPYEALDSTCVLTLLGVLGMRCGMSQKGDDANIARGVLECFSVGAIKIPCNWC

SEQ ID NO: 994106 - protein, 66 aa, Homo sapiens
YYRLSYSLTAVELLQPLYTDLYTCLITPALLPLCPLDDSMYLSTQLNDYTQPRGARFDLDGMAILP

SEQ ID NO: 994107 - protein, 572 aa, Homo sapiens
  misc_feature (158)..(158): Xaa can be any naturally occurring amino acid
  misc_feature (324)..(324): Xaa can be any naturally occurring amino acid
  misc_feature (476)..(476): Xaa can be any naturally occurring amino acid
MCSWQLSGRGHSVTQARTDSPKIRVRLSQSYMGKGSLENSGCTRHGHDCCAGSLLSAYRYCGRGVGPETASLVTPKGGVMTPFGCQYNYQNGWRPNVPRWYTGWMALGDRTDTRGTGDSLEAAGDTDPPWERTYQTTCELEDERAYTRLVNSEEPPHXGGASRGQGKPTEEIIAPRIIDRGIRYRALSPGGAQFIAQTSGVAKVCPPQARRDPPLGVHNQNTSGGIYTRIPPYMCVRKGPDCFKNKAVRSRVNPELSKRDVTFLDAQVFVNHTDSRFQTPNAIDDQGPQHVKFHTGFKTVKPSVRTALAQGHIFHKGHERTHFXNQTQEIPQWFTTTKVTGIEPVGNRQDPGTHGKAREFRHWQRTGQHNMGPHSPGTGGHRKRTHGRALGHTVLWARTHIWNESDEHAEKCTLRNGNTKIDSKSTQRENRISHREALSVEQEHTAAHQCTTSKEEQQQNIDKTGPCHRGRKQRRXPRRKRKIDRATLNTTAGQTQCKKNDTQNAVMDEGNKQPPQQWPHNETRTHTRHDTQTRHNRTNTGTTAKPHTTTKRDHATQHNETSNTRRRETITH

SEQ ID NO: 994108 - protein, 70 aa, Homo sapiens
MSPGSTPKHTGAIHPPSSHGEPVQPSSIDERTPRAHTNQRKTVNNHQSIRPYPVLTKRAHDSIESPMTPY

SEQ ID NO: 994109 - protein, 132 aa, Homo sapiens
MVLERRDISHGTSWARPTAAYLRISLEELTDISRRPSHDPTTGCEPPISELTPIHHIPTLLAHCAPPGPAAEGPPRCFGLPRGPHLPGTGPACATRKELARCNPPGAHARARFGMLCTPGAIWRPLGGSRQP

SEQ ID NO: 994110 - protein, 398 aa, Homo sapiens
LKFTNNQKILYFPTWQHISSKGIAAEQLQCSKNSQKYSIRHFLGFITVILDFTPQEVITEQHTNTNKNKKKTKTKKKKGAGAPTKRAPPRAGPHTHRTHDPPDDLRRPKTEGAPYHGGAAPLTIQPTSEQRATRQVNDNTAKTTVADTHLVVQRPRNPLTKQQTNNINLHARRPQTDPPHHPPPTKNDTNTHTYQRPTNTHKNKQKHATPITGVVHQNTRSRRTTEPTTHLHGNNAVPSHSRRDTLPSTIHTTNTCNKHHQGQINHPTSKHNPHNESWTDHKITPGRRLPRDVRRPSDTNASNKGTAESTTPHHQDAERDGNTSRAQTAARPRQNGRVTIASETGSEHALVTESPSTSGEREYVAVLMPSQEQVKNSMRRKRKNGKSRRQIRTHTTES

SEQ ID NO: 994111 - protein, 80 aa, Homo sapiens
MHNCPAISPKLARERQHVVTPPVRSSARSLRLLAHAHAGRRFLPEAAHVLPCHTLASLLALLTRLSTTSSIPYRTPTPFP

SEQ ID NO: 994112 - protein, 147 aa, Homo sapiens
MTDQWSRVTSTINAKRARSRSQCTLSHANNLRFPNAFLEVYFTFPVNPRSLPFAPHSVRHFSRQTVTQYVLRMHPNTATTRTASNFWDLHTTQKDKPGNKSKRTHHDAEGVALTRHTHTDYPRNAGRRTSPHHPSRHAHPTNKRYRA

SEQ ID NO: 994113 - protein, 104 aa, Homo sapiens
MAGPPPSNLTPRANDTRNSQGTPPPQLKRATEARYHHQTAATKELRRRDTLPHKRLRQHVQPRDPYKIVSTTMRDTAEHDSTRICLRDTTNRQQHSPTTKSNNA

SEQ ID NO: 994114 - protein, 184 aa, Homo sapiens
MRHAIANRRKDASYFGPGDGFGPTRRKRRIRTIFIPGALDVGGRGDVPPARSAPKRDYTLATGHAQNEGPRLTTSSVQSVTYHREHDIATQEKYQPRTAGATTPRLGANTTGAWHSGRTPHPQEPCRQRLNTPLQRGPLGSEDPPGLTAGHTTYIAHVGPSLAAYDGPRQPDNDNALPTTYPPL

SEQ ID NO: 994115 - protein, 159 aa, Homo sapiens
  misc_feature (57)..(57): Xaa can be any naturally occurring amino acid
MLPIQHELAAILRRTTGIIFTSNILTTAGCLTKSPHLLIRLTTIKHVVEAFPNTRTXYLRPPQGYVLHLNTPPVSSSTESRELLTHTTCGATQPQEARGGIKTEQSETADATRRAQLGSQLMDTYSTPDQHQSGERAHKHNPSEGAAKHILPPQPAYKR

SEQ ID NO: 994116 - protein, 256 aa, Homo sapiens
MGVEGPPPSAGSMGQGSRTEGCGVRTLLRFLPPRDQSTLAPPVPKAQRPCSRGPLHPNTGTYRDRWLSASQGHMSNRVAGGHPSCALLCCPGGETAPIAWGHPFLPTLGPGGSPTHWDSLTPKRPPRIAPAIVGTPRILTQHLFHLWRLGPNPSRRPSLGLLPRPFLFLGTLIIASNPRFGQPFTLMSLSPHCGHASQRPVSACYTHAHWLRNSTMTNRWLLNTLSLGGVPRVLNTPPLGPAYRRHYPASQPGLIG

SEQ ID NO: 994117 - protein, 185 aa, Homo sapiens
MPRQSTGKKVMQKETIQDQLVWLLKSSFDEEDERRLCYVLPVKRISSGNQRLPSFTFFSYKGKQLKETVQYLTHAPQKSTIQYGAAYQWFLTNFVNRTSEVTRYDNYCLCLGQREKIYVRFCVHKSTDMATNGPDEPIAGPMLSSRPLNSCARGLSDPGYRTPPHTKLPPLRNGFALTGDSKEAL

SEQ ID NO: 994118 - protein, 120 aa, Homo sapiens
MLLPSINVTPLPIASPQRALQPSRPVSIDSTPFLQELSGVNMTKDQALPYVGDPSQFTHSWSWGDAQPVSSTETTLLIQLAHFQDLTPSCQGEADPMTDYPLEPSRGRPTDGRTVIHVID

SEQ ID NO: 994119 - protein, 147 aa, Homo sapiens
LNGSNNLSIVVRYARVTGNAMLQSISTIGVDYKWIQESQWCSRTRSRSRSSYRDLDQTEAQPGSAPRIYGISTSLPCTHRPKKHNKASPLTKAPTPAQMISSSRVKVKIAHTHTKEQGFQTHKKNGAARIKIYTKKGTQGRHDAPTN

SEQ ID NO: 994120 - protein, 227 aa, Homo sapiens
MDHSTQNMPQHTAPPAQNAQDDAQNPPRPYNKRQHKLQNNHPEGNRTGNKDIAHTRELGRDQQKPRNSPTTGRQQPEHEDGKARTTEKAQRDQHQEAHLQHDAMHQKEGDEPLSMNAQGPPGEEQQERRHTRYDAQHKPNVGTNGGKKQASASAKGRYSRRREPTAKSHNGPKKATEPSQRQTKNEEEGHYSNNRETIEEDNTQEEPHRGSEKRDEQGTNAERKKQL

SEQ ID NO: 994121 - protein, 209 aa, Homo sapiens
MTSLYEPPQKKTTRGVLPLDTVLPGTTLEGTYTPVEPCKELSFCARKKGGQPRRVTADDSSPHGGPKENPFSPTKSANIMTPLCCSTSGGSSPRKPHIMLALCGRNHRLDTLGNNNSGGDTRDKQIKRTVWEQITPRGKQNSGLSHHERASSNNRSFPHHKRGGRPPKRKIHPHTRTRQQNRRNTLRHTHTLNDAHSSNTSSIGRTATT

SEQ ID NO: 994122 - protein, 216 aa, Homo sapiens
MADDAGAAWGARGPWWPWDGEPRLASAERVSGSGIRGRGPAVDGAGVEAGARVGKAEDKEWMPVTQVGRAWSEDMKYQCALEEIVSLLPAQLRNQRSLISSWGPLSGMRFGSIDASADSRPVPASAPGARHCAIGDYKWPRRSGVLSAPGRWQPDIRGAIILGRSLHRPPCHEATVGEQDREAAHCPIANVTGDAALCWYASSLDQVQCIVIGNCA

SEQ ID NO: 994123 - protein, 148 aa, Homo sapiens
LEVDREAEKKREGKQRAKEAQERELRKREKAEEKERRRKEYDALKAAKREQEKKPTEGSKSGPENLILAPVPASHTRKQTRSWAVLKLLLLLLIYGVAGGLVALSGDRAAAGRTLCTGVKHIYDNAVTGSLRTHEILQWGPPDANSQK

SEQ ID NO: 994124 - protein, 411 aa, Homo sapiens
MQAKPHHTNTEQTTHRADSATYEDQTHNTHQHTATTRSTRTEAKKQLATGTQTGNTTYSRQTTRDKEPTEGKQSRKENNTGQQTRATGQTEREREGSTKVENKQNEDKDRGTRDRQDSEQSQEITTRRRETHAKNKNKDTNTDKKADSRRRRKHKAAKRTQGPQQQEKNTKEEQREHHTAKKETQTARKKITADKQAEGRKKTNREERHDEDEERREPRERETDSKRPRRRRKKRRRGKKREKTKRQPHKRSERGDQKRNTEADAKTSKHGRENTRSEDNTEEKQQQGDDEAEEEEREKEGGRHERETKRESENRTKKRSKEEDEKQEAERAKAENEKTKRTERTQNNKKERNREKTKRQKQRKRRKTREHEIGAAQEKNRRDKMERRRTRRQRDEEEATGREENKNTEKK

SEQ ID NO: 994125 - protein, 150 aa, Homo sapiens
MSVNRNRNERYLQTDVEVHVLGSSSKACLGRQYQGTFMSDALGEIRIRTSHARAYESDVTERVDEQSVLELSDVLESTPVVLYNLGEYMMEQKGAIKKLDGHHKLKVRGEVEKDPWNEKVRSGNKPGLIYHAYLLKLCGGGIGAVSSSTV

SEQ ID NO: 994126 - protein, 471 aa, Homo sapiens
RSRGLKSNLLRYISITMSMVMVGHLKPSLVIRKIRHQTRVESIRRTERESHEYKEYKRGGASMRKGKGKIKRKSVIHHTASDEEPHSENTTAKTQGNDKPANEQPRDQQTPPTTPTQPPPEAPDSSRNHAPPKTQQHKTHQRTRQTRNTANNTEHTNTPSPPQHTAGKHRVTPHPHHTPATHRRKPTTTTSRPDPNPRQPAHTSHRTHTTAEPSTQKPTPEHQHNHTAKNAHPNNTHNNTTRPPHRLSPPRDNTRQEPQHTHARANTPPPRHDKQNAQPKHNTAQGKHHTHPTKDTRERNTPRASPARREGPSDQETSQQRTTTAQRKDGKEKGTRRGGERKEAEAEPHKPTPRPAAPGTEKQTSPSRPPRPKERRSADAAGPGKRRTDEQGGERTNDTEKKERGDTRRRGPSSEEQTKPPKSGKAQGQRSGSGSTHRQQRAAKARSTTDTARRRHAHDKTRRPTPNTTQT

SEQ ID NO: 994127 - protein, 175 aa, Homo sapiens
MRNCETITTRAKSRGQNRSLAWRDYHLVTLGGATRGRGEFPSTTQQARVGRQPTFSLVTRTEDMSGDRTYQDAHEWPTFLQLQKQINARTKGPSGIVTPSRTVTLGEETHAEREATHFEDGGTYSASGGPSDPKPVVQSMNHNSVYPMRLGAQQQLHDSEQNHGDTETRLVLCAQ

SEQ ID NO: 994128 - protein, 208 aa, Homo sapiens
MALRNVDARHETGRDALNKLFGVKVLQRQVTLKTAFTWGPRRERERTPGLNDDSFLEFGKPAHKFARFSLLHVGQAKIAPGKGDAALTTVLARKGRNCTCRWTERGMGLACTPIDTWTRKGPTNPGGPQQEKTKVYLHAAIGKGKAHRRVHPMGIVCTCREHVGRRNQPGRGEVDGIDTFLWAPENRSLSTRLDVDATRKTCRMETLH

SEQ ID NO: 994129 - protein, 269 aa, Homo sapiens
MAGGTLYTYPEELEGLQEALIACSVQRGSGPGVLSVHTPTSILAKANRYSLELSSVRISCPDKVPAFEGDDGFCVLESERHCAYYVSNEELRGMYIQRQQPEVVQWVSFADSRYSAPSQYLGVPHLGLHAIIRNRPLENAKEEVRRILGLLDAYLKTRTCLGGRTSDIELTSLVVCTLLWLYKQVLEPSFRQAFPNTKRWFLTLHYPAPVTGLSWAKVKLCEKMAQFDAETVCETQLNRRQPGNEKVHRKKSKAKLRGRRGQRGALSER

SEQ ID NO: 994130 - protein, 79 aa, Homo sapiens
PRVAKTKKAGLQYYSDKTDFKPMKIKKDKEGHYIIVKGSMQQEELTILNIYAPNTRAPRFIKQVLRDLQRDLDFHTIIV

SEQ ID NO: 994131 - protein, 387 aa, Homo sapiens
RRAHCSLGRGSRVSQARTVRGAWRVRARSGARFGAGVPEGDMERRRRGGTMLDQLERSCCDVLGCRQVHGLRVVTLQAEYHAAQRVWLISRGDLLIVLSASSVDGHTGAVDFIGRHGSPGLALVVWAACGARIFNRWDSARGYAGDSVASNLQSRGGEYVLHVLVGSYGSTVRTFHQSSGSDARIIHCLAFICKQRIVALGSSVNATLYPSQHRYLQLVRVPGCGQPKLCGLPLRCLLFTSVRLLVLLECRSPGSGCLWRRQSLVLGPCIIPAEDSVQNPGTGGWCSNVESRVLIVKARTVIGGHHVSELIRGNYVTEEEDIIRRHKEKIKPKRRDGPQRAGQHSERRHLDITMTEDTKDGTKPGTRTPKEAKKEKQRRRKKKEPTT

SEQ ID NO: 994132 - protein, 119 aa, Homo sapiens
MRNIYSTNNRGGEKFLKHVVRETRRALCAKQQQEKQTHHTDDPTTTQHRQETTLQNEPDPHQNNTQQRGTRHTPTATSQLKAIAHKSGAHEQELRAGSPNTYSGPHHDKTAPQPKRGST

SEQ ID NO: 994133 - protein, 322 aa, Homo sapiens
YFQIAAPSADAPMFVMGVNHEKYDIRLKIISNASCATKCLAPLAKFIHDNFGIVEGLMAQFHAITATHKTVVGPSGKAVAVMAAGLSRTSSLALLARAKAVGKVIPDLNWSERLTGMAFRSLTHCTNRVNECDLTAVLEIDCRNMMILNEGGEIRRQYGPLIDGVLGHTLSIQVVRPSDFYLDDYRISVHPSMLRLALPIKDTLSILISWYDNYIWVQQQVGALYDQCSRVRAWEHQPAEHKRRERALTAGVLPIWFRHMISFAPFPGDPERGGREDRASTWAGQPKNHGMRGKNAAKKAGWKKGRTSGTKDIETTKPAGQK

SEQ ID NO: 994134 - protein, 344 aa, Homo sapiens
MFAIEGTDRNGRFLLPGRSMSYYIPRVVLLWTWKPRVIHSILNSHPMPKLYKPENIYLSERGGRMLETNGGHGIFPGRKDASEDIIDITRTRVRQMVADDVIVGRIRAVVHLQYAGGGDEAHAHLWFATYYRTGCHDDVIVPTRRAWLQDYISDVCPKPRNEMSDVVVSMTIRGLRSLYHFEECRRLNGDDSVGWSAWTINQVPVTRIARDSVCEDAEAILLLEIIGWCGTIMSPEDTTLSLAWYLNNDLWLNKSSGFHPMASLLQDWVNPLRTPSEGTVIATPGLKIQGGVAQKFVVPAESETKRMGAHQGGAPANCCTKECCPGDRGGYRQGRASEHDGKKG

SEQ ID NO: 994135 - protein, 229 aa, Homo sapiens
MNATDKNEKGGDNNNEKKTNERLVYTRTEQKTRGRANRKQNRQEKKQRRNEDNHQKRADKQGEKGEREQERAEKEEKKQQRNKERKTENNSTAPRKRKQKTRKREKGKEDKTKARQSEGEKSDRKGESKDKKRENEKKEKRRKKKQKDEREKTKRQERGTRENRSNIEKDKNHNNNTHNNRREKQTEETTRKAGRKEDHKSSSGEQGKEGENERTARKHVKDEQTNPHD

SEQ ID NO: 994136 - protein, 108 aa, Homo sapiens
MRDPIRILVREGRVDPGGYPPVSTFNVDTRWKWNAWTHYVTCMKPWTITQAGIFINTRRKVDWFTLRRCMLEISCVSAMHGDMGPKRNEDVIYEGVPVLALAEIFDYH

SEQ ID NO: 994137 - protein, 77 aa, Homo sapiens
TRCRENYPLKVQNGKGKDSYQRLSSLDTVLFGQVQPLLEHLIYYNAVDSDNREPYEKMRRRRLRDMGKGSFKYAWVW

SEQ ID NO: 994138 - protein, 429 aa, Homo sapiens
  misc_feature (80)..(80): Xaa can be any naturally occurring amino acid
  misc_feature (350)..(350): Xaa can be any naturally occurring amino acid
MAAEHTLNHLAKNLEIHKITLYRGANTWAHNTILPAWGVAITRTAVYTSLEICMTQLPIVGQDPNSRGSLSRNAVRKLKXRDSQSGITGPRGHGGACPWPPGQSSTTEVCASIGHPISGNVQHEFALIRLRFREERIFNRNTGGERHTFKGGSPVIANQVRYSEHVSHKNLTAFHAVGLSVSTRGLRNPRNHGEGRGQVLHRNRRAVPGSNPPPDIDTRNYFTSFQHPYERQSIVAPNFPPIPRRENKRGYELTLPIGLAIPKLGLPEEGLGATTKRGVDVWKPTMRQDNTPPVGKGPKGGQWGTRGTPRTTGKPDNHVAQDHGNPGNASPKDPTFSDCMGGGAKGRTPXFPCNALGLDKHWRHKAYAESRRCRFATKNQWSAVKRAHPLRARTGDTRDKQAEREHTEGHRNNNHNTAKTRRVQKTNRE

SEQ ID NO: 994139 - protein, 220 aa, Homo sapiens
RVAYIPDMMCARGGLLGVGGQMQELRRVRPGVMSEKDHMVTMHDVLDAQELYDNHKDAESPCGELVYPWVKAVDDLDKRLVMTDSAVNAICYGGPDYVFHGVLSHMRTAVEVNTRRLWWISTKGEAICMAIALMTTAVISTCDHGIVAKIKRVIMERDTYPRKVGFRSKRQVEEADDQAGLLDKHGKPTDSITCHLETRSMLNYSESAKRGGAEVVKARR

SEQ ID NO: 994140 - protein, 156 aa, Homo sapiens
EQVRTFSMRNMGRALGIKEPGPGPLQRGSRVTRGLRGIIEGLLPQESRIPRCPVTLRLPERMVAGFLHVDDIVSKFYRSAQCLFLKDSITKYLMKMTPTDLGEEGESMRGMRRERRLLLNERIRVRPWDSEPGRCWSLINYIRERAHERGWQGHGF

SEQ ID NO: 994141 - protein, 136 aa, Homo sapiens
MAHNGPYKGTPKARRSQREPPSHSCGVTPRPKGTCAPKFLWWPCGAQVSNIVCSESNLWWHMAMECAENWGTFSKRGAQRLGGEWWASAQGQSPLWRAYKTPRLGPQRLSRTRAPSTECEKQPPVSRPSQDIRDPL

SEQ ID NO: 994142 - protein, 118 aa, Homo sapiens
  misc_feature (71)..(71): Xaa can be any naturally occurring amino acid
  misc_feature (74)..(74): Xaa can be any naturally occurring amino acid
  misc_feature (100)..(100): Xaa can be any naturally occurring amino acid
MSLPSSRAAVSLGPSGSLCALLALLLLLTPPGPLASAGPVSAVLTELRCTCLRVTLRVNPKTIGKLQVFPXRPXSAPRWKWEHIPEERDSKLLSGPRKPXFLTESHPRKLLDSGNKKN

SEQ ID NO: 994143 - protein, 113 aa, Homo sapiens
MLKAPQCFWAPVVFPCGVQTFNTNLSLEGAVSHPSGRHSWGEKDPFVGDSPSLVGLGPKRLGGALLSPLGFLGHSFAPPLVVCPGALCGITLGICVLPTAPFLERVVRRFISP

SEQ ID NO: 994144 - protein, 318 aa, Homo sapiens
MGTLRNTKPNFVRCIIPNHEKKAGKLDPHLVLEQLRCNGVLEGIRICRQGFPTRFVSHESGTDYEILTRNSIPKGFHGREARRSVLMAQSPGARQQSWSRIGHSKSLPSAARECWPTWIGGSNHWKDHPKSLLRYKACLHRCLPVGTGPSLLPTPRPARQAYRPTDRSPKRESAPCLTEERLRTPCGHGRTDTYTHGSRPHGMQCDTRKRQAARIPPMKGRTTWRKRRRTRSCRGPNQRPREIGTPGSHHEHETHMPATDTDPGQPPKPEVPRDKRPGPPDPHTPRIPDDSTRRKARKREDAPKHNTENDSHRRPHTT

SEQ ID NO: 994145 - protein, 275 aa, Homo sapiens
EPWTRLTRLVLVNALYFSGQMEDSFPDSSIHRRLFHKSDGRTVSVPMMAQTNKFNYTEFTTPDGHYYEILELPYPTGYTPQRCSIAAPYEKEVPLSALTNILSAQLISHWKGNDDQAVPPPGLLAKFSLETEVDLRKPLENLGMTDMFRTEFQGLTSQSLSYQVVLSTSAQAAAENVKIEVNESGTVAPHSQTVIDLSRMGPEEIIMDRPFLFVVAGQTPTGTVLFHEATVMGTPEPGGKDGLASGDKDLGMPRDTNTHSGEQQFGGERPPCGGD

SEQ ID NO: 994146 - protein, 176 aa, Homo sapiens
  misc_feature (60)..(60): Xaa can be any naturally occurring amino acid
FVRKDLEILCFLLSTVNLHDASATRSMLLHPYLHGSPWGILIREAGRSHNGMTTGQVHEXQSGQYGTMHVALVGLMVPRIFTVAHLLLIRVFMRGGAYGGRGGGLALPGMSPGGSSAWTLRDVQSMKRKQRRDRNCPHVARERIQDKCRILYPLRTLEARSVWLAKDQNQIPVMGH

SEQ ID NO: 994147 - protein, 191 aa, Homo sapiens
GGGAPPKFFYYTNKKKTPRGGGAPPRACGGGGEPPGGGGAPSHARGGGGKTQREREGGVGGAPPDKNRRGESSARESEERKKHSAGGGRSSRAGRGGAPRVASCVPHKEVFLPVGSKTKRKEARRAINTTNIFFFRRPVGEGVILHPRGEPCGPTEREPAAGEEGGSAAGGSTKSLSHGGTGEKTPERSAE

SEQ ID NO: 994148 - protein, 144 aa, Homo sapiens
  misc_feature (70)..(70): Xaa can be any naturally occurring amino acid
AHRLVPRHSNNVAWEEGYSRSGEVHDLIYPEHRSKPQRIIDLFASDVSKWASVGIDHMKCALNMRTGSQXGEKRPATRYCREAVQYARTTKSVLYSGRYVPRRQYGEDKPRVRVRGVRTRKCSERMPVLHVLDVTKSSRMCAIR

SEQ ID NO: 994149 - protein, 347 aa, Homo sapiens
  misc_feature (232)..(232): Xaa can be any naturally occurring amino acid
IPKKGFFFYPINGKCREPKKGAPGCGTMILWVYPSPHERKQGNGVVAPIHPLYVVSYLSELPLVSLLWCAALSYMVAAGTPTILSPRGKAVWCIRLETHSQSRAHMCPRQCPLFLRTTKTEYTRGAETGVNLRDGPENTVERHKLAGDIDTHVCGRARVYKPNVMAHMWNAGCVFKHTNVGNPLVTPQINRVQNTPRWLCVPQERSEICRRLQTSQRGTHSCAASPQKSPCXREPTAGERQPPPESGRRLMCATAPGRTGGVKRSSPLLYMSGEVGPPIYSSSKAASAAARNIGAAFRTVVAAREQTPTQRYKGGIQRGGENPQSRPPQKAHKPPSPERVVAAGPQQ

SEQ ID NO: 994150 - protein, 61 aa, Homo sapiens
AGVIISIIHSSLAEPRVASGGLGTVPPLPPEVTPPSPPPTQERRTRFERTVEDTCPKMSRG

SEQ ID NO: 994151 - protein, 268 aa, Homo sapiens
MAEVLVTPGCMGIEDVPAVTSCGIRGACVTSSLTKAISSPAYSEDDHEPERARRGIPAFLMAASICPPRNLYRASRPMVCQLREPKEKSSRKEPSQELMGTPDGYLLASTPVARQASPQNLGTPGLLQRHRSHSLRALISGPTYPVRPAVYTKDQMSHLFNVAHTLRIDGAKERSLNPEGEGHGSMFYEVSTRTSSSFACSHGPAGRCCAQLLGSHIGPVQKGGNRWLTPWQTMSWLCERSVRAPGPPSWKRGAWPPTLPEARDQAGD

SEQ ID NO: 994152 - protein, 328 aa, Homo sapiens
RELAWCPGCVLPLPMPMSPMYCSDRLWHECWQPRRIYEILPQRIQQWQQIPCIAKEQRKKLLERFPRAQSARTRLPDMERTITMSLRPSFYVPRQQAVREDEVMMQQRVTRDDTDLQIFCVACGHPINPRVALRHMDALLQPSMMSRTSFGSMYPTRIEGATRSSVMCIILRAKHTVSGSRCCAPSTHGTQSGSLTRIRVGPPFPECLTPGEFCRCPAMPSHYCLGNWGAEVDLERVVLCNSLDQAVEPWRKVGTGMTNTGGIVALMLTKNQEFPPEQLGQADVALRALTCQGGARRWPPFSVCTRGALRAHIGGDPPFITKRACLVP

SEQ ID NO: 994153 - protein, 107 aa, Homo sapiens
APPERKYSDVESCGDPVEITFNSIMKCDCSTSAEDLYANTACCQGGPIMYPGIADRMRRRITRLWETHEDISASIKIIAPPETQVHGVDRLASNLVLIVHRSQAYVD

SEQ ID NO: 994154 - protein, 133 aa, Homo sapiens
MTEPVGAMLGATATKVAALWYSPLRVLEVARGVNFNFGIDVDNKLFSKGMVGLNLGVHQLTHLGGLHQGNLRRVRERASLWPREKKAPEPRGAKAKGGRPEGNPYFTGEERNKGGDEEELSAFGLSTHKGQDV

SEQ ID NO: 994155 - protein, 114 aa, Homo sapiens
VNALQVLTAASVLRIQTVIDECTQIIARARAPGTSAPTPLPTACVPGIATCALRPVCPLLVRPPGTRLLQHSRKHAPALPRLQLPSAPKTPCQRLMGPEFLTLHVSQRPRIKTE

SEQ ID NO: 994156 - protein, 140 aa, Homo sapiens
MNGPGTDRVFSICSNNRSIGLPSPGPELRTECDRDRGTSSGAVPVRQAEKVIPSRSLGIENVRAHHLSSKPCSIEYRVLGLQTTQDVSHCRPLYGDVRERPWEARKAWTRAEEQSRTEGAINARALSTGGCTNLITCRPS

SEQ ID NO: 994157 - protein, 74 aa, Homo sapiens
AFGPECLAPVALCVPRAILSFWPGRLSSVLQRFTVYSASSSIEWKVDNFLNCYVSGYHPSGGIEVDLLRNGLEN

SEQ ID NO: 994158 - protein, 241 aa, Homo sapiens
MTPTDSAEKVDPAGERGEVNSSNEKYGEALLAMNRPVLVPYKLNPGQPSAVEGHGICLMNIPRSWKCLNTVRSLPPWWYEESLKGPESPCPHGQSLKRSLQTPFGLNICNEWQMGGLAKRRELIPKAQRKRVSEGNSVCSSLLSWSSSSFLSARLHVDLANPESHSVVTLPRLGFPALISVGRQPFVWKAVLWIWARGRGGLGWGDHRPGVKDPVPEVPPSGGPGRDNHRGQGGSPSPRVK

SEQ ID NO: 994159 - protein, 103 aa, Homo sapiens
TIREGWQESCTPCSTMTKLSDRYHSLILEVRLWARGKCTDRSTNTSADVYEPYPILLLGNKSPYWFYRTLVTGRISPRLQPMFLWWIAFESVEEIASECPAHS

SEQ ID NO: 994160 - protein, 204 aa, Homo sapiens
MSRRCETASGRRLSAQSSLLLWSVCDPWSAGGPKGARPTTLVFSLTCLVPNPTRLLRIDAVIPSWGHQLCALAVVSVLVFVTHAIPDWETTQLGPNQEFEGVLPRTLWSAPDAFPSSCIVGEWRTCWADSGTLNALALVCSGRSRWSLDPHRVLVSGSMCLTIWTGFWRAGTKAGGNSHGHSILCSFSRLLYLSRPYFAVTLVP

SEQ ID NO: 994161 - protein, 128 aa, Homo sapiens
HGSGNNLMGMAVHLFTKKLSPHPKMVRPWRKREECGSVNASYNGRAQTPEKETQESGHGSHTKRTRGINLITVAPHHWGREVRVARNTAGKKSLRINTFKTITNKPCAQAEPPFLETHTKSVSHTPQL

SEQ ID NO: 994162 - protein, 138 aa, Homo sapiens
LCDLKNPDFVSAKAPACVCGHGGHGGGVGKTKNETVTAKMTSAAHYKKREETKTDNKDTQKNASHIRYTKGEGAFFQHQQKHADKERRRKRKRERNRKQKEQTNKKQHVQKQKKKTEDIATKQAHNDNTQRNKTPHNR

SEQ ID NO: 994163 - protein, 243 aa, Homo sapiens
  misc_feature (95)..(95): Xaa can be any naturally occurring amino acid
MPSNLILSFKLTGNLSKGRLALYSQPGRQAGIGRPFYPRYTLGVREAHIGEPLFIVTQAPKTSPSGGRTQKALRERSHRGVVYHTCRPQGTQRVXETDPPRTAIPHQKANQGRQRRPLARRTTQGLGPGTTQRDRRSQTATSYQVTWVPPLKLYPKSRHHPLRCNGRPPGEDEPHEYIHTPILPTRRISPVWPRGTQERGTQIAQSRKETRNRSTPLDESEHEPPHTAEKPYQRQHQQTTQTK

SEQ ID NO: 994164 - protein, 329 aa, Homo sapiens
YKTLGPKINIKMGLRGVGPPFWAKLKIPPLWSKFSLRRPVLYGVRSYNCSIIGFRKFGAPSVPPAVWPYRPGRAYTLGTLFCPARVSQDRYSSRATPDSPRNTSLIINERCRPPPPQRWLPSTSRQYIVYQRQNTRGFSADCVGPNAREFLLAGHPHAGGTRAPLSGPPKESWLGIQRPLNPTFVPQPAPLQTPSWKKSDKFFAPTTQPPCGCVYPPPHFFFSRANTRVLRQTTEAFVVPLASKQTRQTTNPTSQSQRTTPKTGGRRPHTKTTPSERGAATTITTRPPARCVRSDRGRHPTYDEPRYKTPEPARAHNTARAQTNRLRRG

SEQ ID NO: 994165 - protein, 372 aa, Homo sapiens
DAFSRPERSWLLRYTSHPVNEPPTGVRRDPDKPSHPAPRVKRPKGEHAETRREGVRRWARAGSVRPFARGSREGRERLLNPWSWVTCGCMTPARTTSSPHGSASPSFRAVSRGNMLAASLPVCAKIVQTPGAEMRWTIDQKQVVILSQDSFYRCPYLESSKAKALKGQFNFEHPDAFDNELILKTLKEITEGKTVQIPVYDFVSHSRKEETVTVYPDRRGASLQGSWHFYSQEVRDLFQMKPFSGIQNEETRILRRGIRDIGKEEGYEDIISENKFGRQHEDPMKKKMRVNIPKDTKMSRINHGQNPAYKGKAPTNTGQKGYQDKRRCTNQNVPTQDHLEQDRIINERKKKKQNRDNKKKPVKKRPDMKKHE

SEQ ID NO: 994166 - protein, 336 aa, Homo sapiens
  misc_feature (258)..(258): Xaa can be any naturally occurring amino acid
SSVMCCTRWSAVTHRCNSTCDVACLMCDGSDPKSFAHVPASTICITWTGYTPCLFVSSKDDLSEGVAVSGPINGRVWSAGRTGIQPSYLVVRYHPMMTRSTVAGARRLTHHFLFTQSRQHGRLRTLGPPPVVLNPSCLLGSRVSACMGGFRHGLWTVELGSPHLSRSSTFLTKWYHWVEKSHVKGPAYPKSPRPLIQWVVDSAAEVLCDREHKIGRAKPGLHSGKRLCGKDYESLNGIVICIAWLYAGHATSPGFCWXLRVGRGLVAEAGARESCGHRCQGLATPGLMCVGREQLVWTLYPRLNLRVSPFLAWWPGFAEVAGVWPPGGGPRGSFNP

SEQ ID NO: 994167 - protein, 291 aa, Homo sapiens
MPHAQQQEKKQPAPHADVHIHLLNPHTIIFIYKRRESALRHHKKTTHTQRQEREQKRQNNQQSKQQTDTSNRTARKHTPNPHNEKKKMKKTRENQSSHKEKTNRREQKQPKKQQKERQHKEKQHTRREAKGRIQKKTTGKQDRHAREEQGERKKRRQEETTKTRRKRTARPKEAKSRQTDEEKKPQRTGSEGKNRAKRRTKRERRNRRERRTNTKRNRNCDKRAEYNHHQDKQSQANEVKAKTGARTTRRQEEQRKKKGAEDDRERTEEEDEATKRQQEGERSRGDTTEDR

SEQ ID NO: 994168 - protein, 69 aa, Homo sapiens
GRLVIPLVRKGHVVLPTGHTWCHCTIPGGEVYTCVRRGLYHLLLASPKLRMRDLVPKTHYDLTFGSLTR

SEQ ID NO: 994169 - protein, 137 aa, Homo sapiens
MACELYLTDHDKKPAMISRAVPMSSVWRERSGRVGNASVCTSRDMQSLSRVFLDARSHTSRHVSGIISMSQVVNQCVCGTSVSPPEISDARMWLRSHFWRCRECLAKSAFSAPKRTGPITVEVVANRYYHRHFMLEG

SEQ ID NO: 994170 - protein, 161 aa, Homo sapiens
AGAAPKGKQVYWAQLGKSRYAAKRFRKARSHCGRLKLRDDAGAKRQKLMTVRSRRQHAFEIIHPAHRRKPSAGPGERHHTHSGPREDIHHALGAPGLCDDRLWMLSPLGRVNQAIWLHVHRRLRRGCLPEALRHIAEMPWQMNINRLAGKWIHQTHSDLKS

SEQ ID NO: 994171 - protein, 105 aa, Homo sapiens
MEFIDVGREWNRMYEYENEFYDEAMLGLGETLAGRFDRNAEQLGNQWLPDMLDPFDIATVRCNRTQRRMLKGNEGFAPCLGHIYYAGMKKDEDAECVTALNARIA

SEQ ID NO: 994172 - protein, 275 aa, Homo sapiens
MDSTVDACTHQRTRDLCADYAQRKDINCEAWQSLTRIQTFRDISPGLWTDLGLHVTSKRLDSICCSIEKQTIGNNQQLTATQTRTVTEHGDEYHRPPPDLDNYETQDFLIQGLSGRVRDHTHAAKLPPKDQSHLCFIMTTSRRLAYTYILPKNVLKTVHLQYLTLRAQIAVIPIWGGAHQINPQAEGDTLTVTGRRNGATHQSVNLTCPPDQNDYIKGTLEPLRMESHIRPMSHRRYTTHGCHPPRRGSWLPTLLGMREEHYDTCNYSQAQINEG

SEQ ID NO: 994173 - protein, 348 aa, Homo sapiens
MVDIWPTLPVISPPSPRTNNTSTGASLKSPLTREKVKGNLKNHVIFHPLKEGLYYRGAVLIVALHFPVGEPLWGVIHNFSFYKKKIFPINPNGLRGPAPVFFYNPEKSRVFGDTYNLVVGVADLCTSKGHTIVASTCGGGNNPFWDCTTDQIFDPKVEVYAWLNCLPPPALLAFLKVGPVPVTLLLFTLLVFPMSFLTFGYKALKTEGGNRVTAYNLGTVNPALMEALKKVVLLYHGNELLPDNFVTQHRRRYKAATRKKKQHQPKKKGARAKKSPERRRMTQLLSIEGGTTEVKKRGGRKNSEGPSRLSNHPGCGTTAPPPTVCHSPEADTNQRRYTAKRPKDERKG

SEQ ID NO: 994174 - protein, 144 aa, Homo sapiens
MDGQGETAGRDRRKDARYARAGEQRTKTDGGAQERARQGREGADNSAEKAQSREESNNWMMNEDERGYKGEEREKEERGDGESRYNEQAMKWRGERDSNGGARSDEGDKEEDERRACTTVNKGGRLDGALIADLSECVCTFGSD

SEQ ID NO: 994175 - protein, 438 aa, Homo sapiens
HASAPPPKVPSPEAERTYGYPTSVPPPQLPVQTKQHYGGSTPARTAKPPIHRVETLARVNPRDRVKYVLSRIAMARTIYATSLANSVVDYLASQTPGSVLGRRCRSGTLHGEETRIHSMALLTSFTWPRYYSCDPIIATKYYKIPSTIHYYTIGVLVDRQCEHTEEAPGIRIQLHPRTLELSSSQLTRKRDSKQRLTPRTRSRPRTPKIRRKRSIQSTVGHRYPIGDAITTLAMYPICFGAVSPSMGPPKQYDEETSDSGRTAIQWRIDTQINGEPPTIPKHDTPVAQLQRMSHNKHRARRRHALPTRLQGTRYTDEKRNRNTPKYNPKTQPNHWHISTAEEPSNTKPTKANHNTSKQTKEIWERLNPQPRTGATHARTHTNTQTKDNQTHRQIQQNTHMRRLATYINNNANKKYSPQSSPKNGTNKDTADKAQDKST

SEQ ID NO: 994176 - protein, 267 aa, Homo sapiens
MHELKVLPRDLQLCSETASGVGCWGPGWMRRDAGAVWIPRLWVVGGATRNGETVPRCMNLCTAQGGDCQTVTAVTRKKDNRVCVWPCDSEQNSDPCEKTIRLKGQCEWPPTPGPSNGEIQPSLPKAYAFLHCKETGEENGGVYVCETATWCWLGAQEPRDVTNFTVGGFCAYESPDSSPMHPSAGGQRGGFGSPRWRQWWHEQGPGPGGTTELIGQTVRSSQGAFQRYIGVVTDAPESRPVWGCSTCRHSCRRPPVPRGSRAGGAPL

SEQ ID NO: 994177 - protein, 73 aa, Homo sapiens
VRAIYVRLEDFGIFSDFTIEYSQAPKKSDGHLRCTVTKDLTERRCRASRIRTHKELITSSMNSLPDLNSYHGY

SEQ ID NO: 994178 - protein, 65 aa, Homo sapiens
MLIRTLSLTTVRRRRNPPIEQHTASYQLHTPARTKHRSYTFTQSASLISNPFIFDKGTSKTRQYY

SEQ ID NO: 994179 - protein, 200 aa, Homo sapiens
MIDKFAAVMKSDEINDEPSHTSEACVLEMSKIHGSISDMDGHSRVNRKIRRVDKDELDVLGMKATRGFRLREFHNQEWLELEPAQARTHKVWTTHNPFKPRALQNTGVKSLVPLERLSKLNQLILRAHHFDFSPSTKGFPSTFGNTHGFKLRFGGQRTLLALKRANSNIFYPHKPKRGFPHIQSVDLSILWWPQPPYFPH

SEQ ID NO: 994180 - protein, 250 aa, Homo sapiens
MVRVSHFIMISDRPNQPSERSLVLLRDLYLWWVVTQCFIFNSQREQHNKPWVNKRAKSEQPEQTNSIFRGAHYPGYTLFCGVYVLPLTRVFPIYTRITVCRYVLYLTQRGVLHTDGATQHYTAGLVSIYISHPPLSCEYNNIANVEACVFSYVLSLCGAPVCESNEYMSVSAHTNYVVELPQNNYHHTEPPRSRHFYDGPEGRCSAPFTHRDSNTPTPHTREGRRGGPTDLAQAGDTPPPHKRAGAPPHR

SEQ ID NO: 994181 - protein, 359 aa, Homo sapiens
MVMLYTSWLNDRLHSALPPGALLRNHNRPPHHSLLLRWQLITRKTVAASDACTHTPLPLAPSHTAHHCCSRPAARAHSQHTLATPRAFTPTTTPMLRHTQPPGKPASATGAPHCPAPPLSRLGRLPTTCLAIGTRTHPCSPPTRRTHALLLHHSSCHASRALAMTTPCPPPRYVRRACPTPLRPSPPALPPLGLRACSYHLSLTPSCSSPPATTAQPFRLQPTPHPAHSHLLPACNPHRPAPRTTLPPSRLPPSSPPLPPTARAPSTHHAPPPPPATPHNPAPKDSTHKHNAAPSGPIRRHSLLARLTTRASHPPATARPRSQLTSLASPPLPSHALALPPHTADFPPPLLLPRPATPP

SEQ ID NO: 994182 - protein, 102 aa, Homo sapiens
QQPPVRRNQVEHRLEVAVLHLVALNSPLSGGMLAGHPSVAAPSSAVPAVRAARCAAWREPLSDALPVPRRLSSDTVHASLLPADTTRLYRTLMPHTSTHQRH

SEQ ID NO: 994183 - protein, 272 aa, Homo sapiens
VLIADGSSMICAFGLCILPILTTGDLNHLDHQHTMRWCHHHALRFPGQLNADLRKLAVEAWSPSHVSISLCLALPLSPAVEASSIELSQCRNSPSEVFDAKNMMAACDPRQGRYLTVAAVFRGSDVHEGGQTEQMLNVQNKNSSYFVQMDPPKMSRQPSVTSHLVASSMAAPFLGHSTAIQELFTRISEQLHCHVPPAGLPPPATPGEGLAEHGVHRGWEPLTDSSLSISRYPEPRRTGGRFACGRREDGLRQQPHTSRFQLPSHSYSTALS

SEQ ID NO: 994184 - protein, 101 aa, Homo sapiens
TASSENSGAKGERQIWTCKGSPASEHDVFDPVSVAWLAWRWKSMSYTLEGVMAGVIASTRHLYSFWRCLQSSSSKRDEIAPNIAPVLESDCVELITDTLFS

SEQ ID NO: 994185 - protein, 259 aa, Homo sapiens
ENYGGGVRQGTSVELTIVEDSTEDDSNRGFMNINKYIALQHFVHEKSQMYSRELPVIDFHKCLTDFPKLDDIHPFYADWMNILYEPEVIIDTVGALWANKLLPTNSSGTHVAQKITVRLMKYGDSLYRCQQNEACGPGTDVHSDQEAEAEFGLSGDKCVDAILSRLQTIDPNTRTLVWCGYPDVGSPASSTKVTRADVDVHALCVHNSSLCELGTWIISIYVGQVCRHSWDSGHPLEDTTHHRDAGMMPWGNYVLRSAL

SEQ ID NO: 994186 - protein, 120 aa, Homo sapiens
MSAQKSRKLRYSRNSPHLWWVRTICANNGAHVNRCKQFAVPPKKGAIYAMGFHPSQFSRDTTHGREPMMWLRSPRDRDTAVLCTTERKLVCNNSGAALRGHNTVSSLTLRDVVREPVKRN

SEQ ID NO: 994187 - protein, 366 aa, Homo sapiens
  misc_feature (107)..(107): Xaa can be any naturally occurring amino acid
MSASCLCQSVTCLTDVCAALHAAGGTAVLSALSVSAGAYSTLFCVHHVHSGWHQHMRIALERPTMARTCSKDVIDMRTLLILIPRSCEVLIDAVPAWCTRAGYRCYXSLYRRLVYLCLAQVRGVLEDPVWATTVFACGIYPRTNSCHAFDPILQSSQPGTDNGYLLPLRLFSLHCCLVGRSLARSAAPMLGCCGSSMTQWSWCCCFLSINLAAGASRWGWGCCFSSSRGTSSVEDECAALLALGYVIFSSTRVRLPVAALPKLRNSVLAFTWVRGGFLLVGKPWGTVRPLTLCAHSAPVANVGLPRGSCQRSRASVGPNRPRLPLRCVTGAISGEPPRGRPFQGTYPKCILQLLTLDRQLVLYHHM

SEQ ID NO: 994188 - protein, 326 aa, Homo sapiens
MARGPKKHLKRVAAPKHWMLDKLTGVLAPRSIRTGPHKKRECLPLQYICLEEQHLKYAPDPEHEVKNHYACSRCHSHEESDCVEGSEADSNATLTGIHWYVIEAIDIRRERISVWSMIILKGLRLLYIVITPEEANVLELCKVRKIFVGTKGIPHLVTHDARIIRYPDPLIKVNDTISDDLETGKITDLVKWFDTGNLCMVTGGADLGRIGVITNRERSWDLLTWCTVKRCAMATALPIDVPHFVLIGEATDHGFPSRGKGFRRLHGGEKGTKSGATNRDKGPGRVALRRGNVGGNNTGAKTHGGSPCEGQSLKSAAQKRWRLGHT

SEQ ID NO: 994189 - protein, 284 aa, Homo sapiens
MCTVCQHLEHSMTLRSCGAQGGGVGVARRVMAGAWARQSSSAALIIVSALTSGDGQSMLLVLCLLSNSLRGGEVLCHFLYSSYAVIITISICCYFPVELVEFPAPESGSEDMSDDFLIGRYVLSRTFLQQPSFLVGLLLGFYPFMFLVGRVYAKALHSVVTTSSGLLTNRVLSFIVMTLMSRKVTIQSPSFDMPQCLRLEEYLFHHGEQISGVLGSQKLIGKCPCGGQILTRVKRIGISLAPALEFHRLTGNNGDRNGSPPLGLGNHRPARNYKTTALPPPRWP

SEQ ID NO: 994190 - protein, 136 aa, Homo sapiens
  misc_feature (28)..(28): Xaa can be any naturally occurring amino acid
  misc_feature (49)..(49): Xaa can be any naturally occurring amino acid
GELVRHRFPTYERDQCNKRRTHLDNPSXLGRYHFRATVPLTGATRPTDXTMAAQSSKSNSDTGRSASTYYTYENPTLDIKDCSTTGDEPAARRIGGTQRVIPIKGNCHLGARYESYTQSADSSDTLCETLLEVTLT

SEQ ID NO: 994191 - protein, 273 aa, Homo sapiens
MLTGFNSISTNDPTSWCVLMDTKRAFQKRSVAQKRDPSALLEFFTSGPVSTSGLLHTFRTHQFLVPGGLPRVRETPRGTLFPTKLLVAPSPVCRKLVPPHRRAGTPCDAFISGSFRTTEISLAPRWVPRHQRDDRLDCHTLPDPVGMTTDSFVALRAPQCMRGHQQALLTSARACGRRRKYSIPCAVVYTPNGLKYWTFPPSETACPLTCAPHVMSRALTLGISEFFLRKYTVLDPPCRLVQPFATSATFWIAPPDRAHNTNYACATVRYVAG

SEQ ID NO: 994192 - protein, 262 aa, Homo sapiens
RDELADEIANHCSRLRSPGVRGERGVWRSRIAPELEEELEGGGMVQQRSLINDRLKKANPAEIDQINTDLNLLSRSHCPVRTENARQLAWKCQNKELKVKCCRVDVRALSIPKVLRSSIERPRGHDCSVGGAAGHSETNERSWQSAKQVRRTEKNLKDVLLAMVDDRSVRNCRAEYKDQVDNGIYPALEARFIAGRLEEAEEEAQRDQASSRAVNCSRELEDATETADAMNREVSSLKNKLKRGDLPFVVPREWAGKARGWL

SEQ ID NO: 994193 - protein, 222 aa, Homo sapiens
MSSPLTNPSTFGKAEGQADSTQVRQVPDQARGHEWMEPPASHKTHEQNCPRRRHARCPVDPSTTGEGEDGELARLHGTTTDGSEPTQAAPTPPPAPTAPHPTQQPTERNTQTPQPDQRQPTRRPQERGHTGPRPARQRQHRPQPTRARKAAAQTQTKHHTRTPQKRTQPACRQANPRRDATHTSGDPTRASHAKQLNAPNTHTTMTVIHTPPPNSRTDAHTH

SEQ ID NO: 994194 - protein, 221 aa, Homo sapiens
MAVMAEIGVLPKSDAEIDAQMMATNPEGIWGLQNMAKSYKSDVGVAFRYVSTIADDANRFIQAMLRKLLLMQMMCDMANPVPRVISLLCVSSPEEICYLDIAMAKKVKPALPIDQAIFRYWLPSDRYCLTAPKYRLKSLRKKALHLSAWKNNSPGCKVLVSVYQQNQVTPTSRQHAIHYRHDLFEPKSRGLPCPSTGSQVYGYQIAYFLQSSSCEQLRIPG

SEQ ID NO: 994195 - protein, 150 aa, Homo sapiens
MTGRSNKRREGRRKRRRRTTKGAKKRHGREAEQRQGDERERNTQKDKTQRRERKEEEEGKKGEGKKKRKERREERSKTKRGRQKEGRRRKEQAKEREEEEKKEKRKGGEGRKEEEERGEKKKRGEQGAEEEERTEKETNEERREEKEKKE

SEQ ID NO: 994196 - protein, 233 aa, Homo sapiens
ICVLVLKINTQALSVSLCGYYNQSEAGSHIIQRMYGCDLGPDGRFLRGHNQYAYDGKDYIALNEDLSSWTAADTAAQITQRKWEAAVWLEQLRAYLEGLCVEWLRRYLENGKETLQRADPPKTHVTQHPYSDHEATLRVLALGFYPAEITLTWQRAWRGTKLRTLSLWRPEQHGDKNPYKKKDQLVGWCPTGERAENNTCPMYTHDGVRRKPLTLKHEKPSYPVATKYTDRGH

SEQ ID NO: 994197 - protein, 182 aa, Homo sapiens
MHKKTRHTQKNTKKGEKKEKEKYKKKRKGDTKKKTKHREKQNTGQEKREQTNNTREKKKRKTTNKEQPHHKAEKPQQKKSNNKGQKHTPEERKRQQHKRRKNKEKNNSRKNKTTRTQQKKTNKKQQTTKKKTKQRKKKKDTAPQNHGKRKTREKKRKRKEQKTTQKTNEENQEREEARDRKR

SEQ ID NO: 994198 - protein, 269 aa, Homo sapiens
MLIDWKQKQNTNTKNNTQTQRRGPTKQHHHQRGPTTDTNAHTRAQPTRAERTNNKTHRQHTTRTKPPRATHTQPATTESKTHETEPNTANTTPLTSARHTKGQTAHKPNQLTARQHEQHTHNKKRQHTTVHITHDPKTTGPRAKHQQHHTTNRCRRNHRPRQGNTKQREGARSGMRADQSNAGQPQQPPTDETRGDSTTDGRESQSSDDEARAHGDHGKSPTEREASLAENKETKEAEDAQRAERQSGERRGTGAAKIERRKPEREDMQ

SEQ ID NO: 994199 - protein, 330 aa, Homo sapiens
MQTRGNTPVTHQTRALNTIAIPRQRLNSINHDCYATLRTPLDKTGPLRLPLHHTHTAHQPATTYDPTHTATTVKHPPTPPTTQHHCGGTSPHYQHSTTQTQHTTGHYHRHNCDHQPNNPNPPYTSYPKQHNTHRHTTRPTSHKRKTHIASSTRHSHHSAYTNKLAPHEQRHPRRQQTQKPTDETKGPIANINTLTLSKPRKQGSSTHATTEQTRDTAQHKHNGHNRHYEHKRKQQEAQIEANNNDNTEDNDEQNRSTHSNNHTRPGNPENQTHHNTATTNATRQHSNPAHNAERLGNANTQHTINNTHTQTIAHNRNTRHEIEPKKTDNE

SEQ ID NO: 994200 - protein, 121 aa, Homo sapiens
  misc_feature (12)..(12): Xaa can be any naturally occurring amino acid
  misc_feature (21)..(21): Xaa can be any naturally occurring amino acid
MKSGQETALPGXSLYREEHKXCSHVRRQWSLITHDGRLAPRNWQRRSHEEATDRYLGHSYLEDLTRAQGENVTHREGVREHDLRTQRDRNRMHCPLGRSRYQSSDETLCIARHVACAGCIP

SEQ ID NO: 994201 - protein, 100 aa, Homo sapiens
MASCLQGLWLAKGGALAEPRDDRCQGSHVDGALKKPGGQWPGNRSEKTVVPALQGDGSDHVTANKPKQRRLVEAGYTTVDNAGERQERRQDTNSGSAPDK

SEQ ID NO: 994202 - protein, 106 aa, Homo sapiens
IVHKRRNPEDLDFAASRRLTDKNLGFQMLQQDGLEGGPWPGLPRKGHQGVRSAWEPPRKGKGWVLTGRSTEKKTHSMCCLTRGMMQDVQHTSGAEHNSSRVTPVED

SEQ ID NO: 994203 - protein, 32 aa, Homo sapiens
MTDQVAAQSLAGRCGASRRRRSECECNTADAR

SEQ ID NO: 994204 - protein, 108 aa, Homo sapiens
RLFRSWISQIGFYTLIPHDLGMNKPPVLNNADSVQAKVEMLDNLLDIEVAYSLLRGGSDDSSKDPIDVNYEKLKTDIEGGVTEYSVEKPRSSGSMLENYSCNHQHKCV

SEQ ID NO: 994205 - protein, 358 aa, Homo sapiens
  misc_feature (48)..(48): Xaa can be any naturally occurring amino acid
  misc_feature (87)..(87): Xaa can be any naturally occurring amino acid
MDGSSDRQGWMLGTHAEVDLVIRHSARWHKGILVRMQLSDRVHTMLRXYRDAGKLARAHFEARGEVVHRHCQVHVQGHDVVTGAPLXLRCTEETTTLSSNETPGLVGEEVATQIEDVGLLGDKERDGSDARVGLRRGHGRRAPTAKQSDSWALRIREEDPSWLAVEPGGDNNFVTNFALWYRHRVSGTARHGSKEGDQLASISDKENWKTNGKKAQWWLIWEEAGTGVCMVGGSIDRARWLGLGVLPQCGYHQWRARTPPVGQPGNHPPKNERGGRHGNYGEGGLATQERAYSGTGENFARFLESRLHHPTVFPELRNLPGDFAMGRKDEPADHWRVWDLEGKGLTGFGNSAGGFSKV

SEQ ID NO: 994206 - protein, 96 aa, Homo sapiens
YYTNQDIMSGEGKAGPPWSAVPVQHFHKVRRRTVAAVPCAVPVWGQHFLGHQDQEGLPTFCRKFRSDILLQDTRPLFLETRIPWHMGHSYMRKYPF

SEQ ID NO: 994207 - protein, 135 aa, Homo sapiens
LGLGNETAPVCFKKMAEKPDMGEIASFDKAMLKKTEYAVRRSTLRTKETIEQEKRSEISYMILEDFRTPRSVFETPGRRVWRKSHAAMMDTSHNGCTVKPGSSPRRVPPGLWVSEGYPAAPSRHCPKVSPVVARG

SEQ ID NO: 994208 - protein, 267 aa, Homo sapiens
MCSSHYIRETAGEDSTRAKERYIRSRIGARHISIYLDLLSIIKNLRGKEAIKHQRRVLHTAEAHMSPLGENRRCFYKKFRYIALSPTKRCGFYSHRGGFSGGGAKLYKHIICTSSGSNPEAQSANERARITINTHTCDVNIHTGQGNLDNEKQLSKKQNRYRKDRDSKQKEAKEAGRREIQRDGRNERVGDKGQNNKPEARSSNSMRRRESTPTRYDRRRKPNKVQEPQHMKEERDAKINTNNSSDARGGERADKNNKTNAQPRRGN

SEQ ID NO: 994209 - protein, 197 aa, Homo sapiens
LLDGSRLLQEVVMSLSKCYSSLPGLDEAEIRIRWLEIVVRKTNYLTSTGLRRFLESQMSRMYTIPLYEYLLHRLPSSPSRLEVFYQTQGRLHTNLQQYAIQQILYPGLGLPAKSPTQSTSTELGQGWKEKKQNPDDKKGPCLACTDRVSTQGSDNPYYSEDVKCGLAIRHLIGRSLSHRNLSRTTPQMLAYPEGQRH

SEQ ID NO: 994210 - protein, 175 aa, Homo sapiens
  misc_feature (26)..(26): Xaa can be any naturally occurring amino acid
MVTGKCETHEDTGGTISRYNQTIIRXAGRWRYQMSGLRMTLIGDDEVPTYRLGLSTCCERTIMVLCVGPEVAGSNTVLLYDDSTIRLTGDVDEDGRTWFGDQGNEGSMSSWSGTESVINATDESITLPDVSPHYGRTPLGSLWTEQYYLTEGTCVVPGLRLVAASWASSPFPMSV

SEQ ID NO: 994211 - protein, 258 aa, Homo sapiens
GTQYHLFLIHKTNIFERYIQKCSTWKFPYPSVVSWLNVCLPRTFEMLAYLGGCTFSTYGWVWVYSLYEMVIGASKNTTNKHRANQASSTTTNKEAGAPEDNIPPGGSPTQHAPPPPETLLGKTTEDHPIRCGTLLTTTTPDTGATALKQAPRQRAKQRNEADTNRRRTTQKRAEANTTGQPKHRCEDIHNAQNATTEYTIYKAIKPRVVHNSASMTAPRRNEEVDAARENRLTQEQQHPPTAAASLENTRRPPSHPPL

SEQ ID NO: 994212 - protein, 529 aa, Homo sapiens
MSTHPTIIIYVSERRKNNHINGSVRRSQQNNNKKGDVTNRASNDIYFTATHIIISGDHEKKVVTTTNADIASRYAPAGAIHVGRHTKLQRTDEYKWRTLNNSKHPHSTRTATEQMMSRTTTQTTQRNKSARGPPPIPDDPPDDESAYQSTDERKRTRRTYTTPTTRGGDTKKQEDRPYPQHALIPQATSIATHTPHHPYLITHVDTSNKSGGEPTHEQDTSHTPKRGRSTTHTQVVSHRTSSAARTHSGHTDPKGTTNNDMRNHPRGQTTHTPTMRSQPHSQQAHKHTQHIVPPTTNYGKRCLHNKNKRAYNTNTNTPHGHTATHQTTNEQEYDGYIYNACRPPHTRITEARGGHRSHAIECKESILNNVEHNSMRTPAYTATRASNDRRAYCHSARLNTNETDTVTDIHCAAVVSRRAAGCTCDWRERHDTKTHAESQAYTTDRRSISTARAIEGHEQPCHRRVNDANASQAARTKHPSHIPQHRAQERSEQPQEPLPSQPTSTSSIQQQLNTDNQAHRRAQAAHSTH

SEQ ID NO: 994213 - protein, 241 aa, Homo sapiens
MNYKLWALRLTSHIYWKSIRGYDSIVGLYYPNSITPGLSVLKHKGLHPKESSQQLALRRIYPLQKIPQVVSPHTAKSSPLAHYHKRRKAGQTANHLLINPNNLSTQGTTPIPNPARHTPENSTNRCMPPIGGTPNKQILSELVLRTTGLGLPHGPPGSNKEGALTKKENPIQQAFILIVRPPHTHVRNLTRSEALHTLHKRPAQLAQNNSAHALRAHATTTTRAGINQSEPSHLRHYKKCP

SEQ ID NO: 994214 - protein, 237 aa, Homo sapiens
FDTHYKTDFDKNKIWFEHRLIDDIGGSGPQVFGWLCVAPARIYDGDVQLMTSWNHGFGSLGLHDCPVPWSALDGELSGPDALYVPLQMGPVTLSDYLRMPPDRVRPTCHQPPSAAIFAWPTGGLAATRGVNAWDGATDSISIPVLCPSMLVATVCSWSTRADELASDVPKATWRGMLSTALYDMLPAARLSCLRHHGLSSITHSMSHLCLDALGQGVRGVAPPMAAAEAAALPRGLS

SEQ ID NO: 994215 - protein, 399 aa, Homo sapiens
GDHEHDLERGSMTMARTGVTFTMAMTADESNLIKHRHRERCVSQPVLRQHTMSLPVQAADRHFQSRGPAHGTGTRDVNGAVRQAQAAWWPLHAAHERPELQGKQPGCTAASRHHRKNSWQQDTTNGPSIRHDMMETSETPPHPEGQLKNTSRMSPAKKAKQRENREGERHDKDNHKAMRTTMETLNLKEHKQGKTDRRATRKPKIDTHHTEITPMTTERTRTRTRGHQGTEDHAQRDRHTTEHDGRQHKHKQTKQRKRTPGNEKQGHGPDSGGTNQGAEPGQHDAVTKPAEGRNRAGGRGENRAPTQVRQQKQQGRQHNQGHQQHQDTEEKRQDQRQETRRAEEHLATPRQPPTAPHGHPPATPHTPITQPATTAKSAPPRATGPNTHKPASDHPPPGA

SEQ ID NO: 994216 - protein, 73 aa, Homo sapiens
STCYIIMTGLKVFAELRKPMSSVKDKVSQVYMNPEAWNTMVLKNIAASGKFSSDREAMLKNMPKTSGTWNLQI

SEQ ID NO: 994217 - protein, 293 aa, Homo sapiens
MRLPARSLSTLLSLRQKSRLQAPPVVAATSLTHSSTSGGSGETADVVQTAATKLPELGLGSYTPVGLIQNLLQIYALLIWAYLGGGPELHCTVFARCLILPLIVPGQRQAATLHNHLPEIHEAHPVESTEAKLARDHIEYFTRLPREMALSPRNNMVFNSINSHSPCDSGPNLHLLLHCSERHWPPFLCPAARQVALVVPDLPGIRSHRTYTPADLAPSALPEAQWLSTGFTRLPTHDELGPESPPGNLAIAPYPGARTTPPSRSSLATPGRTTEPPTPAYTLAPRSPRHAKQ

SEQ ID NO: 994218 - protein, 310 aa, Homo sapiens
  misc_feature (101)..(101): Xaa can be any naturally occurring amino acid
SLIQTVSRSRSLAVASRGHSRSETYGEGERDQGDSNGIVVRIVRRPWIHPGTVFSHSSRVNSGILFGQSSDPFIWALQSYHGYILIPNDVFHSDGRNFQWXYRCKGVKNVERPCSIKWENPIHASFQGARIPSREMLDGGRMSVTSEGTIAGSSSVAVVCTTDVRTAEALIMARGREPRQGSIHASEAPIIDWMATRYVSVHRGVNPVDATLLTRQALQRIIHVNSARWDPVETSPMRRTRLGARQGSNTLSEASLSGLVVGKGDRPMERNEDSPIVATPALAQCARERETRWWMEPPYLWGKTFGLWPV

SEQ ID NO: 994219 - protein, 96 aa, Homo sapiens
MVGARYRSANLVNGVSQCQGAYVWTDVWSNEYILRVRVLFERLNCNGMVTVAFKVYFHSLEEVTVGEHEARCDYQHRNVISRVFVPIKFPGPGVKS

SEQ ID NO: 994220 - protein, 184 aa, Homo sapiens
MEETAHFTLSSNRAYNHAFCTLIWPYSVSQLPVASVHSSVSELPLTVQPLLPVGSVPGLVFSVSRSKASYLKTCNVQFYVSGKTGGPTSGTGGTEREPRTWGREAGTQAPVKDPQKMALSYSWPVATEAVRCKDLNPSHRTHRPLAPKGSKGTGRIPMRLQGPAATHSAAHPPNTNPHGGSPAP

SEQ ID NO: 994221 - protein, 153 aa, Homo sapiens
MRCQGSTMRMKTQLRRRRTPRRTLLCQAYANQTCERERASQEKYRDLAKERRDGVNRDYEAKRAYQHHELTYRAVGPPLREADKSVWGEEKTVDPGGPKFLGGDSGYYSPLVKGLDFALLQKVRAEIASQEQEKEQWWKGPEGERQKAGDPDD

SEQ ID NO: 994222 - protein, 117 aa, Homo sapiens
LHTEILKLVPQAAWQERYSSLMACKLPVEDVHPLSQAFDQIKGSETAPSTWRNTASLRLPWSRCSLELCQEQALGNVDDKIDSNSSMETSPSRKILKQRRRLLTFKVAKSYCIITFP

SEQ ID NO: 994223 - protein, 315 aa, Homo sapiens
MDRQQPSETSSEYVNWQQQIRQQSWGIRCTIMNRHLVTHRPKHDEEARKNTNRKTGATQVKPQTHSTTRTQQESNPAQATATTQHHNQAAPRTGDTRHTQRTEHRHTHHTDAQATHTQHHTDTSTEDRHSAAQLSHISTHDTTHESIKRIQPRTNKPDRPNTPRSTTASATHDNTTPRTREHKRTRQPDHNKPRHHTETKHEANLTRESTTEEQSHKTKESESDKTRAEKDKNKNSEARRKHRADRYESTNESRQRKQKRGEQRQEKPATGRTSRQQKTTNSPTDRPTHSGAKDETEQTRNARSPAHGRKESNRV

SEQ ID NO: 994224 - protein, 260 aa, Homo sapiens
MKSLLVVLRGIVYVYTVDDSGKQQILIATDLREEKREKRLRENAMMERAEWSKYQLEKPKTIKGTRAIRSGSLHADVMKPRDSERGEKAQITKAAIERRKATRGTQLTGVNQERGLRQKSPQDKQARLGWDPTHLADKGSVYGANHLETRDNTTILDQQSLTVETTASREDKGKGTAQGGPCVHRIAWSVTKRDHLKVGKSQRNWAGLVSGRKFRCTPRPNTKTQHTNKEPEPARQTTREPSRTMQHSRHDSTGMRQGKA

SEQ ID NO: 994225 - protein, 271 aa, Homo sapiens
  misc_feature (55)..(55): Xaa can be any naturally occurring amino acid
MTEQSNTEPPSDSASSWPDQATPLNRAPSHHSRSRRPWEGISEGEDTSYMHMPQXVAPYRSTLSTCIVGTATPIVCPNTHLTILSFLSFIAILPFLHGNDLAPQILANIPVSLLYTMSFHVFEGSAPQFCPLTTFLTRSGQILLLTIRERNLGQDEAQAGIAQVKSSTELGTCSFLRLRESQGHRHQESLAHEDTRQQAKKQGADSDRVTKYGTAGKKQRPRTGAPAPKREQESSPAHRTKGDHGNASRSRAHPTEVAPAKRENYTGQERP

SEQ ID NO: 994226 - protein, 141 aa, Homo sapiens
MRSSHSEGQVVCRSQGEAQWVWELVSALVSEGPGLASLCWLLLLGLKMSEAIAQLRGRAVTKDTPDCAILDSSGGAPEIEDRSPEAPPPLLSPLQMLPWALLLQGARAGVVSRNVSLADYFKLGSICPDSVFDCENIFLAL

SEQ ID NO: 994227 - protein, 298 aa, Homo sapiens
MGLSWNGCRCRYGWVSEAIRECMTFSSVHSEPLDQVNKLSGQDHSTMVVGGHSDRVTVLVLQGGPKWMPLDMVYVCLSDIEQCVGMHWYGREHPGVQERGLVALAILAGMLNRHIYIKIEPIPGITRSSGWCISRIEFDGYRGYPYLEVILPGSVESTRIFHGYPSLGTKSKSDERRRKDDYILVGNSRISMTVMGPSGFRRLACRAYHKSTEVELLRVDNIMRYTEDENGTMGKTIEGQWSVKDNIKHRNQEGKRRDWTTQEETERKLECHVATDYKRRAKDVRKRGKVATRTGTGG

SEQ ID NO: 994228 - protein, 40 aa, Homo sapiens
MHHKQTDRQRSAHKSTHKWIAQIRCMRKPNKRNKKKRQHH

SEQ ID NO: 994229 - protein, 413 aa, Homo sapiens
GYLQPPSQTRRKVSSSIQACAGFTWLWKTLCKEETEQAPPGPPAQCSRRAHLDQTFPDTGTSLLPHPVLVGHVLEKTPNPDGHSRDVHQTQATGSRGGPQGSMRAFLASRKITCTRHSPNGTCAPIERAHLNYTDHNSVIHHKTDAARVPCPIFTRERPQHGPPCIGKDMKQPHVGGGDADSRHKPLEHPDTCIPDTGATPHCRRLRGTEHQTRDGLPHPPRDPQHHLDSDRPTIGKKFLKGSTIPEHQQKAIRRTRDSMNWTNYPIGINKAKPAFENDGSNRPGENVGPRSLSTDMQADSRYRARDANRTPASQANKGQQVQNPRTDDHAAATTNGQRNGKHPGGRAQERERKAQKNNKHAKEKNQRKKRADSEAEQKQVQTKKREKEREAANRNNDEKEEEERQTRHRTGR

SEQ ID NO: 994230 - protein, 309 aa, Homo sapiens
  misc_feature (242)..(242): Xaa can be any naturally occurring amino acid
VHAGLGELLRYSGSSTARNVTWKLGSRRYGPSSVSFADDLSCAGSKQHYNCEHSKINFRDKRRALESINEWVRETTVRRRLPEVTKDVERTDEALLVNAMFFKPHWDEKFQPQDGGHIVDFMVTRSYTVGVYDDAPDEASIELSTMDRWKDKLQIVEDAPGPQALQARHPHAPSTWSLFERLEKLVSKEQLKIWMGKMQEEGVAISLAKGVVEVTHELEKTCCVALTEHVTEQGRLVGMSPXACSWHGSQPRFEWTNGTLCGHWGRNGSPVVYAPFSMVTQGLDYGAAPSEYTNCGQKEDIQDKGDPQG

SEQ ID NO: 994231 - protein, 319 aa, Homo sapiens
MTTGRYGPSLQSLGETNDLGQWTTTDKRQHTRSHKTRQRHNIFATNLQPALDTAARNPHQTRQDHSHTRTNINTPGHTQEKERQGTSGRRQSTTDKNSGHSKCGKREQKLIRKTQHDTTPRTRQDKTQRRQQTTKEKTSDEQKKKRKRKKAQNTGRYKSKERRSGRPDKKMKAPSQHTIRAIRNEEGKKKKEKPREQQTAPHTTTKNKHDTIERQSKSEQKRQTITRREESKSDTRENQKLAKVKRRHRPEKKRTEPMSELQREEGTTTPRTQTTRHTTAVKQRAQQRKRSRTQTNDSASTITDTRAKHHRQKTQIERT

SEQ ID NO: 994232 - protein, 510 aa, Homo sapiens
KKVMPQSLQGGKVHLQIKKAKKKGGEKDQGGKNRRVRYIDEACIPRARTHIGSRNKAQKNETSERAHNGGEKKKQGETPRKIKNGRKEPDRPKNRENKQTKAEQEKQQQKTSERQTHKHTPEERYNSEHKGALSHLIPPHTNLHRAQHPRQSTRETQTGNNNKKSADSQTQQRPTTETRNTEMQKINHPTREKQISKEDKQQADTEAHKPHKHHRQPQHLTTDTLQSHDQNRENQQATQAQPASSNYSASPRNYKTARDHDTTQYEQHHASVARQPTTERENDYDSNPDEMIDSTANKTSHNISRDTKKREKQERAAKDNKTRHANQRQEQNTNHEKISDTTNTVKRLKTKARPEETNNTGRENTNKHEHTSRQTRTKTRTPRPTNTQKKKRKKERERTIEKKNTDESARVRQTTHDKKNSEHRDKERRKQATRRREKQAENNEKRDYGEQTRMRDDGERNTTMQNVHDKQRKKENTNKTKTTKQKHRATKPRQRSDEPNTNAAHRPTSA

SEQ ID NO: 994233 - protein, 240 aa, Homo sapiens
LFRWSSYPRDCRCNPIRIVDIKNRVYGLDVGSGIPMVQRYERFVSQRLKSYVIESDRSNPGRSIYSQYPPVYEQDEEDNKAYLTKRTEPAEKMSISAPTLSNYTTNSPAQNQRTDKTNNKTNGRREHKRSHEKGTQRNNAENPTPTMWLHNKWATPQRNGKHHTIKPAERTTWTETPCTPETKRDTPLTNKRDNSRKGHKETTVSVGTSYHGTSTNSTTNHKQQQRNPQSDSTHGAHQPS

SEQ ID NO: 994234 - protein, 320 aa, Homo sapiens
HRPSDGPLLPLPPLDVARVVSAPISHVNSDEPEAVLYVCQGGRVDEHLLSKDVVVDEVVFRRNGTTTWMSPVLAPLMYNADPPACNPVLQKVRLSCWCQTVMWSTSPEYEEEMSKICMTYLLRTAFARSKDEKIFNIKATEHVISPMGSGLLHSWTGSAIGACSCPSTGSDWNDLLTTHRELWLVLMPAGENFTIHGRLQPDLEVLRVGKLVKNRTVDWALTAVHRRMEPLLEQRGIPPPVLSGAPNVESGPHSATVTMFLHDSDRGPNKPVSIEPISGPDKGPYQRVKPPRTRNPRPASDRLPATNPVSPHPFCPTPPP

SEQ ID NO: 994235 - protein, 270 aa, Homo sapiens
MTPVQRGGPGALVALGWGTEVCFRVRFRQWHPGAGGLRPCDWAGAVWPWSLAECKAEDRSGCPVTNVGARLVNDMKIKSLAVEIYLFSLPIKESEIIDFLLGASLKDEVPDRLCQCMKKTRAGQRNQVQGIVLLSGTTMATSVLGVKVLHRSVATDIRVGHHPGQDSPSSPCAKATGGTKIGKAQTVPCKVTWPLLALCWLRPNPVNPGVTGIISRTLCLKEAGHDGVVSIDWYTSERRVTCNHWGNLRQMAALMQFKNYKKLNPDTEGD

SEQ ID NO: 994236 - protein, 309 aa, Homo sapiens
VGEIHVKTLEEILLGKEPVRNVENCYTKLKTDGPCKILMISSFRSRNAPPLSVSKPSLRSWLKTNIGSRKQRDNKIAKSGYNVASQTSKVLEYLRIKENSINLPSTVVASESDNERAVLVKTKSMPEVHGYDSWLELKTGRRQLRVKKSSDEQQQVPDLKDEVTPEGEERLMRDAAIRTGDATEEKNLQRRTMHSPILQTQVIRKQKPIKKGSKVADHPGRLTSTKTFPCPRRWSQSRAKKQSNMRGQPCRETGTVQSSGHAHAGQNEALAKNPRWQRNQRSHDEAENHTGRPGVPTRHPKGRSPHGWT

SEQ ID NO: 994237 - protein, 33 aa, Homo sapiens
GRGRQDARAGSELDASGARRDSEMQAARSGRDA

SEQ ID NO: 994238 - protein, 115 aa, Homo sapiens
MVCGLLSLSLMCAKGMNYLVVVAPYNGETVGHGLDKSRTAERPQRILNKQTCMCHKEQGPCKEDRETDDTRGIRPVREGKLREPDYHKKEEMKEGGRGTEEYLRENHDPTRHVTP

SEQ ID NO: 994239 - protein, 81 aa, Homo sapiens
ATAQTRLRSYSCASLRFLRTFDNRYGCNEIESKLKKTETRENPLPSKETIEQESSGESNEACAAYALYIHKHAFLFTSFSC

SEQ ID NO: 994240 - protein, 97 aa, Homo sapiens
CPELPCGYCLTLLLLWALCPLPCHLECHSTYPHTQSLSYNENDIIDTYNNHRKRNTTKQNNTIPLNIIYKQQHTNHHYTHNQKIHNKNTENKKLHNK

SEQ ID NO: 994241 - protein, 430 aa, Homo sapiens
MLLEDEICCWSLLWSEDGRLLKSDCTSIVYATEKKQTKGGVTRRPGLYAGDTCNQYSKYEEPQGWNRRTLTNRRIHETANTDGHKREDAITTTMDEGTKEAESGIDAAVDGRIQQSKAALIDTETQTYNQKKPGQEVPRQHRTHPYIHTQNTHKNTPGPDDNTTLRNPMMIRDMTNRDTPYPGIHPIEESTWDDITKNGNQTTKTDIINDTGNNRNWDKKRQQISKANIGQPQEKQDEHHNETDKQTQNNRKHTKGQHQTKTETHRTHQMRKTTQLGQTTRGHHQHEKTHKETNRDVKRTRRKQKNKDKPQREGNHKTNSRRQRTTRTSKTKRQTKRHERAQKDENNKRKRTIKKRKNNEKKRRKQIRKATEDTKENKRRQRKNKQQQNELSIRYTKIAEQQIDRQEGDKKEKNTHPDVSSTGHGTGTRG

SEQ ID NO: 994242 - protein, 377 aa, Homo sapiens
  misc_feature (26)..(26): Xaa can be any naturally occurring amino acid
  misc_feature (112)..(112): Xaa can be any naturally occurring amino acid
MRTTSCERHAVQGDERDKGELVYTRXLCAHACMLPFLSVHCSVHGSTMRAHGSQGHADNQRKSYGADRVDGGHTVSGDGRMRRGVLVTPGGPPMHHAIAPKTHRALARRNTXEDPVWDSRNRPRLSQRVGTPEGHSERATGDAIDRRAVAPSCRRRGSHKRYTEVGQKGPDTLHAGYETVSHKVTALVVLFANGPLWGFCFSATVRVLVFGTTVGAHRRCDFMGREKSANFLCREDPKKLRAQRLGSKGGNTPFCITGQWAFSVPPVWNSPFDTPGWNAFAHPQKRIGIRRTPVGVGARSNAVGKWRWANDEQKTSEISGTKTPPKVGLKSNNPGAVPNGGPWFRADGQPWTCGSLIQGTSHEQLRLLTRWESQLGP

SEQ ID NO: 994243 - protein, 173 aa, Homo sapiens
MGPMSPGTEAISLPERGSIGPQDEASGPGKPPDPCTFVGAPASPGSSPLCIYTDLSQNWKVSPTPHLERGSPHVQMGQDPDTRAGRDGHENTSKPDPPRTQRSPIRNLTVGLPPQTDSGSQAPEKMRSMASGSENQEKHTYRSGILPCTFNTASNAITLIWNYLGKGGRREGA

SEQ ID NO: 994244 - protein, 52 aa, Homo sapiens
MERRNETEDRKATDTTNNNHQNEKGADMRSKNNMKGRSSTANNAIARTKEHE

SEQ ID NO: 994245 - protein, 71 aa, Homo sapiens
THASGHHPPAPPPWKRNHGLRFLFQSILISQISCHPIDHPHDHSRLMLCNHQCRKLELLEKSTVCSSMCGG

SEQ ID NO: 994246 - protein, 95 aa, Homo sapiens
MRITRLTRRSTTIQRRGVSDQGRIESAKVAKHQQDFTQHDGNTTKDALHVADRAEFAEQKAHNYHKRSTEEIKTTVMRTRRKRDSQRMEDYPHQR

SEQ ID NO: 994247 - protein, 241 aa, Homo sapiens
EIVFGSVARAGVQGHDLGSLGPPPLPGSGNSLLCPSPPGIAWDLQALHNVHVHNLIFVYFIDKDRVFAMFVAKRGSSNSPVGPQGDSAHLTASPKQCWGFLGIKATRVPRAQRYSPIFFCGLVQVCKKALQQNMKYMVALTLKHVRDKTPHIFILPGVPHKSPVWEERLTTQVIIYTLVNVVGCAKTNLSKVILHLKCWPEGQTLCVSHKLHHKWVEKPLHEVGAKGILTKKKTKRTQTNF

SEQ ID NO: 994248 - protein, 137 aa, Homo sapiens
MVPRLECSGVISARYNLHLPAACLCLPKCRDCSLCPDATPIWEVEAPVHPSWTNHIVQGPSERTHRQAMGKPRRQGRSGGSRRTGPGPTDHRFSSQPDANTHSTPRRTINHGEENNRDQSRDKTPMTRQTEGDTQRN

SEQ ID NO: 994249 - protein, 137 aa, Homo sapiens
  misc_feature (133)..(133): Xaa can be any naturally occurring amino acid
DKELLLTNTEVLCPQHTCVWRSCGIDVIVQLTCFLLSIGYYTRIGAKKVHDTEIIMDRLGRYYFHNYSEIPTKYCASAWIHVAPTAQRRNPNVSSDNRCRSLPTRLFSLSHGASATLRASYFSHFASLVLFMXIVGT

SEQ ID NO: 994250 - protein, 134 aa, Homo sapiens
HEDSTNRRRLSELAALSYSPSTGRCSMTLSAQSMFLAMQGDTEVHLLHHCADEQQSSVANSASRATPQLRAHAAPSARCAPTIDPHARPLHELLLLSVTPSPAPFALAHRTPWLLYPLPQSPSAILPALPPQHN

SEQ ID NO: 994251 - protein, 302 aa, Homo sapiens
MYPALEGGRRGSIRILMQRTPPAWHNGRLTGHTMPFTTGDYCTPPYNQPALTHHCPDSLAPHHSPPTPTQPPIPPDPPPLPTLSTPPGIPSSHTTTMSPQLPHPPPPPLPHHSHSSHTRLSIHTHTTTPPRPPPPTPHTNHLTHKSIPYPQPLNNQHAYSSLLITPPHPLNPINTNMPPTLIPPKQPTSPPTHPTHSTPTPHHHANNNIYHHPHLSTHHLPRHYPTNNIHSHHSPTHHHTTATHTPYTTKHSTLPQLSSPIKLHHPHTPLTHPPLDLSTTSSPAPLYYHSPTPKHTPHTNNT

SEQ ID NO: 994252 - protein, 348 aa, Homo sapiens
ACCCLTVPARDCLLDPRAPSPDPDRPPGCHAIPGFYSSGHPWMATGGPASLAHAGCSCGRVVQLQAGWLTGQLFLEVIDCLHARLWGPDTGDTVNIRAGCILQVDHSYSESRTCAQQNYIFRLSWLTLVDTASKDGEMQQRIYIDGKDVTLIGPSWSLFDALLHMQRLGADHTGRSNTFALVTGHQLTPDLKQRRDGSVQAQAITFAPVCSTCNPREVPQPLILQRFGTRAAQPVHRLLSAPPWLAKQRDAACSMDASTKVLPHPYSNKTLLTNYIITHNNKFDNLLNKSHPSNTNYNFQQHNATYRIAYITPLNYALTQIISPTNHLTTTNSTDYYLLNHTHHTTTN

SEQ ID NO: 994253 - protein, 82 aa, Homo sapiens
SGTYMSKQSGGEGGIIINYVIFTRTHARCTAVRLIVLQSMAYLDSHAQQPWAANLMNSGVRLNADLSRSLSNMKHPLNHLLT

SEQ ID NO: 994254 - protein, 576 aa, Homo sapiens
  misc_feature (134)..(134): Xaa can be any naturally occurring amino acid
  misc_feature (384)..(384): Xaa can be any naturally occurring amino acid
MTTDYVSMYALDDSGRGDPREELLQYCRNGDSSGDNGWYRHRVGEVSQQAPGIRRMRENVATAGRRDSRTGIAERQRREYSAHTDDTAGLSKVYYSKCSDYVLAVMRRYSYFFFQSKRGPFQNWTLTGDTLFRXRVTPKGDRCNTCEEQVEVDPKDGFSNSLEPAEVTRHAYPRWCTAYGRRSFSNVLFYTASSLGLSRITRREHLNWFLGPYTLGAPIRSPRIPRIGTRTNSNISFGNAGPCPNVHMEGQRYTHVLHLPGGENRASFAKLTHSLTYIALAYSGRVEKRVAKGRTHLRSHFLAPQGAHQRHAMGQRARCSRDRFGELIALGSPINGLAWSTRLRILGPQNTHAFTLPKRYGTSWRTHLDHSSGHLVRWTRDTEXRDVRHEQRCFVCIRPSIPTRSSDMLTLELYPLTHPTTRATRARATQKYPFEHDTYPQRSNSDVNMNYTETLWKRHHRRGQASGRSQTTHMTSRTGPRNDTHAIHETHSQTRDASSATPAGKHAAGAGTNNHTQEGRQHSTQKNTEQQQLAESSNHTDTKTKRHTAEQLQRTEEDHSRGGTQMLVSSHNTRTA

SEQ ID NO: 994255 - protein, 118 aa, Homo sapiens
TRRSCSVAQTRVRWCDLSSLQPLPPGFKQFSCLSLPVYRMYRMKRSQVRTPIRRLIRNVNLDWEDSMALGCTTVIERGTLRRLKRATLNTFLDSPVHVLLVMPKLIPEHWEKWEDVKR

SEQ ID NO: 994256 - protein, 152 aa, Homo sapiens
MESAKKRPLTFFTAKCVDRLINSRPPPNRGPGSSFVSPLDGSDMGCILIGNLLGVPPHPGKTDFWANYSRKHPRRLYNVVPLEDFNGVDHLNALEQKDESFSGPETSVYVGVAQMIFTVGQFGPHAQGKASLAPLLGQTTLSLNLQGKDLLC

SEQ ID NO: 994257 - protein, 164 aa, Homo sapiens
  misc_feature (106)..(106): Xaa can be any naturally occurring amino acid
MSYPHRRGGPPPTKMRRKPLTTFKTKGPSTPHEAAVAAYTTNHAARRSISAIHNNGDNHVGKNTPLDRTKDTAPPYQPDEEEEHAQHKVARAKHHPPLDDRRTDTXALQRGEHISPTAVNEASETKRGGIYHHTRDDIMSFSDAGRRKNVSPPHRNYKHENKIL

SEQ ID NO: 994258 - protein, 250 aa, Homo sapiens
MCGYTVCGYPKTKQQHTDTHTHTHNTHNTTNTTKQQEREGAARAPSRHTSLCASGARAPRPHERAPRPPSLVKHTRARALTQVRGRATAQTNNKTALLAERRARAPDQARPHTRPRAQPGVHNNTTGRTTRGATSLRASPRAPPLHHINIAAGGAVTPPPPTRTQPHSPPPPAPFYNKRHLRRQHKQSLSTKLSYKRLCPTTRGAYSPPPKPHDTPSPTPPLNHKQHSSPPHTDTSTARPPQTNDPNYQP

SEQ ID NO: 994259 - protein, 252 aa, Homo sapiens
TPQGQEGGQNGPGEEWRVTSMPRSDMYARKGYCTKRTVLAAQLRSNGRNRYHTIRRRVLDNRDYRNAVVLRDTRSGAYPGDELNIIAQNCRSNISPYVHRLIAVGKTCLQDHRDAKEPRIRLRHGDREHVSGRPKTLTHTRQRGDRSPVGETEEADNANSRPAAGEADRRAEERKHRGEGKDVGAIKHEEESTITAYRRGPRVDVYSYSLATLPSIPTRGLIPSRNRQPENNQPAHKGQTVGKAPSRAQRIT

SEQ ID NO: 994260 - protein, 384 aa, Homo sapiens
IYLKHSKNKKIGTLVEIQWHKVHCHKLAGTLYSKKATKSTEHHNRTKQNSPVPQHCLHINFTCPNRPFTNIHGQYNCSTIHNTSISSHSTSHNCYSTSQHTHRVIFTHATHNTNTTTGTWHKPYNHPPSTPSAGSPRPEALSLPIFPPTTLNPTIHVHGQDSRSHHIPSRRHPLRIPPPYTWTPDAHFPLPPKKSEHIAQAATCATHIPQFNCGKTHPVLDRAIAQGSVHHSPHVIFNASSINPFLVVPTERPAHSQQQGMQNNPTRAPSVSSPHKGTIHPHKGDNRDTYPAPHPTIHTCPLYSPLLTTHSLNPYSQRGYSYPTTLLAPPPNEFLHPLQRLYKHTPKLTPPPIYSLHTTLSSTPTATSLLNHQFTTSHTLTHAP

SEQ ID NO: 994261 - protein, 371 aa, Homo sapiens
QSFWMSYGKEPLYRATDPRREGAEGSRHGVQGRDSGLQLKECPRLRIFIALQMCSQLLVCLPCLHLLLILLSSHTGCHMESLYNVLHEGTNIRRGPEPGCRSYAIRTHGQGDIGPSYTHSQPLIPLTCSPIAVAVNDVMTDMTARISMADAHVLFPMSWVACMHPCLRKTPERICTTRRLHHTNQTLQQTMWQVLQAASVRKLVTRSSEQHLALTLSNHSSIGNCTAGIMNMAIPALTTHTRSLPHVRTRSMHSSGLSTTLPTYNTPPPYTLYFYHNLITHFSHKLDSTPMSTLTIFLNCPAIFPSTPTLFYSPTPPLHPPSPSLPPHDPSPTHPHPPHPAYRPIIYPPPTPSPPTTHRTPTPQPTTTSPH

SEQ ID NO: 994262 - protein, 379 aa, Homo sapiens
MQALLARRGLLQSCGCELRRRATIMPGALTVTGFGCVVTNRFDQLFELTNRDPFEVLNGSREQEQKKPAVGAALLVALGANERTLSAAAQTHTPTAAGNTAAQGSPMKDLQTNPLPAHALAWLHTDKRSTAAALWRLNNSKAYSTSLARKTCSTTSVVACATHSFDYDRPRNKGDHTFVHLTRSLNHALTLHTETTLRLNAQRSNSSRLHLSSALLCAEPTLDRSVSCHSLRQHVSGVSGPALTDDTLGPLRRSATIAFIQRHTPSPLARAYHVTPDMKSYIYHDSPLRPYTPRYLSDALVSAEEPLSSWWRPFLNAGLTLICLATTSEHSHTRRTTCETSDHAYLLPHPSQYAAHIHRDVRATAQPPAPPVGPRAGVR

SEQ ID NO: 994263 - protein, 138 aa, Homo sapiens
MLCHISRNLLEGERGGARAGRRRVRRHCKEETHREEKQAARRAHGRRRGEKSGHKAIKTNGERTPPATQRACPAPLTHDVVGNSQRGRGAWKTTEGTRKMHTQTTNEHNKRKRTREDTQQPNAAKKNNSRKKQQRRRQ

SEQ ID NO: 994264 - protein, 127 aa, Homo sapiens
IIISSAPVCLRQRDLKSLIAYSSISHIALVDIQPFSSRTPMYSFYRTTDHVSIESAHRYFTIAQLSILALWQNSRASERTSQSHHNPRLKDFKLYSQLSSFLMTSSKPRLTSTLPPTINLLVQNSLC

SEQ ID NO: 994265 - protein, 102 aa, Homo sapiens
MPPGGHRPLWDRRAPIWKELYIKTEARARRVITKPACSEEKQALLAGNLLGKRATLQSVGGGTTHVGTNTTSTRYGTPPTEEHNTTVTTVIWCANTPPTQFD

SEQ ID NO: 994266 - protein, 110 aa, Homo sapiens
MLRRDFNFAVGRRFDEPSVRKVASFTTSQRTGPETVERSKRFEGSRQEITGRTQNHASVKEFLSFIQKITQHTHYNITITGVQCARSWPITKLNVNSKYEARFEKHAYTT

SEQ ID NO: 994267 - protein, 104 aa, Homo sapiens
MSLRDRGSVLELAGAVVSAMPKAKGKTLEAEVGYSVNAKASVNRNARRKVAPWIECSHIRHAWDHAKSGTGENRGRRWGWMWRPEQGGAHIRYRAKVKAHGGGR

SEQ ID NO: 994268 - protein, 431 aa, Homo sapiens
MMKMVFLKNLPSKNPHVSKGSRETPPRLCASHGHVCSYAIILQRMDTSSGLKLGHKHGTTRTQRLHTHKHCTRMQHSTKPRAHTLHNCAQTAPTPLNHSSAHTSLLPPKHSRLDAPTTRHTHTLQAPATADTQTFHHTIRTRHTVAHAKHRLKHDTTLAPHLRTGPNATRTRTPHQLNHTPAAHSSQLHMHLPAPHQACHATLRNTHNHHTTMYRDRTPTPQHPHARHHRLTHPHDPATTSSAPHTAPCSPHPPQAAAPHTATNPTTPPTHMRPPGPPRQRDTPTPGKNATSPPHSKLPPPHNARHNHHQGTASPTTAAAHHTHPPPPTHPHQPPPPLHRTRHRAPQTDPNLTNARLFKPWINNPHPIDASTHPTGRPPIHTPNTPSGRQHAHSHLSTVLSRRCLHHKATNHADRSTKQVEHTNHAPSHDT

SEQ ID NO: 994269 - protein, 319 aa, Homo sapiens
PLAVTRHEAGCGCFAEPPWPARCPGLRACGFSRQLQLSDSGSSPASELRRIRARWTSTRSILAVPDLHEAVPGLRISELLVNKTSFMYLRQELPVRLANIMTELSLLPDESSQDTIRSNWYKAGLSRVFRSFLILRTKSAEAATRYSMTFTRYCDTDQKPTPLHVIPTMAQGVIDYQESSWGADPVTSPQCPTYFSCDRFYMSRISIYECYSIPDTPSMARVRTTAPQGSFHTSIAHTPLSRHNSQTDIVLARYTPTASRTTVHPPLPGHRNSSLHSSRNIDLASSIKRTIPPERAHYHSRLPSPNAPSRNMRLHTSTQ

SEQ ID NO: 994270 - protein, 345 aa, Homo sapiens
KTCSIWWCALCTVTLNPQGLDFVQYKLAEQICETRPRTQWPLTMNAAFPIAACGIRASGSSTPEWRDLILCSSTLTSVLTLLPFYPTFHGRDTGFGRLSAGCYGYPSTRHSQTCEQPHDNFTNNACQRHDPSLRCYHPAPVDTMETDQEIHRYMASHHGMALRLAQILKHGSTVSRMLTSHPYLLMHITLEVVMRTCPTLNQLPTPSASRNHCLTFLTPNEDYSTPQSPPSHTASRDRLRLLHTPSTPVLRHHVRTPLNTPYAPTGQTSLLYLMPASCESAHPIHPTNHKKWTAKHEPVTYQGHLHQHTLDITQQHLPSSALPETMARYVPLHAYKQRNRVKPLA

SEQ ID NO: 994271 - protein, 212 aa, Homo sapiens
MQPFPVNQRLKFVKLGGIPIVCKQNQPIPNPEVLQAGNAFKCTKKPECECRNIQSRYTIYISQVCEDVFSVFLLNSAVQLAGLTLLTNMTVTNDHQQHASPVTFTDLFQVLLTGHMETRKVQVLKTAFELWSEYPAHEPEGNLLRCPKWISSIPFYPFIAQATIGHTGTHLYFADTSRLYTRSNSRTALTNTKGHLSLVQALPIPLERYTGS

SEQ ID NO: 994272 - protein, 250 aa, Homo sapiens
LGEGVTIQLLVWRHEKALAYALPGPILCEVMEGQVLAFTWVSLGQPGEGHRCEATPPSPTQHGNTRTGDGNQAKGSTGTSDEQTTTQKTKTTTQKQRRGERTHTETHTTTQQNPPTKHTATALDITYAITTTTQEMKNTDTGTTRDPELVKRQRREEEHGAAGESSRPRRKREQNTDSVQTPTAPETTSDTKQKRTQEGADAPPHNTTKDRDPRHEQTREHKQQTHHAHQTTQIPHNNSHPPEAATQAKQ

SEQ ID NO: 994273 - protein, 228 aa, Homo sapiens
ASSYSLLQPLSLSLNHFLLSTLQSLPSLNFNSFHFLGETKETRFIHGPKTPAPVTDWEGSLPLVFNHCRDASLIIYPHFKGVRPRRDTCLGPSLLAASPAFLGKGQVPQPLLSLSLPLLWFPGAGASTPTPSPSPLATSSAFLGQGQVPLNPFSFTLAAKSRFPRGQEPPQIAYFRTPTSYLCAPIPYFRTMTLISVPQSLISVPKPFSAFLEGKDPLPRSPCLYSCW

SEQ ID NO: 994274 - protein, 299 aa, Homo sapiens
NFNSFHFPVETKETCFIRGPKTPAPVTDWESSLPWCLIMQGCLSDYSPTFQRYQTTQGRLPWSFTLSGKSHFSGEGASTPTPSLLVSTPSLLFWGRGKYPNPFSPCLYPFSAFLGKGQVLQPLLSLSLPLLCFSGEGASTPSPFSPCLYPFSAFLGEGQVPLKPFFLNLSGKSRFPGAGSSTPQPFSFTFSGKSAFLGEEQGTPQKPFSFHPLVNKVLALLGGKKPPIPLFSNTKLLSSDALIHYVPGAPKPHSQAFKEGIETAGAHDYKCIGPIIRDANHQRQLPHSKFSLYLSTVYN

SEQ ID NO: 994275 - protein, 260 aa, Homo sapiens
ISGSMTILFLQLSKLACNVSRVGSRTGDERRIGWMADSEMNGDVGQRSTASETHFDGMKLTRSDGYEMKALPREQSEGEMTKNVDKQGEKDEDNKEGEIKRTTTIKRRRTKENRQKRHTKKCNIRAERKNAKRVRQKTEIDVHTNGARHGSRLTPTSPQLTNQVPGKRRTRSNQPEETMSQQINAQDRKKTPRTKKHKKTGTQGILGHRTHGRDPHTEHNTEGPKYERNKTSKEKEKTSKEWQKQETTKNQQRNEKRRKN

SEQ ID NO: 994276 - protein, 147 aa, Homo sapiens
MACAPSAVNQAAPHQQNRIWEREPAPLLSAQYETLSDSDDWTAQSEGNRCREGSLVFGGFFLVAVQKLRLLCTYSLETFQGETGPQDDEEMYGQFTLAQSQWRKKTNKKNVLWIHGPFTWTHYYRWEGLEHVEDFSKVDRLPVLTFC

SEQ ID NO: 994277 - protein, 109 aa, Homo sapiens
MAFLMLTERKILGYIQLRKGPNVVGPYGLLQPFADAIKLFTKEPLKPAIYHHLYITARLESHIVFYMKPPSHTNPWSKLKLGSYLFYGTLELEFTQSSDQGERSNSNTP

SEQ ID NO: 994278 - protein, 112 aa, Homo sapiens
HVIMYLYYGLSAFGPVAQPYLWWKKHMTAIQLIQIVLVSLHISQYYFMSSCNYQYPVIYSPHLDVWHIFFMLFSNFWLLTLYTKGKRLARALQAKWNSRLLAQSRQLEKPLP

SEQ ID NO: 994279 - protein, 102 aa, Homo sapiens
KTIDDLEDKLKCTKEEHLCTQRMLDQTLLDLNEMENAPVPPCCCSPSDQTSAEGSWGKVNFNWRVGIFNWKGGFFFNNPFFPGVLFRQTGLLCFLPGKSNWA

SEQ ID NO: 994280 - protein, 149 aa, Homo sapiens
MEIMDSKRKPKSNAEKGVQAVFSLPQLKSRRRAWATWVPHRPPALLPPPTATLGSPGAAKEFALITERGEPPKFRATLGRSLSVFWKAMGPKEPGQLAARERPGWGLGLPPVRNLQGGLFSVFQKEETREVRGESLAWKALLLASPARK

SEQ ID NO: 994281 - protein, 67 aa, Homo sapiens
LIWMYGTIFFMLGSNFWYHSYTKGKRLPLHFSKMELQVLQGQATESMANEAPTNAQMDLGGQSVPLN

SEQ ID NO: 994282 - protein, 289 aa, Homo sapiens
MPDPGPASLDGEGATSPLLELAMGVWEGLVLRPRTMQNRQDFTEQVPCPSGPWGLLRPEKGHWRPGRKCRVISVLDLRLLQGEKLPNGGPGGGSQLCCLTVESPSRILLNQLLKGLVLPADFSETFLKHAYGDEATVEFRRSVRLNGQITDPYTHKGAGAIPLKEEGDWQNLNRLLAHLSPERSISSVLQGRSRDDEPSEGLRLKGAATLWRSTIQKTWCQCQQLGTVKMLEGTRDDAADRLEISIAAYKRKQRQETNKAEGGDTRTSVGTKQQKLKRSDKTRQRAKHP

SEQ ID NO: 994283 - protein, 406 aa, Homo sapiens
MRAVNNNTEEAIYFEEERENSSITSHASEEQTHKRRGQQNQKSTKTDKHLKESTYTEEQNNLTKETSKQKEGIYSCGVITKNKQQQNKKNKKKSTKTEHKRQNPEHKYNNKYDRKQPCNITEAGRPTSTTINTATRRKHSREQRRSTQGTHEENNKQRRGRTQPTDTTEHTTRRLRRKRRRKERRETAEREKKERKRQKKREKNKRRLETEKEMRKRHGKDNKNRKEKRTDEAKKNKKAGERAAKEEDTRSKNTGRRAEIERGKKKDGRGGRADVNEEDKRALERREKGYTESERDTEDDKRKEAKKEKRRKADLRRDADTYQRYRRRRERNEERTVTARRRRERDSRRRRGGTPRTRESEEDRKGERKGEEKRKRESGKKRGGVTRETETRKEEKRSRELSRGRM

SEQ ID NO: 994284 - protein, 94 aa, Homo sapiens
MNTPPYQQYTATSQQQGTHEETPSCSNYEYTQCTHHRDTKTCEPVHERSKRYYTKTQRIMHRAEHLLSKQHLRHLTPNIMNTKSQTNHNSKYLS

SEQ ID NO: 994285 - protein, 235 aa, Homo sapiens
MLDKGDRGVRPVVSYSRGLSWKSTQIVPSRLAKPPLDEAEREEDGRLLRKPGCEHTGHRSLAVPSAAAVAAHPVWFETSITEIWQQWEAAQSQQGQEPDCVGQSHRAAPSKLKPEDAFVDFCIIAWTRLTKDTYRVRFLYREQQLGCGRQHLILRQIVDDLESPDEPIAHQPWHGRRILEVLLVLADGLVSRGEPGAGKEYRRDIELLYKQKDGSIEWEAEPGPGRPDEGLNVEL

SEQ ID NO: 994286 - protein, 155 aa, Homo sapiens
MTDPDTQPVVNGYTPRPEGHEAYNCWLETIRWAPGPYSNSMYGYQEQAMSPGDSGATPSRREGAETSKGQGTRHSEYRQPRRDEWNVCQTGGQQTVDLRPPEEGGREHRKRITEERRRRAAHKKKHESTNKRQQRPVHSRRREGNNERKGKAPER

SEQ ID NO: 994287 - protein, 147 aa, Homo sapiens
DAWAKKKGHPGREQKKHHHHHHQQMQQAPAPVPHAAGEPAGNNDGTEETQNNSIKRDKNKKKTNTNKDTTYKIEQNLQCESTLKPPSAITTSDQQANIEANIYKTYVQESETEYDTTKETDSEDRATDHLTNANIFIIDVERERERA

SEQ ID NO: 994288 - protein, 163 aa, Homo sapiens
MCAVKVFKAGSCLPLTFFPPDKLIEVATISVISHRIVLYHYACCDYNSIIVACLDHLIYIKTRTYYILNLLSSTLDKNERRPRNNGTNPARGRPKPPKQKALTDPKQHLLANQPRPTAPTHRTPRSTHTTTARPHTTLPRPYPKPPLNNSQDTPLARTNSSRL

SEQ ID NO: 994289 - protein, 312 aa, Homo sapiens
MKKETQSTELRNKPTVNFSPESDRIDEMEFEIKLLREACKASRLVSAKLTQINREGSPDTNRIHSLEEQVAQLQGECLGYQCRVEEAFTFLVDLNRYCQTKLKSSNTNCRTWFNMIQEVRKAVLTSFRGIGGTASLEEGPQHLTVLQLKRELKKCQCVLAADEVLFNQKELEVTRTDRTPSARLMAHGTPNGHAVSRQNGANTRDLDRNMTTLTKQPTLAAHMTEELPHLTATAPTAPNPRQWPIHRPESRPTRTPTPMAHKITHDTDSARPPTRQHHERQAHTNNQHRTQRQRTQHPQPQHAHHNTQQQTH

SEQ ID NO: 994290 - protein, 85 aa, Homo sapiens
RSWNLYGHNGTQKATRICRRLAVQQCVTIRVWSCAAHVVVRDTTGMSSQVNSFRALPTSRDTELHAGPAARKQRDPRQARADSMR

SEQ ID NO: 994291 - protein, 98 aa, Homo sapiens
VHELAICDWRSRLQLLGLSLASQWRQDEASGSLRCYDHLHSDQQLTRGQGVQLIIMRATIIDDHMLLSQLMISHQVRLISSALSQSSVSQLITCVIIV

SEQ ID NO: 994292 - protein, 95 aa, Homo sapiens
LSNTDVPVSRVVDDNITICETAEAGGMPLDSSIDIELVLHELNTSRTVALTRLRSSRISSTYSHSTSSTRLTRLIVNYLTRLDKLVLVARLVDTY

SEQ ID NO: 994293 - protein, 63 aa, Homo sapiens
WRDYEELGQPIARAVIASEDAGFVEHSGVEWDAIEKAWERNQRAEAVAERRNEQLERRQQQAL

SEQ ID NO: 994294 - protein, 209 aa, Homo sapiens
IYSRLHITIVSRARCCISTSRWCSRYVKVRYVQRLKSYVIQSSDRSNTASVSIYCKFLPVRKDKRNKATSQSAVRPVNDIISTKHYTHTHPRTGYVKMAEPGKSHKNLIKIKDKQNAPQEKITNNEGRRSITSNSPTAAPYSYQATTDGYVNKTPGPKNETPQIPQPQGTTAYNNERYKENTSTTYYLSTHPHLGEPHGDPPQKLLRAP

SEQ ID NO: 994295 - protein, 179 aa, Homo sapiens
MQSHAGTTITNIHTNKRANHSHSRTPQHHDATKQNERIYQTLDVLQKTHTQATTLTLITSTNHHIHYDTHLTRERTTPTLSRTPSPREDRTHILPAPHASPPRTHPEDDRNTETQATHGQLNIEYEPSYAGATRRTAKTVEETTLTRKHRENSATYNTPNNHDGTHSDITTKSTKAHRT

SEQ ID NO: 994296 - protein, 255 aa, Homo sapiens
MALWGGLGLSCREGMSRRAPGSRLSSGGTNYFAELGMTGNPELIVHQLTQVIKNILHPEIEVPLPLTDCNLKIQLLVTRQRHDDTRVHADIQNDEKGGYSVKEDLGKILMVGSRETRDEGKNVTSLSSTVFSMESCLNTKERRNQGEIEVYVMSLEDKIYLPRHHPGTEKQLEDGQAKPVTECNQTTEKKGPKQHGTTAAHLRLTNKTAKTTNKEAQEHRTRTTANTRINDHEKNKQIANPGQHTSAHRHYGNTT

SEQ ID NO: 994297 - protein, 168 aa, Homo sapiens
MQRFLQCPDASQLHDTWYVLSGHPSGPVESPHQMRRNVGVVELHNSHNGPSVSPTASDIAAHEDGTRDAWSAFVQRRYGTAVRCGAHNKELRAPCAQNLFAITDEGMDVPLGLWMRSGLPTSVSTTTLSAANCKPRPDVRHYTQVVWAKTERIGCGSHFCEKLQGVRR

SEQ ID NO: 994298 - protein, 121 aa, Homo sapiens
ILISQNQRYSRERESMNRLESLEESGGCSCVDNRLQPSQVALLFQAPVEDDHIPGISVVQGNVTVGYHSRGVAASGPCSEDPCTGTVMLENYSPPLSQVGYGIPKTRSDSQVGERRGASGY

SEQ ID NO: 994299 - protein, 311 aa, Homo sapiens
SPCDDKPVEKFCSTNIAIAILIKHTECFSNAKDGDGTITAKDVECKESIGMKKKIRRPAGTYTPTAKGRTAHTPRNTAQRSARTQHRHTQPPNTTTQTPPPGDRTPHTTNRAHKHHPPPHNTQTHTHNQDGAATANAHAPPRHPQHQPRDAHDERADTHPSDEPQGSPSRGARPNRQTRHPPETRSDETTQPRPATTDTARHDRTRARRHTGTPKTPDYRKDRGTNDRPPTDAEAAPTAAPTTKRHTRGQHDRDNNSNDGDANNGRDTPPGHTNPPPHPPPRAQTTQRRARAPDTKTAQKNEQNARTHAHD

SEQ ID NO: 994300 - protein, 145 aa, Homo sapiens
SPTMCSLMGRGFFRFLIKHLIDAVRNCLNLPCKVVNTISMFFRCFQIFFQKNSVKYFNKRKAMWNFRLACLNCSRHPHNPAILFWLSISHSIFSVFCPFDISLWLYCSQSRLLCGYTYAQNCFLIHSMSIFSKSICGGKLKLLWY

SEQ ID NO: 994301 - protein, 80 aa, Homo sapiens
LDYEKENEMMKSHVVDQAINNAINYLGEKTLNPYTTTDRRNREKTENHDKERHIIVQHNTDTQRKQEDTKIKQEKPSDVF

SEQ ID NO: 994302 - protein, 438 aa, Homo sapiens
PYGRDSSTRWKSIWTTGGSFRGLQGSRHTPPYPGPHPAGPPDHTACQQHHMFVAPPPKTQRASSLRGTTESTLKDSVRSPTALASGIRHWPLEDATSICRTTRRAAIPSHWLKSTRGPNQHGRCPLDAFEICCSGTTSTFDKQYNLEQCLHHIHSRLSFSILASHSSSAGSVAHNSLTALDGTAGTNKERINNTYASTPVQSHKAHILKILPGNTLSLIQEPTLPTIAFSFHTPRLAPFNQNHTTTEILRGIFMLAHARYYQTTGSTNVGNKKHNTHNQTNANKPANKARRKTNEKPKTKPHTPGQTTQRHIATHPSNQRRYRKQPTTIHTPTTPTTQTKHTTPHTKLQRETKKTEHTRARTSDRTEGRHTEKQTTGQADHPGITTPDQTPPEARTKTARTEGRHSTPKQPHRQMRKINEHGKINHQNEQHAHLPTDA

SEQ ID NO: 994303 - protein, 536 aa, Homo sapiens
MCSHDNTSRLHEATGESILCTSDIPKNSIGEHNKNAGTPTMPCDNILSKLLLTSTYLLVSSTRGSYTITDLLHEHGSCATYHMRGYQGGGPPIHHEYIRDRITHQYNTATDRITAAPYNTVIYICTKSTYMSDDTFTQNTREQNSTIYEESIPTDTSRFSTPSRHNQSQTDSITITYHSIIKRTQSRSPTEPLRKNNIHTQTAISLPRRNHSKRHKEHTTTINNYAATTSTNTGRNTRHWDTLSIKAEQDTDTTYSHSQRHNEKTATKQADTSTKYYIDSHKLNRHVKKSVIYTVGDRNKEQTKRIINNHRNGRPKKRDNTKSEDRKQYSTVVTQQEADKNYHQTTQREEMNTRENSSGQTRDTAQHHTETRETNENDRIKQQQEEKGEQQTRHTHRERNEKETNEQNKANGRQRENQRSRRTQTRQPETELGTDKRRRPQEGNKEDRRARQDTNGRTTEEEQRTRIERRTAKRTVNEQRTNSDGTSTTTQSAYRKHAAVKRRLRKGTDHGTKTHQDRERVNKENRREEKQKMKRT

SEQ ID NO: 994304 - protein, 402 aa, Homo sapiens
CFGPTAEAAQLESSKRFAKEFMDRHGIPTAQWKAFTKPEEACRLHFECRLPCLWYVKASGLAAGKGVIVAKSKRRGLHRLYKSIMHGAKPYGAAGRHQLSIDRTSLTAHSRVSLSVFHLDGKTVAPMPQNRTITRLLAGQMVALTTEGKWRALIVTATYTDFYMHLLNYNITSIHDPISTDTVRIGSCQPQAGYIAIITAIITSYCLRNTLLDTQSTHWTPNNASSTVHTFGPCIGLKSSNLPEGEYHPTSFLNKVDSSAELFDIQHASPSTTRHLESVPKSSMAELGIRTKRHTGTKHRSYLGPTRKKSDINTMCEQTKSPKGALSQHSNHRHAPVRRPHNPLQRRVNNAPTAPGTNDRTHMDGTDNTQKRSDNNTMERRQQTTRQHSSTTGDGQATTKNT

SEQ ID NO: 994305 - protein, 526 aa, Homo sapiens
LLSPRTPPSMEQRRVTDFFARRRPGTYRKIASGPKTGRMETRRPVSEHNKTDSTIREQVAATNSVEIPRTARGTQRRSIHKKKGRPKKHRQKTKKKTNHKQQTTKKKKQTNTKHNTQTNTQQTTKRRRNQNTRNQRRRRTMNEREEQTQQRTAKTRDKEKTEEETEQNKKNKTQAKEKPTRQERREKRRRRAQRRTHRAEENTKDRPKGPQTTESHTATARTQTQDTGKASGDRNATPRQRNDKTNQRKATATSETRDERRHKTTAEGHDDDETTEDNNRRKKPPQQPRSGERQARSSDKERRQHKNRNKRDTRTERAAKKREHNSTTHQQTKRDAKQDEKKKTKKKKKQHAPTHKDDDTRRGRHCTKTTDHHHSSHKQHMRGQATTRHHNKEQKDKNNAPKAATEKRNTERRTQTERDQRRHGEETEAEERKDRKQQGRHRTQHTQTKQTEPTQPHRSTTQRTEETGKEPETRDNRQHASQNTNNKKHTTRKRTENKAKTTRDRKNNKQRKKHTHNRQKKERERR

SEQ ID NO: 994306 - protein, 297 aa, Homo sapiens
MIELSYQQRSHVTHEESTSVCRALAQSRRQEENRARDRYIRGRQVQWPRFMSPGDKGLVNRQRERLGLHEESGQTVCHGDRVTPTIMSLAELTNTSGRSVTTRPLRTDEENILRAGLLDDVQEEQNDLRNNAASGVGSLNMGPFGKDRFTSDLQDTWQKAQENPQAIDNHPRAYQMWKGPATERQHGTPKAWRPQTGPEKARDGLTEPLDPHDEQRDNTLPRPGAQREAGTKPRYRHQTCLPTTNTRGLRTPAEHQKIDRTEANQEKKDNRRTNPQADYRRKEHQQRGGTKQRDENK

SEQ ID NO: 994307 - protein, 162 aa, Homo sapiens
MANGLQGERNRQVKAYLPTRTNNLGHPTNVPGQTAEQHTMAYQMNGHAYQRQTMMGAPPGHQNTTRHQGNHRKRRKRHTDNSDTEEKSTQKEDREQKTGDRKQDRITNNAAPSSKTQRRTRSRNTANEEPQENKRDAEREPREKTTKKTNTEAMTEDTTPDK

SEQ ID NO: 994308 - protein, 251 aa, Homo sapiens
NKIGTRSKRNSSRESCEGKVTFTYAFRHCPVPFGRSALACVEVVRFLSVRGVKHDLPPARALSVSNELKNTPADAGRQLKQDLAYLCAPNRHLAEHSPYYEAMTEVKDTEVLFCFEQFDELTLCTFVEFDKKKLISVETDIVVDHYKEEKVLRTGTQHASAYHEKETEELMAWMRNVLGSPCTKRRRLTLRLDTHPEHGHRAGDGGCRHFLRMQKYDKNQEELARSEDHAGDKARKRLIKKLNQLRQANLT

SEQ ID NO: 994309 - protein, 114 aa, Homo sapiens
RCLRITWRGHSRDSPCFLPCAGRVTSADLVQCPLTWLLAAPCSWDLRAQGPLTLHLGREHKALKSFLFFFYFFGNTVSPLFAQAVELQLGTIFGFTCNLPPPGFQAVLHTFRPP

SEQ ID NO: 994310 - protein, 109 aa, Homo sapiens
PVILTGWNFLILVVLFISRDPVLLGFPAGRECAYLHFPEVLVVRYPDSQISSSLPCCASLRLSFREECDAAIHLQSLCTSKQTNRDPNTPQQAYVRELAPMLAQPDEFR

SEQ ID NO: 994311 - protein, 171 aa, Homo sapiens
MFLCARWSTTREFFSVVYNHKTRGGPPQNEWAQPRALYIIHPPQGPRAVGRPAAVIFNHQRSAATRSRWGGGHNTPGVGLPCVGTSTHLLSGRRDRRGPPPHHHPRAGGGGGADTHTHAGRATPPTSLPRPARHIQTRRRLPAGAEHTHPTIWPRGGTNSGGQTPPRGHNH

SEQ ID NO: 994312 - protein, 121 aa, Homo sapiens
  misc_feature (50)..(50): Xaa can be any naturally occurring amino acid
MGGVCAHRERGREPPLSLFLLERHRLCITSSVTNTPPLYCVGEVSLYRDXGNPPARAQAGVGVFPSPRGGLLCKRSVLCAPRQYRGYLLSATGGRPPRSTGPRPLPLARHNTLLRPHPGQM

SEQ ID NO: 994313 - protein, 91 aa, Homo sapiens
  misc_feature (72)..(72): Xaa can be any naturally occurring amino acid
LLSTATPTFSFVLVCQLQKNFQIRILSEGPEYNEYWGKQDRQETSRMHTARHYYRTHARYTDKSVETATTAXESKLEREKKQRTQDTPDMT

SEQ ID NO: 994314 - protein, 189 aa, Homo sapiens
MATPSADFEALMNGVTSWDVPEDAVPCELLLIWRGFISCDGEVTWARSSFAASSYGRGRTGGRSPNDGLHWWNAHAHATFLLKQQMRGWLMRLPHVGSQLVYTQSPWHLLAKILEVLWSGCTRLSHEGEQTPLGVYCTWMPYNETMTRNQLVNVHEHGRGWLLSRRTKPGIGPTKGAGCKGSVTRTLRN

SEQ ID NO: 994315 - protein, 184 aa, Homo sapiens
MWNLQDLQRIECGALPFRNCWWAIQARNVEGLSCAQFGGSCASCGSQGRSPVSVDFSRGKDIRLGHVFRCLQPYRQPPIHVGQAAHSVGAVRPYWPVAPTAGGFISSIPWPRGCRVCNLCKQLCVSDSYNSHISEPLSVAVTLCVPWHIVQGAISGRPYMLEARCGDHAGGQFLGGPFAGEKKG

SEQ ID NO: 994316 - protein, 186 aa, Homo sapiens
MPSEGRCWETLKALRSSDKGRLCYYRDWLLRREAGCGDFMPIIPTLCEAEAGRVLEASSSWEPGLVSHTCNPSTLDVLEESSPATPNGTKGKDESQHTESMVLQSSRGIKVEGCVRMYELVHRMTRNRGPEAMAGGAGEEGASPLGRWHLTQLNAVDEWTEPESSIKEFPGLAGSTWTNSSREAWD

SEQ ID NO: 994317 - protein, 218 aa, Homo sapiens
MTGGTHCANIPVKAPTLKKPNIYFPDKGGNGEEGPREHTGNRALWTPKRHPNTVVSLKGQSTAKNKIVKGPPERPHKKVSHKGGVYNAWQKQTLNNPGATKQAALESATQTLARRSDDKNKPQRGDAHRKNPVKESMQEGERATTKTAGTAPTHPNNTHKTESRTGDRTKGEITRGTAADHNLASLASQHTTASKTETSKLTHATRQRRQNQLAGMTT

SEQ ID NO: 994318 - protein, 67 aa, Homo sapiens
ERLEDEPAGCFLNEEEGCCTMAVFDTPEEAFGVLRPVCVQLTKTQTVENVEHLPDTTYKTVDDTCPF

SEQ ID NO: 994319 - protein, 113 aa, Homo sapiens
MEKELGLVEELRTKPSQEHRQNSKKLYCKNLIKVIEASDVVLEVLDAMRSSLVAGCPQVEEAIVQSGEKKVVLILNKSDLVPKENGEVGKLCEERIGKEVFKKVKKSKDKGKI

SEQ ID NO: 994320 - protein, 218 aa, Homo sapiens
ELPDPEQLMIGKRMAAPKAVPWCHSQRKMRKPWKTNPSLRNSIQVDEEKYGGNYAEMKDRKKRKGSKNDILRADGEDTRRKGTTTLHEETDHQVTTYHACSRLEKTARQEHKHDAPHNKTPANRNGKTARRHPQKMPVNDGDNKHPDATTTASHNAQRQQTKDTAELPKMQPQSGDATTKHLDHAANKKTRNHKRQAEKTATEQKRKSKEKHTTRQKS

SEQ ID NO: 994321 - protein, 108 aa, Homo sapiens
RILKSGGLEGLLIADQYSGAQVRVLSAPSNFHYGQIKRTPCNLLRRIFLGGNGPMQLQRGDLSGFVVCCERRDSTVCRTMLANEELRGKYVREVDVRPEWCNGVTRSG

SEQ ID NO: 994322 - protein, 124 aa, Homo sapiens
  misc_feature (113)..(113): Xaa can be any naturally occurring amino acid
MILALTVLTPAVHATKSVADSARRCTSRLAHTNRSSYHSAEVTAFAVIQAVSMRDMVIAPKALGMQQRRIEQSKAHFMKRCRTMLSRLMDQCRDVVRSVLIYPKGRLVDASEXCGLSGQGLPVG

SEQ ID NO: 994323 - protein, 45 aa, Homo sapiens
MIPNKSDVEQLVDDEKRARDERHCSTTATNALPTPTPPDTLMNTP

SEQ ID NO: 994324 - protein, 463 aa, Homo sapiens
DAWVFFRGRSFAVVAQAGVQWLNLHSLQPPPPGFRLFPCLSLPSSWDYRHVPPCKVGFVLFFFFYNFGDGVFARVAQAWSVGGETLGSRGVLSLRGIHTTSSASASVRIAWDLQRAVHTHRRGYIWVCVLCVCAAVYVVMWSAYLFYFFPNKKERGFHPRLTPERATHDSPRTTPAEHHPLQEAPHHKRSAAITRAREPTRGPRARGRRLTHETRLGRQPTQATASKKTQHQQRTKQRGKQPHKRTNHPAAHTHSHGRRATPREAIETHRRDYSDKWATPETLVETTNHSHAPLFYLACGRKQKTRNIRRNETNTTPRPPPYPPPPAPAQPTNAYSIINYPTLTYPTPHPPSPTHTIITHNTNSTTPPPSHHHHISRRQVRTADHDIDAKHAPPIIGYHPTEGGPISAWLRSDQRRTPAERSQHAAAREGEGAQRLLPSEPRRPSRPPRCSCAARQPPAAPPR

SEQ ID NO: 994325 - protein, 215 aa, Homo sapiens
MVGSSGGEHLFGTIGHSQTQYILSHLTLGLFSRHLVERRFGIRPTTGRTQVTPNGLKCKKSSVTLHNALRVTIALEDEAKIAVRTYLGAENRFVTRCVDAPGPRFSTCTRAGAFLGYILGTSFTHATEKALKGNCPQMVVGLVATRVEYENLPGNNCPMVYSKLFASCEDIQLCGSVSQQARAGSRHVANGGPGGGPTLSLERSLEDGKLLTLAN

SEQ ID NO: 994326 - protein, 367 aa, Homo sapiens
  misc_feature (202)..(202): Xaa can be any naturally occurring amino acid
MSTWLRENVRVTSLLPALRLLAYSIHDHDQQIVTLSCRTGGLFLHPFSQAYIIMYGNSSTNHLAERVSFTYLESPNPHTIHIRILSAVHTSRLIVREACSRIRVPHCGPPRCQSGGSKFEQGISLISLEASNCKMAALRYRDKMCEQVETWLDPESGRKTSRPWTVWRTRSGCVRPPWRFDSGRKHLFIPPCDYYLFTGGSXALSLVTLAFLARNRWVLTSPQWSRGVGGACDLFRPAGAGGAPPWGYWGGSLCPRETNPKLLESGHVCPVPAVRRSCHRDIETCNVALSKYRPKVEAMLLALHMESVGAPVRSPYAGLLRDESFAPSCPPCVVLGTPGLVSPKVTLGLGPKMGNLAVPIVPVHLPG

SEQ ID NO: 994327 - protein, 222 aa, Homo sapiens
TKWRMTAGACWGGPGVPCVALGLGNRGVLPAECFWQWHPGAWGLRPVDCGPGGRWPAELCWSAMADVIRSWMPCHHSEGLLESKDHEKITVPLERESISYSHAQLQELRRSIAFSLPVRAYSSSDRGIDRYMPSATSMNPLPGQAHPGSNGIIVSYTGHYNWPTVGSGVFKCSNGEWPTTIAWEPITPGQSLSISHPVTQDGYMARNNDSGKQTKFVTCHGD

SEQ ID NO: 994328 - protein, 310 aa, Homo sapiens
MAAKVCIGSLRVAEEAEHLAVMVISSRRGSRGVPPHGLPGLWGLTYSLQADQIATLKSKQDELHRKALGDSWRGRQLAGRPVTPEVILYVSLAELALVRQISSAMEQLQEALRGWQGCCATPSTLLALALRLPEKATSSHALVCVEHGITEQALRNFKLMLSKVKAGAGAERARRKALVSCMTSADAVGDPVPGSPSWEAKEDVEFGGGATVKKERWLAPELAEAMNGRPGPGGSTKRSREEDSREGKTLGVKKPRVGARAFVVAVSSSGAQKSRQRRETSTQRGGEEETGGKTIIAANERKEGPRARAG

SEQ ID NO: 994329 - protein, 475 aa, Homo sapiens
  misc_feature (357)..(357): Xaa can be any naturally occurring amino acid
RPNPGVGPEARSLSHDSTPTGSLVIAGAEAGGCGAGVACGCGPGPAKVVMQWSEGLDVGPQKRLLVLCWDSEYCDCEPRALMPCHDTPLEPSTAGDPWHHEHTQIRDHAVSYTRGQTFLRATTQHNKGTAGEDVRERPPHQAIHSPQNTTHVTEERSDREHQQHYTNSQPIDKNQNNTMLTPKPPPIINTTRGQRLATSAHTMARLNQRITIPPDHATTRGPTRARATHSNEARGRAPPTNESSPQHTRSTIGHATKPPLRHNGRNEDTGQRTHRRHGEARRPHGKLDRTPDNPKAETPQGDGKPYSTAHIAKGDTQTLPRSSSTGHHNTPSRTSPESNPYKSTGRETNATKDRAYXTILTTHYESTILYRSDSTISVWPTREAEVPKNTHSTRTGSNIHAELELRRAARQQQSSTQPLQSKRGATNTRAATNYETPATERCTNQTDEPIARNEASSKERNRGNDMLRRRTDRPE

SEQ ID NO: 994330 - protein, 346 aa, Homo sapiens
EVRGSVLLTKLPAHTVGDVKCDMEVSCPDGYTCCRLPRWLYLLPEERYSIKRGLGLATRLCAERTTYTAVPRGLRVTQQKGTCEQGPTNQVTRMEKDNQRHHTSDMNNPQAIEERCPRDDNVQTDMKHSSRIHAGHNHDLGNEEDDDTKTNQELSRQAPEHRAQRDPAGAKRDVRMSGNESDRRKAKIRARELDINESPGRTALTHQQTENTTRESQQHKTHTAGDTNEDPNTEKGRSARARENNEEERAQTREDEATKETKRQKQGEGQKEGERNNKETKRREKRARGEDDEQEKGSTEEEKKNQQEERNREKENTEQREKHDARNNGDSTTERRERTRTQNEQQ

SEQ ID NO: 994331 - protein, 36 aa, Homo sapiens
MLSGKKAASRGGWRLQRQQPGLEAGPGTVGGSENGS

SEQ ID NO: 994332 - protein, 138 aa, Homo sapiens
MGRVRTKTVKRASKALIERYYPKLTLDFETNKRLTSEIATIPSKRLRNKIAGYTTHLMKRIQKGPVRGISFKLQEEERERKDQYVPEVSALDLSHTKNQLEVDQQTADLVKSLGFDLPISVIAVSSQRGAERRFRKRN

SEQ ID NO: 994333 - protein, 157 aa, Homo sapiens
MAQDDTQAIKGSKATDTTTPQEQGRQNPQRTKRRRQPTCNKRRKGEQHEKKTENNGKNKQKGRTRKKETKEQTDHSTDKQHKQRQGPTRSTTRQGTRQRRRNEKHRTGRKRQEKQTRTNEPQKQEKQKRKRRKHRRQRKTKKETKTHKNQANNTQQT

SEQ ID NO: 994334 - protein, 274 aa, Homo sapiens
  misc_feature (19)..(19): Xaa can be any naturally occurring amino acid
MSTQKVLRSQTWCPSRLPXSEAQPCRHCGKVNELALRMTRPSRSSSQTFLGIQGLVIERHYLWRRMSDSGRGIQTDVDKRNGGAVPRAVLEAYDTRTIDLSGCVDGAVCRPVLIGKSPSEAFPGALSNDLFFYDLYADFQLTASAKAWPVVMKTHSMGTTESDTELKGSISIVLATYMAAIAGVAERREAGREDFSTSMQGSHCQVIRVVCPDPRGACMTLRQKNGPTRDDEIQVNGRDMWPPKLDCARERLEHAWYLCSKCVVQDEMIDVRRG

SEQ ID NO: 994335 - protein, 419 aa, Homo sapiens
IPFPGSSPSSLFPFFPPIFFLLPLRVRAIITGTGTHIRCASPRDPVYDPTILTILSAYPLTHVDCGAAEGAEHNMDPESRLAGSGKQPDLDGELGATTQGPQERHGLNSHIHKRKSTYLLMKKNPETYTHRKRKRGKIQGYTALATQDNTLHSGGHGNCTATQHNSTSHPLNTRKRGDNPTMSDNHNYKEWEDIHTRGDDNHYGNSERNEPQQMANKDTLRHETRNKAPTEHRHHPTTSPNKSRTNAPRKTNEHGLMTPQTTAGREYKGHSPEESTAKKHTRKPKGTGKHNHTTNIATTTTTHQHSNNKTKHTKKATHGNDTKPTQETTKQTDKMKSTQINESERSTEDARRESNSEKRARAKAPRTEKDKQESRQASETKRKTRDNGRDDEEDDKTEKQQRRSAQAREGKHSTNKRER

SEQ ID NO: 994336 - protein, 71 aa, Homo sapiens
EHVTAGKHRHAELGTSAALHIKPTRCPTAAARRPPVSHNALKLARLIWTYKRNVILMDHDGKEHRLHGLIA

SEQ ID NO: 994337 - protein, 355 aa, Homo sapiens
MPQGMKGDSAKSNILPLRSSNYWMIIRKCCQWWEQTMWAPKQMQQILLVSLRGKAVVLSGQGTPMMLQWPLRRAPGKQFQLWQKLAAVILRGTCEAFVFTKGGPSADDQGACCWPIRCQLLPDAGSHLPHVDVTVPGRETLVSGPEDLLFPGFKVSPTKHLQGAPLKVLSDVQLIKDWRQTWEPTEATLLNMLNISPLLPYGPGSSKQVSDNGKLYSLEVLDIHHRQLLGFYASWKGVTHSCASSARKHGQHQPLPYVTPIHQSTGENTTIRGHHMRDETETTPVPQCGRKAQERTWGSTPCHQEEPPERRHNNKEQGRQPTKDNQPTSRHNDNAGPTTQTRTLRHTPLKTSHTH

SEQ ID NO: 994338 - protein, 146 aa, Homo sapiens
TNSTTVEDSVVFLKDLEPEISITAYRPKGIEIILLQRYMHMYFITALFTIAKTWNQPKCSSVIDWKKRMWNINTMEYYAAIKRNEILSFLRDMDGVGSCYPQQTNAGTENQPPHVLTYKWELNNRTHGHREGNNTHWGQSGGGGSS

SEQ ID NO: 994339 - protein, 297 aa, Homo sapiens
MPRKTGRAGSPTTSLGSSNYWMIIRKCCYCGSRQCGVSNARCMHDPSCPFAGKAVVLMGKNTMMRKDIAEGTWKDNPCSGETVCAHIAGECGSLLFTKEDLTEIRDMVLAIKGASCCPCWCHGPSVNVTVPARTLVSGPRRSPFIQALGITTTISRAPVKVLSDVQLIKTGEKWEPGSTLLNMVKFPLFLWGGRQQVFDMGTIEPESADIPRKSASRLWRGSKVQCRRNGTTVVVPNIQRKQNRLREGYLPSEGRSGALTGAPCCTTLFCLAQRRARASQPTSANRVPLHSRRDYFI

SEQ ID NO: 994340 - protein, 405 aa, Homo sapiens
VHETLEDCMYISVGGATPWFWFKPAVTFASAVPGQGSGPNYNIHMLVVQHVSCVSLNFHVFSLKHNTHKSTSFHFHTSHNTHTTNKQHKHKQKNKQQHTQQKKKQNKQHKKKKSKNHRRRKQQTKERTARNTEHKKETQRRGSTKKKEKNTRENRREDRRHNQQQTKNTKKKEQKENTQTRPTDKEEKERDEKDKRRERRQPRSKKTKRGKRERDAETKPTNKQKEEKTTRREKQQAKTSADDKNEIERENSEATKKERRHERDQEQNTRTDDDEERARGQGRAREREGGQEEQAVTQPATHEGTRPKTEQAERQSTTDDTPEREKAGDEQRQSAQHGREPGRSEDGRGKDGQGEAGRGGGTKRREDNERPRPRGSRQGEEGQGGARNGSEGDRAGERPTKRGHR

SEQ ID NO: 994341 - protein, 137 aa, Homo sapiens
TNTHITMSGGKGGKAGSAEKASQSRSAKAGLTFPVGRVHRLLRKGNYAQRIGSGAPVYLTAVLEYLAAEILELAGNAARDNKKTRIIPRHLQFGHQKDEELNKLLGHVTIAQGGVLPNIHQNLLPKKSSKAKASQEL

SEQ ID NO: 994342 - protein, 76 aa, Homo sapiens
QRGCKSPVSVKPTPGVAEGPPSTRARRRMSGCQCRTTDTGRTRAHADVTAHTHTPHAQPPNTQAELQRQHPTNPAS

SEQ ID NO: 994343 - protein, 334 aa, Homo sapiens
MGSHTIEAGQGLSGYRICLGLALNEFYRRPHASKGLAEELAKRNRPSLSSPGVTIGVIRWALHDCVGQSMTRQGGSYAWGHLGACNGVRAPQIHTTFPMAVQQDAKVLGKVSPSPKVGHGSEATYIPVVRGNGLRVGNTVDIWGQGGRLEKALESLDKGQAFVVGASGFGGDPYSTLVFGLLAFPHRPFFVATLGPLFDTSSSAPRVAQWGQALPPFDPQDVGGDIPAPVTFKRGIIARAIRAQPPGKDSPNVVLPKGKGLSRRVGWDTQLKCSGRQHWATGLLEQERGAPAENHHSATRLRGPHTMLKKTTPGDTHVNAERDTKHERHTAGHR

SEQ ID NO: 994344 - protein, 322 aa, Homo sapiens
IIICPEVYAVFYKMPRRYFEGVWVCVMCVEEAEDPIESPVWRLDDTGTNNERTPPHRHTKAQEENTQHTIEKERTNAKRNYTLQEQANQTRNQNRSEQRSPDAHTSTATTNNNRRPRTTQHKQPRHHGKTETHTTTRHRKTNRTNKPQQNAPPRRTHPRHNHAPQTQHAPHPLGTTTHGSKTHKQQTHQRRNKGKHRNTKDTQTTEDPKPSQKAEDITQTTHRARTKTASEATAGARHTTQHTKQHAREHTQTEQPTNQHKEVNRRDYEDEVEAQGARRKKQDQQSTNEMNKEMRKQKHYDRDARKEELLSVEGAEGAKQRT

SEQ ID NO: 994345 - protein, 353 aa, Homo sapiens
SGGPAPGRDHWNPLETPIKDGMLYQRPAQSCGNKCWRKVWALLYAGGPSGGGQRVWRAGRSGMVAWEQRVRGRQGLAGEEELMGHPRWLTVCPCFLTDGRELAPGETGAFLLTYHAELKHIYWAAQHLFMALDGPQIVPGWASPDDRGGLLMIPRDDPVSHTMGPGPHWEENSNLASSCCTEVRAEFYRGGMHEELRGRDPLARLKGPVLLVLGPDAIQSDWTGLDRRPPKAGRTFLSRFGSCRACSPWRPDVAWHRCKGTLRHSGTPCATDCDGVAVGIARHRTRRRNRRPTLAQERGPIAYLEDQRLWNPGTGYLRKMKLDRDNNPQLGEYHGSWRAGTTGTRAHVSNTSF

SEQ ID NO: 994346 - protein, 152 aa, Homo sapiens
MVPLHSSLGNRARLCLKIFLNKETKNEGYRFNGHHVGKLSPRQINTSHLSVVIHTSLLNKGSHSQKLQMWVGTHWPLLGEKGTKKNTAELFLTRGKRGHVVIFSMGLESLNFRIGHYSVFWLPTEQSGLSCGKNRGGGFPKCDQNREGVPLY

SEQ ID NO: 994347 - protein, 227 aa, Homo sapiens
MNFSDVIQTPDGYYRREGVPTTFNSTVNSYLDAQYTQIWVIVDDYGAVMPFVDDAADVVCTKRVEEHPNEKLGGSSRWSNLHYTPFTPGSTSRQVPQLHPQEQHISHMLDSHEVIEIAAKSNLPLGWASPPRFYKQGLFSLSFSREAPYTGERPHKGRHPDHTPAAKREKHNHRRKHPHGPTPRGMRAAHQAYTPQPHGGRYTPPKERPPVVERRNQHSTESAGVRK

SEQ ID NO: 994348 - protein, 70 aa, Homo sapiens
GYALLITLLQKNGSLLQVLELRMDIPDYPSLLDDRYCFIIMEPIRTRDGASYHKLHTNRIRERPNKTKKQ

SEQ ID NO: 994349 - protein, 73 aa, Homo sapiens
MLTEGANDNLPDGATTEPPFQHERRVSVHRRHRQPVNAGRLHMSHQRTRRVSITNYSAQTNTYSTHRLMHRFQ

SEQ ID NO: 994350 - protein, 107 aa, Homo sapiens
MSLSMCIRGDVIPICHYNVHYWLLLYHTWMIPGTISTLLSRCRIPPRLSLKGKLTNHYSDLARLSRQVLIRFTSLLRRRWYRQLAPWNSTSPVLPLGAISPSSQVAM

SEQ ID NO: 994351 - protein, 372 aa, Homo sapiens
MSQEEKAAYLSDPRAPPCEYNRFGMHKHMTGKTMMYRQHYIANSITGLLNLSLTTVTSFSENDESKVPADLLKRAFVRMSTSPEAFLALRSHYRQTLSSDMHQPLDPRDWRQTSEQLSWWPWRLAADDRDRLWRMRSGSATQFLTAPELMPFRLTRQFINLMFPNERNGPYRTRIMVQQLRAFRSDPGLLTNHHGCVTPRSPPLLWPQFDQDNMLDHQRTGSRHYTATLTLLPRHHTGTPEPHTMPRHDESYKVPKSAHQTVDRPTPGPQNAPALKTWCAAQEPTIQTWAQQQSEDPKTATRTARGHAQSPKLRELSEHTQDTATGNNTDGPLQGGPMILPKRLQAPSNNTGTQHTRPPTTSPPTHNEHETD

SEQ ID NO: 994352 - protein, 119 aa, Homo sapiens
INWVTWLISVFHHRIRDQQLFPLPDLGPSIYDYAKSMALFMVGVNVCLIVCIICGPEYFHRDFSATAEENYSDQKKATIEQFDTASDEERAMGSLKMNTEVEEFDMDKASVQHRESARD

SEQ ID NO: 994353 - protein, 413 aa, Homo sapiens
MECWWLLCVCLAAPVRNVLFAACVTLCVHVPECVDPMPPCCVRMLLYVSWVHVCVLGPKLLVMFIVCCHGGLCVGRECDCASSEMCCEMRQCSPEPLTATHLHSHPHTTHKHPTYRARPTRPPTGTTTEPRQPSHTWSRDAAAPRAQPPQHDTRAPTFAPPPQATRPARRADTRQHGPKQHKKRPRKDVRGERDSHEPTTTHTPPARYEHQLLKATSTQGQANTTQQQGSKTNRQEAPDNAAPSRSGEQSASRPTRSPHATQRPTRAHAATPDSAHTSPQAEPSQQGRPPPEPPGHRDPHESLSETLPDAKGLEGGASKYAYIDLDEQYNGHARSTEPQKTQHPRAQGCASTARRHHTAVDEPARGGGSCKRTLPHPPTHIPNPSHPIPPPTHQLFGHSSTLPHSTTHSNYYQ

SEQ ID NO: 994354 - protein, 215 aa, Homo sapiens
MRNRGGEGARALPILFYKDDPEELVMRLAVNIWTWQVMEQLIAAYNLSKQLTVVPLTHECSLLLGKPKPCENMGRIFPKGHSQFFRQWHAFENTYESPSGVHLRQPTAVTVEGAIHTSRPCTLTPVSKKPLATRQRTAIMIRRRSRHTTDQREITRAHTTNSNKTTTTTDNKALRTTADQTEGKHKKVEILYDHERPRNRPQRWRYEHTTSHCRK

SEQ ID NO: 994355 - protein, 232 aa, Homo sapiens
MSSSRRPISHIRTLIGLKVKGVEKNLPEQIENRKKAEGGNPNFRQNRFQRNKSIFQKGQGGRGKIADLKSSGSWRLPRRRTKRVVANPGSSNWTYPGPKDQDGQGGGRDPKRTRKDGLGGWAHRGATGGKGSRHPQPAKGGSERAGYPAGETVGPGILAIHRSEDPIMRPHQRAWGANKEACRYSKAVKRSRAKLPNPKWGERAKHGVSGGKTASPGEGATTETAAKTEPRT

SEQ ID NO: 994356 - protein, 141 aa, Homo sapiens
MGGTPILSGPGPISFPKGKVSTSREKNPGYEHEKYFLFLMDWGSLENHWSQDGKMNQSGRLLSFFLEAMAKISVVGWRVREVTPVTKFIIALMGLGLVSGSTRIWMVYIYHSTIRTTSNIRSIPRCGQGLIHIKGLHQQIG

SEQ ID NO: 994357 - protein, 197 aa, Homo sapiens
MCGPGFHTGQIPYSIPLLPRGGTSGETPKSRRTQGHERAGDSPQHAENSHTQKGATPSTAEGQETPPLGLPLPKTPRGNPIPPKSARQTREDNHAVTTHQNTRKEPANPNTAHNSAARPKPLPSKNTPRQRHKHRTKPPVKKPPRPGGTTRQGGASPPGVTPDPEESATMRADTTKDPLELLNTHRGTRRTNAVKQN

SEQ ID NO: 994358 - protein, 229 aa, Homo sapiens
MREHPAEKPHTTHPGGAPCPQRGAARGKYTARGRYRAPNPQGRARGRKRDIIGENKFQKLSPTDEGRPTEGAQPPICGDPAWARVNSRPGGPQQVDTLSPNAYTTAATQHELPQKTRHTTKSRAAPDTTTNRVLSATDVTTQDYVRSGGEIKRGRVPNHRGGGQQPERGHNHKSLAPIQQRPLVVIENTRPRLRRETQHPDGETHPYGGAPPTHTTLHKKPTGARRGNN

SEQ ID NO: 994359 - protein, 37 aa, Homo sapiens
TSKTRHAPATNRPCADEHRGGPDEPHAVAHAAMSLAR

SEQ ID NO: 994360 - protein, 108 aa, Homo sapiens
LDCRYDYVTTRRNLPSSSGSPYAVVLLLVERDVYAYCHFPVSLDWPGMPHIEDVATPCLCMLRRTALRSEPAFSLEGTKVIGAFYYYKILKHGILVTRVVTRLGQGLR

SEQ ID NO: 994361 - protein, 331 aa, Homo sapiens
DTGSRVDKMTIENAEDPRRTPSSEVHLIIPRGGPSRGGPVGPRKLKLHRGAFRELIERPGASQDFQSQAERPLGTVPHGSVDHCFSIKGLKGTVSDRGPVLCRAPSSLGDSVEIPALKVVKTGEVHCMMFHMPITFSHAEETGLGIVRSPQFDPYSVLERGLVCAPESLRHWSDAGLISVAEMPYFRGPHVEPRPKFHITSGPCKQSWAGGCSSVLLQITLMQEPILGLFQSSLKNTVDQEQYLSQGFDHQGVTDTDEAERKPPGPEAMASGAVGLVGLTSQYMTPVGRGLAPAKIRHYTTCQSSRAGQGKADTRNCQRKVKSNSLTENTH

SEQ ID NO: 994362 - protein, 126 aa, Homo sapiens
MHIHRTQILRGPLSRTVRLLIKTSMSPELHQYSPSPNTRALLDTSHQRLTIPTQQRGTHGANTCAQREIDHGASPATTNSAHRTILEHPRTHARHRQQEHRQKVQPQDPNENELTEAIRNDNTTAQ

SEQ ID NO: 994363 - protein, 539 aa, Homo sapiens
TRREKVWLDHTEDDDKIHEESAENSKNHGTLSYKTSPVPPVKVDASAQQHKQLLATQGWLNIWPTAWHQHISTANWQAATGFTSAQQFMQAQIIFTTHTGPTCRSGITQQTPNPARPAHQSSTVHPHAQHKGHQKAMEHHPQFHRGTCCIPNLQCCKTLATLFISHACKHSQHIHKHAGGTQSVSPQKPPPQAQQYLSQSHLLCNSNITANQYTMPLKHPHPNGSTSPIWLSSHQPEHHANIPYNLTTLFPPREDSVLAEPHGHQTRHALDNTTLLQQTPQPPNLTHIDDTLQEQPTNDHKEQHTNNTLHPCHTHTHEPQRTTLQTRPPSDTLQPPLSPQTNPLERQHGANDPHLTSPRANRLHTQDAQRAKHREQPPIAHAPHEHRTQNTSKTTRSQHTTHSEANHDLQTAPQLDNIDRTEDIDPDHKKERPEATMKRTTNNTSKRRSETPLYMATGTHQDYKNNKKAKPRTTPSTTTNRNTRRTPTNPTTDNTTKQSNNANNRRTHVKRREEPTSRSTTERSMPGPHTHTHIRNNDR

SEQ ID NO: 994364 - protein, 73 aa, Homo sapiens
LDSHEEASEEIMEQGLVMEECGLGSCRRLKVLLAKGTFSETENSSRSRLCFVTDKDGLLMSARSGQTILKKKI

SEQ ID NO: 994365 - protein, 329 aa, Homo sapiens
VSSPHFQVGERALLLLEIMNDIMSLESSDNAVKILPIHVSFLYRSSKSHGTRQYMADIAERPGEHLQWRVNQKHYDDCTHTGSKQERLIREAKNEENGKKHGLKIENLAKANPQAQTQIRRRTVLLQRRKSDAGSGPPQQERLGSSAARPDELAPRTAASLRGAASGRASTRFLFRIAVRKYILAVSYQSVTSQKLSWNPFRRTITCVAAQCENEGGTKHKGGRFPRAPPAEPAGLTDGVSIWMGASAHAIGQVRDIRRTSRGKESTWHHSQGSEGSRTCTEGLEHPRSTTDAKRGQMRVRMKEQENRGRRGNQRKAGRPRRTKEKRPE

SEQ ID NO: 994366 - protein, 180 aa, Homo sapiens
SRAGGRCTSGGGGGKSSRPLTALWSRVPARPRTAAPLLALRLLARRLPAASACEPGRRLSPDPDGRADVPEEAARGGQGTGRTGRATTAELLSRPTNSTSGRSTAAQPQGQTSQGFTRGNPCHKCQEDGLADQARAEDDRPQQPQAPEARPHTRTDRPKWQTTRHRPRPVDLRPIGRLRT

SEQ ID NO: 994367 - protein, 166 aa, Homo sapiens
MVTTCWSQVLNVAWVQRHGDRSRVRIGPRQIGKHRCYEGLGQDSNHTTSSKERALATRIHAGYNHCGDMSRRILQQGAKGRQPEGGGELRYKNEEAETQLETYTKVVSPREKESKPKRRQTDAAQRKNANTGKVDTKLNQQLTDYKKRKPHKNTSSWHAPLVAPAL

SEQ ID NO: 994368 - protein, 243 aa, Homo sapiens
MVEAREWVLEGRLAITEATLLWKTGNWRLAYPIRSQPSLYPSTVLLRGLSGGGVVAGSRDFHGLCLRKTELTIDEGEGCPYRRSPKKEAVGAFHDADAWAFCICAINRRSRCPSADSGTHSLGRMVSRKLYAGEEVKNKKYFTEGTQLYVYVEIFLLGATEEQIYELFSKSGDIKKIIVGLDKNEEHRMWILFVGYYYAQMRKTHADHKWDASGDGSFGQTGTQALRKGRHTGRGELGAHVAL

SEQ ID NO: 994369 - protein, 127 aa, Homo sapiens
MPPHVGWGSYYIIVASTIRATYNTSTERHKRHHQQNSYDKNYVAEYIKTHHDVMQINSLYKSHAVTRRQQVIDERTTFLTTYKNIDEQAETYSVKHESRARQYEDGNGERGCDRGERRGEKSDGKKD

SEQ ID NO: 994370 - protein, 197 aa, Homo sapiens
MGKYLVVEDRRQDSEERRICMSCCVSGDGSDEGDRLCQREHMNVKRRGRKYEVEDGRGSKQDEMMANQGYVGWSEGGRLMGRVIAVLAVSEEVEGEFGAVHAQIVQMVCEAYSVSWRLKKCSSSTIQIDWDSATESRDRNKHDVTTIRSTNERKRVDEGNVHMRDKEQKTHYYRIQLTVSKSVICDRITIPIADTIT

SEQ ID NO: 994371 - protein, 135 aa, Homo sapiens
MSTARGSASPCSAGRRHRARGGEGTSAADVELQIVDDVVVAALACEHDSLPFLTMLRRHKGSEVALRQIVDDRRCSSRHEMTRFRRYCMLRELSLQDLQQPGRTEACDRYARLGAILVLTSVVQSFDRRRTVVRL

SEQ ID NO: 994372 - protein, 104 aa, Homo sapiens
LAYQSHLFTHHPKILPNISYLFPNLSSLHPNLSQVLTYSPTYSPTSPKYSPTSPTTATPPKVNGISHSPGYRHQAQATVLNKPRLSARMTVTRRTEGTWGAAAG

SEQ ID NO: 994373 - protein, 284 aa, Homo sapiens
MADSAERENRLLNSKKPSPYLIKMAMAPSTNLKELGNWQLRSLGQNPYSKLNCEDMIKLNVACVMVMATIDFPGILVDVVTVLYKTCNTIQTGEERTIPLEAIPEVFDNGMANLGYNHGASMNYVTVNDEELREEKRYAALNEGKNDMCTQRQQILMETDKSSYEEFVHDDELQNMKTQLFKRPIFAPSRKNQIEFFDLPLAKDKLDNHNQDQQLHRGGPRRCSCVRRASLVVRTSLVAGRGRPPARPYVAQAAALAHASAVTLLWFRLFPEHLTSVGGHFRPA

SEQ ID NO: 994374 - protein, 243 aa, Homo sapiens
KYLMGDLLREGSYGKVDKDVLYSETLFMRAVMILKKNKLLKRSPDGEAKVKEDHSDVRERVLRVHVMSSKLVDVVIHTKSKQINVYVVMDVLLCVACMNNAGTSVPEKRSPSCCQAHVELLSVSCLIGLEYLHEPGIVHKDIKPGNLLLTTGGTLKISDLGVAEALHPFAADDTCLDQPGSPAFQPPEIANGLDTFSGFKVDILVGWVTLYNITTGLYPFEGDNIYKLFENIGKGSYAIRATV

SEQ ID NO: 994375 - protein, 325 aa, Homo sapiens
MEALHAASRDKYRTTAATDGCFCCRYCMYLLPAGAVQGLGDRGEAPDSRSRSATYYAGGQVYPGEAVLFSRSPTTPMPLSKAKISKPAPYWEGTAVIDGRHLRHADTAQPDLIVGTIPMAPLSFSPHLTPPPTARCSHTLTHYLRPLWRPDPRTLDSTLPTSSTPYLGTMRQRNRPSRSHRPPGHNATTPPGTITYTPLATDHHERARRRPPHLTGAIGPTYTYTPRTLWTPDIHARSAKHAGTETAEGSVTPKGQAHPSQRHPPAHTLYTARAHTPLNTYIVHVGNPKNSGTHSTDNTPPTQPIPHYHVTKLWRDRNPIGSARH

SEQ ID NO: 994376 - protein, 85 aa, Homo sapiens
KFPRDMKAMSPEDQEYLEKRSVATCVDLKEEDHYQRARKEREKEDYLHPQAAAQTALALLEQSIPPRLPRQNSVASSPSSSSAVV

SEQ ID NO: 994377 - protein, 334 aa, Homo sapiens
GRVGRSGHPAPFGTQKARALEGDPPLVEEWRWPLRGRWPRARLSPAGIPAVALWFLCTLGLQGTPGRATAAPPWNCPAGADCLVTRFYTAGVAWLRAGDYPTPRISKRQLAYPGVPHRMTPGLGTAEQRLLAPPKNCQLGPLNGASNAQTRRGRDASRRLPTSSNWHLRRQNLRVRVQRPEGGLHHAYLTDGNVYRSYRHLLEPMGLWSGLGIPKGLGMAYDVEGTIPKEAPGAEGCGITQIGVPTVGAVPDVQGHKEKDPTRLKRGAALRKGLTGFTFNEVALNPPVERPRSINGAFTHEKNGSQHKRVRRVFPEINARLKSLGRATTSCEMS

SEQ ID NO: 994378 - protein, 129 aa, Homo sapiens
STCAVLSVLCCLCCAVLSVLCCAVCAVCAVLCCLCCAVYAVLCCLCCALLCCALLCCSVLSVLCCAVLYVQCCVVRAVCAVLCCAVCAVLCCAVLSVLSVLCCAVLSVLCCAVLSVAVSLTNLEHTNCR

SEQ ID NO: 994379 - protein, 110 aa, Homo sapiens
  misc_feature (110)..(110): Xaa can be any naturally occurring amino acid
MREETAEEHGAHNIESSEEEKQKRTEKERAAPTEVHSPGETAKRTQHSQAEGAKTREAHEASATPENEAKSDTRQQTNRRRQEREQQSQHTHSPPARRTQVEEQEHTTKX

SEQ ID NO: 994380 - protein, 32 aa, Homo sapiens
MLLLLNCAEIPNMVDFLTSLWGKRTTWRQKVD

SEQ ID NO: 994381 - protein, 129 aa, Homo sapiens
RQGSSGKREIAHTQEATGTPSRTFGTVEQQIRTTKGLVKIKCLPHTCLYSSLTNQLQVSSSPLSVPQRRSHRRRELQQSGSILAFILNPLWLVKQLNPKATPTYPRHCDSTPAVKGAQGSTIQGLCGHQ

SEQ ID NO: 994382 - protein, 107 aa, Homo sapiens
MVGRKKCMHHSYHSSLDSSRELLLALGSDGQTTMRLTQMMRMPDDRSHVKDGISKRNSGRLQPANSREKLQKVETMMQRPTERGQRMNKKSRVKRDNDDGTTHRHKN

SEQ ID NO: 994383 - protein, 38 aa, Homo sapiens
VDIDMTFRTIHLLLMKFWDEQQDTVCARHMRARDRSTS

SEQ ID NO: 994384 - protein, 313 aa, Homo sapiens
MANARDEEIVNATTKKTDKYRHGHEGKAVKEREKEEEARSKKERTEQREETEANETERPQQDEKENTIGQQSIPQTHDKSHLKKNPHQYCSHKTYGYTNNKQLTTLNLNTSHRKQTISYHNHACTTQLFNELTRNSTNTNTQREEMSGDRRAGGGGRETEEGEERRRESTRGAEGTKEEGRSCAWDGRMEKGAERKREGQTDRRRKTESWSEEQNEWESDGKETGRGGARGEAEREKERDSGRRDAMNRRERTSVRRQKGAEGGDGRRSERNEREREEKRKGVERERRRQGRRERHTDQSSSGDDRRQEADRT

SEQ ID NO: 994385 - protein, 81 aa, Homo sapiens
FSSLSSPSARLEAFRGWLVSIEVSIPRPSGWHMQCSSVCACVCVFMCALYACGWLPYPWCRASLVRAGPGGRRCTWVFAEE

SEQ ID NO: 994386 - protein, 159 aa, Homo sapiens
  misc_feature (105)..(105): Xaa can be any naturally occurring amino acid
GIVGQHNTKFPQPSFWGHAKFLPYHAGTTFFIYTVEKLWIPVLARTPTPPLWNLWRCDNRVETQHRSHSVSPRGGISQVGASSRSPHLFSGTPRNILFSENISFXLFSPLERAVCCGETPRQGDHREGQRESGEPKMRASATEHTAVFVLSHTQKGGAQ

SEQ ID NO: 994387 - protein, 351 aa, Homo sapiens
MPESLDQPNLWQTRGYQPHNCSCLQACRIHWRAQFPGWGDGGKTPGRGGGATRRREGVPNRGDNIIPRIPPEGSQGQLHTLWGGEKENTTCNHGANHTINGHKHNIEENRFSHPKGGKKEKITHMIVMGPIGRDHTAPSLDTEGHESSKIGRPTGGARTQWGGCPPQRNMLQPRRRAHPGGGKSDPQHRGRDPQWGAEDGETMREQTREDAPAGPMFGKPRWGVYVRGPILIWKTPPNTLGVAAMGPPHGTEKHLRGEKESFPQMAVLDSDTTTWATRLYPRLNDRWGLACLCQLYATLRNPSHLLATATEGRGGGPTPASLPQAVGYITAPPGGTVFPRELVEFPLLKVG

SEQ ID NO: 994388 - protein, 67 aa, Homo sapiens
VLIVTILIAMYLPNAYPELKIILGYIQLRKGPNVVGPYRATTTLRLIANKISFIKEPLKAATSTITL

SEQ ID NO: 994389 - protein, 182 aa, Homo sapiens
MGNMWKGKLEHGDAGNERVIRRGSRACVQGRHACDPSIWGRQGGRTGGHPGRWKTRRGNSEDPGLTQNYRKRVWGMPWKPKLHTGLRPKGPQLAKTVHTFTRTKTKDRPHKGEDPRVWENVHTNHKRPDTKKAPTRGGPPLREESKRRREDAQIRSTYKTTARANKRGRYTRRGPEQHNKAG

SEQ ID NO: 994390 - protein, 109 aa, Homo sapiens
MHSEWLLICLLSVVVLDPNMYLSVLADIISLHPGNWLGTRPIHFIATYYNGWNKTFTKVASPWLRDGNGRGWGFAPGVPKAPSGVARRETILSLSYIREVKILLRRQEC

SEQ ID NO: 994391 - protein, 115 aa, Homo sapiens
TLGLKQFSHQPPFYFFVQMGSCYVAQAGLKLLASSNPSALAPQSAGIVVLSCCASLPCFYISLSFILEFPQCFSPREREPWIGELQRAPLKGRTSWGLLSVCAPLCRGRYGVAPV

SEQ ID NO: 994392 - protein, 89 aa, Homo sapiens
STFQDLFAFDSYFIVLFLQQPGTEPHPIHTLKLSLTLKPYLYLYPYHYPYAKSNLKIKPKTNPYLYFYSYPYPRSYHYHNPNFNPYINT

SEQ ID NO: 994393 - protein, 86 aa, Homo sapiens
MSNVFLVETQAPFFPCQHLIYSSPGEMDKIRRGDETITSITCVSIGEQYKSQVFTNFPSDSNLIHLLKHLQWTVDILFVVVQIDLD

SEQ ID NO: 994394 - protein, 109 aa, Homo sapiens
MEIEHLAQLDMYRKGNDENIIIEHNIARTNPYTCLRYTELTYEEYTFRPKEKPKAKDPRNQTSYLRTAKRAHSVRYARQEVMVEDDCDMRSRRQDLSESCVDRLVVPTI

SEQ ID NO: 994395 - protein, 303 aa, Homo sapiens
PPPGMPPPGSFPPPVHLLEPSHWDTPAMPTLCSWGCRNGPHRRNHRARILVMDTHYTPIPTGWDAHLGTGHQMPERTTMAPHGKATHHKRLRPHRLMTGHSPTPKTQHQEKCPPAHGTQPTEGSDEHHLKTHNQNRETHQGANTTNQSPPKRKSRETTHTVDSTNTGQTQTQTQNASQKRRTHNETTHTNKKGENTDQRKRNRKKTNNHQKTSKTTAKKATDRADKTDSRGHAANGEKTTTKRTKNRPRATTARKTEPGARRKDNGTADTHQPRGRRRERKEEHESATGRRNEEPQKEEGERE

SEQ ID NO: 994396 - protein, 40 aa, Homo sapiens
STKNALYGSLLASGVPDKHTCMHTHIDTGITRAQMKLKDD

SEQ ID NO: 994397 - protein, 40 aa, Homo sapiens
FKLLTMYGDMLIKGGNANATVTKVLKDVYALKKPYGVLYK

SEQ ID NO: 994398 - protein, 37 aa, Homo sapiens
RRGEGGYCQGTMAMSVCFCVCVHVLSVLSVLCCAFCA

SEQ ID NO: 994399 - protein, 162 aa, Homo sapiens
AAAYYYYKFAAASTCVCAVLCYLCCAKLCCAVLSVLCSAVLSLLCCAVLCCAVLCCLCCLCCSVLSVLCCAVLCCVVCAVLSVLCCAVLSVLCCLCCAVFAVLCCLCCAVLSVLSVLCCAVLSVLCCAVCAVLCCAVCAVLCCLCCAVCAVYALLSVLCCLC

SEQ ID NO: 994400 - protein, 62 aa, Homo sapiens
MALKQITAPRGLSIPKDMWYSPPKSQHMNRLQGAHAFNPNTRETEAGRSLEFEASLIYRVRS

SEQ ID NO: 994401 - protein, 166 aa, Homo sapiens
RHLTPTPNLNLTPTPIPNLTLTPNLNLTPTHSHPNLNLTPNLNLTPTPILNLTPTPNLNLTPTPNLNLTPTPNLNLTPTPIFNLTPTPNLNLTPTPTPNLNLTPTPIHSHPNLNRTLTPNLNLTPTPNLNLTPTPTPNLNLTPTPIHSHSQPPTLNLNLTPTPVDA

SEQ ID NO: 994402 - protein, 31 aa, Homo sapiens
QASNDVRGHDVYKISGIFAYMAIKKTRFVDN

SEQ ID NO: 994403 - protein, 43 aa, Homo sapiens
KLLTMYGDMRGAFGKPQGTVARVHIGQVIMGFFLNKKAGKKKK

SEQ ID NO: 994404 - protein, 105 aa, Homo sapiens
VDDIKTRLASLRRAENLRKHRRNKEQTRTRFYKDPFKFLKSLFTKEKSGALKTTKKDLEEHLRTTNSDDLKRHEHLAIPSDIPPIEPPEHNIETSPSDMIRGESR

SEQ ID NO: 994405 - protein, 40 aa, Homo sapiens
NHKPSNTKVDKRVELKTPLGDTTHTCHCTPAWMTEPDSIS

SEQ ID NO: 994406 - protein, 67 aa, Homo sapiens
MLEETSSLVANPSPGRSAFQIINSLLILDSITASTQHLLELLVFKVLADRAQSSDFLLYYTSFSPCR

SEQ ID NO: 994407 - protein, 36 aa, Homo sapiens
RIQASNDVRGHGSGKNVGDCLEIDFEPDENKEWKAS

SEQ ID NO: 994408 - protein, 139 aa, Homo sapiens
RRENEGSKWEGKGLRRKQQREEQEEEQEQGQEEEQKQEEEQEQEEEQEEQEQEEEQEQEQEEEQEQEKKQEEEQEQEEEQEEEQEQGQEEEQEQEEEQEQEEEQEEQEEEQEQEQEEEQEEEEQEQEEEQEEEQTSRVD

SEQ ID NO: 994409 - protein, 162 aa, Homo sapiens
MPQKIRPWPYLLRPGSQQSHSSHTPPALRAFLVPSGPRPRFGPPVSYSLTPVRSVIGGNTHPGLACTHRSNGRRALTTEEFLPAAGKHTLTAQQRQGAIRAPHQGYGIARERTPSTVGSAERINPGKMWSHTARQARGKILALDKTTPANSEKPRVVTTTSA

SEQ ID NO: 994410 - protein, 165 aa, Homo sapiens
MAPLLLWPSAASSAAAGKTPPSRVPAGAVCPDGGASKLPGELAEPDWLRGCGAGLLAALGCVPGGTRRPAWTLRPRGHGPWGSLWIGRARWRVASRPGVSVSSFPHALGACGSSAPGSFEPRLLRVKLGARGAPSCHSGCNSLLVRYWARDSRGRNTTWGQTLHY

SEQ ID NO: 994411 - protein, 173 aa, Homo sapiens
MLGSARYRLIDNPSEGYLSNIISCMIALGMSVFVAHQPCRGTFLIAGSWAHCMFAAVEVRRPVDRPIPKARADAQLGLCLMSAGVTMGAKCYGIVCITVPQMWDLSSNQCDNSIAQHDAPVKTIHWLKAPNYSCVMTGSCDKTFNVTGILDRRDPHASVCNSLHSVTSADRDI

SEQ ID NO: 994412 - protein, 58 aa, Homo sapiens
STLVLVVGDKVVLVVGAEIVLVVVAEVVLVVVAEVVLVVEAEIVLVVGAEVLLGVGAE

SEQ ID NO: 994413 - protein, 260 aa, Homo sapiens
AGEGPGWSGSRFAHAGVSLSAGVPCVLSSFPRRVCWSLLFSSRPMRSTWSQTPCALTSAGRCSMVRHLGPWVASEPGVSCARMRNGLPYGPWEFNPSVSWNLECRQYSGARMSRLNESQPERRYPPDARIDGTKGYSIGRTILLPKHCLAPVGVSTEVPPLVQMFTLCSGPQDKGPRVIRGAPMAKKHPLIQSRRNITGKFQRNGKQHSRYSGDDHTFVKGALRTVGVVSHSHDNERDLWGRTRKGEDDEDGEVRPDMAL

SEQ ID NO: 994414 - protein, 298 aa, Homo sapiens
GSCNRCDRRSIRRSIRRHRRACKDSVGRRPREGRHKANGRMSPRRRRACLGAGGTWTCRAMEIQGREKSRADLVLVALLRPMPATVPAPPSAPAPSAQPTPRVSLCPWKEGSVRKPQGHRVQPVADMLKLRSLSELGPPMELKIRLITGETSGDKGDLYRLCRWNERRAAPWQDLTISHLWLLDVVRATQECQGEREVVGESYLSPAQSVKTKINIEEKLSRAKIQSLLNPGIYLESKGDCFLTMSLLQVCTRPRNRITVIRGLRDPCGQLWASSPQDPVEAVRTHRGSRNQVQARPF

SEQ ID NO: 994415 - protein, 184 aa, Homo sapiens
AADMLSDYALDQCLVPPAAPVPRWALVLGWCGTVPAGRVLCELVVLLWLGAWLAAHWAWETVVCSVYNMLTVEEGTPNRGALPKPASWYSCGPTVYDHAHLGHACSYVRFDIIQKDPNQGFLDAAIVMVMGITDVDASHHQKRHMRCNIYPRIAIDQTLNEGRPSTHGTWKDPERFYRNTKEVT

SEQ ID NO: 994416 - protein, 272 aa, Homo sapiens
PALVTRLCIVSAMMAIVHVLVLSQNTRSVNPERNTFVLDNINGCQDYCRSRSDTWFGDPKIQVMKYAFLDPNVGGKLVIDSNSMARLPLLLSSISRLQAIASRGLQSTASEQLGRAPEDWTEVGGWAPQSVELFFGYGATMRVVYADATVRVSTRDVTQPDGDQLAYRKKAILRMRSLSPGHPSNSRHIEVSPDRNIKVTSALRMPGTIYRTSVSFSTPKPIEVGESSLGVATFALDAVNAWYSSDGDRSDPTIDLLHTLCKKWTLDSLGGI

SEQ ID NO: 994417 - protein, 337 aa, Homo sapiens
  misc_feature (156)..(156): Xaa can be any naturally occurring amino acid
DGPKWFIRYEFPKLYLYKRKLVELGEYGAFSKLPGESHQLVWWELVGPFQGQGSFGLQMSAHASPCAGGTGWVTPLGCQGYLLDTLNGEWVQWRITSKNFGMVGIFTNPVKNSRDSQKPQKGLSSLAPPGNGIWKGFRANLKLVLTPDGTGFAGNXRTPWRTGRVSGPPGGTRILYITVTWSGPGKPSGRAEIRPGGARERPGGKSKRRWGGTGQHGGPSRRNGAWKSKSGYLFFHKVPWGCVTLVMAPHYWVNPRMRSFTKPRSATQLGDGAGGITKGAPTLKAIKPYKQGWSPRLGSPKNTGKPGWVARAHTPKPGLWRNLKDAKKDKACQSRNA

SEQ ID NO: 994418 - protein, 48 aa, Homo sapiens
MNEKHEAEKTVETSKERKRTGRNRTKTQSNTPNRRQRNDKQHNNTKPK

SEQ ID NO: 994419 - protein, 334 aa, Homo sapiens
MRGGAALFPRDSCCSWRRDGASRSAVPTNPCRWCASQWLYSWQLEQLAEQAGWNLPEAWCLVLTLDLLLGFCAAGWPGGLNRVWLRLHTWACLGAAAALLSLFKAGKESDAALSGTTFSSRALRNMEAHSVCERPLVLRGQLCLDPWAMEAPVLLARTYRRLPPDSRSGHKLCSLAPSPSLLRGRMYVMRRRNLASGKDSQLSPAAASTGSCGQPSLDSLPIPCARGWSFVLSRGIGPPGAGCGPTLCRSLGPVVRDLGGGHGLRRIRLACCHDRLHAIVLVRTPRALWQGLKSQWIAWSTLLPGCACRQNTGDESTGIAVNVLKSQCKAVIET

SEQ ID NO: 994420 - protein, 175 aa, Homo sapiens
RRGGHQGLGHCHSHHEGGGGVPHHLQTRMMPTVQQAKSIQRLPPNDHAWYFEVESCEILMGEDLTEEEDGGIIRRIQTSRVKAMLSLEVKGASLLVSVCSCETRDTTKEQCVFEPDVELRRLKIGAEGVEDTVGMLGLHECLGEWRQFQSAMGMHNWRKLITHFVGDRYQRTATT

SEQ ID NO: 994421 - protein, 278 aa, Homo sapiens
  misc_feature (63)..(63): Xaa can be any naturally occurring amino acid
MTTLADWPWAGPFFTTLTEAGGVLETPLELDAERAGCSGRSGVAAVPSRKARRATGPSGSAHXMVGPTLGCPRRRHWHPWPCDVFRRSPEFRLQDSTFRGDRHSVSLHPHLSFQVQPKPVLTCLVDLAKDLALSGKERRGSITPVTRGSPRAKQLWTSPALELGPQPWARDFSDFIIWHEISGLSRDNQVAGVVKVRTAKVCDNIFDMLHFKKGYVGTTQEEPHRKGSTWTQCSLALTTPKTRDKQENLNSFEQSQTTNESRTQQVRGEHRSPTRPPY

SEQ ID NO: 994422 - protein, 112 aa, Homo sapiens
MLLSHDVLQDMRPPGDRIITWYLYDQSGDDVDPRLERNDSIGRIHRARVPKKRQRGRDELPEGMGSTGSLGFLTHKRESILACLMIIEWLLGSPFAVNQHEDLELTMWVPYG

SEQ ID NO: 994423 - protein, 33 aa, Homo sapiens
STPEDSAVYYCQQFGSSPWTFGQGTRVEIKRTV

SEQ ID NO: 994424 - protein, 170 aa, Homo sapiens
TDVMRINGRDVVLCHTFATAYNSIPGSRRSVPMIMLDIASVLYWRRFTEHEGLLISSVGAPVPDEASSLDDPGQVSSCWLLLLRNDMQSSNEFPDDTLNFIKTHPLMDEAVPSIFNRPWLPENNGQIRLTQIAVDTAAGPYQNHTVVFLGSEKGNHLASLYGPNRNIVVC

SEQ ID NO: 994425 - protein, 130 aa, Homo sapiens
MNTNQGKGTPHRNAKKSTYPAMTVIIEHTCWGPSPLVPKSSHDTWHVPWLDVQRASQSPLCPLRDPVCPPAKCTDPMARRYKKWPAGKGPQEVARLGHRYTITWLWGLRCTNASRREAERTERTRGEPQA

SEQ ID NO: 994426 - protein, 224 aa, Homo sapiens
  misc_feature (74)..(74): Xaa can be any naturally occurring amino acid
  misc_feature (111)..(111): Xaa can be any naturally occurring amino acid
MDWRLFPSWVRTRTTKNHTDPFELESAEGLLTAHDLQGGAPDWSHIVGRPLCREDRILTTRERRGTSWGRKAIXCTWVEKVVNLYGNNTRTQALRHHAGQVTHRWEQTAEXEPMSRETEDQITVSRTRYPGCDGRRFGATRRGTGIAMHKKGRPARGAHERHCRTGKSGHHYSEIQELHTRTKEERIHGDATGKSDSRILRQPKGGIRKYGAIGRNRHNIWNTK

SEQ ID NO: 994427 - protein, 304 aa, Homo sapiens
DFSGPLWLAVLMVGSWDAGSLTEGECQVERIRDVARHKKRTSLDAWGRCHVLCCDAVWCLLPKTAEQAKAVLRQDVMCLVAHVLVPVRWGADDVELLVFGYACKLVPVDDELGPGSGTGTAPHPLDAGTTRSSSTDMMDVVTCMTVSEYDADVLPQCNRALSGCLKQEARNRGAHLMTERESCGAIAVTEYAIEGTADKEQNETEVQRRTSKVEQPGRPRQRHGGNANKKGPDEGKNARTHRRKGRQHTKNSTTRARKRAHRTVREGSDKRTRQDKHETTTEPEPEQRVHEAQSATTPNGTRPR

SEQ ID NO: 994428 - protein, 88 aa, Homo sapiens
VDVNTHPKHMPGKQWLGVTLKEKEEERSTLFDSYGFPPQIFTFPHIYKPFLTKIGSKIYYSINKYKITFPLHVVNTVYSTYVKEPVVD

SEQ ID NO: 994429 - protein, 162 aa, Homo sapiens
  misc_feature (30)..(30): Xaa can be any naturally occurring amino acid
GLYDLNHTEMGELIQYDIDGEDHSSIDMSXLYCPELESVHVAPCEPVSQRVHAMERVERDQSRQSISMWDCKGCMWFIRGVWDFWWRTVDSQVILYHEYHLPGRSSTLQEEQASLRCRSMPVLDQVATQYFIRSGVMTRWLSCEDPDCLFSLPGILSHCLEK

SEQ ID NO: 994430 - protein, 205 aa, Homo sapiens
ERAQRQESELTRRSAMTSKGPEEEHASVTLFLPVPAYSARVQDPSLTMELLWLAFEETDTPSVGTGLSESRWWLAMAYVVTVVDRGLGTKPYTRPSIWSQSSHTECGACLQGTSESRPFEAFKDSEGYIYARGAQDMKCVSIQDLERCEEAEGGWVTGSPVSIHYDAISRLHEEVRGVNNGRWSLVRVTRARGSMLLRAGLLSLR

SEQ ID NO: 994431 - protein, 116 aa, Homo sapiens
ADICRTRFSWSECGLMRKGTVLLADNVICQCAPEFLAHVALGGRLGSEVEHTNQSFLWIQGRLVVTGLRGMSHLQRAQAWKAWALTSCPGLSHRGSHLRQASVTCKVADAVLLTCL

SEQ ID NO: 994432 - protein, 365 aa, Homo sapiens
GNMAGIELESCWLTRALVSAGEPCGHGECLSTSCRWMHAASRSQAEDVRVDGLLSLTMLPGDGVGPELDARRQGGVKGCDVPSGVPGAPPECGAEYGSEEKLEQVLSSHEGEQSGHHWNRFIPRWSIRAELASYDMRVKGTVGLYLGNSTYHVQGHYPLGYNELTGNKQIQNLGCIITEKTRPDTGGSTSLLLETMTQLPQARLMTTGSWQRKPHRQRTDTRRSTRRDRAHGQRAQGNAKRPPHDTGGRGTHGTTRLSTTPAARADKGTTWRTRGGAARGRRARQARGKARAGTRRAADHTQIQKNYGRGERDVHIEPNTSAVPIERGGSGQKARKTQRTDMNERRKAATTIHVRETVNRNGTSK

SEQ ID NO: 994433 - protein, 114 aa, Homo sapiens
MVITTIIHTRRNSLLPRGTQPVTGGHRNPRPCGKGAPSSGATGPYRYPGYPDPWCPSTPGTQISDHQIPGYPGSPGVIRGNKRIQKSHRGTTEDPQGSHRRHTGNILRSPEIPL

SEQ ID NO: 994434 - protein, 335 aa, Homo sapiens
SLCVLAGHVAPSRSTPGAELFPDTLGPRPLEGDSVSPPDPDGASDYLLHFAGSCAYPRAGQVPMVPGTSGGPGSHGWKDAFQWMIFPCLPRTPLWDAISMGHSGRADPAARQGRSTSSGIPVSRDLSRVEQLLLAQSPVTVSSHLPLWLAMLLTCDNSILPQLPDGHSIPGTVDSGKPGLARKKPQLSPGTSSTKLFEEELSIREPSEEGPVDFWFLIASSSDRVRGKTRPASAHVVNQEQETQESLPLEEAVIPIQQALPAQAVPSVHLPGNRRTCRVGTTRQRFLTSRKLAARGYKTSADNAGFVSMSWQSDPRKLAAGLNIGWCRTARLVDP

SEQ ID NO: 994435 - protein, 234 aa, Homo sapiens
ASTQETSESSRESKGKKSSSHSLSHKGKKLSSGKGVSSFTSASSSSSSSSSSSGGPFQPAVSSLQSSPDFSAFPKLEQPEEDKYSKPTGPRIQHPSIHAHSECHEHTPRDDRLKRQKGVFIWRGGPSVARNCNQTDSRLQDGPGKHIPLGTISLPTYTGSGAIGRHTTKRMPALSDNPVPADETPETGLKEKKHKASKRSRHGPGRPKGSRNKEGTGGPDDPSLPVTSWRDDEG

SEQ ID NO: 994436 - protein, 312 aa, Homo sapiens
AAAERRTAGRRLEAASSLEREKAVGRRRLLRSPLHGTEPTDRGGLSMRSTSFTSSSASSFSGAAGGGCVEARELKFAVRRAGSGRRQVRGPRIAGRPEATGTPAGRSQPDARRLGSAIGRTIPVLLASAAEGRETNEPGDPPGERARARPGDLDGRRGKGADLPQRRLIRNCRGTQRTLVPGLTRGLVLEKGMDPLRIWCHDTSQVARKNWSNKRPPLANGLNWNRDHWKTHHVHHGTMGRSRKVNIYETQPATSEPTVVRKLLISLLGAELNKPHIPEILKDLVGKTFGQGGISAKVKMAQDLSLPGREVA

SEQ ID NO: 994437 - protein, 324 aa, Homo sapiens
GLHGPVSFKSVYVCHEILCKLSLEGDHSTRLQVHMGLSKPIANFDAERDALNIESSHQDQRCGMRSPVVEHVDRTAGSAQRQDIAFAYQRRTRKELAVKHVKSALSGQLEHGDSGPIEDTCSDMTLLQLKSFLKGLGNRTRTSLIEIICSRRQAGAAGNLTESTTDTVQDCSGDGPLLYGHIWVTFRKTDWLPWQTGVEEPEDRLCHLMMNVIAPRHARDLYDAGSERRKGTAVPKVGISIIARAERAHLQKRTRQGSQRSHKGRRCTVDGKQPYRTTRLERKHLENRHTRNTGAQLRNKNKTRDEAERMHTAMKRKGEEIRTD

SEQ ID NO: 994438 - protein, 357 aa, Homo sapiens
MVAIRNRNGIPNAYRTTHSRLYTSYSKGPNVVGPYGLLQAFADAIKLFTQGAPVKTRHIVPVTLYITGPSLARHTIASSTMNPHIPSSQAPWINRQRQGLLLYCYATLCAYDVYSHSYDQGRASNLKPSALTRRTCRAVRPKQSHLKYSLGAVILAIKHGPNKWLLEASSNLITTARTPPEVTPAMHDPWHNMLDRPKYRQRHKRKPHTNIDRRGDPNIRLRTTTVEYSTKAPIPNLTYIARNTQNMHCIIKTPLQALTGSCLENQAYDRTVSSMKIYEQPSSKATTRRPKESTPLSSGVIEVEQQAIPPGKPDEGDDDNTRAPDDKTVRKQRKTISNSRAYADWLQNTEPRIRAIP

SEQ ID NO: 994439 - protein, 42 aa, Homo sapiens
  misc_feature (1)..(1): Xaa can be any naturally occurring amino acid
  misc_feature (25)..(25): Xaa can be any naturally occurring amino acid
  misc_feature (41)..(41): Xaa can be any naturally occurring amino acid
XPHFSPYSKFYSVYFSFFKFFNDFXIFQVVKGIFLIFHDFXF

SEQ ID NO: 994440 - protein, 203 aa, Homo sapiens
QKLLNQVGLPVSGRSLDHKLHELRVLRRCRLQRWEDYIGRRITELSRASAVKRVQRTSLVAESCTSNSRPDSRRAALSGSGLNGTSCVCVVGHWMLLQLRMRMRASAYFSQGARSYLLVCRTTPPCAHSESVRIGRRWNHSGSCSVCAFDWKQRGDVTAVATHDVWLTEPSDLHLSDRCEHGRDVSYSLCVDIVPETQRVHSV

SEQ ID NO: 994441 - protein, 116 aa, Homo sapiens
CDVTGSCVGTGPKQRGSERRTGAGTLGPVGTPAVCDRVTHTLVRCDQCIEGYLDLTCINESGICMVSRDRVSDSASCPIRELNEDCNFQKKFQRLISLTHASQGKQHDLDLNIPMR

SEQ ID NO: 994442 - protein, 387 aa, Homo sapiens
  misc_feature (212)..(212): Xaa can be any naturally occurring amino acid
  misc_feature (315)..(315): Xaa can be any naturally occurring amino acid
MMPRVGMDSSLRRKKKKKEKKRTGLVTPPVGCLTLVPQCDSPYRGKANSVSKLEPIGMARLEKSRPNWLVARPVLPAVENGSGGPGRLWSHTQGGGNTPVASCVPPRIHPTGVSAPTRRDPVPNRDQSKSGLRQWGTPLQQICARDTHYHNDTSPTGSPNNRTTVRRDLGETHKRGGNETHPDKQMCGAAPNSLRRDALRQNGDGWCAPHKXSSSGRGTPPIRQTTATEESDREYTPPGKEIINLCDQTDKTTTQWGGTPLIEDNASPSMRGSTPAKEPARPRVANNPHKRPPPVRSFVAHTGRKNGSVDRHGGXLTIVTQSPTKRGITTHEEDSPPSTNKWTPSASWGGHNTSRLNNADNHNVEGSAKHMCGFGATTVRHQTSSDK

SEQ ID NO: 994443 - protein, 201 aa, Homo sapiens
  misc_feature (157)..(157): Xaa can be any naturally occurring amino acid
  misc_feature (176)..(176): Xaa can be any naturally occurring amino acid
MAQQERHTPGGSRNGVASGRCWDWWAQKPGAPLLLLPLAHIGAWWLAIQVSRGTARPNGCAQGLVGIQEITGGLPVPDRFLALAHLGGGTRLGHRRTGKGSQLARGPELGLVRKIFMGTPGRPLRENLVSTKSLKSDRRVWGSGTKVRSGGSNLPGXRSARPPGNWLTLDERDPRXRSEGKALMQAVGPMGVLDEGTDDAG

SEQ ID NO: 994444 - protein, 216 aa, Homo sapiens
MNAAQVKPLGKSPQCVNPAVYACVLWCALWGNVRLAHVPPWEGGGLQTPSAQVGKWEEDSESSSEESSDSSDGQMLPTAVDPAQEKSLGNISSAKSISSPAKGTPSEVHGACEPVQVKAEKPMDNSESSDGVIGPVLDSEEAPAAMTAAQAKAALKIPQSKACQESNQYHCICQGRPLCDVGTPEPPEKPGNCDFSSRPHPQLLAWRAPSRTGRGI

SEQ ID NO: 994445 - protein, 31 aa, Homo sapiens
STRKRGHEFEKELGEGIWGIGRRRESDVIIF

SEQ ID NO: 994446 - protein, 450 aa, Homo sapiens
MWLVGAAPGAHKRGEWVTPRPRFPPNIPQWRSWGLKQGGVSRRNSVTHHNTVTTEACCVGPPRDPLPYNIAAPVGDNPKGRGSPRDKEGETGETEKAKSSIAGEPRERLPQWFVDHPGVFHNYFPNNEAGGGDHPTRRDRSDNPQSSNPTRRDRFAALSNNWGRAPMEGLLQTNHVGGAPPDVEESCVPTTECSTYGPDSGAPTPSEGETSHARAVESQDQRATHNHSLIHPKDGGRQYGRTDICGYGFPPNKSPLRTGASGGPPREQPHQVHHTLLRRDLNGRTQSSGEQTAPYGQSTHDDGAFSRRRNNNTLMLHNAGTQNVTRTAAHYWYVRDVCRDHVETNDTYLAPHQTDAANDPRGSTKQQKNTYALLTTYARTSEVNTPCGAPTGPHKRDRKKKIYTAEITTQVNTGGTNGQSRDGDVPTARGGRAIFREKPVSAGVPQSHYQ

SEQ ID NO: 994447 - protein, 139 aa, Homo sapiens
MSEGTSRWIRHWSCANRRSPEMNGLCARNEPYAPYCWMVIRKDLELKVDGEWFVSHLNHGPKAVFSLRSTKKYSSSGRTTYTVVTLHKLPEARDPYIRVYCGANVMQRNEMQKRAPLDVASMAAETLHGIPSELFDHLR

SEQ ID NO: 994448 - protein, 171 aa, Homo sapiens
MSDVGYEDGADFVHPSSKMFSSSIHAVFRTLLRGNGLRSDPRIQGVESAYTRHARSCTHANCRIDSELRLFRYLRGGYTVRFPIIHKHAHEGSIREPCVGQQRQAMALKADWEEPERTLALPGPYRSGGARRRTENGPPGWALMRVIYLRTGFRHGRGRPQHEVTRLEFDI

SEQ ID NO: 994449 - protein, 335 aa, Homo sapiens
EPPSSPDEPEFLAMDCPGNHDAQSISAPDCTRAMVAQKSTDRTVLTQQRHVLQLMPCKEACCERLLDSKTQAWECWCEVGTSYAYVHVQSLSIAKKRTSTGKTVKDPVDTLSDTWPESGPGLHHSSKAHSETQIICRPSHTKHVSSGEPAETPLLDDSRWLPPLAKMVLESTPGQLRETARLLTRSLSIRTSLAITHFTAGHVMNQKEPFQEITDRRAAFPVKHIGCASGLHSTRLQGDSTADMTCHSLANFSSGILPLSVAIQVLEPQADHYSIVGTLQAEGPEFQILERNGKKRLEKYLAHETTTVIIGPEAASLELNFRAGFLIETQRYRMR

SEQ ID NO: 994450 - protein, 51 aa, Homo sapiens
  misc_feature (24)..(24): Xaa can be any naturally occurring amino acid
VDVKYMRHMDNYIRHMVNYIRHMXNYIRHMVNYIRHMVNYMRHMVNYIKHM

SEQ ID NO: 994451 - protein, 296 aa, Homo sapiens
MSILKIRCQGDLGLLAGRSTRVEVDLVQPRKGLFESCCAQWCFTVVIYEALRGSGHNDKDSAIWGRVSSKADRRTSHIKSIDACRMGWPEAKPETLTEIAYDERLRPETRLDSSTGTGTHDRHSDIATVARCRKRHNSVCVGCSHVGPWGFGKNNLEFVAGFQRRIRGRDPRTPWVTSGPTKDPDRLDTPWESLGAHTLSLPQGFDIFLGANDSPAGRRNRRRTLGPRSSKHMGTRGMVPSHMGHRRDVGQKGPVGTQHAQRGNVVYPLGEIRGPHNVTGATRPRTRRNNSKGREH

SEQ ID NO: 994452 - protein, 511 aa, Homo sapiens
  misc_feature (321)..(321): Xaa can be any naturally occurring amino acid
PISPHQVDRRGTADQTHEAQQKVDAYHLQLQNLMYAVCMPPTARSITNMFCAVSSPTAMQATLHPGRDLAGSLSEGMAPTSIYSKADKSPMGRPSTSTTTGNGHGTWRRLEKQAGTTQGWARRKGTRKKEGVNSKPNGTKGHSSRTGGPNLRHETNTTKRTIPIMQEQRTPITRGKHTTERASHTHRHTPQLDREETTPHEHDRMQHGDRDQHREAKRKLDNNNNKERTKRELTNNNDNRKNEEQQQRHHRNKTPRHSPKHNHPADNAKKDQRHLMEGDDTEEPTLGQAENRRKTQRARPKGATNNNANTDIQNNVGVRRXNTMTGHTRAPQRRTERHLRHREHTTTGARHRTSTKREPRPAHHSRQSITHSHAQLPTQPQSTDSHTLPTSSCHPETESNEENDPTKQRTPEKPAETTRKKVKHTTTENISEDEGTTHDTKRTRHKTNNRQTKRTETPGHRTQRQGRQTTTDDCNTQEITQRRHSENAREHTIAQTREMQQHSSAACTTHN

SEQ ID NO: 994453 - protein, 204 aa, Homo sapiens
CCQPCAPHCLLPGARPVELGFAESAPGCGTAQRAVPQQGGLGGRALLVLRPGCLVAPGPVPASCACALISFLLQVYAPLPGRPDAFHRCIFLFCCREHSVLCRPAEYTGINYPGKTIYTHMSHLLRILPQKQENQCVSSLSLVLISAGYEAVIGPKTCSRLPQKHITARTAASDPRLGDWDISRLVHNQDHRGTIFNSTSTIFL

SEQ ID NO: 994454 - protein, 186 aa, Homo sapiens
MGQSPQGATKVWDGDRGVLGIDNDTSTRGPNPPEGETIQRIPPTREETPIERAEPTSAKQTRDINNPPSKHGKTTPTHKYEEQGDIQTKTPGRAKTGDTKPTKGNQESRGHKSDAKTETTSAPKNPTEEKPDNPTRYTATHHGRNLKPWAPPTNAPKGTAAAPDTTRDNSTDEHRYNRSNRSPSRE

SEQ ID NO: 994455 - protein, 119 aa, Homo sapiens
MVPCAACAGCHPGRAGRERHGLGRGPCGLAMLRLALDGPARGLALRAAALTPLQHRHHLRLRSDCQRPAGFPPGPAGCPAPGPATLDLASSSATPACVAHWAHTQVLPAGPAALDSPNG

SEQ ID NO: 994456 - protein, 108 aa, Homo sapiens
ILHRQSELMLTNQISKHRIIDLNHGFYSLIKCSRFGYYRFYFKILTHATASVLSSFSTIKHFNNIHTQTSMAGAPNITLFRFPSLLCALPNHLKCNTFNSNWYLNSLA

SEQ ID NO: 994457 - protein, 348 aa, Homo sapiens
  misc_feature (74)..(74): Xaa can be any naturally occurring amino acid
GTLWGESGFLAGNSLAKCEHLEAKGWGRTPALAGALCVATGRRGFGRRRVPMVMGRCVWAVTPHVGFGLAQIEXGAWLGLAVGWTLAEEASSGGQGVVGEYGWPAVLCYQCDLRAPKNCLVPALSSVAFGGPDAITLCSERSILVHDNRTWSTGPPSSEGERTRCPWDPRHAQIVALFGVSRSRLIGGNEGSAGDTFCPQVPSPALPNFLAAADDKLSGFQGDFLLAILVVEFLVAVASNGLACERFSIRKQAMDPAVVFSVQLGMSADCLGLDVALVALSLSPKHWRYWEAASGWSVLLHLNLLAGDLHHLVSLNGSGIGPFFAETPWASRLGVASGGCALACNQFH

SEQ ID NO: 994458 - protein, 222 aa, Homo sapiens
DSMSFSTRSSFSSNYRSLGLCPGAQLRCPAESASAGSVYAGAGGSGSRISVSRLTPCFRVRHGVRGPGPPGIAVGSWQDMGRASKNGEGDHAKSLEASGLASVPGTWSAREPARPDEAERLESRNPGRHIGGRQGRPESEDVEAMIVRTIILTEPDVARDLCCKNNWCDQTAPAIGVLDMYFEPEEATVIGHSGALELKDVKRHAEHEAASDDDHGLVEETD

SEQ ID NO: 994459 - protein, 150 aa, Homo sapiens
MMTKGKRTVDDRVDRRSGGSNERERKNKDGGGQHSRRKRGPPRAEDAARPEKETRSTKPKRRKRRRTNKKRTTERKRKKAERKDKNEKEKENKSKCKKEQNTNRYKKKKGAKKEKRERRSRNRKQETGTNNTRKTHNVTASVYHEEGGNE

SEQ ID NO: 994460 - protein, 242 aa, Homo sapiens
MAAIDIGTPSRGCCTVGCIFGERKSAKHPRSALAVVRCVSTVSDVGDCFWRIRSPGTVRNLGPCRSDALISDDVVGAVQEMCSGEVAFINSKMLSQGYRQGNSCKALCVLCVFDFASLATLLSTFCNGLGRLSAPSTKECEYPKWVETGLVVIEWGECTLPARKSAQVPTRSPRCDGSFNHWVVRCKVGTRWYLQFPTNGCMSQRTTQLVHTPSDSAVETSRAPTFPYSCHIGGPPFLTPKG

SEQ ID NO: 994461 - protein, 149 aa, Homo sapiens
MGCPRTHALREYGGLRTMSSDRTASNSLSERQALLRPTRARLGTMRMPEESGHHRPEGAQGRQAVEAGSPVTARRVAAVVTGDGLVAEKRPKSSREGSGGPQESSRGQTPLSGLIVGPPGCWSAQWGETGSWPAFNTTREVGRDTIPGL

SEQ ID NO: 994462 - protein, 163 aa, Homo sapiens
YELADGQVITSGNERFRVSVRRCSSLTFLGMDILRIHETSFNSIMTVCVCTSGKTLVQSQRTVCLYGAGTKQCITGNCSDRMQKEITRPVAQPPGRSNDQSATLTVAATYSRCRDRMAPSCAITGSIIPSQDVGFSNGAAVRTSTGPSIVHLSMLLNGTQAHA

SEQ ID NO: 994463 - protein, 109 aa, Homo sapiens
GAQPIGSPRDDASPPTEQIFLHCVLFGPMKWPMRSAAHWSMRTCESSPGDSDYEYWTLVLPGCHLLLVSCRHNQVHMLLLRQVRNLPGPQSGVLLQEHMSTKVVELCWN

SEQ ID NO: 994464 - protein, 362 aa, Homo sapiens
  misc_feature (73)..(73): Xaa can be any naturally occurring amino acid
MLADLGLIGTIGEDDEVPVRRPESDLRGRGRWRGPLCWAYDKKLLREWNRMCCFHPCILVSHCMTGGVHVRWXAGPCADVMSQLNECTHGHANYSYTDSTDLRTRFDKQTQAPTRVITGKPEALATVGITRHEEKARAAPRSSRPQRILRTHTFYMENCTEAHGLPQESDRPSQTVTYLTPAWLQRHSLDQTARILTRHPTLRSVKRTDRVMPCEPLPWMAWARIACHSSLSLPHRLLIDPPAQVTHFLCSHLSAPVPSYPLLEGPLDELRPSGLRIARTRPLPVPPGCVSSLRAPQPPCVSLLVFPTNLPDPAPTDPVPYRLAHRRLGCGSLGPAPHTHLPRPTVLPTPTPRLPGLCRCRS

SEQ ID NO: 994465 - protein, 160 aa, Homo sapiens
PGFRCAAWTVHVSCLAFVLDPWCYMDNDQPVRYSLQTRAMPMMMPFGQLLGGQTRRKTLRQWSQAPVDDLVKVWKLGVMTRLDLQLRVWRVHQAGEWCLWTSVTPCPLLHPVSLDAHIRSFGDFCAYPWTTDITSIDAGSVDAWTFGPFVFLISQYLATR

SEQ ID NO: 994466 - protein, 262 aa, Homo sapiens
MEPVERFRDCALSLAPLPLHAAGIFSLQLAQDLFSRLCPLAHSCPSWFRKRDAHSEPPTRVTTTRSSWLTSRSSVLNAAPLDDTNLTTPVTSGCPGLEPTEFFQSLGGDGSKGTVQIDDVPWHHTNCSPSSSSMELIAAAWILGASAGSYISALRGEQRCLRINPSPAMCTSVWMCKQTVKVLGKRHAGHRELHALYTTPDAHWKESLLPQLAPEALNGCCPTIDCCQVPGAMVPPSYYTQSLILWLGDHRRVRSTTTYVEL

SEQ ID NO: 994467 - protein, 104 aa, Homo sapiens
  misc_feature (93)..(93): Xaa can be any naturally occurring amino acid
MVPRAYLTWHQQLERLSHRAGIKSQCSPHQGRLRGVPTKQQYDRRVAQASHLLKEGAPITLGYQYVRSPIRPSIPSLVTCYAVNVACNSISRXGTYTTHLCFRK

SEQ ID NO: 994468 - protein, 246 aa, Homo sapiens
MQGLKGLTCNSKGRRPTYNPGLAGCYALTIGPHYRLYQTNLHLKTVVLHDRFNKEHLGASKRYETSGACHQSEPASTFVDRKWSQTVQKLARLKRERVVKPYTPQESIITAPKRVPPWDPTGGDQDGSTMANANTLHGRTRAKARNSDTSTQITPDVDDRGLNPRNAPPWATSNRIDKNATQGGTTQNLTSEGPRRRTPTGLRHINEPHTKHREHSNKDNRYTEPRGPTHEPSKDDNTATQKHPTT

SEQ ID NO: 994469 - protein, 41 aa, Homo sapiens
MVVGSGRSPVFLWVLQRVRGALTLSFCDGGTVSGFVVPCCV

SEQ ID NO: 994470 - protein, 171 aa, Homo sapiens
ERQHRRELEDEEGACASLTTITPGVCTRCFRVTLAIKECHSSSFLTTCDMDYYTSDCMSYTLVWSSRNGDDSYPRARLLSPAQFMSERRYPRYVWILSRCMKSIERNALQCDQKVSRDYGTSIESSQQRILKWFRVRRVQLVLVAVTPSQYGNDDSLKGAFAVIGAIRKCK

SEQ ID NO: 994471 - protein, 270 aa, Homo sapiens
PSRPVLCGPVPPPPASHELHAVNKASYGCRRRSRTVCQIDPRRRRARTGSRDSRPLHRPIPEGLKDGTILCTLMNKLQRAPSPRSPSMQNGTARKLSNSSRPWSATDDPVDCSRPRLFESGNMTQVQVSLLALAEKAKTKGLQSGVDMASSTRRSRSGISTCTMKAGQCVIGLHMGTNKCASQSGMMRTARGGIIYDPKNHICPHGPLDISLQMGTNKCASQVGMTAPGPGDIYDYKLGNDKCDNSSMSFQIGYTRAQTGAASFGWAGYM

SEQ ID NO: 994472 - protein, 223 aa, Homo sapiens
SSLSPTEVARLKFLRRKRRRELRYVRLPYLCCGCALRGQLPSPSARGLQEDLGQRWVTRGGRQTGSKQGYSVAVWIWGTKNYVDSTVYWPEGYCGNVFAMLSPCWVGVLYAVLLVWPRVFWKPLAVAVVLCAPVSVPPKRVPDKTQRYARTQRVEREILEEKFRDSEVAPVGNFWAPYMEAISTFPVGPPPVDKIYKGPFFLTHTLSKAKKQKNKKIKKERSD

SEQ ID NO: 994473 - protein, 266 aa, Homo sapiens
MGVLSESEKEALGGQALYPHVLVKNCAVEFNFGLESSSPTCSCPSPGVYRSSERRFPLVESYPGSPFGPKSMAECEILMMVGLLVLARPQWAINIMQSSERPSKKYNILGTNAIMDQMRVMGLRRQRNMLVRWDVLIQQVNQCLNRLIQIASRKKTQLYPEIRQMFMGQPRDEEMRPFEGFQLQSYRHWSHVDEDLKDRTIKRIDEEGQDVPGSAVLEDDSQLHVAKMLGDFLDEVLCIELQRDRKRTKLVKQHNEEMPEVWAPPE

SEQ ID NO: 994474 - protein, 275 aa, Homo sapiens
MCVVDPVLVYSWMLVIGCAVLIRTCSPKTLMESWLRDDKRKESKPIIFVYGQSKAVTGRLGVDQESEEGKRQNEALIRLDARFPEGTSLAGSDQENVRNMRAIPEHFLQIAGDDMEICADELKKVLNTVVNKHKDLKTHGFTLESCRKHDVRSWIADGSGKLNLQEFQAALVTTIKAWHEPFAKTMTQSSPASIRRYEMRICGQSAQDSTSKKRVYDIITMRYADKTHEHRQFDSFICCFVRLEGLVQSFFMHFDKDGDGIIQAQRSGSGCSSPC

SEQ ID NO: 994475 - protein, 488 aa, Homo sapiens
GQLCWCGGGSPGSSYRWPSAPATDMHRPSAPPSATGAALRGLRSRHTQRDKQRDDLTSHKVPGETRIARRRGRTEDQMNEPRRTADTQTNGNGQSGTTARTHKKHTREETTREGRQKADGRKREPRGREKQERRAREERRRESDEEEQEARGTERRERRGQAEDRTEEREGERQKRSDGREEREREKKRGGEEEEKERRQGEEEKSEREEKSKKRERERGRREEGGKERKETEKEKREKRKEEKREARGEGQRGRATEGEGRGREEGKEGEERNEREEEGKEEEERGGGKRAVERRERGQERKKKREEDRRERGGEGGEERREGTKERGEAEREKKKEKETGEREEERRRERTRRQEREATRKEREETKREEKERKRRRNKENAEERERGRNEREQKERQESGEEEEKKKMQEEERDDTRPEREKKRAGERRRREKSEKEKESRKLRTETNDGRKRRRGASEGEKGTTRDTRGRHGEDDRDGRAQSEE

SEQ ID NO: 994476 - protein, 315 aa, Homo sapiens
  misc_feature (305)..(305): Xaa can be any naturally occurring amino acid
GIPARCMAAYKLVLILALAESDMDTCENLLQRAGTTPTSSPGVATQECERAAGRRVRDARLMSLDIVLPPQCRRRSRIREPLLGNRLARIAQLASTHVGLAKCVDGPLGALQVSRAPNRGIYTVSTTTEHDNLLAQRHGSQCRMCARLSDGRITNECTRADVRIGDPDTLLFSQRNIQVQDSPGYRRTLNSKHHAHPSLSSSLDRHHSLARDALARIVDMREDRFAAESQGRGNTVLLALAGTQWTHTAFTRGTLVNGSHERGTPLASSASHCEGGTTDRRWISTRLVIMKSGTEKTVNALIQVXNAGINEGIEA

SEQ ID NO: 994477 - protein, 253 aa, Homo sapiens
MGRIGELCRRIRDTTHSGLTVGTGCLHGVGLRVLTCPGVGLRSCTGDELRVNLSFNTADNGDQQPYNRERAPTIGLGEHTTTRAENGGTQTLRHSAHTAETYHNTGRAENREVPDINTPHSTLRHAVKRCRDPSAHSTNQPRDTERATRRRTQVGTTGAYPPPTPPRASHTPIGEHHRNTPKADYTPTSAHDRKRAKKRTTAQTDPAPTNTTRTAGADNDEPGPPNRTQPPTAPRHHNTGPKPHAPTPRHNHA

SEQ ID NO: 994478 - protein, 86 aa, Homo sapiens
SDVELAVPDGSVDAELGGVESSGAVVVVVVGRRSEAGESLDKWMPTAGSRKPQIPRRVSAVLCSSWAYFFHEATVCSRLPLKAHNK

SEQ ID NO: 994479 - protein, 137 aa, Homo sapiens
MCRSLVSRKRSRVRLPGAWETMHHCKRYRPPRRSRSRSHGRLPTRGGTGSAVTAIHTGVKSGAHPWERTTMDLHVSSSSAIAGEGAYRNRKHAHSATNANQVIVAGLLEKAKSSKRSSGVWADDKEGHLGGRIGECS

SEQ ID NO: 994480 - protein, 97 aa, Homo sapiens
KKPVDELARGAGGSGALGGAGSDSSSPFTGFVAAQDWPVARADWLPVRRSGRTLCLADSVCLMLLTVGPSILVRWCGPCNIGECAPGLSRWAENLPV

SEQ ID NO: 994481 - protein, 140 aa, Homo sapiens
MNGPKGPSDGQGSNTKKWEPRKQADKGGRDKSIQRRGHTKFKEKRSTKTSTRNDEKRGQRGAGNTTNKLAHTIDHEGSNIIEHTKTQTRKTEHQTATEQHKQENKRERRTTAPSEKQNKRKGRTTRRQEATTPHEGTRKK

SEQ ID NO: 994482 - protein, 238 aa, Homo sapiens
  misc_feature (167)..(167): Xaa can be any naturally occurring amino acid
MDRRSYRTLRLDTTHKRHDVPVWDATLLQPLLRQECLPLVALVASPSVDTCEWSDKCGLVAREPRLTSCMQSCRSDYVPLVVRCLATGTTGRCTRGAPHNASRFPQSRFGAPCPEALRRHRPHALRERLQTTEHIRGGPGTGTMASTQCKLEATRSLLSARGRPALXPTRAAITLRGHIGTDLELLQFPGRNGLGDKLWQVALSPLGPLAVRISMWSTARPQRSRLNAGFSRKFQKED

SEQ ID NO: 994483 - protein, 339 aa, Homo sapiens
EFILMFYRDTAIERAPGPYTVGESLLTREGCESTVDQCETRQACENRLLDSRSPSFQATLVLLIVRRRGLAKIQMTDRTEMSFCDKARRHAVQGCDVNRVMTGGRRDDACKTYQDFNRWRKDYLRRGHPFWAIQVPCQRGVTSIARSELASKLVNALGDGFILPQWEHQSTRRTMLFNTSVEVLPFDKPQSDKEALHGGPTRHPPVPSEPRLATSSIGSFYKGVAEGEKVDPAFGPLEALRLSIQTDSPCVGDSERDLPEKGRLSWRASEEYPVAALKATFLGVSSLAVPRRARYGPPTGSAGSGLGRPGIAVARRPEELVLPADGRGEARGPNVLRPD

SEQ ID NO: 994484 - protein, 258 aa, Homo sapiens
  misc_feature (34)..(34): Xaa can be any naturally occurring amino acid
MTLAIHASRGARLPQSILDAGWSQRLAANWEQCXDQRHQSLPNYYSPSEDTNQLTLTRGMSEDGRAVMRYLLCRHYFAGPLHASTRELLHVGAMAMMQRGGKESEPIGLLRYIAFARARIESLHSMSRPRGDVVSRIVVVPVIDPPGSVQRSSPVLLRPRKAPSIQVQQTGRARLSEIGGKNTMRTGPIQLSLNLTSHDTLHWAPSTWEQMPVSAESGVTVGDSAHRFSGRRGDKFGRIPLKKSHSEFSSRFAYLRAA

SEQ ID NO: 994485 - protein, 102 aa, Homo sapiens
MPLRPCLQHPVWEREEWSPPSHDKHTSRRRDRWERDQENTVTKQEESKEVEKARNGLKERSLAHELVRVRENDNNRRVKGQIKAQRDRTKKRRRRKEEITKT

SEQ ID NO: 994486 - protein, 355 aa, Homo sapiens
MVLLLMVGLTGVFWEGNTEQTVSEIYVENHHSTEQVTGFGFPRPNSRPRRFYYGIAVGRIAIHSWGRSFAKPIKAQTFDCTLTPLATWTTGGSPTMGRGFNFNPGNFPNGPFPFSTVERTTQRHNRLSRALGVNTILVATFCLAQQRTDAFDKPTARTGVLWGGTLSPEQRAQLPFTPQHRGRNPLVWPYDSHPFLRFAPHRKLGSPRRALTGGGTQLGLRLYTVWHTTLTFETTMAALWNTTQNYSSDCRQRLIPRAEGGGQQHKQSVRDFQADCDKRTYPKRVCALAAVLQSDDVRSFSCGISRSTLCAESLVTYISGRHATDNIALIHETQLWCSGRFGLDAAEKSDPTQPQ

SEQ ID NO: 994487 - protein, 107 aa, Homo sapiens
MAAAGLWNQCPRWAGVAPVVRAAQRWPDHLFRPISAEDEEQEPTEIESLCMNCYCIWHDAASVVSKIPFFREIVVSSFSCEHCGWNETRSIQSVNAGLQDQGVAATL

SEQ ID NO: 994488 - protein, 333 aa, Homo sapiens
  misc_feature (142)..(142): Xaa can be any naturally occurring amino acid
ALLVPCLYCLAPAVPPGPNGTCCMAPAGPSLTAVAPAACPLAGLWAMPCVTSGHALVWASYMTAAAWPLWSLLAHVPAGTMPPRALLTLRALPTGPPCFLPCDMCLPAPWWAFLCPCVMYCAMPLNGPCQGQGPCLPPVRSXALLPHGMPQRVTSRMPHDAALAHVTAFTFLWPWDVLRQPEWQLLMGPGAALDQPNGWLLIGAHDACPAQPLAWLIMGPNNAREKPQTWLIPIPESPFNPGACRARPVWTLLGAVAAKLLVSPIDLVRARQPRSRPGLGNPAGPLRVLVDLICALGWPSGPICCALDLMLAGTPHMGFTPSSVIDLKAQGRR

SEQ ID NO: 994489 - protein, 240 aa, Homo sapiens
MLARALDKASNAAGTIPIHAETGGSVRIHPRQMSSVSQSNDEGSLRTLVIYFPREIEKACSQVRVHVGKCRMAHVTGDKADKKFRDSVVGAHLGIEGNSAQGTKLLSGDTIPVARHTQKGHFALVGKSRENRFMEFQNEDTIGNQEPSSRITSSAEEIENGNQNFGRVCSYGRAWGPEYKPGPFKRPRWGLSVFDTRPWIKSLRKGGTVISIANKFLARWVPRHSNQCLAGTFSLDPSKR

SEQ ID NO: 994490 - protein, 291 aa, Homo sapiens
GTTKPNLDLLEQQAAQLIQEALIFDKQADTNYTMEHIRVGWEQSVSPSLPDTIKEVENQILTARQPKGITSRRQMLGSSGRSLQPLRARIMAEALGPEECNGLPHSAWATMMGERPGGLRPMFNRNHEPGQTQISSGLVTVPSASIDFMVAGEATIRDERLTRSIAFLSRVISAGEQESSFTGGGGMRMRAGPADRGRVTGIVQDGSEYRGARLNRDPIPTQDPRALGDRSWALDRCSSRSYMLRRNPKQYKRGRATHRRENQLRQPTKTQTIHRQTEHKRILEPDTNVIG

SEQ ID NO: 994491 - protein, 298 aa, Homo sapiens
MHLRAAKATWHCHTASTQSQHTSRHAQAPNAAKTAPPDLVQTHKRTTVSRRGRKPAHTTNTGNWKAKKHSRTSSAKGSANAQYDPPSDNTARTTTHLRSHPPHCTYAGTHHSTLPPSHRQPTQRDPPQRTVGPHPSAPTPSKTVRKRKENREGHTPRTGKKNRPQNQPGRTRRPNQAATQTDHRKPNTNHSQGTRAPTQHTTQRSQLSGQPRPNEERTTTSTPQPTAPRRAPHALSTHRREITNTRQTTVRRTPQNKQDPHGRDHQTEHFNTRASPLDQHKQEIDDRQQKYTAADTQQ

SEQ ID NO: 994492 - protein, 239 aa, Homo sapiens
MEPSFESFLAPTYGPVWRHVLNGIPGLPPDNRYKLQVITQAQQQLQYGTRVNSMVLAWKATSLPYAARYVILTSTAEMFPVRNSVAEASNPFWRTCGPPRLAALVGMPVSAAKWLAGLGRDRNGGLRQPEYRTRTANSRNPLYGEAMPPTILAPLEQRRTLPLTARPPHMTSAPTASPAHTLHPRAQAQTGIANGRSTAHSPFGHQLAICRKPLSGKTTPRGTKEQPPMETQDATHPPK

SEQ ID NO: 994493 - protein, 475 aa, Homo sapiens
  misc_feature (3)..(3): Xaa can be any naturally occurring amino acid
  misc_feature (183)..(183): Xaa can be any naturally occurring amino acid
MHXHQFAHTPGYSGWSSAFNRIVESASENILTLSTNILTTRDALVPAYITFATPYLKFLGSNEATTRLMPSNETRYSLKILTRRPHLLEWNERPLRALGRFEEFHNLSWHHHFQSRTDVQNSQSKGSRRCKSHNARLALNIETPTVRYINPDYAGVHKKDSETPISAQASALAHMEPHTLAHXHIGYTSSPPKIHTDLSLAKSWSSDCRPVVRATARLCKKPANPHGGQQAGICPQNDSTQSHSPARADLCDDTFPTPTQEWHAPHNILSTTHTPSITRANQPPSTPRPNTIRGDARLPLSTRHKQTLQRTRRARSAAIRSDYRRAIDAQPLHHDIAHQQGRRPPRIASPTHTPPSTPRQDTSAPVRDSRQPRAEQERTNPAHATRPRLRAATASTITRAAASSPRSQRAPRTHLRALPEPSSHTPLTLDRPRRRAPREDSPLASELNSRLTVLDAARMTPTAGRRSRAPSVPPL

SEQ ID NO: 994494 - protein, 294 aa, Homo sapiens
TRGSAFNVITWRYLMAGNEVVATAGFSESIPARMQANVQGKPVRSWMQRVLHTNPSRSVTQGTRYGKGLLSQMVGGLTRRGWTPKHPGRSNRNWPGTRADTTLSTLGHTLVAINWYNGRYIVTCDRYSVLRSFVTRGLGEEYDLDFKSPDDRQIRYIVGLDLAWLTVYKVLHQWTTPGGVVSKDPDLTEGRLGDAWHEVHSSVARRSMVDGEELSLNKMSKGPERIAKAGERGRSWELVLAESEDHSDLVSGGPKISYEERAKQGPRASWLAGVKGGRHGPGGRRKKAFIGERV

SEQ ID NO: 994495 - protein, 52 aa, Homo sapiens
WFSKNNFAHTKQQFTKNRGAWTHHSENKGGAAGTQAPFPHYNKDDPYEFLNS

SEQ ID NO: 994496 - protein, 163 aa, Homo sapiens
MTGTKHHIALATLGKVLRSGASPGEEGALPEHGTPQWNHLGHKKHSGDKRQNTERQDVPLEHRYQGFTRDNTYNAHLRRKNIGEKPGAAKTMGVTRRGYRQNTGTFAQAPPHEIVARGQHTRGRHEPDKRATAENSGTEHTPRRRHRTRRPKERTTASVTHAQ

SEQ ID NO: 994497 - protein, 159 aa, Homo sapiens
AYGADMGKSKNQAETNRSENVPEMVSRKPDHKDTNLLRGVDPKVLREHALLARKPQPKGAKEDAGATMARAWSARGRGLSRASVKAPRRVKAPRIPKGVSRPEGPNRAWATLANPKAWGKRAQWPGYGQGGQGCSRANGQRAKGAGAKIQPTGQGCRPT

SEQ ID NO: 994498 - protein, 53 aa, Homo sapiens
MTDANTESSRHNAPGPSEATSSWQGQRAATEDNLTARRIALLNLHGHAKSGPN

SEQ ID NO: 994499 - protein, 72 aa, Homo sapiens
KVANIMLSYKCRNEDAQYSFIRESVAEKLCKLADGEKTTTEEWLCSLRRRYGGNSNFSNKKIPEVKQKSSSQ

SEQ ID NO: 994500 - protein, 133 aa, Homo sapiens
  misc_feature (92)..(92): Xaa can be any naturally occurring amino acid
MKAGEKLALLVRVALRSNWRFWKGPRKRRHEHSRHNARYAVGQRKGHTHAKRYRREHIWVALKTLFRSVEVVYSLRYRTRAMDVEPPCGGVXNGHGEVHPQGGREIRPTPVNHPRETNFCTRIGFSRTSRISV

SEQ ID NO: 994501 - protein, 330 aa, Homo sapiens
EISGSMTILFLLLAPSPSPSPSPSPSPSSSFEMESHSVAQTWSAEARSWLTASSASRVHAILLPQPPQQPGPQVPATMPSHFFLVFVSRDKGFTSVSQDGLDILTLDEWRPRMGSTRKQSGIDTWLSDPLKRQHREQPGNQGKRRAAQSADSRKTRRGTHTPRPTTEPHAKTYHHSSPKRLNKLTHCTHALDNKRVNTEGRTLSAASPASDNPPKGHKTAEPYCPQRETHAPLLPTPRTRTRNKTRRSSRQPLSRTDGQPDTPPSQARQAGPGGSPPRDAAPRLATPPRTADYTYQRVQQSPGHLHRPPCITLAPLLTYINKTARCSHAT

SEQ ID NO: 994502 - protein, 84 aa, Homo sapiens
SLRERTSAVGSLVDRNHRTSLPQLSFPNNVCYSHTKLHAGQAWHVQQGTAGSVHAAVDYQCFLMKNNQITNNQRIKAAVPSIKF

SEQ ID NO: 994503 - protein, 113 aa, Homo sapiens
  misc_feature (79)..(79): Xaa can be any naturally occurring amino acid
DVSRVRSGILRVAETYCAQYSHHPIVNYIFDLPWMIKDYGSRQLDKVRKYRLHYPSYAIRQGTSRMGYNDDVGAVIISXECSEGLSSHDGLIDSGFDVTRLRDKFRLSSNSSM

SEQ ID NO: 994504 - protein, 380 aa, Homo sapiens
MCQDQSSMSSGGGSGGWFMAIKTRVVDVWQLVAMDSSDLWRTEAWGGTWWLAVCACGVWWLATESSGWLMNPEVVEGGAWTAGRCDGRKVTVVASIHILVALGTKDHVMHSEQRSIQDNETPSYCARPGCAQCYNMRSVADYVRMQHWYYVNEQTKEHTGQCPMSISYGTPAQWKSWAKLDQGRGPHASSSPEIDHEAFSLKCTVNIGLGSDFCYHAISSAHESVIHKGHHTGAHVSTGRHSNHTPKSAARERMRHNSGPGSDKRPEADQHGKRTTKRRRDRQHPYLAHERRSSRQRQPDQAHALPNQQTAEGKKRPTNERTEPEHDHAHAKSDHRPSTRTATTEGNEHTNENDPNTQPTPLSRPQPPNETSHTAERATP

SEQ ID NO: 994505 - protein, 419 aa, Homo sapiens
AAKVCWSRSWSVLWWSLHLVSSASAITYGCTFGRGGSNPDTVIAACPASSCTQQHTVSTGMCHCNRWEASSLHVIMCNSTIRTQQHGFVHILSHCSTHYQTQGTQGGGNKYLAHITDYIESTVVSRAPVAVCTQGKPRRQTIWTPCRPFYSSTMHSKPGINTSYNHDVWHTGIVIYQYRPRPQGTVKTTLGMGVLDAETLILAVHTLERLEHKVAKEENVVHDVHQGNEKYSQGKQPKGHRYRVDNSSQFTRIGDSVGWTPTVKQTVPGTYSTLQVANPYLHTRTPPIRQQTHTISVIRAYHTKSAKPWGGNQRTRVERGHHKERHQEHTANDKQRTSEDHARTTGTDTGVDKTGEHQSDDTPPLHAGTTKRSRATKDKHEHATWGAKNDKKETQDSETDQLQVQTRSKTKHHNGTRQQ

SEQ ID NO: 994506 - protein, 151 aa, Homo sapiens
MTRSHTHNTRDFQRMPGPGAHRILPDPWVGTEKVNVQIEMAQWNNTLVFKFQHGVIAAVDSRASAGSYIIALGVNKVIGGLALNCLVTMSGCAADCQYWERLLAKECRLYYLRNGEPYFSVGSSKLLSNMMCQYRGMGLSMGSMICGWDKN

SEQ ID NO: 994507 - protein, 75 aa, Homo sapiens
RHVSLGSEKEKEWDAARVRCEITPSSSRDLRALGPGMADGARQLGSDAAAQAQAALSCDCVPAGLLPGYPVDASA

SEQ ID NO: 994508 - protein, 302 aa, Homo sapiens
MTKALAVSGCGMVLGRCIMILLIIVYLCQLQCCLRTSTCNTYLYSRPANRGPADCPTALGLDIVDMGQLTGADSDSRTTYSLGQVYSCAWLCKQKRHFPGNAETEQRGLRLADAVEGEPMRRHTDSVHRCESPWQQDQDTRDLERTRRDGATDAFAWPGGPFVGAHSRQRLTHIHPRANGKAGGPFRTEQVPLQHTEWPEPATRRIRMRNRTRATGGLHNIINAWDYTRIVPTKGAACPFDTCKPLGAKGDRIGTLEARSEDFVKTGVNTYCVAPIPNPRVAHATPALQHVGEHPRHGAHSF

SEQ ID NO: 994509 - protein, 243 aa, Homo sapiens
CISAWNDQEYEHTAEDPALLYRVETMPGLGWVLRRSLYKEELEPKWTTHGKALGLGHVDAVCLRLTPGPRVHLSLIVVPYPSYFGIVWPTNMNGYFHRGLLQEAQGSIDGSRVSSVRNCGLGREGKKLMKLEVHRAGSREAGGAGPQQEPIVKTSFLRTTQEGALANVAFIRMEEDDDVQQLEPGWQVPPISGIWMCVATIGDCGDCFGRRTTYWWWGSGFPLLSEEANLSHPIFLEPAQRTT

SEQ ID NO: 994510 - protein, 323 aa, Homo sapiens
GLTARGRLGHPDRCFQARSGPAPYSVAGLMDEALAGPCASQKIPCGRPSARRSRWGTGELSAAEDGGQRTFLGAWGLGTPSLRPVAAELEQTRYRFGGGPKAQVHSGPPGAKPGGSRVHSGQGEPPRRYSSEIARRYQGVGAEERHMRARENTEETKRTKSEPRTTTTQKGRKPTTTKEDREPETKERPTYTNKQQRTKQEGAKQTQSATQRTDRAPERTHKGARKHEKHETQQAATETRRKTRRRTPGRARRARPTGERGRRKRRARSTAAWERETSARTSTTNHTAQDTPANKQGVAKPRPNREGTAEPAEEKKHPARTQR

SEQ ID NO: 994511 - protein, 78 aa, Homo sapiens
AVTGGSYSGDAIGALTVWEVVSLLGKLLGYSSSRCNVVLYLLRSVLIVWPWKVRRTPAHSVAKSHKYSRKKWKSSSTV

SEQ ID NO: 994512 - protein, 685 aa, Homo sapiens
QNEKLNRYNYIEGTKMLAVYLYEVSQLKDEANAHLCEAVIQVEDALTSMKKRRLGSAQYICRNQRNRVYLCIGERDTRRTNAAPPPNDTAENRKQTQSDKKASQRNERQRVQSQQPKRHDANAHTPHKENNTKTQRKNPERQRDDQGTDGHKCQAPARHTAERGNTTSPQRPSDMNQRHHPAQTAAPQATPDTHWGPQTQTHNENTRPREPEERAHQPATGEEVEGPEQEGESTTDDTLESDETHKQERRADKRQRANTERNEESRGPTKETDESKQESPTEEQTSVDKRRGQPRRATTERTGDGERGRQRQTKNRRTRAAHATTTHGQSTAQNKTPTPQAEDQKQSGDDQTGRQARAAPHATRQPGPTRHPRADAPDTTPQRREPATTPERRRAQQRTAHATGRRRQENEPGEEETRTDQTRTSAKRRRDQAKRAATTHRAHSAGSRRSSQHERARRAAAPGQQQRAREANRRRDHTTTTRKRTTTETRRESSNQQTARRHTQTQMTSRPAEQQPSQLTAQEHDGRPVQSRAAEPKRSSSKQDGRRASARRSAALQKRQRPSQRASRYRASACGDATAATASQSTQLAAREIDDDDAHTTHATASDPVKPDTSQHAHPARSTRTPSSRSHHITDHATRTHTATTGTPDHDTQQTPTAQHEQRTRRRRPAPPPNARPPLPLRCAH

SEQ ID NO: 994513 - protein, 108 aa, Homo sapiens
RAPPGVGGKADDLSPAPSFCPPIVLPSGTTGQDLGASSVDACALGHETPPGCCAGGAWVGAPRLTSGPINKQQWSQRNNKQTQQEGDRGQRRLSSRGSVKSHKQPHRG

SEQ ID NO: 994514 - protein, 385 aa, Homo sapiens
MLFAGYKCPPPLGAQDHHPECRPRRTTDPQEAFTNRRITDLISETVPAGVSDFRTVPCFPFAFCRDCQISKRPPTDHDFLYSLQNFWHGKAPVQLVKISISTRRYLNPPGAIGITLTSIYQSSLAQILLNCAALAKQRRNYPALTEAGDEEEETARSPWLTETPPWRCQIHMGWQILPPKHVQPVVREEAVPGRGTTELPRNSIPHSTAQTYRPRDPTAGMQTLQPARPDRMHNSCEDKSPGPNGLSWRAQTPTQLSDHRRQATRNPRQDHGNNTVTAPEDTQLYPKNKRTLDRTATGQPTRQPTPAGPARHPPLHARQRNGEPQTLPPRDSARDTAEPDGNSTEAEIRGPGDNKRQRQQSPTRPTPASEKRDSTQKTENTSGHD

SEQ ID NO: 994515 - protein, 146 aa, Homo sapiens
MAESSASLHANGASIFFICLFLHIGRGLVYTDHISTQKPGNIGIILLLATSSNSLTIGYVLPEEPHIILSGPQIITKLTIRHPIHWGRANSLNLRRLLSRQSHPHTILIPFTSSLPFIIASLAALHLLFFAQKRRSNKPPRESSST

SEQ ID NO: 994516 - protein, 144 aa, Homo sapiens
MPESQRFPLVGACLNICLGWVHLWPDESRRQSVTKSEGLLYVCPSHTKRSGSLPLGMVGITASWNGWVKFTRVRIGIEIYQCVEPRGYRTRYKKRRGVGAGTERGRGTRAGKESAGTVQKQTDYAGSGKSIQNSGKHNQQQALL

SEQ ID NO: 994517 - protein, 222 aa, Homo sapiens
STHASVFLFIFTQTGKKLFLLIQLFEYNFHPMAILGLEEVWGNIPCLVNGWSSSSKSEIIPREGQKVSEEPNSRIITGEAVLSPLRRNRYKTRAEKDHNIARKATRGEAVDTYSGAPQRGKRGKENSETKIADRGRTGHSVEYIVTHSYHTRECLNSCHRGEPQKRKRGGEPQRATAQHVTGPRGAGGAHKAAALSKRGDRGYQHLWVSTHAAPLHRRDVTH

SEQ ID NO: 994518 - protein, 159 aa, Homo sapiens
GFDFYSHIYNHLEIFIFFERSLPLSPRLESSGTISAHCILHLLGSSDSPASASQVAGITGVCHHAQEIIVVLVETRFHHVGQAGLKLLTSGDPPTLASKSAGITGMSYCTRPNQAGVQWWDLGSLQAPPPRFTPFSCLSLPSSWDYRHPPSRPANFFVF

SEQ ID NO: 994519 - protein, 102 aa, Homo sapiens
MTLGHTMIYLHTSRRATRTPFDLAEGESELVSGFFNIEYAVRTPSPYSSEPAHNTNIIIINTLTTYNHSVSERTILTYIISPWNIYTKHILFTKDPYFVNHP

SEQ ID NO: 994520 - protein, 40 aa, Homo sapiens
MQYQHFLVDYATHQRARTPLTDTETELRYWSNLYTIVSAT

SEQ ID NO: 994521 - protein, 578 aa, Homo sapiens
DTWMMGSEITELPLKGAWKEGGAYGGRWLSLCWLPSDERLIFMEAQRTNVKLTKKRLMASNSEYQRDKRIQQQKDERRTEDNNQVLSTEQGVRDGIRRGALPRRRARTQPTEPPPTILAAAHQEARQTQRSERRLARKRKKEGKSERDNARRIKQERDGEGEHTHRRERGEPTSRSGQHSSSEHTTGLPARRGQRGRWGENSEDHTQRRGLQRTRTTRRAADTGAHTPRRREEIDYECVRANEQRPRDNSKPGENRRRTQLKKGAERQAGESRLQTRGGKSDRRTDNKRERRSRRAEEAHEAPPIGTRGGEKSSARSRGQRPHRGDGPSRGEKRGEDNNETGGRDQRTRRREENEKRERKEEKEEKRESRRRKTRRRDNDKTTEKRAERETRQRQRERRERGQQRREEREEGRRRARKRRQARREKEAASGAQPRGESSGEGWSRGGAAHDRGRDEEGGKARVEGKGEQDSDGAQGERAETKRTRRRGTRRATNGTRRRTDRARPEADEADTRDETERRSREETEEKRGRATGDQSERDATRAQGGKAERRRQGAQEKQRTRARRDTQRPRGREREQR

SEQ ID NO: 994522 - protein, 175 aa, Homo sapiens
MDSYKNKTKQKHNTTNRKKKKGGRPHKKPHRRGATTNQGYTSYMRHKKTTKKEHKERRAEQHADPQHTTQQDEPRETQRRQQAHTPRRTRPQHKQNVETSRNTHMVRTQTHTRTHEHTTAAQQAATQQQPADKEDKKRVKNNDSPTTNRQHNRTKQDREKTKIDTDKQPQPESRK

SEQ ID NO: 994523 - protein, 75 aa, Homo sapiens
KATRIGGLGSSAVSGGSAVGMITETIIETDKPKVAAAPARAFQAPSKALKLEPKEKEVDNFVDELKSEGEIHHVL

SEQ ID NO: 994524 - protein, 103 aa, Homo sapiens
MYVQLYLAYKLYMTQHISPHSDTIASRHIYTYNYPNNPPALKRPVYPETAKVHFPAVNLQTRNVDRFNSSRQFSVISCSLGHKIFEERYRNPATFHPGSGQCQ

SEQ ID NO: 994525 - protein, 171 aa, Homo sapiens
EASILAVATGVVVGEDEGGNQSGEEIVMVEPYRLEGVFICRGKEDATGHLQNAGPWGISLMEVEESLESLRNVKNDNNYDVTKSGTSFQLQMHRQQATLWVSVDRDPHRNRGAKVLYLRGVSRAPRSLHVSEIRRVRMSLVYASRVLPTDLAGDTSINLGTRKMDLKINSL

SEQ ID NO: 994526 - protein, 69 aa, Homo sapiens
MRRAHTPHRREDDNPAAGGGIKTQQEGERVKGVDHTKHNKQPGAKKNDAPPREEADRNNHRGGVGRKKT

SEQ ID NO: 994527 - protein, 267 aa, Homo sapiens
DPRVRNTKWSDDAGAAGGPGGPGGPGMGEPRCASAAGFGHVCILVVRGRWAWTAWARGPEGTQEHRRRQWTEDNRMWIARHQVGPHWIKDMKDQVPCDEMNLFFFSPVPLDGNHEDFTSIFFRYCEGPSSQTESKGIFDDDLMPKSHGEPMTPVSPGRSATRVLSRGILVRYTRELTNRHKRSVYSRVRVNVGLPKGKDWHKSGQFQVECGPFPFPWRFKMHSSQLQDSTPCWAAKVQGLIMGGRNQNEILGKGPPHQLVPAYGQSG

SEQ ID NO: 994528 - protein, 179 aa, Homo sapiens
GTRNGRGPPPPRPPASPQTSSQPHRVSPPELERWGHLDGHEGKRLSVTTQAEQTHDRDAEGGAQERGAGRRLHHRTYQMTSKPITSLASETKHITLDGPPQKTGGTRTANATLQSDQPPRRRRHKRATRRAITGIETPERTQGRQHTRRYTHTKRGKRPQGIRQQPMSGPPQPETRAHN

SEQ ID NO: 994529 - protein, 124 aa, Homo sapiens
MAQMTANSGRAADPISPEGRTQEQTPGHGEAGGATNQGAGPETERETHRGGGDPRATLDARRQAHAHVDTTLRRRQHPHGRGGTKMRPRHKQRQTLGAADKHRPEVTEHHSQDVAGKLLGHHTT

SEQ ID NO: 994530 - protein, 111 aa, Homo sapiens
MVGSTMQIHCTVLKSSDTTCINEDKKHELNCNVSNETNGMSCNYTVYKRSGGVHWIKKRLAGTTDCERLSGVKCQCNVREWALAFDVCGSLVYVGGLGFVTYKIERANQGY

SEQ ID NO: 994531 - protein, 272 aa, Homo sapiens
MKTPLSVRGYIHCGGTAETVCVSTPVWARSLSQETEALSLCGSHQRGLCVRRRTHNPPHGGKKWGCCGSTPNSLLQRKQQSPKEGRKPPKRGGGTIRLCGKKEALLSKTTHHRGGVLCAPSEKRHIYSNTKRGAQSLFTPRRQCLQRKYLRGAPPTLYPEDYILSSPRQKGGRQLQTPYIPSRSSLSTSHNTTRANTTTCGRTAPDGRRGNTPPHLTQGGGKERPGGRQKNMRAQRECGYPRRIELTPRSTWLETAQAGSPNGGGGTNTWAG

SEQ ID NO: 994532 - protein, 130 aa, Homo sapiens
RDLVEAVAHILGIRDLAAVNLDRITGRTMENWNRLMNVEVRQTLERELNLVLSVREVRQLTLRKLQEHVHQRRMRPASWHAPRTKEDGSGQTEESDEPAHPMMVNPEGPTLMRINSVQSSERPHVPGCNQ

SEQ ID NO: 994533 - protein, 35 aa, Homo sapiens
MGARRLEAREDIDRSNQGVHWLGRDVGNGIILNGN

SEQ ID NO: 994534 - protein, 322 aa, Homo sapiens
MLGFLTDGTTRTTNGLADHTQRNRRHARLNGHNATVASTNVGSDNNNSPSLATSKLPHDYELTDGATRELPKRSLDPTAHGEGITLRQLHTHFTSALTRDELWEVHAGAVPTLGPQRTRASASLHFLRSEATTQRRNNTHTSIHTLCYWLPPRKLFSTSLGNYPCCTRRPNLSVHTNSWKPVNLHASAGEDKNPLGQRIFPLLRAILRAARIACQTTHAHNTLSAHTPSIKCTRKLKGSNTTLAITQTVLFYLDTCARGNSTHPEANLTDDTFLLTAQVSLLNKHHLPRPCGNYQAERTLILSNFAEKGKAFSRKAGIERYT

SEQ ID NO: 994535 - protein, 131 aa, Homo sapiens
MLAQWLRPKRQCTLKLDYIQGEAETTYSRTQGCRHWIDRSFLVLEIDGRSGISGALRVYVAVGAITRIASSEEHQPVPREEQIVPRAIPVSRYQISWEEVVEQVAEFRIRGLSRVVQKPGLVTKGQFEASD

SEQ ID NO: 994536 - protein, 112 aa, Homo sapiens
MVRSSNGFRTWVLFSCDHSSAHCMKTGLSQCFNLTRAVSWSTPRSLLVPYDSPHQMTLAKSRFLCGQGWLADWWKVGWTKGGHVSSQHQFCTSSASVLVGVPVSPGPGWARA

SEQ ID NO: 994537 - protein, 138 aa, Homo sapiens
MCGTITNVFCAKRAKRVQSDRRLDNPPYIKHNVWGSASGEKNTEIAEGSAGTTCGKSSLSEILVGEEAQKTNIYPPGRDGTTGNCGAPGDEPTLLDRGLIPTRERHTRQHTRCRCQPAAGMLSSFLGRTTAVVDHTGA

SEQ ID NO: 994538 - protein, 211 aa, Homo sapiens
MKASCGTLREYKVVGLAESLRHPTEMRTRRPVYPHAKSFCRPYNSLFSRLGSRFWYFVLSRYKKDEMIVLQREDCHTCVVRLCEEVHARLRVNELSWIWLAAYESRSWDAQETCTGNTWDLITVVRMSAHVLAETVECRGSGPECHSIQHHEGAGASLAEIECRSAGLSEQIAMTPRSRFPRVHRPGYLAPISNEVTLRQQGEAKKPFCLA

SEQ ID NO: 994539 - protein, 174 aa, Homo sapiens
TRLHAVSYSKTQPMTPNRGPLRPSVMTFRAIAFDELSTSASINASFYTYVPVLNLNLHVSQYTKWSGADVARGKHYCSMDHTQHLPCVHTNGAFEISGDKSIVLVTISENCVFFRQWIRLSPCLPTREPLSRRIPSPKLVEVSPCAPSRIASIQPGLTYHHQKDPNVHVITQSR

SEQ ID NO: 994540 - protein, 297 aa, Homo sapiens
  misc_feature (158)..(158): Xaa can be any naturally occurring amino acid
  misc_feature (189)..(189): Xaa can be any naturally occurring amino acid
YTKEQRLLDPKATGQKNTHLCASPVPTTPFLSAPAPPNASPLLPHCPYGLGLLTSLHPSGLWPTRATALAPGQLHSTSHSFQASASTTWLLLPSLGTGTLQPHSLHGQLLWAPLPGAQPPFSTPSYPVCLAHPSPEHPSLPGNTLVHSGQLRCHTRQXYHAASSSPCPLLQRLLRFPTAATLLSRFNNXLSNAAQPGSGLPHMHSQLAASPQPERSSSPVGLATLALAQMCYRNPCPPCPPKLISARLNSATTDSEQGPRRPHLRPDLCLRPCARTLPSLSRSASWRLHLRAHSALT

SEQ ID NO: 994541 - protein, 100 aa, Homo sapiens
DRADGRVVEGNHTVYRISAPTPEEKEDWIKCIKAAISRDPFYEMLQHGKRRSPPQRDTEGAPGHGQPMRLWPFLLPPLRALWSQAEESRGLLCQFLPFRS

SEQ ID NO: 994542 - protein, 148 aa, Homo sapiens
WSHASIDHWCTLWRLGHGEATFMTSTVFHVPDVADMELLACCSPDYGHSLCPGGGHALDGSQSVLIDMKVSMQVDVCVLRCYVGLHHETAWSRQGLSDSPMCISDFDALCTDRCAAPVAFRDFSVLHESSKGDLSRCLAMNIAPNAAL

SEQ ID NO: 994543 - protein, 269 aa, Homo sapiens
VDPARELKVLINSLLELLTEVGVSGQGRDNALTLLIKMVPRKSPKDPNNSLTLWVIDQGLKKILEVGGSLQDAAGELTVTANSRMSASILLSKLFDDLKCDAERENFHRLCENYIRNWFEGHGLAGKLRAIQTVSCLLQGPCDAGNRALELSGVMESVIALCASEREEEQLVAVEALIHAAGKPSGLFITANGVSLLKDLYKGSERDSIRIRALVGLCKLGSRGGTDFRHEAVCLKGPPSNGKQCRKWVCNDPDVAGTPGRAREGLGYP

SEQ ID NO: 994544 - protein, 233 aa, Homo sapiens
MGCGTSDHSELDLRAPRYKLGPVRETPKLLRENTWAWSLKRPMPKLHSPNAVIPLPDEKLFPQQFNKLSHKKQDKVAHEEGRHWEYWRRTILKPKVGLVPRSPCHLGTPHESCNILAPRVRSRSRRRRLHDRKEPYTLLVWVTMGPTIGTPVWENPRKDAHFLRLGLPKASGDPAFRYMWVSKTQKLRSQQGGNFGPRNEKLYNWRGERLWAEKATPQGGTIGLRVVTRHSLY

SEQ ID NO: 994545 - protein, 242 aa, Homo sapiens
IKPTDSSMVVRICHLRLAESEALMLALMVFSMDKVCKENINDKNFSFWPWIDTILELIKKHLLCLWNDGCIMGFISKERERALLKDQQPGRSCLDSVRAPGKEAITFTWVERSQNGGEPDFHAVEPYTKKELSAVTFPDIIRNYKVMAAENIPENPLKYLYPNIDKDHAFGKYYSRPKEAPEPMELDDPKRTGYIKTELISVSEVHLLDFQTTDKLFPCLQRSLMKMFPDSGPEFDSMMSPD

SEQ ID NO: 994546 - protein, 358 aa, Homo sapiens
MTQQNFMLMKQRGVGGEVYSQPPHMLSPQGSHHGPPAPSENAHGVPTTFGRRSVIHWTDQMGYHRRTPCRHGQTCTFIGSSPARGMEPEGNDSKIRKHYNQRFVPHQLIWRLDLEIAGSGGERLEMREEELDDRERWHIKMESQNGARTDIEGKLARSGGYGGLPTTRRSDYGDAQSSTGHNPKGNLEHTITSQQYRNHAKRRPQNVRKHQSVNNDKRDAIKERTKKDKSPREHNPEHKKTPHPLTQRTNTELHEGERNAPRENWAEQTPRREARNDQQRGSKRKTSGHNTTTIHHDTETPTQHIDNDASEQADSNEREHHEAHIQSKAEHRKSPNSQSLTTHNVDKTHAHTTPQEHP

SEQ ID NO: 994547 - protein, 282 aa, Homo sapiens
ARAWSAVRGGQRRLPPHAAPSLTPVGGQSAVLALATLSQPTVRPAAMTAEEMKAAENGAQSAPLPLEGVDISPKQDEGVLKVIKREGTGTETPMIGDRVFVHYTGWLLDGTKFDSSLDRKDKFSFDLGKGEVIKAWDIAVATMKVGEVCHITCKPEYAYGAAGSPPKIPPNATLVFEVELFEFKGEDLTEEEDGGIIRRIRTRGEGYARPNDGAMVEVALGSYHKDRLFDQRELCFEVGGRGKSRSGLWGWEEAIGPGDRGDSIGVLKLVWLREVGTGGPNP

SEQ ID NO: 994548 - protein, 108 aa, Homo sapiens
SGAISICSSSYSWLLHRTYNRSRHSARCQGPRPERYIVSARVSLTMHVAQLGCHALRCPNICAHADAVAAGSSSIVYCFPEISDRSYSTLLTQKEAARYQNMGTVNLE

SEQ ID NO: 994549 - protein, 249 aa, Homo sapiens
KKKKRDDGIREHVNGLCTDRWRDSYSIDKKDKLRYLNSSRASTDEPPADTQAEHPSTDPRIHPGRLRSGVRSRRRAAVLLHWQLVTVTCIKFKTGSSAGRKKLKFVRRANIQNMGLVQPVEPIRRTDEMVIEGQWAKKSSVQVIRPTMRGRKTYIDGRRRQYGTQDLPMYQGVRPVEDASTIQTASTEWTRRIISSALPSQHTDGNHTKLDYSPRVDQRERRQQKGRIRPTTYAERKTERERGDSPMTI

SEQ ID NO: 994550 - protein, 146 aa, Homo sapiens
QLGPPPAYPCAPAFGDKFSLEEAYPRNSSIAALRLKAKEHIQAMESPGKPSRGAAELLRALCAPSPAWWPNFSLLALLQAASQPWAGHSRLLFERGQTEIQPRCQRDKLRVPLSTPLLAAPISISAYHREGPRILTWDVPDGRNGE

SEQ ID NO: 994551 - protein, 189 aa, Homo sapiens
PKFPTECFFLTLHAHHLSILPSCRRYIRRLRAIRELNRTVEDLKNNESQWKDSPLATRHREMLKRCKTQLKKLVRCKACADAGLLDESFLRRCLNFYGLLIQLLLRILDPAYPDITLPLNSDVPKVFAALPEFYVEDVAYPDITLPLNSDVPKVFAALPEFYVEDVAEFLFFIVQYSPQALYEPCTQDM

SEQ ID NO: 994552 - protein, 275 aa, Homo sapiens
RETWRGRTLAAGVAATTTQKDEGDSSVSRPVVEVFGKLKDLDCPFLEGLYITGVQDRQFRNCCGRPLRVPLGTILEWMCTRVWTPTLTGRGCSLTERWSQSRGEDAKKMSRKLGHEADDCVQLESDPEELLKGRVAWAQKQLQHYTGAVARYHSGGLTIGVLQLLDACEVEATCEDKLREKNEGLSGGALLLAPIVGVCFLNHEWNGGPVDMHPLLNKQSDDWQWGSVSAKSEERRRWGRCQAGAGECCRVGRRLERVLQSMSMGAVAQRIDRRQ

SEQ ID NO: 994553 - protein, 532 aa, Homo sapiens
  misc_feature (173)..(173): Xaa can be any naturally occurring amino acid
ANVGEHGLEGFGNAYDEYTVEVSDDLSTIHRCRQRSASFITLACCILMQTSHLCQYAKVPRSWSLRNLYVKSKMTDSLSSGARIGLNLLCVKLLGGWKDKFTHLLDRVMDTHSIFRGLPWAQAALMDLHTRMPAITRKRTKLLNAASTIIPERNSYDHYHRQGDRLGSTLYDXLTPQDHLVLAQRANRRGPLIATLTFPIVQDYYRQRVGARVKNSCEWPNATRMDLTRRRELCPKSKRSPNEDLSRRIKSVTLSVGLTIRGGALWQAQVRDNKKAQSGLSISEPNIECALQIKPLGLYLTEEGNGGVPYGYTGRVGWPPQHKLKILSKGKGTPPGGWIEHGNIHFPPHMDKPSINPRNTNLNFLTVDDPQEGKARLNTMIVETPFPTEGERLYIEQVFRRSRGSTKPTLMELLPGREGRPKHSNNRSVPLMVNIERVREARMTALRTSARAHFWKAGTPAYARVGDTSEERVPAPVNKTQCEEGSNILAEAKQAHTNPQQLTSHRAGGVTNTNHPEVALTRRVRKNNQNMG

SEQ ID NO: 994554 - protein, 349 aa, Homo sapiens
  misc_feature (349)..(349): Xaa can be any naturally occurring amino acid
VERGKGREKVEGEGGDTTTTTITRMPDVKERAARKEPGAAESASRESRGGNTRESASSAQGHRSCRFNRRPSTAALTPGSAQGRGVKTAPRGPVGHGGLRTGPTSRCPQPSARAKLPSVTRGAPLPPSPGKGHLGGTPSSHRLGMTERVHDASKLDCQLARKEFIFKQPERQGQGHHAQRLLGASELAAVSRAPDFSCALELLKEIKKILLVLLVQGISRWKNEIEEASGPGSSFRQQADRGNLNVFLLSQYYPQLKGLCVDQKKNRPVTKTGNLSKPADGDDKGGDPRGCDQQNMGTWGIHNTKSPSPANEKLATKKGATTEATKTPRRYNPEGATRQKHKYAPDMEX

SEQ ID NO: 994555 - protein, 140 aa, Homo sapiens
MKRPQGSLVGPDYEQPPPNVMNARKGVFRITGSEGKPPFGLEAVDGKAFGLKHYNVGLSGDRGKNIGDFETFVGACRGCETASSTKINYVETRQFPLFGPPHLYAIFIYAHGTRNNNTHYREHTFYSARNTHITNIIQSG

SEQ ID NO: 994556 - protein, 171 aa, Homo sapiens
VAELLSQAYQTAMEQIRAGKLCLSSTVKQVVRRLNELYKASVVSCQGLSLRLQRFFLDKQRLLDGIHGVTAERLILSHAVQMVQSAALDEMFQHREGCVPRYHKALLLLEGLQHTLTDQADIENIAKCKLCIERRLSALLSGVYAYYLLPTCRVGSETWQTVLNTDQIRWC

SEQ ID NO: 994557 - protein, 172 aa, Homo sapiens
  misc_feature (71)..(71): Xaa can be any naturally occurring amino acid
MAPSRNGMVLKPHFHKDWQRRVATWFNQPARKIRRRKARQSQGAPHQPQRPAYGSHPGPSMRLPHEFGTTXKGAAPGRRGFKPLDGGLKGVGPGHFHKGKGGPGTIPGISCEIPREAGTQSTVVPCRPNVQPAARSTSPRLILFPRKPSDPKKGDSSAEELKLATKLTGPVM

SEQ ID NO: 994558 - protein, 70 aa, Homo sapiens
RRRRSRRVDAAEASMVSGGGAAFRGARGAVGPLVCDGRILESFVIYGGLIVGYGVSPVVFVDAWGWSAIT

SEQ ID NO: 994559 - protein, 119 aa, Homo sapiens
MQSVTVRRRVCQGRRIKPASVKPLKENIRAKKKLIDLESIPSKGSAKLGNPESLIAEPFSENATTVKVVYTVITRVTPVEGEQISFTLPRLQGPVDSVVCNNTRVKDAECKARVHRMHN

SEQ ID NO: 994560 - protein, 67 aa, Homo sapiens
PCLRTVTLTMRVGGFILDVSETKNPPIPDKYEMVPLGEERSCEGTVRRWPSTSQEERPNKKPTLLAP

SEQ ID NO: 994561 - protein, 151 aa, Homo sapiens
MRTKQRREKTRAEEYYHQKHNTEKKIIANTKQQLKKTYQQQTTYGRKNKQPPVETRGAAQVKRQVEATPTKTTAEVNKNSTPKEDNQIMKETTKQNYTTHRRKEEKARRKIYTTHTKEQTTNSQEESKYYHQEKTTTANPSGAQKQHTRGR

SEQ ID NO: 994562 - protein, 242 aa, Homo sapiens
  misc_feature (9)..(9): Xaa can be any naturally occurring amino acid
MRISKWELXELPEELRCDVSHCRRNGHWRACSTTAAARWCDACVSLRRQTRTARSRLQAAAEVLTLVSTHGPSPTRDRVDLRYEMTVVRFLHGKASARRVHVRTFQVHAVHSHEGWVRELYSAMVGLEAANTGGASLPSTRRGAHNSVGWGKESDEELDGKRKIVNLLLVLTWITIEETEAMSALVRITHVRNQINRANYARSVMGCDPESGATEVVRRGFGCKVTEPRGFKEEEERRTCTV

SEQ ID NO: 994563 - protein, 96 aa, Homo sapiens
ISLAGDMSCERTDEFDYADMEPSVNEVCIYSNVYISIGMSARRAIKLFNKLVLRIRKRYGLGNTKVAVTFYPVTSHGDANRDYMWVSHNRMEITTS

SEQ ID NO: 994564 - protein, 300 aa, Homo sapiens
MPFSKQSTSALKLRFPAEDEFPDRERSSTSHMDQGADPRACTRSCAPRARRASFTLDDVIQTGVDNPGHPYIMTDGHAMAGDEESYEAVQRISSKPIIEDQARRHTSPADEHKTELKPRATCRAATDHGTPTYVLSSRVRTGRSIRGILTSPPHCSRSKAAEPSDETTQRADSPEPHHGPGEPWTGQQNTKDASRRHDRPQEPASTTNKETHTSYETNTPRRIATCTTLRQREHYTQAQCTPTTHEKHGTKQTKDTYKTSTNERTTKQETHNEYSNDNKKPRRLPNDKQQRTPKDDDTTT

SEQ ID NO: 994565 - protein, 102 aa, Homo sapiens
ATCPPLTSESHSTEPHQRGTRGRLSAAASGPQGGPPGPCTLFLPTWLLAETCVTCCPSLTCHLSPYGDPLVASHVVVHICHLRSFFPPLGLSQVCFILKKYI

SEQ ID NO: 994566 - protein, 103 aa, Homo sapiens
MAEKQRDASVRVSPGQQSTDESEEEQSESRNSTAESMDRLSSGEVNYFRRMRPSSMESPLTSFVLRERASVSGERVFMLTVECLEGELSRSKIGVACERAVCK

SEQ ID NO: 994567 - protein, 120 aa, Homo sapiens
MQACFLKCLLIDGVRIYGAKLTPEDLVGEVLTRILGARGAKIPLLRTGGGTGVKDNNIGVNYQRTLIEMSAAASLILDNITPPGAECSKRRGGVTNTQEPRAHDSYAYIESRTTHNYCSI

SEQ ID NO: 994568 - protein, 112 aa, Homo sapiens
MMKIDLLVSCIMMLLVIHLSCSSSRVSLFGIVLPNSSLGYRTKADRYYVVAQVRIYVLINRSMYFAIRVRTASNVERSIFAPYSSSATCRYNSKLYSSQNSIVHIVDIRISA

SEQ ID NO: 994569 - protein, 205 aa, Homo sapiens
  misc_feature (122)..(122): Xaa can be any naturally occurring amino acid
RVCGRVELRMSRRAVGSHGAQPEWHGYFERLLLFHKALLSGAVDIVVSYLRRGQVRFRDERIGPRQKPTGDPVIVVQYSRCLVSSITGPQSVQSSPHWFLSYPINVERGCRRAVFPFAALSXLSEGKSIKAGYAVPGAPILPTFKPITDWSHLVGNPKFRPSRFIRVLCNVPERKGVRERTKRFPRTAVRFSLFALRWPRNRRFG

SEQ ID NO: 994570 - protein, 355 aa, Homo sapiens
  misc_feature (355)..(355): Xaa can be any naturally occurring amino acid
SHVLSCMEKTEQCLLALLQKHLPGHPYVRRKRRKFPDRLADDEGDSDSESVGQSREETEEVKRQGPSEGAEEGEQEKPSRGVGEAGKLGGFKGEVTGASRNACHAKLGLLLQFPMGPFSSKGKLLGSIMLSLMSPAQKSSQQKWSPPESGRSLGMDSVSSARALLLSLLLLPHYSSCQAPWPQRGCCTPTVGKERHLATLGEVWTLLNLYLYTSPISLRPTCLFPLLPLRVTVSASAYRIPVPPDLGTGGARVIGPIRTPFEKSEDLTVEPTAYPVRPYRQTEISDSNKGGGYTSMNEKRLRKECGTTPHITKLCGNKEATVLKREYKSRYNRLVRKKEVQEKRIAARATSVVVX

SEQ ID NO: 994571 - protein, 162 aa, Homo sapiens
  misc_feature (5)..(5): Xaa can be any naturally occurring amino acid
LAATXVRGLQLAGSGRHRLVQAVALRDVRACLTVLCTRGPLADYPRFVESVDEYQFVEAPGYLAIRDPQIPQEHEHYRYALVELAGSQETPPTKLTLLGTDSSSVMLQNAPVAINGLSAHGNRQMTVIRESVNGDIWALQKDVADFLSPLLGKTPVTPGQLR

SEQ ID NO: 994572 - protein, 314 aa, Homo sapiens
WLQRVTWDNAGKEREAVQLMAEAEKRVKASHSFLRGLFGGNTRIEEACEMYTRAANMFKMAKNWSAAGNALVKLPNSIMQLQSKHDSATSFVDAGNAYKKADPQEAINCLNAAIDIYTDMGRFTIAAKHHITIAEIYETELVDIEKAIAHYEQSADYYKGEESNSSANKCLLKVAAYAAQLEQYQKAIEIYEQVGANTMDNPVLKFQCQGLLSSRRALPLHSGMSLEAKACSGQIRRKCSGDFKDSGEVILENLLEAQRHEQVRFLKPEGVGPITGSGRPRCVVQISRGKEMTGGHLCAPYYGGNAYTPLCFPL

SEQ ID NO: 994573 - protein, 70 aa, Homo sapiens
YYYYYYYYYYYYYFERESLTLSPRLECGSTILADCDLCLLVQSNSHASASPVAGIAGERECYHTQLFFVF

SEQ ID NO: 994574 - protein, 77 aa, Homo sapiens
ASFVPHCNQCMRSYMDVPERLSSYEVILGLYTMTLRPLRILVHQGVLYASRLISLKHSTPKMPSLVWHICLSTLSVH

SEQ ID NO: 994575 - protein, 101 aa, Homo sapiens
MGECNPPGVRPTKCNRGPADNDGAEALNTVKCSPWNTGDAPQPAHKQHVVQSTKGAPGDTTRRPIQRPVAAHTTINDDTQRRCHTTADAPTPAAHAKHRTQ

SEQ ID NO: 994576 - protein, 614 aa, Homo sapiens
ALQAGGFGTIARPTRSVYPHPPKNTGSLKMAEPGYSHTNLKLYSQSVQYPPIYNNIPTGQPILLLIATHFYIATAPIPNCLPNRQTFLALLTTTYAHQATKTDEATPPYGLYSTTPYRLTATNKLFTHKAATIQTPDTTHTINHSYNNTTPRTTIASSTQYRPTFHNLPANAPPLNPTLHRYIPPTLRITNILPHAYQRYHHLNLSLETNDKSPYPNDNTKKPAYFTLRQYRTHRQTHTAARPAPLPTQPSDRPAQTTQGRHGPDNTCDKDTERQPKTDKHHSTDQSPAKPTPTPLKTNHTKNRDQTNQARNQPYSHNRTGARHTSAQPIQYTAHPTRKHTHTPPTSQQQAQHPAQDTHNAEHTTREGHTQVGADNPTLTATAPPAPPAHNTPKRRTPHTHRATRHPMPSTHSTRSTGSATPKRNEQVNARDAMTRPRRRKQATRSTAHPSAPHQPAPTRPRPSKAPAEQRQRDRGRLTHNHREHTQHTSTTAPPNATTPRHALGTQIREPARDSDVTTQERARRGCTGRQTPQQHDRARRPTTRESITQQKNTHLLTAHDDTTEHTPRKDTQTYSHHYHPLNAQQPTTHRQPDARAEQSRHGRNTRQAQNHTT

SEQ ID NO: 994577 - protein, 231 aa, Homo sapiens
  misc_feature (219)..(219): Xaa can be any naturally occurring amino acid
TSSTHEVMGPKKKHLDYLIQATNETNVNIPQMADTLFERATNSSWVVVFKALVTTHHLMVHGNERFIQYLASRNTLFNLSNFLDKSGSHGYDMSTFIRRYSRYLNEKAFSYRQMAFDFARVKKGADGVMRTMVPEKLLKSMPILQGQIDALLEFDVHPNELTNGVINAAFMLLFKDLIKLFACYNDGVINLLEKFFEMKKGQCKDALEIYKRFLTRMTXVSEFLKVAEQVV

SEQ ID NO: 994578 - protein, 156 aa, Homo sapiens
MPLAFYVGALAKGLVVRKGIPLELENGRSASTWALGPFRWSPIGQTVVQWVGPWTLPVLRKTLANIIRLTFKEGWVERRACRRGPLQGGASLGHYHLEATRVALPRTFQQRKPNSFHLSTLGAGIALKDHFGQSSISWYDNRIGRFTANQGGVGPS

SEQ ID NO: 994579 - protein, 133 aa, Homo sapiens
MIGPLHSRLADRARRPCSEKNKEETREPEGRGREKNKTQPSPRGNALAPPHGGGAPEALSKDETTQKQGAGPPRGQRTRSHIPPQTERQANQETQQQQGDHHAPHTRARYTEDLATAQRNQSPCTRTEPTHPT

SEQ ID NO: 994580 - protein, 158 aa, Homo sapiens
MAFMVKSMVGGQLKNLTGSLGGGEDKGDGDKSAAEAQGMSREEYEEYQKQLVEEKMERDAQFTQRKAERATLRSHFRDKYRLPKNETDESQIQLAGGDVELPRELAKMIEEDTEEEEDKASVLGQLASLPGLDLSSLKDKAQTTLGDLKQSAEKCHIM

SEQ ID NO: 994581 - protein, 74 aa, Homo sapiens
MRQEHLPPRHARGVRASRRPKTDNAETSPQHTREDRPERPPHTHIYMTAQPGNHHGKHNTRTEPQPKAVSQLCA

SEQ ID NO: 994582 - protein, 219 aa, Homo sapiens
TSCSTSLVTCHRNERQTTIELAKMFLNRINYWHLEAPSQRRLRSPNDDISGYKENYTRWLCYCNVPQFCDSLPRYETTKVFGRTLLRSVFTIMRRQLLEQARQEKDKLPLEKRTLILTHFPKFLSMLEEEVYSQNSPIWDQDFLSASSRTSPLGIQTVISPPVTGTALFSSNSTSHEQINGGRTSPGCRGSSGLEANPGEKRKMNNSHAPEEAKRSRVM

SEQ ID NO: 994583 - protein, 266 aa, Homo sapiens
YHAWLKTASFLRVSLATELGAGDDTVSEEPPACPAALSSLKLGDSCVNAATMNEVSVIKEGWLHKRGEYIKTWRPRYFLLKSDGSFIGYKERPEAPDQTLPPLNNFSVAECQLMKTEEATTNTFVIRCLQWTTVIERTFHVDSPDEREEWMRAIQMVANSLKQRGPGEDAMDYKCGSPSDSSTSEMMEVAVNKARAKVTMNDFDYLKLLGKGTFGKVILVREKATGVLCHEDPAQRSSIARMSRHTVQRAGLQYRPPLKPQVASDL

SEQ ID NO: 994584 - protein, 153 aa, Homo sapiens
MTPINKTAPAQEASSTERAACHVPHKPQGMGTKIPNTGMTEHRDTPTTHPKRTIAKTAGGIQTPERPTRRGKTLRAAADRGKPTLVPQGHSHQDGNERPHPKSAISTGGLSQGTIPRKDTRAQATKAMGPAGEYTGRPTKRGDGTTKRPQPRT

SEQ ID NO: 994585 - protein, 376 aa, Homo sapiens
MEKSSYQRCRHGDTVDSGRRSDHYWPSASYKMPGGIGHIEQPIAQHICSKEAAEMGKGSFKYAWVLDETEQLSVKRGITIDISLWKIGDQTSSYVTIIDSARSTGDVLSKNDDYRDISGCTVLSWIVASGVGRIVKLVISEEWAEHESMPSRGLQQLGVKQTEVVGVEQKGFTEPPYSQKRYEEMVREVSGYIKRIGEKHDDRSMVQILVAWGQHVGDKVAKNALGTRELHRQHGKEMQKPRGNKDEMSALHLAYKQQPAPLQNATVPDLTGMITTWRTRGKATRWTREEHVAPKDREGASMDNATGHTGNNNGRRTREATEQRTKGQREKRPGPPRARENKKTDTRPKKPQATANERIDRKDETEREDTTDTRQE

SEQ ID NO: 994586 - protein, 265 aa, Homo sapiens
KKRVFMGSAPPSCDFVDKGVLGVRRVRVGSPTPEVGCKSKVGCKHVQKKKQKKKKNKNQQQKQQTKKQNNKHKQQNTNKTNKQQNTQQQTSHTTTHTQQTTQTSQDKQEGENKTTDSEQARPQEGAEAVGTTHNSMRTHGQTHRSRRRTESRNKQNEKQNDAEKKYTITITADAHEHNKRRRARNRRDQTTDKTTRSVIPQTSREAARKTHKPTGESTTDATQKQQITTRPPTTTAPHQPSTHNEATRTTHTEGAQAHNTTKDRK

SEQ ID NO: 994587 - protein, 121 aa, Homo sapiens
MYFCQMLVVVKTINAAIGVIYVTGAAFSDPAFLRSKFYFGFIHLGASMAQNLREQELCVPVCVIFRGSSRLKFSSRTLSTMLTVQLTWIGKVLTMAIVGLCGIPLYPTGVCIGGSLSHVEF

SEQ ID NO: 994588 - protein, 241 aa, Homo sapiens
MGARALSLPVRVRCLSDDRGAVMIIFADLRDRIPYKGRLVGGIGLRSAGSGCSLEVQAYDYSEGATENAFYAPPVLVLCWLVREDVLGKAKYDDYRTCMREDTSKQYDDNWIDAEILRTFTGTFCDESRLSELIITEHDEDEASVESEGQDESRKVITNDGAYPEERDEYDHIGAAMMMNCSELGLGDEEGPDSCSIQLLKIRDKRVVLMSGVMTVRKQIEEQVMDLSTNFRWLIWWCPGV

SEQ ID NO: 994589 - protein, 106 aa, Homo sapiens
MELRIGDSDIGRKNTMYDVCVLVYTIPPGAVRNTSFLCRYASYTRVSAPMRFCVIELRIIIEKYDVSYRLFWYSGGHESGCDCDLSFLPRIQNHCACTNRIKMDEL

SEQ ID NO: 994590 - protein, 87 aa, Homo sapiens
  misc_feature (55)..(55): Xaa can be any naturally occurring amino acid
VYFADDWLITQQPGDCYEEMQSGPVDVSMWSCGVTCVGVPAIADGALQVQDRPGXWGFPPRALGAQRGPVPWWDDGWDLPVVPWSST

SEQ ID NO: 994591 - protein, 344 aa, Homo sapiens
AQDPERGPRAAGPVPDPSSMASWAEPSEPAALRLPGAPLLEGFEVLDGVDDAEEEDDLSGLPPLEDMGQPTVEEAEQPGALAREFLAATEPEPAPAPAPEEWLDILGNGLLRMKTLVPGPKGSSRPLKGQVVTVHLQMSLENGTRVQEEPELAFTLGDCDVIQALDLSVPLMDVGETAMVTADSKYCYGPQGSRSPYIPPSRPVPGSHPEDGRGWTLTWEMLKWARKRRWPGQTEAGSGGNAQYQGADLCAGRQFLFDLGHQGYSLQKPRGGLDLVERAEATRNGVTVEEALPGCSSNTPGGGPTELYELLSPINPRTSPCCPSWSNPRVLVRTQSRADNTEGR

SEQ ID NO: 994592 - protein, 264 aa, Homo sapiens
  misc_feature (29)..(29): Xaa can be any naturally occurring amino acid
  misc_feature (47)..(47): Xaa can be any naturally occurring amino acid
MIQRIPIAVERDCIDTDLRDLCTYVSVEXRPYREGPATHIVCVRISXYSALHSNQPSYSEASVHIAALDTMRLPSVELLSNALVSCRPNTSQYGSEERHWKSIVKLRSRHRTGGCYFEANLMTCLASAIGWDHWKYIPLIGYHRQCRIPNYPRGSPKVAVRGRVEMSQAGMWGADSWCSERITPTVKDDSQCWNGLKSVALERILDSKHSKERIFRKHGLRNERGMRENTPRLVDPTGTELIHYGLGLVGIEGPEGNIPGLKTS

SEQ ID NO: 994593 - protein, 105 aa, Homo sapiens
DSELQDPSEMAEVEETLKRLQSQKGVQGIIVVNTEGIPIKSTMDNPTTTQYANLMHNFILKARSTVREIDPQNDLTFLRIRSKKNEIMVAPDKDYFLIVIQNPTE

SEQ ID NO: 994594 - protein, 267 aa, Homo sapiens
ADMATLTVVQPLTLDRDVARAIELLEKLQESGEVPVHKLQSLKKVLQSEFCTAIREVYQYMHETITVNGCPEFRARATAKATVAAFAASEGHSHPRVVELPKTDEGLGFNVMGGKEQNSPIYISRIIPGGVAERHGGLKRGDQLLSVNGVSVEGEHHEKAVELLKAAKDSVKLVVRYTPKVLEEMEARFEKLRTARRRQQQQLLIQQQQQQQQQQPEIKTTCHKALEGKASRSIIRQSQFGKPGLRNPSPKRGRNPRMNPVKVGTLG

SEQ ID NO: 994595 - protein, 176 aa, Homo sapiens
MASKTTTTVTPKRIAHSPSLQSLKKPVIPKEFGGKVPTVVRQRYLNLFIEECLKFCSSNQEAIEKALNEEKVAYDRSPSKNIYLNVAVNTLKKLRGLVPNTVPNLSKASGRRVVSHEVVLGGKFGSKTSFSIEPPSSPRVEELKALTHQCPAGLPVQRSGNVLVHSEPLRDGFPFP

SEQ ID NO: 994596 - protein, 94 aa, Homo sapiens
DAFEKEETFALSSTKTLEEAVNNIITFLGMQPCERSDKVPENKNSHSLYLAGVYRGGYDLLVRSRLALADGVTMQVTVRSKERTPVDVILASVG

SEQ ID NO: 994597 - protein, 258 aa, Homo sapiens
PRLSSLLRGSVPRDTRAPSRSSLFLKPFKAVFGFLLSSQILFSPVKMVDREQLVQKARLAEQAERYDDMAAAMKNVTELNEPLSNEERNLLSVAYKNVVGARRSSWRVISSIEQKTSADGNEKKIEMVRAYREKIEKELEAVCQDVLSLLDNYLIKNCSETQYESKVFYLKMKGDYYRYLAEVATGEKRATVVESSEKAYSEAHEISKEHMAANHPIRLRLALKYSVFYYEIQKSPGGKGATGQNRLKKPCESTSGGT

SEQ ID NO: 994598 - protein, 106 aa, Homo sapiens
MRVWVPVGVLTSLAYCFHQRRVALAEQRAPNGQRPVDRNLLELKMVQVVFRHGARSPLKPLPLEEQVEWNPKLLEIPPQTRFDYTVTNLAGGRNYILITTLNTEDT

SEQ ID NO: 994599 - protein, 373 aa, Homo sapiens
CFICNVGKSEAQRPGERAAGIRGQASLPGSWSPAEVRAIRNNDSPIQEEEGSPCCHLISAPLLLPCSRAFSLEKTFKATFVLRASRHQLEKVNLANDMKILQGRILAGKLQRTPSADVLKTSESQKLIIHPGYLIQAPRTQPTKELGRLCNFGPSTMKYSLWALLLAVLGTQLLGSLCSTVRSQRFRGRIQQERKNIRPNIILVLTDDQDVELGSLQVMNKREKIIGNRVGPPFNNGFVTTAHVLSNQAQSMVNWEDTCDIPKVYTKMGNALIPQWEQMNETSDTCGYTRNRGKERLARPPDGNKGSKNTGQEESRNKKKQVRPGEKRQHHHLTQAAPDKDNKEKHQTKRDPVDTPEHTQKDRDTRPTSHPHY

SEQ ID NO: 994600 - protein, 95 aa, Homo sapiens
VSNPYYWKHLNIMSLHVDTLVTKFLNLSSSYSMAVRIAALQCMHALTRLPTSVLLPYKSQVIRALAKPLDDKKRLVRKEAVSARGEWFLLGSPGS

SEQ ID NO: 994601 - protein, 83 aa, Homo sapiens
MSKWARTKLDPLRYLQISLKRIWGHGPRSPGRDWTLPQGYRVQPRAWKLTPWNYRADVNEHTCLGNEHRRHKGRKRVSQLNSA

SEQ ID NO: 994602 - protein, 164 aa, Homo sapiens
MSGLPPGPEKGPTRGPFSPPFAPSFFLCPWASNGYPYSSSSSSAAASSSSSSSSASQYPASQALPSYPHSFPPPTSMSVSNQPPKYTQPSLPSQAVWSQVHLLLLPMAASWPTTTPIQALSLLLGVNLQPTQQPLHITITSSSHSNNIIMETLGPLHPERILTL

SEQ ID NO: 994603 - protein, 283 aa, Homo sapiens
SFGYQLEALVSCILVLASNSTPKGGTGVLHPGAGLKLHTHLQLVTGFVVIRRMHACLAQRYCSQPVVQCVFPSYRHDSALLSWPPVVDELSTQAKTRCDALEVVGHEEFLNPPRHLGCPGDSSCEVRTTVLAIHLPVHELGLLGLDGHFGPEAWAQLVDDLCIEAATIVHVTHQHGERLCGTQLLRPHVCDPKVVVGLPNCAEGYCVGHLETVAQPFVDCKFDTFICTGNSSALRWDSRTSRVGQASESHLRGARPCEPESFHTQVDPGRGARGIDRGRGGGG

SEQ ID NO: 994604 - protein, 99 aa, Homo sapiens
ALDCELRLSQGRMVATYKILALQPVFPKDSADKAFTCVFICGSSRLEQFLLSQALSRVGSPDAGLSRSLVQGEQKLLEQQEVAGPSYPRNLPRTMPRWG

SEQ ID NO: 994605 - protein, 239 aa, Homo sapiens
QVYYVEMTVGSPPQTLNILVDTGSSNFAVGAAPHPFLHRYYQRQLSSTYRDLRKGVYVPYTQAKWEGELGTDLVSIPHGPNVTVRANIAAITESDKFFINGSNWEGILGLAYAEIARPDDSLEPFFDSLVKQTHIPNIFSLQLCGAGFPLNQTEALASVGGSMIIGGIDHSLYTGSLWYTPIRREWYYEVIIVRVEINGQDLKMDCKEYNYDKSIVDSGTTNFVAQEKYLKLAVKSISS

SEQ ID NO: 994606 - protein, 363 aa, Homo sapiens
PLASSVLRILPAPHLPARSSGCRSAGTTLLGAAADMSAVSQPQAAHAPLEKPASTAILCNTCGNVCKGEVLRVQNKYFHIRCFVCKACGCDLAEGGFFVRQGEHICTRDYQRLYGTRCFSCDRFIDREVVSALGKTYHPDCFVCAVCRLPFPPGDRVTFNGKECMCQKCSPATLLGNSAHVAQVLRSCGGCGLRNQEWPGPGGFGQALGTWDASSARLVGKLLHAEYISKDGLPLLRGDYQRQVGIRCTLYNVLQGPVQQAEERLQPYVRIRQGPKVHKGQEIPVRHPQWASRSFSGHGSRQSEHPDRKHCRSPPDGPRCENSELLRSSFTSTYRPQIYTSRYHKHHITNTGDTTTDSPLFVY

SEQ ID NO: 994607 - protein, 201 aa, Homo sapiens
ENEPVNVEELAFKLWQSPVLKIPQTSPQVLRIGGIFETVENEPVNVEELAFKFAVTSINRNRTLMPNTTLTYDIQRINLFDSFEASRRACDQLALGVAALFGPSHSSSVSAVQSICNALEVPHIQTRWKHPSVDNRDLFYINLYPDYAAISRAVLDLVLYYNWKTVTVVYEDSTGLIRLQELIKAPSRYKSKSKSAASLWQ

SEQ ID NO: 994608 - protein, 120 aa, Homo sapiens
MDDNITVLLAIINNGSSMCKAGFQVTMLIFPSIVGHPEALESDGGCGSDGLLHGDEAQSKRGIPTLKYPIEQGVVTTWDDMEKIWHHTFYNELRGAPEEHLCCSRGPPEPRQRERYPDHV

SEQ ID NO: 994609 - protein, 307 aa, Homo sapiens
MAVLAPLIALVYSVPRLSRWLARPYCLLSALLSIAFLLVRKLPPICNGLPTQREDGNPCDFDWREVEILMFLSAIVMMKNRRSITVEQHVGNIFMFSKVANAILFFRLDIRMGLLYLTLCIVFLMTCKPPLYMGPEYIKYFNDKTIDEELERDKRVTWIVEFFANWSNDCQSFAPIYADLSLKYNCSGLNFGKVDVGRYTDVSTRYKVSTSTLNRKSNLILFPGGEVIRRRDDRKASGLGLSEGRDRDHLMGFTDQKLKGGLQERGRPTAWDTAMTGWPPIELARLTLRLLAGRLRRQIDPKNKFPL

SEQ ID NO: 994610 - protein, 108 aa, Homo sapiens
MAHEPSSPSSLVYLRRTTVVYSITYTHVPGTKHITRTAQHLSNLPNLHCILTHGHICAPVCHKRLERETLNSTATSLAPQFPRGPNVTMPFIGGPLTATARAWDQLPQ

SEQ ID NO: 994611 - protein, 292 aa, Homo sapiens
SAEGGRDRRDGRIRSEEVHREDLKECGFESSFKDKSDCDFPKNLEPWERPHAAREKEKKDALEKERKEKGRADKYKEKSSERERSDKSTLDKCQKDKEFEKCFKEKKDGKEKHKDIHSKDRKASFDQLREKKEKVFSSIISEDFSERKDDRKGKEKSWYIADIFTDESEDEKDDCVAGSFKATEASDTQRVDGSQKRRKDENNPRTGTGSPLLTGSTQRSQETKSPRERRRARDFGTREGQKAPWPDLWKPKERRQGVGRVLIPCPSGHLWDITRGHLLRGPRGKQEWVRRF

SEQ ID NO: 994612 - protein, 34 aa, Homo sapiens
MSPGSGVKSEYMKRYREPRWDEYAPCYRELLRYR

SEQ ID NO: 994613 - protein, 97 aa, Homo sapiens
LVVIKQNGAVITNKGRKQIRERGLACFQNWVEAADVFQNFSGGPGQLLEVQGNYLQKGLSWFPSLLRNVIESHHAVTESINCSGKNYVCPLWVLELR

SEQ ID NO: 994614 - protein, 97 aa, Homo sapiens
MGSFIGRKPVNQTLLPSRGRLMTKGPRFGTPIWKPAQGLKATFNKPEFPDRGERHTRGHGSSKSATIDRNTHKRPPSRQKRSKRDLTHDTTCSTTGK

SEQ ID NO: 994615 - protein, 97 aa, Homo sapiens
CSYNLGMVGAVVVTLYKMGFRKPPASFRTHHIERCSNQTLQRDGLSTARSLLFTRDDFDERNLCTTDTREPTFVERTTRVAINLALQTVDNDCALAG

SEQ ID NO: 994616 - protein, 357 aa, Homo sapiens
RVQELRPESGEEAVTLVERMQKELGKLRQQVTNQGRGAEVLLEEPLPLETAGESPSFKLEPMETERSPGPRLQELLDPSPQRDSQAVKERALSAPWLSLFPPEGNVEDKDMTGTQLPESLEDMAMYISQEWDHQDPSKRALSRYMVQDSYENSGTLESSIPSQEVSSTHVEQGEKLWDSSVQTCKEGMNPRNPVPGVEQVLRTKKEMLSLFLLKVPILQYYCLARLRRGGCSWEVPEAPEDIGINRTKALCERFAQRTKYTHPHGEPQVLRRRVPPKKGQESMEHRVGRNLLKGQPNMCPQNRATQCLAHQAVEPSWCTHYVTKQGGTIPHIKETNYLGHRRNCYAEISTTTVTVIV

SEQ ID NO: 994617 - protein, 71 aa, Homo sapiens
MTHPASEEASAAARAKTQTTRGEHDAAWQGQKHQSTTEPAAGREMKTSSPAQEHGTTQNISPNSRGENTNN

SEQ ID NO: 994618 - protein, 123 aa, Homo sapiens
MGRYNDLCLLEGLEIAWPLGGKWAILNKVHASYSHNMPHLTVAPQLAMVHLFHPEREKPRGMGRDRLDGGVRGKAHPFGASPLKCLSRTGLPRPVEERRGPLDLVGIKHILAARQYRLISNKN

SEQ ID NO: 994619 - protein, 293 aa, Homo sapiens
  misc_feature (210)..(210): Xaa can be any naturally occurring amino acid
MPHSYPALSAEQKKELSDMLYEIVTPGKGILAADESVGSMAKKAEPNGVENTEENRRLYRQVLFSADDRVKKCIGGVIFFHETLYQKDDNGVPFVRTIQDKGILVGIKVDKGVVPLAGTDGETTTQGLDGLLERCAQYKKDGADFAKWRCVLKISDRTPSALAILENANVLARYASICQQNGIVPIVEPEILPEEDHELNVASMYREGWXWLQGLSDIMVLEGTWAANGEPGSGLSYPKMQGTEPRTWPTPGPRGERKRATRDRDAGTPGAGTRRKGGKSGQGGPRSRRHKRG

SEQ ID NO: 994620 - protein, 135 aa, Homo sapiens
  misc_feature (116)..(116): Xaa can be any naturally occurring amino acid
  misc_feature (132)..(132): Xaa can be any naturally occurring amino acid
ATPHLVPDKLSQRIYRDRYGKAIEISKPGAEVDIVHRQGKRTEMTVSNTEAIILSEETNSANTVFCSNVDLTYHRKNFAMEKTEHDVKEPPRITTTKRMAKRIEGERRHNHRDGKXHRYLICSCKRYYDGVXDSK

SEQ ID NO: 994621 - protein, 224 aa, Homo sapiens
MAFLTGPRLLDWASSPPHLQFNKFVLTGYRPASSGSGCLRSLFYLHNELGNIYTHGLALLGFLVLVPMTMPWSQLGKDGWLGGSHCVACLVPPCSLCAVSPLHVPPRRQSCVHPAPCLGYVWSLPCRHPWSLPIIHWTLAETVASPVPDGFTACQVSRESLMPSQCRRLGGTGPVFGLVGAGQVRRRRRSLGVMCPPRGAPAPLGAPRWRGPRGATRGGGPARS

SEQ ID NO: 994622 - protein, 300 aa, Homo sapiens
LHDDAWTKAETDHLFDLSRRFDLRFVVIHDRYDHQQFKKRSVEDLKERYYHICAKLANVRAVPGTDLKIPVFDAGHERRRKEQLERLYNRTPEQVAEEEYLLQELRKIEARKKEREKRSQDLQKLITAADTTAEQRRTERKAPKKKLPQKKEAEKPAVPETAGIKFPDFKSAGVTLRSQRMKLPSSVGQKKIKGAGTDAAGTWCGAEPTPQRSWCILFHECGSDLVLLYELKAGWANCEYELKMLGERDEAWSGQSAGGLREQWATPVWGHRVWFWVLWAPRTPCVGGPHTIREEERPPS

SEQ ID NO: 994623 - protein, 121 aa, Homo sapiens
MAELGSPEVRVETEARRRGHTSSGFLPISQLSLCFSTPSLLRAINNYTMNVRSSYSYIGGGQGWTLCCFIQKDKGEESILLQSFDNTYIFIKSREPAPSSHYPIITLYNPYTLMETLTIKL

SEQ ID NO: 994624 - protein, 190 aa, Homo sapiens
VCLEKPKYRCPTCRVPYCSVPCFQKHKEQCSSEARPVEKRRAGPPVRSEESKDDDSSVADFLNSDEEEDRVSLQNLKNLGESETLRSLLLNPHLRQLMISLDQGDNKAKLMRACMQEPLFVEFADCCLGIVEPSQKRDSKTGCVLCSSYLLLLQEVAVFKATIRSMHTWVFLYHMARCSNFMKRKLVALE

SEQ ID NO: 994625 - protein, 167 aa, Homo sapiens
EAPSLPAYSPDSHYQLFLPLLPGSVSAMVELELVAPSLSCWARASFDLFDFCYHLLKVQRQDGKAEIIKNVPLKKMADRIRKYQILEPNEVKTIMNKYMKSAGDQTVTTVEHVRMLYQPPIHQSLDNTMHKQKILQDPNLGGGAEKPGERKPQHRLTSGYTLDNECD

SEQ ID NO: 994626 - protein, 328 aa, Homo sapiens
AAGGGLSRSERKAAERVRRLREEQQRERLRQVSRILRKAAAERSAEEGRLLAESEDLVTELQGRSRRREGLKRRQEEVCDDPEELRRKVRELAGAVRSARHLVVYTGAGISTAASIPDYRGPNGVWTLLQKGRPVSAADLSEAEPTLTHMSITRLHEQKLVQHVVSQNCDGLHLRSGLARTAISELHGTMYIEVCTYLIPNREYVRVFDVTERTAFTDTLTGPDLPQVRDQLRDSIGALGETATLGSLGTGKAANELRRKQNKSVFRGPPEGLTKNPDLVSKTSKRLTTLFVELLGRTDMCALTREGVMWPKKRRTVTGSTFVDPGEN

SEQ ID NO: 994627 - protein, 322 aa, Homo sapiens
  misc_feature (227)..(227): Xaa can be any naturally occurring amino acid
HWDKIAVSLPRSEKLRSLVLAGIPHGMRPQLWMRLSGALQKKKNSELSYREIIKNSSNDETIAAKQIEKDLLRTMPSNACFANVNSIGVPRLRRVLRALAWLYPEIGYCQATGMVAACLLLFLEEEDAFWMMCAIIEDLLPASYFSTTLLGVQTDQRVLRHLDVQYLPRLDKLLQEHDIELSLITLHWFLTGFASVVHIRLLLRIWDLFFYEGSWCCPDYAGMWALXGEELEQAGKQVQLQNAGEILADGSQKRGGSPKRGGPKEGRETKGGTATFGPGPGGAPQHREKNTGKVTLEKQLRKKQNEGCTPQGQKNTRLSSRP

SEQ ID NO: 994628 - protein, 235 aa, Homo sapiens
EEEEEEDEEEEEEEEEEEEEEPQQRGQGEKSDHALTEDSGPYHWGASSRAVLPTSCSTSPAGSWLFPLHEKRACAVGPKSSAAEEPSETDKRLTPRRWSLDFLKVSSVFKDEATCEDGSAVMQLDALMQKAFNSSSLQVQQLPHQAVVTHGSAQRVKQTGTRAYAKPMYWNALMAELNATMVAGTDYLTQGPLHPHECMAYVTQRTKQSTGNTDSLRRDKICANRCTQALESKPH

SEQ ID NO: 994629 - protein, 120 aa, Homo sapiens
MVLADLGRKITSALRSLSNATIINEEVLNAMLKEVCTALLEADVNIKLVKQLRENVKSAIDLEEMASGLNKRKMIQHAVFKELVKLVDPGVKAWTPTKGKQNVIMLLDCKGVVKRQHVQS

SEQ ID NO: 994630 - protein, 156 aa, Homo sapiens
  misc_feature (91)..(91): Xaa can be any naturally occurring amino acid
IYLTSAAPIIKELIHASCMYYYRVSTYCDRTRLMRVLHECSDLAPLYAIIRASQKRMHQRYPTYTNHRSRTSRRICCSSWKYALACLWSLXFTCIESPGLIPTYRLVCMSHLCENNVKSYEAEYRMRSCNLYLQKNATLLVAPSPHLVLIVEYRLN

SEQ ID NO: 994631 - protein, 270 aa, Homo sapiens
AEEGGEEEEEEEEGDGEEEDGDDDEEAESATGKRAADADEDDAPANGNANEENGEQEADNDGRPNERRKKVRAERGRRTERPVTGDATRRTGRLNDVTDTLKSSYRGNAGRLKMTEDWRLSTTTEAEDQTRTDIDQQNKAKVKLKQNNRPTEDLLQPYTAITEHTTTLHQWVTITEVRDVTKHRHRHKRKIARHRQRLHTDRHTSKTTPKRHTREHKEEKGSKDNKNRKHSQRTKREKKPTKDTQENQEKHRQRHTTQKHNKQQSPKDPY

SEQ ID NO: 994632 - protein, 31 aa, Homo sapiens
MSSALKSSDVDKLENNTSENPSSEYPMELGG

SEQ ID NO: 994633 - protein, 165 aa, Homo sapiens
MNDTVTIRTRKYMTKRLSSEENKLVIDVLHPGKATVPKTEVRDKLARNVQDHTGMSSLYLDSELISVVARSTGFGMIYDIPGIMREKKRIEPGSIDCARHGLYEKIKDLKKATKGTQEQNEESQGDWKANVGAGMKVSWRWITAEGVKVLQVMLAVATVDFAQEH

SEQ ID NO: 994634 - protein, 103 aa, Homo sapiens
CLTLHRYQMQFKFIGTPFKFDPCQKQGFKTSEEKVECRRTSSIEEVIDQTTALDKERQVFRRRRNQDVRSRYKAQPAPPELNSESEDYSPSSSETVRSPNSPF

SEQ ID NO: 994635 - protein, 259 aa, Homo sapiens
MNRKRRKRKGEAEGRKRQGTAQDGTGPGGRKKRKERRRGEEREKEKRRAATETKKHRQRRTDNRNEERESRDGDRTRERRARGTKGSEEGGQRNGTKKERATRGGQRRRRDRERRRGERREAKREREREGRKGRGGERGREERGGEREEERKRGAGKENRKDRRKKRKGRKKRSRNKERKKEQEEAESRQTKKKKGTKHRRREGDERRRGESEPKADRQQKGEEEREGEGKRQKEREEEQGGRAAEDGWNGDAREERRD

SEQ ID NO: 994636 - protein, 396 aa, Homo sapiens
DWTGTEGYIGGSVENTWGEGRGGKARGSRGHPLSQSAPFPHRDGEEDRDRQTNREWRRKTKRSASGEGGKETPRWSTTFPLRSEFHRDKEMAVDRLHSAIRRNKKKEVSALILTLLEERVDRRKAHRTRPHLAVCEWRVCVVPHENSVSILIRGPEGISQGQLHSLIECYGRRGNNSIEGSGSNFHKLGAGGEFDGQGAIYPGSLFTARGHVKQRGQAEISGIYPFPWGSPGEPLEGMDIAERDLGKCRDIASLPDSPKSGSVRNDGLPGEVRQTSLVARRGAIFNATQGPQKGQGTGWTTQGHSEVPSLGDLGDTQAYRTTQRHRDLPTNGGPEATEAPRCWGPHIAAVWFAAPPSQGTQSNGKYRDGRPTQTRTHTGRGDATTKSENNSGRGIP

SEQ ID NO: 994637 - protein, 314 aa, Homo sapiens
PENPEGQTGGDGALRFLGREGTLCVSRAVYACVCSGERRIALKQRPKSQRLLLRNTRGRRRKRVGMLMGGGQTSCPALELLRREPEDAVCGRDSGLTDGRTAARDWKVKLITNLVQHLTGKVYCFLKGYEYNRKVSLTELDLNLSLISYRISEAESMLSDELESKPELLVQFVQNTSIPLGQGLVESEAKDNYLLIPPSSDRGLRMPATNVYQMKLPKSWLNSSQGGCPFFSWFEGASGVMWAQGGKRTGGPMCKKSPEVWDTEVPLPGENYAQEWPLSLGTKEKGGPPAHGGVRKKQRRALSRPPETGPVRPK

SEQ ID NO: 994638 - protein, 189 aa, Homo sapiens
MVPPTTESGQVAAERLGHTQASPVSVTLETEPHTETLVCLSSSQGCSRAALCQCKDCHMGRCLGYLEGQDKRQGPQGTAFGAPRTTGPKNRLLPLQTGSLPTDDKGSQKVGPSWKKGYEMADSQGALDALAGSQAGHGHRPTPEGTNSTARNKAQRRNTWRPGTRRCDTETVTPDGTEPRGEAEKAQRT

SEQ ID NO: 994639 - protein, 317 aa, Homo sapiens
PGFQPPEIANGLDTFSGFKVDIWSAGVTLYNITTGLYPFEGDNIYKLFENMGEETSPSLVTAAHHSLTYSEDVEYEPAKRFSIRQIRQHSWFRKKHPLAEALVPIPPSPDTKDRWRSMTVVPYLEDLHGRAEEEEEEDLFDIEDGIIYTQDFTVPGVEEAAEAGLSEDACDTCMWKSQGAGLPGEEPEEGFGAFSVAPCLLPTMSSIKLCPLCLQVDACRIPSCHYLKGSQPAFENMLGQGWASPQARGPARSGALSWGDASPESGFKVGAGDSGHGPGKEVKAGDGGTGGTRMGPRMKPGRPSKQGESEKPEGRRK

SEQ ID NO: 994640 - protein, 142 aa, Homo sapiens
MYARRGPGAPPRDKTLFQVPLCMARHLCSGTSVCMNTRGDDFRHLCCIRTLKGKKRRGEGTICDVFSTLVTYKQRAIRTNRQQRSHYHGRKTNTHTASSRTADRVEPWPLPCCSDLAENSTRSDPSERGPTPPFCLIAKELG

SEQ ID NO: 994641 - protein, 154 aa, Homo sapiens
MAAAEPDADPKAAIPVDLRRERRLVCVEYPGVVRNEAKMLQTLGGEESVSRIYTDPTKRLELYFRPKDPYCHPVCANRFSTSSLLLRIRKRTRRRRGVLGDEAHPQVTFNLEIIGIISTIYKFQGMSDFQYLAVHTEAGGRHVPCVTEWSWRQA

SEQ ID NO: 994642 - protein, 268 aa, Homo sapiens
EEISINSQGEYEEALKMANIKQGNQLQMQVHEGYHVVDEALPKNVVENQAAARTGKKPLAHYSSLVRVLGSDMKTTEEPAPEQCSSAPCDTDQPQDKPPDWFTSYLEMFREQVVKETVEKLEQRLQEKLVLQKPLLSSSPTEVSMPISEETLFLPENQFSWHIACSHCQKRIVGVRYQCAYAHPTTFVKIVKLDHTPMTLTMFVTAAETCVISSEAIFLTPSIPLPRLLCFGTKSGSKKQVDQNPGGSRKGRLRVRTTGKASPELKPV

SEQ ID NO: 994643 - protein, 123 aa, Homo sapiens
LGMEPSSPLGEWKIQHCLWKTSWYHGAISRTDAENLLRLCKEASYLVRNSETSKNDFSLSLKSSQGFMHMKLSRTKEHKYVLGQNSPPFSSVPEIVHHYASRKLPIKGAEHMSLLYPVAIRTL

SEQ ID NO: 994644 - protein, 49 aa, Homo sapiens
MNGEKTETNNYNNDRRTETRATQAKTKERRRERTVNTVMQPHLFAPLYE

SEQ ID NO: 994645 - protein, 121 aa, Homo sapiens
AHLLSGRNLIATGISEIKKVYTRCWEHLVENEKGLKENYQQMYVVNIPVLTVQIKSEETIRPLSQGTSWNTSMESPDSSQDNDINNSDLSEDEIANQRYGLLYQDIEADKDEVLTLECSLD

SEQ ID NO: 994646 - protein, 32 aa, Homo sapiens
MGQSTPEGHRKKAGHEKDSRMQQNLFGVVREN

SEQ ID NO: 994647 - protein, 68 aa, Homo sapiens
ETVREHGPEEESGRGQGCQRPRSSPAAPLEQKGKPGRETNPSESSGSFQNQEHRELQLDPDWGGLQVC

SEQ ID NO: 994648 - protein, 195 aa, Homo sapiens
RSEAAPCTPSPSSPGLLATALTSPVQDPKTCSGGSAVLCRDVKTAVDCGAVKHCQQMVWSKPTAKSLPCDICKTVVTEAGNLLKDNATQEEILHYLEKTCEWIHDSSLSASCKEVVDSYLPVILDMIKGEMSNPGEVCSALNLCQSLQEYLAEQNQKQLESNKIPEVDMARVVAPFMSNIPLLLYPQDHPRSSPN

SEQ ID NO: 994649 - protein, 232 aa, Homo sapiens
VLNLKRTMNSFCQSDAHKMTNSLRKLLHVGSSEACAITEEADDLKAAVANLMEINQNLQWVQWERTRYATSKCTASSLHSVDECNENGSAQKTLLDEGYSVMGDCTSEMVSKSCNSSCEMHMVSKTNPPKQVDDQSDGLLTSNSCTVSQRSTGACFLTDGVYSHEACAQKEGVYEGACLSDETHIPIRDCHTIHSVHSKENKCTDDLESTEELKLLTKVPKVLASGEFYVSQ

SEQ ID NO: 994650 - protein, 318 aa, Homo sapiens
RQTPLGQWTLRVSLRHPVSLKMNVRRVESISAQLEEASSTGDSVEDELEMATVRHRPEALELLEAQSKFTKKELQILYRGFKNECPSGVVNEETFKEIYSQFFPQGDSTTYAHFLFNAFDTDHNGAVSFEDFIKGLSILLRGTVQEKLNWAFNLYDINKDGYITKEEMLDIMKAIYDMMGKCTYPVLKEDAPRQHVETFFQKMDKIKMVSVTIDEFIESCQKMKTLLRSMQSLKCGLDWQASSTRGRWERLHPSWEPPWLLMLTSGAVCAGCLFRGPPPHRFVTGRPAQWLFSGAGVPPLRDRNPVSVPRVTSPTRGR

SEQ ID NO: 994651 - protein, 69 aa, Homo sapiens
NSISCLLTHAHSSIWAPQHTHARTQAGIMHACKQRKSKRFQASAVRKTETKPSSQDRKMACLKLCGVRK

SEQ ID NO: 994652 - protein, 307 aa, Homo sapiens
  misc_feature (216)..(216): Xaa can be any naturally occurring amino acid
QTGLTPDAPLLDPCLPLDIKDEIQQNGQTLYLQGTGDFDLCRETLQPFMNKTNETQTSLNGVYQPPIHFQNSEFYGFSEFYYCTEDVLRMGGDYNAARFTQAAKDYCATKWSILRERFDRGLYASHADLHRLKYQCFKSAWMFEVFHKGFSFPVTYKNLKTALQVYDKEVQWTLGAILYRSRFLPLRDIRQEVFRAGHAQLAGRVFVYNHYLFFRXLPGRPSVHPFSSCLGGAITEGPRTGLCGMEEGCLPRPGPLWTHLGCLKKLRKPLPRFGSPVVALLVKTCCPCAAPGPSGGRVSPYLWEGRV

SEQ ID NO: 994653 - protein, 339 aa, Homo sapiens
MCSTKQGIIQDTILCDGPLGQSSRVEADPLARQHTSPNWGRTFTTWWDEPWATAYITKVHIRLLRDTILRCTPGRKERTPPYRPWAIIAYWVGRSTISGQEQMPPGFWCTHNPDRAPINEGESRRRITINPQEAMPGNPTGNMSARTRNWTDEQTRSAESGQCARTNIKQEDRWRTKTRYQSKVARTTQNPQAHKTRADTTDEQEKQMRTKRRPGHTTYQDMPTRPRELRTTMQEKDDNNNDKHTMENNQHNKKKQTNKSQTQREPKQENKRRRRKSETITEREGSTNNTRHTNKTNQQKPSRKTNKTDVQTQRKDKKTRTVDKQEKRDTQRQNHNQDK

SEQ ID NO: 994654 - protein, 352 aa, Homo sapiens
GVPWNFTFNVKFYPADPAQLTEDITRYYLCLQLRQDIVAGRLPCSFATLALLGSYTNQSELGDYDPELHGMDYVSDFKLAPNQTKELEEKVMELHKSYRSMTPAQADLEFLENAKKLSMYGVDLHKAKDLEGVDIILGVCSSGLLVYKDKLRINRFPWPKVLKISYKRSSFFIKIRPGEQEHYESTIGFKLPSYRAARNYGRSVWSITRSSDSPLQTPSPKASFLPWDPKFRYRGGLKVRPGQARALIETGWCPLGAGRRQRGTRDSRGTLVEPQPRADTLANQVQAGFKDAARRPLTQTQQSVRGDKNREKDADAREEPTQARGSTHEENKTTTPTTDTIQSTRGQRRQYR

SEQ ID NO: 994655 - protein, 124 aa, Homo sapiens
STHASPTASRKGFMLLTRRSRYAHSTTPRLSPPTNRTIPAQSTVRLTQLSHTLPYHHLPPHPQQHHISDTPSSLLLHLTPIPPPPYPLTTHRYSTLQTILTYYHLEPPPLQPTSLLTLTLYHFL

SEQ ID NO: 994656 - protein, 216 aa, Homo sapiens
MLIYIAENGVKVQSDTKDEVKLGQSCTVILMSVPSYAVKTVITGGPSCYHGFCRAPDSAVSWYLYAIHGYFCEVMFTAAWEFVVNFNWKFPGVTSVWALFIYGTSILIVERMYLRLRGRCPLLVRCVIYTLWTYLWEFTTGFILRQFNACPWDYSQFDSVISWGLITLEYAVPGVCGGPPSMEQVNHREKPRLGFDQGPKPGELAANSLARAVRHD

SEQ ID NO: 994657 - protein, 161 aa, Homo sapiens
TTVLTMSTIITGVNASMPRVSYIKAVDIYLWVQLVFVFLSVLEYAAVNYLTTVQERKERKLREKISCTCGLPQPRGVMLDSSYSDGEVNDLGGYMPENGEKPDRMMVQLTLASERGSPQRKGQRGSYVSMRINTHAIDKYSRIIFPAAYILFNLIYWSIFS

SEQ ID NO: 994658 - protein, 153 aa, Homo sapiens
EAALDSSVCFSRSVSLPVSLHSPERGRTSTSSFRKMSAPAQPPAEGTEGAAPGGGPPGPPPNMTSNRRLQQTQAQVEEVVDIMRVNVDKVLERDQKLSELDDRADALQAGASQFESSAAKLKRKYWWKNCKMMIMLGAICAIIVVVIVIYFFT

SEQ ID NO: 994659 - protein, 114 aa, Homo sapiens
MEMALITTKVVVVTSDDDPWVQNPQLKQSCVDMINEVDARWERDHYDFSGSFLYHDGPEHMKDYSSEEEIREAFRVFDKDGNGYIYVPQSLRHVMTNLGEKLTDEEVDADDQGG

SEQ ID NO: 994660 - protein, 78 aa, Homo sapiens
STHASWLHLDQNPMAISHGFKVHNISAVWYDCQVKNGTCSIQQTLPQLLTTTTATSIRLFYIDLPDYLPDDPTRDFVY

SEQ ID NO: 994661 - protein, 329 aa, Homo sapiens
KALLGVHGTLFPWLQRSYCQKFAMSILRIHAREICDSRGNPTVEVDLYTAKGLFRAAVPSGASTGIYEALELRDNDKTRFMGKGVSQAVEHINKTIAPALVSKKVNVVEQEKIDKLMIEMDGTENKSKFGANAILGVSLAVCKAGAVEKGVPLYRHNADLAGNPEVILPVPAFNVINGGSHAGNKLAMQEFMILPVGASSFREDMRIGAEVYTNLKNVIQEKSGKDSTHVVMRVGIGLTFGEQEAWELVKKGGKAVTDRGLGGGGAKIKRLQVTDQVSGPGFTRHRGGTSRNTGKTSREGAANTVGGDTQRRGKSTEQQTTRQNAVPHT

SEQ ID NO: 994662 - protein, 234 aa, Homo sapiens
PFSARVTWLKGGERHSALPESSMEQQDQRHEGREAERLCLTLDNPGLSAYGSSIPRYGILTSGGRWLSNIRTAHDIMRDNGDKETYICVGPVNSMEEFPLDVAVVCKRVHVTIGRVDRIPPGSALWMKTYWGHERGAFAVHTNNSCAYQCRAGSLDGMHAGVADLDCDAYHGFRKTFWWEYVQVYRSNVVPMYLGELGPYKDLLGGIIVGGVLRLFITVGILVVQILGLRNLLG

SEQ ID NO: 994663 - protein, 368 aa, Homo sapiens
GRVGFRSMKQQYEQKITELRQKLVDLQKQVTELEAEREQKQRDFDRKLLLAKSKIEMEETDKEQLTAEAKELRQKVRYLQDQLSPLTRQREYQEKEIQRLNKALEEALSIQASPSSPPAAFGSPEGVGGHLRKQELVTQNELLKQQVKIFEEDFQRERSDRERMNEEKEELKKQVEKLQAQVTLTNAQLKTLKEEEKAKEALKQQKRKAKASGERYHMEPHPEHVCGAIPIATNHGSHGTHHAYRTGPTVNLTLAWEHTHHSDENPEMSLAETRGARGGIEKDHSGSAHHKEARHQHRSTQRKRKRTERRGATGERRARRREQHGQRGETQESKREATDGATSTATEKKMRAQNTTQGKKEKKDDENK

SEQ ID NO: 994664 - protein, 153 aa, Homo sapiens
QFSVPGMPRARKGNALRKGGQRRGGGARSSTQADSGSSEDEAASEARSTTSDCPSLLSATTEDCLGGEAVDEQSQQENLEEKLKGYVDCQNPESQVALLQEMDNLMDMLVNTQGRRMDDQRVTVNSLPGFQPIGPKVGDVQITCETPHSSLNL

SEQ ID NO: 994665 - protein, 370 aa, Homo sapiens
EPRSAERPQWDSVLHRTSSPGNTLSLLQAPCALPLDKCRQGIVCNGALETENKASEQPAGFDTLQKYPTPNGHCANWEAGRSKDSLSHQLSATSCSSAHLYSRNLHHKWLNSHSGRPSTTSSPDQPSRSHLDDDGMPVYTDTIQQRLRQIESGHQQEVETLKKQVQELKSRLESQYLTSSLRFNGDFGDEVTSIPDSESNLDQNCVSRCSTEIFSEASWEQVDKPGTQKMTRWVTGPPVLATGMPCDRGLRSASWKPLADWGEVFWPLLYPRVRSLPVLKPTDGEAWSIRRPPPKRAPLDRQWRKPCRSAKEDQNRVEGKDGATDTHTWSETQSWRDGTLNTEEHKPPPSIKRGARVTNSQDGNPDDSYH

SEQ ID NO: 994666 - protein, 122 aa, Homo sapiens
MSAGKTLSMLLSYTGKAHDTRSFQATHLVPQKHTFLGDDSVSCAVEPGTATKMAGCVPLPLAYHSLSEKPTLTIRIHGSNKKQDKRDNRHKETKRRGAEHANNHYSPLERGTHNKTEQKARR

SEQ ID NO: 994667 - protein, 208 aa, Homo sapiens
CPTYSGPILPIQQVPTIPNGHSSSPPMAFQDLPNTLDEIDALLTEERSRASCFTGLNPSVVEEYSKREVEIQQLTEELQGKKVELDEYRENISQVKERWLNPLKELVEKINEKFSNFFSSMQCAGEVDLHTENEEDYDKYGIRIRVKFRSSTQLHELTPHHQSGGERSVSTMLYLMALQELNRCPFRVVDEINQVWTQLMNGEYLKWL

SEQ ID NO: 994668 - protein, 247 aa, Homo sapiens
MANWKPKVVFFQNSKYSPPIGKGENNFPNMHFAPGGASLCAFEQVSALLQKHVPSVGGRQRVTEFLSRISRSTFSNRGGGHPRPVHFSNPANAFCLDNRGNTERSPIMEERRAPPDGVCIHGGDTPPYADSRRGPQIEQDSGVKLPGGTTATGGPPQRCSKSRANTTQRNKNTQPMFLSNPSGRCQPLVCGDHPQNDRSNTTSRVVFYYTAGSPLGATPKSEQLYVVTIDKERFIIGHNQQLSFVFG

SEQ ID NO: 994669 - protein, 101 aa, Homo sapiens
LLRIRYPLPYPSHRPLDQVCCAGPATQTFFPHTLPQGRARQASWFQRLGWNGITQVLSCQSFITHRPIIGYLRYARPIPESVRDVATFWRCPSVTGPNTHR

SEQ ID NO: 994670 - protein, 102 aa, Homo sapiens
  misc_feature (48)..(48): Xaa can be any naturally occurring amino acid
  misc_feature (55)..(55): Xaa can be any naturally occurring amino acid
  misc_feature (57)..(57): Xaa can be any naturally occurring amino acid
  misc_feature (59)..(59): Xaa can be any naturally occurring amino acid
MGQVGRQLAIIGDDINRRYDSEFQTMLQHLQPTAENAYEYFTKIATTXFENATAXGXSXLGPVVALLGFGYRLALHVYQHGLTGFLGQVTRFVVDFMLHHCI

SEQ ID NO: 994671 - protein, 326 aa, Homo sapiens
ISTTKNTGFEFLFFETGLSLLPRLECSGKIAAHCSLDLLGSSDPPASASQLAGTTGMCHYTQRIFKLFVESGSPYVAQAGLELLDSSHPSHLGLPKCWDYRREPPLPGLKASFCSDFTPECFYAFALLVHGIMFDETRVLAPAFQQAWGCGWAVTLALTASLLLPGSSDPVGLSLPSSWDSRHLPPRRANHHHHIYISYTSNMLSKRDGVQHVGPASAPDTPEHPGQNPLAVELRKEPGPQGGSDHRGAPNISSPSPQSAPSNTENTPRRPSTPVTPRAKTLGPGAIPADTATHRQRENSGTKRDPNHGTTKAHEPPHALYHITGH

SEQ ID NO: 994672 - protein, 68 aa, Homo sapiens
PCSRGAGDLLVPLDKEGKVPLPLAMACASAWGPKEELDFSFTCPLAPALFQPSAMAEQVLVCGHRERL

SEQ ID NO: 994673 - protein, 295 aa, Homo sapiens
MDELQDVQLTEIKPLLNDKNGTRNFQDFDCQEHDIETPHGMVHVTIRGLPKGNRPVILTYHDIGLNHKSCFNTFFNFEDMQEITQHFAVCHVDAPGQQEAAPSFPTGYQYPTMDELAEMLPPVLTHLSMKSIIGIGVGAGAYILSRFALNHPELVEGLVLINIDPCAKGWIDWAASKLSGFTTNMWTEFWSSIGQDELRPIGLIQTNERTCQDINEKTQTRDYRANRDRSVMANEKIGRQGSLRRGKHAKQGGDNRPKSRDGEARHGKDENGRRRTKHNTTKGDRKTSALEHIEG

SEQ ID NO: 994674 - protein, 369 aa, Homo sapiens
VEPLYEIGCVNLGRLPSHTPLDLHQRASGGHTSYPSKGLPFLAWTLFKITDSMRMRFVLQNAMRLRRVGTRETGGGYRPHSFDLLRPFLFLDPCDADSSGTFVQVARPWREPDQLFKARNNVFHYGYGFYCLCPLTPITEVCVYIYIVYYIIINIKEIIYLSWDGKTREGYIDIYIYIYIKEGDPCLHLTLDQKEKRDMKVLPMTSEGTPLLETTRKQVRKYTTLLELRDQERHRVHHGVTDKQNSGDVKKGSLTIKNPTTGPETHEGENKKNNMTMRQEEPRHNWKGERRERTRTGPPVLAEPERDGRDVGTKETQTAAKQTRGERSAGQDRQPPVRREPSDTQTKDRRARQGDERTAGEPLVVIENE

SEQ ID NO: 994675 - protein, 62 aa, Homo sapiens
MSERTSIEIRRSHLPCSPAGIPEATVESCLCLHLQHLPKSFDHFFCNENLLNVLGNYLVNKI

SEQ ID NO: 994676 - protein, 149 aa, Homo sapiens
ASGGVSVGGSGAGGQQPPPQQPRMARSPTKNLLKHKSLSLSMHSLNLIPANPAPQSQLSPNAKEFVYNGGGSPSLFFDGVEGPSTSTTAPFGSGGASTCNSSSFDVSQVFGGGANSLFLEKSPFVEGLSYNLNTMQYPNQPFQPVVLAN

SEQ ID NO: 994677 - protein, 107 aa, Homo sapiens
MSRLFHISYIYVSVSLVYYRGTMCIVVCSAGGLQQRSVSCTNNSVSDLTIWVHSYPGFCSLLILTVNPLFWIMHKCICNSKIYRFEYFCLIMVIVSPCVTCIGMRCK

SEQ ID NO: 994678 - protein, 495 aa, Homo sapiens
VGLNFNWESFKKKFHSSHKCGVSKGPEEVWVWGPKGEGQVEVWVPPATGVDRPKGVAREDTEAQEAVWASRNCSTLKRRAHLLFVPIGEGRQWCVSQGPRRATPLSSRGSSFSTACWALCLSPPLYMVFLPPPTLCGRPSPLCCPTCLPLCISLSVARMLSFSTAPLAGVLCAAGRPSIMWGASSREFSSLPLMVRRTTHSPPAAIELCLSTAGPHKVVLLLFRPGPIFLLLPPRQGGLLLGGGSEAVPHHTIVGGSVVRVTPGSLLRLFPHPPAHKQAPPFLPEAAILKRGGRRMLMGGPPWFVRPPPPDWLDGSYFSSLWRPAPTTPCEESGLPTQRAVLPGWLSHPTTPLCSVLPPSVCVEGTPFGGRAFFPRPDTISYKLVVVISRAAELFISLWAGLPYSTYEQGVVAIFSPRGITNPPPLVVAMLAAVALINFPPTTMAIRHHNTKSGPPSSPPFVGGTRQTFGCEQTNNVPPYVLRFAEDTNTAFPQD

SEQ ID NO: 994679 - protein, 306 aa, Homo sapiens
VAVGDVAVAVAVLGGMMDRAVAMAAWDLGVSYGWAQPPLLLGAFSAWCPYSDYCCLFTPAASSPHPSAPPDFLTCLLCLPRKPEQYGPLSLWDMTRLMNTLIVFRFLRIIPNIKPMAEVANTILGLIPNLRAFGGILVVAYYVFAMIGINLFRGVIVPPGNSSLVPDNNSAVCGSFEQLGYWPNNFDDFAAALITLWNVMVVNNWQVILEAYKALRRPWSMVYLCYGGGVLWLSGSTWFLGSSSGELFHRWDPQGLRSSCWDKRFRGLLFGIQKTRGGCWNKNPWLGRNKRPPGQQMAALWRSRQN

SEQ ID NO: 994680 - protein, 290 aa, Homo sapiens
GRHCAQHHHLRLLEQGSAGKQMAIWYSGWTPTLGQAPECCPGGCSVPPALKGPKAATAAAAAAAAAEATGGRAAKVGQLSDRALSGASLPNAPSSAPDYLGWAKSTGTIFTLGRLVKSGSLGSARGTQPTVEAGVAHMIEALGVLEPRGSPVPWQDGSLSDLSLTGEEMGPGGSLGAQGSDLSAQSMKPRRDKVGGVQNSGCQEEVGTPQKKGWVASIQQDWSNPTGETMIRNRHMSAVDETQRTEKTRKLVAERTERGQKTIREEGTKTKDKEQQGTPEKDKKRRKERK

SEQ ID NO: 994681 - protein, 136 aa, Homo sapiens
MGGTQMARRPTGVTHGEDCDDAMRRTAKKNIEQVDTHIRERREKRQRERNDSTKEERHNNSPRSATSNARRDNRNQRDEREEQKRKRTRTEEERDKRRKEQEPQQQKHARTTRDTKQQGQSEHIAYTCKTAMHTDG

SEQ ID NO: 994682 - protein, 211 aa, Homo sapiens
GILMISWLPVTIDAAGTSNGVRVTGYAIYADGQKIMEVASPTAGSVLVEVSQLQLLQACHEVTVRTMSPHGESSDSIPAPVCPSPGFCLPASQDVLSLTTTKPRGQNTPCFSLPRLGDTSFPLRHPVPHGTQDFSASLSIEMSKGPQEEPPVPCSQEEAGAAVRSISEEKRAIEPTLGQEGPEPVAPSLAKQEVECTSGDAGPVPCPPKES

SEQ ID NO: 994683 - protein, 151 aa, Homo sapiens
HVVRRVRVTEVVKKYSQLQYAANPITPLYGEGTREGKLCDDEAEEEKGEKEEVKMNDDEEIAKYRRCGFRMRRMISGMDKKDENVKKYRERNYIDSWKERKRRSRRIWIQKLLHDISLKRSMENVYRDASLIDWEEHLASQARCLWKVCWQ

SEQ ID NO: 994684 - protein, 366 aa, Homo sapiens
  misc_feature (49)..(49): Xaa can be any naturally occurring amino acid
  misc_feature (93)..(93): Xaa can be any naturally occurring amino acid
  misc_feature (178)..(178): Xaa can be any naturally occurring amino acid
  misc_feature (279)..(279): Xaa can be any naturally occurring amino acid
MVCLAGRARLVWHRGKIHLERQHRMHPLYEAESALESLVYVTLRGEGSXVAKTLSLRVSNFEGSVPRMWRAVAQFLDIIRPLSEVARIALCHXVRGGHLLTLAVVNSSVCPTVRRVIAGEQHRRENTQWAYKVYDEAQLTVYKSHNPRGTGLHSARGDTRPQKDPEWHGRIELTRICXILREKVHTWKQSNSHPGLGATGARRDHTTPISEIGLFPSDQGPPLDGAVRPHKTTKGLHHRGGKSPIKKALCNALGFHKELIKGPRQTRARRRNMAHSSGXTRGRGTTQCGNGNGKPRRSSPLTGRHRGEHVTVHDTATLRGWNNTMSHDGDTLVRDNETFTGAHKSVHTDNTPEGGMMNPRDPQERH

SEQ ID NO: 994685 - protein, 154 aa, Homo sapiens
MRSMAETGRQRDAARRRRAWCSRQADAAADERGEQQHQQHQQQHTAVKDDPSAGEGPRRRQAGSSLVDRYKGISHSAEEAVGSRQCSSKKERHARKRASREKDRGQGEVSRHGTRERGDRRATTMKRWGRTTPRSRDERRDRQGDGQPGTSNEG

SEQ ID NO: 994686 - protein, 97 aa, Homo sapiens
TVRWLLDSVRRTLLGPFLWTFNTWISSIDEELDQWYLQPASSTDDVVDDRVSVLVRELLAELISLSLIIGLNQSYVIYRDPRNYELSCLNRSLGTRE

SEQ ID NO: 994687 - protein, 346 aa, Homo sapiens
QARAEQAKAADQAAMADMEDLFGSEAESEAERKDSESESDSDSDQDNGASGSNASGSESDQDDRGDSGQPSNKELFGDDSEEEGASHHSGSDNHSERSDNRSEASERSDHEDNEPSDEDQHSGSEAHNDDDDEGHRSDEGSRHSEAEGSEKAQSDDEKWDGEDKSDQSDDEKLQNSDDEDREQGSDEDKLQNSDDDEEKMQNTDDEDRAQISDDEDKQLSEEEKGNSDEMSIQVASGNGEEKRNLDHRDQTARWSEERSTNGERRNSGECPQTSNKTSKGVRKGEKRNTKTRDEKQLQRQRHKSKQRSRNREHNNERALTKQQRHTRHKDAPQNKRASTSRSTKDK

SEQ ID NO: 994688 - protein, 569 aa, Homo sapiens
  misc_feature (120)..(120): Xaa can be any naturally occurring amino acid
  misc_feature (126)..(126): Xaa can be any naturally occurring amino acid
  misc_feature (148)..(148): Xaa can be any naturally occurring amino acid
  misc_feature (157)..(157): Xaa can be any naturally occurring amino acid
  misc_feature (260)..(260): Xaa can be any naturally occurring amino acid
  misc_feature (288)..(288): Xaa can be any naturally occurring amino acid
RQMSHLLIERSGPQPQFVMPRNMINCYKAWLMQLGDLRVPGGAPYCLGSVTPGYRTESVHNEVAYDCMDLTLEAETVQRIAQTFPAWNCENNVMRTLCPSSVSDTSKPRPMANRVSRDSXSTVSHXFTLSRGVAPVVPWIPCRARYRXVRSCDLEEXALITALEPARKRDRCDSVRDDSDPRRNRPKHERNRLRDTLPPVRTENPKRKRVPQPSQRLTSKRESLWQCHKHRHLRWWPGAGSCGGLRKNSLRCGDPIFPTXSSCWYCTTALPRPKRRGGAPRTYNSGVXTNERDTIFRNWNFELESVGHYWTKQVSTKRKRCREFGARAHIGFMDQRGAIRGGGAGRERGGAPEEILLKRGIFRSLSVSARPLCLERAPPAVRSAPTGGGGVPSGSLGLYAERGERAPPQLCFHCVAAVLRPHTRHLAAGVHSSLFFHRKICQVYFPSSLGATGEGAVRTQSGAGFTPLLHPVFSSSFIYAGGRTIGWGQFHSGGGPAWGDGARTACGGPSARAYERGSLERRNPLGPVFVVRFEDTPTGLPRRDTREVPALTGRDEERTLLSGISVWDP

SEQ ID NO: 994689 - protein, 159 aa, Homo sapiens
MSGGLASVHLRRTASRPQCVAVHPGICSSCISDWSLPASLPRAFGAWRASARDAPASPQPPAARRDSPRASKMVIQKEKKSCGQVVEEWKEFVWNPRTHQFMGRTGPAGPSSSSSTSSSMVSSRHVQPHHVGKCLQNRSLTYPQVTRIDWPHRLDDRPD

SEQ ID NO: 994690 - protein, 98 aa, Homo sapiens
RSVEETLRLVKAFQFVETHGEVCPANWTPESPTIKPSPTASKEYFEKVHQRPSYVCNYLKLFRPKKSPSWNPSNALKIIYRMAKPHYVCVYKYCSTGL

SEQ ID NO: 994691 - protein, 117 aa, Homo sapiens
MPNMLDVVGIIYRLEKCSRHRAVLPQPADEVYSHHSRRLLLSARQSCHSYFASFLIEHWCPGRVAQAWSRRSVAVRSYPSVPCRASHGRYGGVKKALASESSQSCETGVLSSGTSAH

SEQ ID NO: 994692 - protein, 158 aa, Homo sapiens
MGGFILGGGPFSLAHGYIYPIFCPKKAGSTHWSQAGENRLLQRRLVRTPPKQAHPYFLVKLSQAPAAAPRRIPVHTIREATYRTLPNFSHHQDRELTWLYHRGGYNKTESMVVAGNTILRVWKQLHERATTYFRQRRRPEQVDYKSDRRMCADDNTEY

SEQ ID NO: 994693 - protein, 143 aa, Homo sapiens
MEIPTIQRASPFPHTPTLLDHDIRNAPRCNIITDWEASLGPQCVWAKVDLHHFGTLLRSHHGITVSPFQHLRGLYWTLLPPREIKENLSVGNNNREPSFICTTPQLAFWTPRLHNFIKVTRGGPLELESGSFLTESSTGHPDV

SEQ ID NO: 994694 - protein, 141 aa, Homo sapiens
VLWCGEPLRFCEEVAFMRGTEPHADWWAVCTKGRAVTSLSGRFCALGSGYRKQGNRLQYTTLRTGKGQVWHSAKGKTHTHTHTHRQRDEFGSRESSKLKRKVEFRRNLPSLSVEVSLWRCMEKPGMKEHGYGQLVQAAWRG

SEQ ID NO: 994695 - protein, 72 aa, Homo sapiens
MGVRLDARVGLLTVDKPMGHLSLANGGSISTKDVIVLHWMLQCAIIQGLVGAPRIALSVRVSGSGCSYRARN

SEQ ID NO: 994696 - protein, 98 aa, Homo sapiens
MRPNGGTGNGKAVGAIGKEVSHPHAELPSDGWHHNIITDTDHTEPHRTNKTPTKSGASYIQATTIAKIQKEQDITNHAPEANRRYEQTGDATKPGRTV

SEQ ID NO: 994697 - protein, 99 aa, Homo sapiens
MHAQPPKGGTLEDTRPTLRTRGQANITHSDATLHKERTNQPSHEKGTYGQQTATHNAAPGDKQNATTNGTHHPRHRETEQQPPHRRVKIRNENQQTNST

SEQ ID NO: 994698 - protein, 273 aa, Homo sapiens
EPILGLLWTMPAVAETDIQDLKIWGRAGCCYGALQSFIRKASRCPMQVRTVLGREGTSNIKIISKIENHEGVLEALMIILEASDGIMAGSLVIYALRFLAEKVYLAQKHDDTDGATEHGKPVICATQMLESTDQDALTHSRLKAEMWPMQSWHGADSIMLTGETANGDKPLEAVRMQHLIAREAEAAIYHIANNKRNSAAWRPSPENPQKAPRGDARRRSYTVHAKGDITRQQQSLGQSGSPRGQKQQTSTKHSGDTKTTHRPDTCTTRYQEK

SEQ ID NO: 994699 - protein, 267 aa, Homo sapiens
HASDKHSVEVTNGMFSSQTMSHEDEVGVDMEYANNMYELVIKRFRQHELIPVHWYATGHDITEHSVLFHEYYTREAPNPFSYVWTQVSIEGAHEHRKPTVSDFKWESLERTMGVMFDDLLTVKYCVLRRVNAYGVDLINDDLLFPNRVIGLSSDLQLSRRGISRIQDALSNSVAEYAEDVLYWNVSQADRYWWAASVNEPGYTEVPNNSFPDDFDDQCSTSNINDRFDGDLPGRLTQSQIAHEKLVTVNGPRGKHVARDNPDPIEQW

SEQ ID NO: 994700 - protein, 386 aa, Homo sapiens
QVQPPLRMKATATISAKPQITNPKAEITRFVPTALRVRRENKGATAAPQRKSEDDSAVPLLPKQHPNLVLLFLSQYKLRMHVYEAFMTSSMEGLTVTAFDAQKQASVHNSGPMAKEALINTEMTRADFHSSGYTTNKQLQGIILKSSLCSELTAHKTGYIIQNRSVIEAAAATHPFPYIPPYHPVYFPILPVTLSTFADRGDLTLLIGQDSSDADGHWTYEMLGEQKTQHKSQYLANKGKKHTRQDIPPHNHMRPRHVAHSTMAHPRQSPKLPGSNMRDSHTRQPHTRNKHKTTTVHQSQPKAQKGGEQTTAPKAHTRQSPAQQKRSTKNSRANNKKNTQEAHNTPPHRHEQQAPPQKRTTKHAPATPRHQTHPQHSVTQRDNEET

SEQ ID NO: 994701 - protein, 169 aa, Homo sapiens
RRLLSSVVRHSTLSGEFFRTKLKYHDYLRKGTRFNKTRGPFHFRAPSRIFYKAIRGMVSHKTARGKAALERLKVFEGVPPPYDKKKRVVVPQALRVLRLKQGRKYTTLGDLSASVGWKYSDVVSKLEDKRRVRAAEYYAKKKAATKKVEAAKASQADSKVTKELAALGY

SEQ ID NO: 994702 - protein, 196 aa, Homo sapiens
MDQLPPPPGYYFFFYWVFLRKTDQTLLADRGPQGVRRMNTTGAITYDYTLCHSAHTTKAREKLTRHVNHNQMSAPSQSDNNGDPQGDNTPRKTRNPGPTPAETWQPEVTLNRDNCSSKTVATKTHFPAAHYATRHQNATFSPTHGHLTESTPAVPSDSSRPITVDLSPNRSIVTSPYATPPRPPRHIPEWHTRTRP

SEQ ID NO: 994703 - protein, 234 aa, Homo sapiens
  misc_feature (131)..(131): Xaa can be any naturally occurring amino acid
DDWAIELIKVMSLHRERASQQRLGGEQSGVGRNRSVDSTKGREGTVDPCQVRAEALPVPRLHLLADAVPGSSYLLGASADEGPADGHPADGDYGIHGERGVTITLSGEVSTACTGAAFWSDRNGECGPGRXLLSLDTEVDRHGAEYAHGNTALAYARLGLHAQECIDVLPAVRADPTSCFDAHGDPKLSRRNNNRNNSSGRVPTHHLRNSRARCSRLGRGSSPYSRSGSQQHVS

SEQ ID NO: 994704 - protein, 324 aa, Homo sapiens
EKKKQKEQEADNEVDEEEEEGGEASRQAGRRRCMVQDRGMADAQMQAQLQSSSRRKLSAAASMIARMTACRYHRQQNDLTEDDYDSKAKENVTLTEKTMAAVTYSPSTSRLRIYPVVTFEVEEARPAHRWASCHPPDDTTLSTTQPKPCRICNRESEHTHPTTSKAPDILPKHVTLTKANIRTNYHTLTTPYTSGYLTGNGSRHIIHDSRAGPNTAYREQFLCPTILTYTIVASDPIVIQELLTRENTNNPLVQEQSHTMDRHDHKRDSLIYLRPYRTQQHTDMLDCYASAVPSTSIIWHRHRQPAASQRATARHKGSYAIISP

SEQ ID NO: 994705 - protein, 34 aa, Homo sapiens
MSFTDSLHHSPPTTGPWCSVQCCPWLRLPVPGQH

SEQ ID NO: 994706 - protein, 35 aa, Homo sapiens
MPTHGNQSPYKLAEITATINNGLATDAHAGRLAAQ

SEQ ID NO: 994707 - protein, 95 aa, Homo sapiens
MGATQGRAPKRDRYLEKVNTDGSQAERRTTDTWWYLPGKDTAAHSWGNTLGKNQHIAKPHAQGGDTDMAHRHPTFHGEKPTPLDGQSKNLTGTNG

SEQ ID NO: 994708 - protein, 232 aa, Homo sapiens
MWWTKTAPAVVLYRRSWTGHPFLRPRGPYLERLSDSWWLPDGLIVTNAHVVADRRRVRSELLQRRHVCCRGHSMWIPWQHIANCLEDSDLSEPLHHAASGHAQPDSTRQRGSPVRRHGNVPFAPATNTMTHPGTRYALPQPSSPRDLGTPPNQCANTLQTCMQLLTLFAHTSCALYHPWVKPVGTAGRRRSDCGPHPYETVNPACNSPFAIPTCIDYSNVFALVAGHRPPPP

SEQ ID NO: 994709 - protein, 202 aa, Homo sapiens
MTIGATNFREEMSDAGENLNVVYNCYTQRRNIVRRSRDTVLAVGTTFQELSIAMAGGSDRLPLAWVTPSWAINGASAAATATPVGTQIDSLRAANGLQDKADKKHLQAYGVPLKVPSTTDIFPGCAVTQTRAQRTQRVTDRLCKHYAPLHLILLHIVSPYDYITTKYKITLQRTLRPRTSFGLDDTIVATLQAVIPNNVTSG

SEQ ID NO: 994710 - protein, 275 aa, Homo sapiens
  misc_feature (231)..(231): Xaa can be any naturally occurring amino acid
HASVEKQEEEEEEELLPLLVFLFLFVRSISGRPYAREDAEEEEEERGSEREKRQDGRRNKTEGGTEEDDCSHETLGVPKHSKPGASGSRMNYLCVDPACECMTSPGCPHKNSQGTCTGTVTRGTLRDPYDQGWSEGSARRPTVDSRAARRLRGFAHVHVQPSTISEGELTKGAEPCEPSERQLRMNGLMRGPSKLGVRRLPCHVVLVRSNARSQTPHHNLTAEGERPESEXPHDVREIHAWVFVIEPMTANGSGEPDFLSVRILGVNRTTGIVNV

SEQ ID NO: 994711 - protein, 344 aa, Homo sapiens
SVNGVDLRNASHEQAAIALKNAGQTVTIIAQYKPEEYSRFEAKIHDLREQLMNSSLGSGTASLRSNPKRGFYIRALFDYDKTKDCGFLSQALSFHFGDVLHVIDASDEEWWQARRVHSDSETDDIGFIPSKRRVERREWSRLKAKDWGSSSGSQGREDSVLSYETVTQMEVHYARPIIILGPTKDRANDDLLSEFPTSLDPVSSYDTSKREYEIDGAITTLSLPGENGDEAFRGHKVMEGGSTKGQLYGTSVQQSEKSNNTGTTDLEALASRWGEGQLTHSNIRPDGRRVKKQAKENRRPKATASIEVHKAAKTTRGANSQRHRNQGTHGKGHHDRRHPSSDTT

SEQ ID NO: 994712 - protein, 30 aa, Homo sapiens
MCKTNQLTEGEKEEDGRNRRKTQKHEVMES

SEQ ID NO: 994713 - protein, 109 aa, Homo sapiens
MREEASQWPLDLTYMTLSRASQVDNTAITHACVNRGTWVHGQSHQGVVSSERKPALRIDLCSRGTDGLKQNPKGTWRALLQGGNLHALGIPTGYSGGVDPGCGYVLGVG

SEQ ID NO: 994714 - protein, 417 aa, Homo sapiens
MSAPKNARTLVSAEWMHALVDNVVLYDPDCDPEGRICERRCHVVNPGASAVLGSVQARVEAMSAARDKGDLSLRCDDAGCSSATQHPTFEPAATRAPSDPGDLSNQLQTPWDARWLEERSSLPTEPLNSCWRPREIRWTAGGTYSSSSNQSSNRVMLCSNSVSHHRPPVDVESRRISRLTNYRREDIKGRVYYYQGRGRDLDLARSAGEPLQVARSTRHLLTHRHRFPPESSTMKRLDRRRHTAEHTWSDVEWPYVDRDLDRPEEIHKQDTSPRNGHKKGLELQGTGAHLTHREHRASTVPRGVTGKAEEDTRTTERTQREKRSNHHRNTQRGEKKTQNKTGGTQRKEGRTRLKQQAQGRKPEVIPSEEKPQRRQRQMRAQRGQSTTKKNGHQRPRARKADAQKTRKRSAKHHVFTL

SEQ ID NO: 994715 - protein, 149 aa, Homo sapiens
MASSDIQVKELEKRASGQAFELILSPRSKESVPDFPLSPPKKKDLSLEEIQKKLEAAEERRKSHEAEVLKQLAEKREHEKEVLQKAIEENNNFSKMAEEKLTHKMEANKENREAQMAAKLERLREKDKHVEEVRKNKESKDPADETEAD

SEQ ID NO: 994716 - protein, 145 aa, Homo sapiens
VLVSFLGTLAVLPGNIVSALLMDKIGRLQNACWFQCVVLCVLLLPVFGNSESAMIALLCLFGGVSIASWNALDVLTVELYPSDKKDYCLGFLNALCKLAAVLGISIFTSFVGITKAAPILFASAALALGSSLALKLPETRGQVLQ

SEQ ID NO: 994717 - protein, 214 aa, Homo sapiens
GHNLARQVHKGSMFRVDLSGHNLANPHPFAVVPSTATVVIVVCVSFLVFMIILGVFRIRAAHQRTMRDQDTGKENEMDWDDSALTITVNPMETYEDQHSSEEEEEEEEEEESEDGEEEEDITSAESESSEEEEGGPGDGQNATRQLEWDDSTLSYKPALSACSPDSLPAPRVHDVQNHFDQQVCRPFPHCSKSSRAWCVGPPAPPSPPSHWQFC

SEQ ID NO: 994718 - protein, 209 aa, Homo sapiens
MPFHLGPPRPSPGKSLVFHVAENQGGCALNQLCLLRELRRHIRVCGPPPFPTACLQGGGRGTPGGPTLFPPLQPPWFLLATLSPLLWEITGQQAWRRQYQVPRDGAPLRHSQPSDWRKICQVAGRIHNREPSRPRVLPRLAPQIKGGAAKKEALQRVILAPPWAPLVGWGHTKVWTGGSDRDWDKTNAGRLEIADLGNAQSERMLKPES

SEQ ID NO: 994719 - protein, 351 aa, Homo sapiens
MKFAVLCWPLWQALVAVLPCSNGYYPFPIAGFLKAPLSQERWAGGSVVLHCEAVGSPIPEIQWWFEGNAPNDSCSQLWDGARLDRVHIHAAYRQHAASSLSVDGLTAEDTGTYECRASSDPDRNHLTRPPRVKWVRAQASVVVLEREWPGHLFLFTSRATRPGSHFVEPDAALPYHSFETPLGTTGELNTHQCPCWVQVGLASSSGSSVRTPGLGLLCTSLTSVLVLSMTLVYLAPCLPVIAGRVGTVPRVRRVYERKIHTTGEPWGQGQPKKTGKKRERTKGRPPHETETEANRERGRKKGNKEGKTSKGGQENNERQNQKTSRDRQEEDKQASDDTGKQTNTQRATTSP

SEQ ID NO: 994720 - protein, 303 aa, Homo sapiens
MPREIITLQLGQCGNQIGFEFWKQLCAEHGISPEGIVEEFATEGTDRKDVFFYQADDEHYIPRAVLLDLEPRVIHSILNSSYAKLYNPENIYLSEHGGGAGNNWGRGFSQGEKIHEDIFDIIDREADGSDSLEGFVLCHSIAGGTGSGLGLLTLRATERTGSPETGARHTQGVPNQGRDELMVLVPAPRIAPQHKRGGANGDALWLRHTRPEQGQQERKIRNSTSLQNTTAGTADERTHPRGPEKKRDDEQANSNRDAHRGTPTHKRGDTTRRARRNDKKESTELRNQQNTAAQRGYSDNNGH

SEQ ID NO: 994721 - protein, 261 aa, Homo sapiens
EAAELKDPTDHYHAQPLEDNLFEWHFTVRGPPDSDFDGGVYHGRIVLPPEYPMKPPSIILLTANGRFEVGKKICLSISGHHPETWQPSWSIRTALLAIIGFMPTKGEGAIGSLDYTPEERRALAKKSQDFCCEGCGSAMKDVLLPLKSGSGSSQADQEAKELARQISFKYGAQNPSGAPLPETTQPAPKNTSMSPRQRRAQQQSQRRASTSPDVAPRSGTKSPQKEHGGSACVIIILSVGIGGLIIRGKLLGQEYIYDVEI

SEQ ID NO: 994722 - protein, 155 aa, Homo sapiens
MNKKDRRKRERKRQTTSKHREKTKRRHKTRDKNTRNTEARNKSSRKDNNKKEDENKRNKERRRRVEKKSNRQKKRKEEKEKKEQEKKKEQTTQHRTNTQRDSKRTRTEEKQSNKTLREDKNTDKRGQETTKTEEQQKKRDSKPETQAKTPQERQT

SEQ ID NO: 994723 - protein, 102 aa, Homo sapiens
MLPELQTLVHRGRLKHSWGVLWSPRRGPMAGLPPAGEKHSDKTNHTRGAPDGANIPRHRAGFTTAGVETNSGAGYLRRGLHHTGQPGSSPTVAPQSCSKMAK

SEQ ID NO: 994724 - protein, 332 aa, Homo sapiens
MAEYGTLLQDLTNNITLEDLEQLKSACKEDIPSEKSEEITTGSAWFSFLESHNKLDKDNLSYIEHIFEISRRPDLLTMVVDYRTRVLKISEEEELDTKLTRIPSAKKYKDIIRQPSEEEIIKLAPPPKKDLNKGEEEEEELDLHQTTPFPILNGRGYGQPPAPYPFTNLVLTLTMRVCVRVRTLWLSVCLAHQFLLLMRGSAAARGGLKFPRLLGAGGTAFLLWTENWAFSSFSPSSLFPHLLERTAWCAKRGARRHKSLAQTRGFLPDTTWGEHREKRRSNTHPGCGRSTTPADGGELQHRTRVKTHGVSRNKQYRRGTQPRMSEERQPLK

SEQ ID NO: 994725 - protein, 161 aa, Homo sapiens
MRTSCITLISDQRPSIDHVSYYRGLPRSMIVPVFPEASHNRRLTNTNIFRGSGNRKRGFVNVSCARHRSVVLHRPLASPYASFYSNKTDGRTESRVRISAVKIQFVPPIGYVNLSEYTRTYWRDLNHYNCLSDNFHPIIPRTRASLRTPMTVDKVGVVLPI

SEQ ID NO: 994726 - protein, 214 aa, Homo sapiens
QDAGILSITFTEDMGLLPCLLYQFYKFKEGIFQGSEATGTWTTHSFLLPKKIFIKNSFASLKNKHSSCFERTCIYVKVAFKEKITVLEMVALIQCVLPTAMELFDNYMQQDAHEFLNYLLNTIADILQEERKQEKQNGRLRNGDVDNEDNNSTPDPTWVHEIFQGTLTNETRCLTCETISSKDEDFLDLSVDVEQNTSITHCLRGFSKHRNSVQ

SEQ ID NO: 994727 - protein, 140 aa, Homo sapiens
STHYYLLPPSDLCLRPPQTQRPTSPPITATQGTATIPEGHGSAATEGLPRGRARGCSASSKVQMLQAMVHGVTTEECQAALQSHSWSVQRAAQYLKVEQLFGLGLRPRVECHKVLEMFDWNLEQAGCHLLGSCGPAHHKR

SEQ ID NO: 994728 - protein, 443 aa, Homo sapiens
VARYRPRDPIIAVTRESPDSSSGPPCTVDIFPCCCARTQIQEAMELSDDETIRGLKIDHEMIESTGTAGISSQNGSMMSTFVDRPGMAATWTPGYHTSTQCSSSIHVPVDRTTKRHTTHQKNTQETNKQSNTHKTQQIDNTSNIKDTTQTYTGHNENTQTHDNTERDINDKKTPESDRRPENRKTKRKTQDEQDEKREENKENTAPPPRERATPQHTNRNTERERNTTRAGKDANENGKKDTKTRIPRAPGNRKEGAEKGNEETRRDNDGGKNKGRTDANAQHHERARETETKETNTKKDSRKERDQRKRQQNTRAQTTQSGQKKKRAHNRQKHDNKPRRHKEKTESANGKQQQGKDTNINHMTTNDRKTKKRRRHETVTRTGADEHGGKGEESRAAAKEQNKEIQEQRGKREEKNARRDEREKRNKRDTSNAKHRRNRISSR

SEQ ID NO: 994729 - protein, 302 aa, Homo sapiens
GGRACVRSLRGGVLWRSSPCHYESTATRHFLGTLQKLPLQAGVRNFHTAPVRSLFLLRPVPILLATGGGYAGYRQYEKYRERKLEKLGLEIPPKLASHWEVSLYKSVPTRLLSRACGRLNQVELPYWLRRPVYSLYIWTFGVNMTEAAVEDLHHYRNLSEFFRRKLKPQARPYVACTVVTSPSDGKILTFGQVKNSEVEQVKGVTYFLGVLPWALEPSTEDCLPFQFSSSDSFQKPAGSPGKGMSVYPVFILLAPGTSLFPLPHDGPLTLGPSQFLCSGPGWPMVQSLWAGRVHATEQGSHR

SEQ ID NO: 994730 - protein, 307 aa, Homo sapiens
GPPTLRVAFLHGLHSAPRFLTAFAYGTTTSAVRLHVLGYRLLCRINFSLNVVENLALLVLTYVSSSEDFTIHENAFIVFIAASLGYMLLTCILWRLTKKHTDRKSYSWKQRLFVINFISFFSALAVYFRHNMYVRLECITIFAILEYTVVLTNMAFHMTAWWDFGNKELLITSQPEEEEILTPSVMLENKKPLWPSLSPRSLWAWREERKGMTGLTQNADSPHIHGDLKKDTIHWKVQKMSWRKVPLGAKQKRLGPRGVKPGAETRFRAPRGAPAPVPGATPGSPPGRRRQTGDGGDRNVSRAKTGT

SEQ ID NO: 994731 - protein, 273 aa, Homo sapiens
MAERGGDGGEGERFNPGELRMAQQQALRFRGPAPPPNAVMRGPPPLMRPPPPFGMMRGPPPPPRPPFGRPPFDPNMPPMPPPGGIPPPMGPPHLQRPPFMPPPMGAMPPPPGMMFPPGMPPGTAPGAPALPPTEEIWVENKTPDGKVYYYNARTRESAWTKPDGVKVIQQSELTPMLAAQAQVQAQAQAQAQAQAQARPGTSPGSGPGPGPSSGTSPGSGPGPRPRLKGQGQSQRQQKPRPKPRAQVQAKDNSTHQSSRGSHPNNSSPPRWSR

SEQ ID NO: 994732 - protein, 70 aa, Homo sapiens
RICRQNTGVVKHYPVKAKMVKGQDSYSPLVVIGHVDSGKSTTHWPSASHTMRWHRPNSNPLKTFADRQAS

SEQ ID NO: 994733 - protein, 69 aa, Homo sapiens
EAFTSEHWLVRIYKVKAPDNRETLGHKPRVTNIVPKQKYCQKKTTKRKRGYVKNKLVFKKGKKTSKKTV

SEQ ID NO: 994734 - protein, 252 aa, Homo sapiens
GSGCGAAGARAPRGGEAGPAAASMEEKYLPELMAEKDSLDPSFTHALRLVNREIEKFQKGEGKEEEKYIDVVINKNMKLGQKVLIPVKQFPKFNFVGKLLGPRGNSLKRLQEETLTKMSILGKGSMRDKAKEEELRKSGEAKYFHLNDDLHVLIEVFAPPAEAYARMGHALEEIKKFLIPDYNDEIRQAQLQELTYFEWRFRKCRCPSGSREIYFAYERCTTPAIPGKRRSPSQGLLRWGTPWEPDPEESFT

SEQ ID NO: 994735 - protein, 277 aa, Homo sapiens
MKTTQETTDRVNNKRHRGTEEELASRKMKATQQQTPTVNAGDSPQRKNMEPEQEQQKATHARHSSEDTITEEERAQSARTNHITKRTNMHAAKKCREHKKFTTKTGSTAGNDNETPTPNERDEEPTTQWTNNCHADNPPQQEPHTSIAEHTKTASTQHRARDSRTARKTEHQRTEEAHRKAGCTTMSRATNNTPARTDSQPDTEHADGPDDNRQTHAHQATDHHTRQKQSCYYPLYLEPTKRRREHHKDSANREASRRQRRTQNKDHERNTEATRRN

SEQ ID NO: 994736 - protein, 264 aa, Homo sapiens
QLLTTIARTINEVENQIRHPSTPRASAQEQMQEFRASFIHFDKDHGVGRWEPEEFKDLPQSVTGLTYVVERPCRVRPSFNRIMSLVDPNHSGLVTFQAIASTSCRGRPPTTDTADQVIASFKVLAGRTKNFIHSFEELLWESWPPDQAEYCIDRMAPYQGPDAVPGALDYKSFSKDYDMAERHVRPPENLTPKDPDRPPGRGHGKNPQSTNSLHICIYAKANTLRRPPRDVTGDGTGNGGWGNGSLTRLRIREDKNKEGTPRHR

SEQ ID NO: 994737 - protein, 194 aa, Homo sapiens
AAAGWPSSWSPQDRRSHPPMTEGPMNTPDHDTEPGGSYTGQRVASPTADHDTTATYSNATLQTSRDGSPLDGSQCTPRVALACPTTCPWTYLSTCEAVRLHLSHCITHRDVQHGYTHFRGELPEMGTPPLASTTITVFCSWDYKVTQNAETPDSSQDNIRTRLKEARMDQRWTRMTRTAHKERDAADGHASSAA

SEQ ID NO: 994738 - protein, 164 aa, Homo sapiens
MTSAWGILLFDDSCLDPFSSWHAHALAQQLEQFNMESPSTSLVLDPPAFSEGPGFLGSEGSMSGPQDPHVLNHQNLTHCSRHGSGPNIILTGDSSPGFSKEIAAALAGVPGFEVSASGLELGLGLEDELRMEPLGLEGLTMLSDPCALLPDPAVEDSFRSDRLQ

SEQ ID NO: 994739 - protein, 101 aa, Homo sapiens
MTSRQTDISNHDIKPKRQHEHHRTNITTTQRNYKDTNNTPKSTTKLRTATRGTLRTSTHRGNEQTKKRRNKNQQRERGSRRNPTTPDVSNEQGKGEQRKTQ

SEQ ID NO: 994740 - protein, 32 aa, Homo sapiens
TTRFQEDQVVHKQLAGISYQRGLDQVINKFLL

SEQ ID NO: 994741 - protein, 181 aa, Homo sapiens
IGLCLTPADFSPSPCKLCLRLASFVFRVGKMRHSKRTYCPDWDERDWDYGTWRSSSSHKRKKRSHSSAREQKRCRYDHSKTTDSYYLESRSINEKAYHSRRYVDEYRNDYMGYSQGIPMENLEADTRCIVASPLVGVEEAVTKVNTGVATTLRSTIHTGYECLLNVLKGFISHGEQETVCV

SEQ ID NO: 994742 - protein, 121 aa, Homo sapiens
EICVSDIILRLRVEIRASAVDERSSTRAVERGQFRTDNWQRVLSWDISQLHANHGCTKPTGLSRKPDRRYSNLCTAIAAMNAAGTQHDFVTTLPHVQDTHTVTKRTSPQDTKLPNLLTNDT

SEQ ID NO: 994743 - protein, 289 aa, Homo sapiens
FIDLNYMVYMYQYDSTHGKFHGTDKAENGKLDHQLEITSPSSRERDPIQNHDGADADAEYVVESNWTSYNTMADRLERLHYDTGGRHNSRDQLNLCTPIMPDAHTMITSMRMMNHHEHSMTTTALHSTHGDNCHYHATTTQKHAYKPTPLSPQGYIADEQSYGYFAEKGTPMHPTKTTNVPNSTDVTTRTEKVNMAGEIETTYSIWYTHYDIRTIKAEPRQSRRHHNHNSNTNINITTDETIISIVTDHGHPKREELTTAGPKKTITSTNTSLKTTGHIPGRKQETYKT

SEQ ID NO: 994744 - protein, 104 aa, Homo sapiens
  misc_feature (76)..(76): Xaa can be any naturally occurring amino acid
MVSTPCINDHPNKNGSQRSSTEHDPHSHEDRKTTLTSGLNKRTKTDMKHICPWRPKHEDNCWLPSTARVIPLTRIXNKSACTRARHKDNHQCGGNTPQVSRPCT

SEQ ID NO: 994745 - protein, 186 aa, Homo sapiens
MPQSEEQPSWEAEPLSPIQASSVHLKSESSSLTKQQDGKLPGLASGLGSTWPISVRIAVERFVPVQVHQPEWSPESKLSWGGNSWVSGQRGVRLNILVFHGKAILPNCAGVNPLFHPFCAEEGKHGEADTGEKNSNTQNPVDTLIPQEDYHKYGAPLTRNTGGESQQDKTTKPESAHRKPSETKTY

SEQ ID NO: 994746 - protein, 66 aa, Homo sapiens
AQGSASFRRTNPQWSKTVAGSTLEMVIWGPEGKRRIDDYRIPSKARDRAAAKVSWKYTLEVGNPDT

SEQ ID NO: 994747 - protein, 293 aa, Homo sapiens
MAVCSRYIHPSEEELRALSGKLRPRVRKERWANGLHDEKPLSVPRDAHFQLQTCPLTAVDALVLRFFLEYQWFVDFAVYSVGVYLFTEAYYFVLGPVQETNIAVFWCLLTLAFSLKVFLMVTRLYFSTKEGGERSVCLSFAFLFLLLAMLVQVVREETLELGLEPGLASMTQHLEPILKKQDWDWTLPVIKLASALGWRCYVPVGAFLIFTGLRWPDHRSADLSGDDPVRCLTQFCSLWPVVWQAGRIRHGPGLVSVRRGRPRGWGVVRTPGFCGGTMVRHAGGGPLEGPRGR

SEQ ID NO: 994748 - protein, 111 aa, Homo sapiens
MLFYQARNEFPCGNLLIGEHTEQLEKQRWAERTEHGTHGESVDNPQNYTRKNSRNNEKVHHADKNKGNPGAQPTERHTGGEENTPSDHEDNQEHRQQQNKQTARHKTRKKR

SEQ ID NO: 994749 - protein, 142 aa, Homo sapiens
KNHACEMCGKAFRDVYHLNRHKLSHSDEKPYQCPVCQQRFKRKDRMSYHVRSHDGAVHKPYNCSHCGKSFSRCAGASLPTRPVGGRATRWPVFGWWGGGSRSWGQEPLPGGGKLLGTGGGTLEEVGLWAEGKQPLGRRGILV

SEQ ID NO: 994750 - protein, 211 aa, Homo sapiens
MTKDNNLLGRFELMRHPSGPPGRAPYEVTFDIDANGILNVTATDNSTGKANRRSPSSNWTRAGLSKEEIERMVQEGGIRYKRGRGEVHAQRVSANNALEILRLQAMNERLRIDEGSSGAHIIEACHKRSKCAVTSVKEVTLWLDANIRLCRMNGRWFEHKEEGSWYRYVCNPIISGLSRGAGGVPGAWGLRGSGLPGDRSGGHGPTIEEVD

SEQ ID NO: 994751 - protein, 330 aa, Homo sapiens
QRYGSHKDLYILMSHTSGSAAEAFAHTMQDLQRATVIGEPTAGGALSVGIYQVGNSPLYASMPTQMALSASTGEAWDLAGVEPDITVPMSEALSTAQDIVVLRAKVPTVLQTAGKLVADNYASPELGAKMAAKLSGLQSRYARVTSEGALAEMLGADLQILSGDPHLKTAHIPEDAKDRIPGIVPMQIPSPEVFEDLIKFSFHTNVLEDNIGYLRFDMFGALGAWLPVSSCWENTSWTKTVPLMALIIDIEVNLGAHSQISLWLILKRPPFVGRFTAQIGGIGHTQGELPKGPAGDRRKKQKGAATKVDTEKTPPGERGRSQHESRRALT

SEQ ID NO: 994752 - protein, 155 aa, Homo sapiens
MFGKSPHFLKSISFKEISPLVSHRGKFPRGGVSTTTSCFGGGAHELRRANWLFYNNKKQPQRKQERSSPLWAKKKNNPILHKEGCPHYKKAPNLGGGHKYWFAETKAFPSFSPAQKKQTAVIFVPPPLGVPQAVEANLSSSTEESLVGGAPTTFM

SEQ ID NO: 994753 - protein, 125 aa, Homo sapiens
MGNRKQAGLAGSLPSGQPPAHHSRWKGWTELSIDVREACTQQDFQKPPDPLGSLEGSGYLTLLSDPPTLGIPETQEPAVFTCPLPCLAPTLVFLLMYPAISFRTVWPGVGGGAPTVTCLQLGVTQ

SEQ ID NO: 994754 - protein, 313 aa, Homo sapiens
MCQCADTQRWDSHRKRRNKRTYNRTTGDRRCNAHTDYTDQNGSDQDSGTKIRVDTNRLGRKTHMDETAEHPLKKTRTGRAQQIRRGDNQQRGETGKNVKRARKQASKQNRTHAKNTAHTEGVTTTNNEQDKRHGRRKKKRGARQHGDETDNERTEHNNQQSRTPNRKHQQSTETTQPNNNQREQDRSKANQATQTARKPTTHKKTENRKKRAEEARHKGEAAEKKTRTTDRPEEGDTQNNKKTENENSEKKGEQKNERGERKQKRGAKKQRTERERRPDNHDQTKTKASEARKEETHEREDEAKDRERIKEQK

SEQ ID NO: 994755 - protein, 42 aa, Homo sapiens
MRRATNRKRGGGGANKSATRQRRRRKLNERDKPTRWQATTRD

SEQ ID NO: 994756 - protein, 378 aa, Homo sapiens
MSKSVIHGNKDAKLIKVERPEAGYLFSAQYTMMIQNRTHCNGCCSKDSSSTDSANYNTSPYPSGEKDLVYLRNLQRRFVGSQARELLHYYQCTGIIANAVTGCSELRIIASCIEGETVASVPWKEDRSCLVLNYSNCHHLNIRSFINWREYGSMLEGMKPWKTPDLLVRRKPEELIETHCTLSTSDGESMLLAVTQGPCKFKHLCQQSVKYDEELGKAARVSCDIEAAEGPNQCSADQHYQSKKHYSQELPAVPGASGEMARGNCGNTSNFCPKISIPKKRLKGQGEPQGGAGPKKRTFTKTGAQEQGLSNKGRMTRVKTGERGAEDSEENITVEKGSKKQKTPKRGKTIAKTDAQQQTRQRHEDEEQKTTAEKKRRY

SEQ ID NO: 994757 - protein, 141 aa, Homo sapiens
TNWTSKLTTFSHPCSKDARVPMLDIRPGLIAQAPGPRFPLLQPGIPPQRGIPPPSVLDAALHPPPRGPFPPGDLFSQPERPFLAPGRPSIDNVPNPDKRIPLGNDNIQQEGDRDYRFPPIETRRALPDLLRWMLGMWLGDV

SEQ ID NO: 994758 - protein, 174 aa, Homo sapiens
KQAFLLDVQNIRAIHQHLLPPVQQSLKFVRVRNTLRQSVWTLQQTSNKLPEKVKKILASLDSVQHFLTNNVSLIVIGETKKFGKTILGYFEHYLHWVFYAITEKMTSCKPMATAMDSAVNGILCGYVADPLNLFWFGIGKATVLLLPAVIIAIKLAKYYRRMDSEDVYDDPSRY

SEQ ID NO: 994759 - protein, 309 aa, Homo sapiens
  misc_feature (157)..(157): Xaa can be any naturally occurring amino acid
  misc_feature (198)..(198): Xaa can be any naturally occurring amino acid
MGAQYNTRLDKWNSAPHTSSTRRWIGTHDFRLGLDEAVFHNWRLLKERAHFVVEEELFPNETPWYNRMRQSTNFLSRNCGKVGPQVFETFISQTAGGTESCRHTGYGGTTVLFALKSGWAKAYEPIGNDTFNKRNRSPIRRLAQVGNGTPQIFDEQXFTGRSQTINQHAHQISLVVEAPLQIADEEATELSSITHIYXSPTQCVHMRHREDLNKPTTEGRGYPKHVPTSDDVGQHGGPIEDWRHTHDETDLMCDNIARGKHRPQDSNKWAGQLRHWGEQEEAQQQKQQGEHNRVLLAHKLSEPHRGETK

SEQ ID NO: 994760 - protein, 343 aa, Homo sapiens
MSPRRGQLPLLADEAALVVAGARNLPLPPPPPPRGGDLMGYDRRGRPGDRDDGMVGFSADETWRLLQVDTWSPSRNGMMGLLNHRVAPDMIIPMQRWSWSHMVILGGPIITTQVTIPKDLAGSIIGMNGGLAGLNEIRHESGASNQSLDEPLRRIRTIGSSYHYRNTGPDDRMHSICCITRVKQYADVERSSNCKICLLSYSVQQDSGKFFKTSEDLKEPCLFMGYLPCCRTPRFLRVIGVPRFEGCAPCLAVPHQLWFPFPYPRVGGGQAASYHGNLEPARDAYSGMGGKNPPCFVDRVAAVLVGGRPAISVRLRTAYVCKRRQIRGACGVPPHRLLSRCPL

SEQ ID NO: 994761 - protein, 206 aa, Homo sapiens
MHHNWKRDAKQYRSALNGFPLQLIIFTSSNSTDYPSTDRCRPLNPQPTLFISFLDKPSTLHDNTNDPPITMPYHYSKTQPMTPNRGPLIPPNDLRTTMGFQLPLHNAPHTRTSNQAQLTIVPMSGGDVYTRKATYPNGHHHGAIPVPKKAFDIRDTSYYYSVRSIVLRRDFAEAFEHSSLVPTPYWGGDVGRRWHYPAHIRYKFQS

SEQ ID NO: 994762 - protein, 209 aa, Homo sapiens
MGNIMEGKSVEELSSTECHQWYKKFMTECPSGQLTLYEFRQFFGLKNLSPSASQYVEQMFETFDFNKDGYIDFMEYVAALSLVLKGKVEQKLRWYFKLYDVDGNGCIDRDELLTIIRAIRTINPWSDSSMSAEEFTDTVFAKIDINGDGELSLEEFMEGVQKDQMLLDTLTRSLELDRHRAQTPERRTRGGRHRRLAAELGVEASPCGF

SEQ ID NO: 994763 - protein, 114 aa, Homo sapiens
LLVLIVPILIAMAFLLLTEIETILGYIQLRKGPNDCRARYEATTTPYPLTSIEHSCTNRAPNTPDTSTIILYIIAPILILTILLLQINPPRPIANRPDRSSTLAPLVFISTSSL

SEQ ID NO: 994764 - protein, 185 aa, Homo sapiens
SFLDGNPTFAHQYFGKKLSPENVAGACEDGWLADCGSLRELCQVEESAALFELVQDMQESVNMERVVFKILRRLCTILHADRCSLFMYRQRNGIAELATRLFSVQPDSLLEDCLVPPDSEIVFPLDIGIVGHVAQTKKMINVQDVAECPHFSSFADELTDYVTKNILSTPIMNGKRCRGCDHGSE

SEQ ID NO: 994765 - protein, 355 aa, Homo sapiens
ISALARRCFVPSHAFVSAPEILNIRCRFHVSSATRIHSCPQLTLNLARGPGAVAESAARKREHVASALKHAGQRNPVGVVGPVGAAVSCLAAWPVPIRAEGLVFRGLGANLELQTEEEFELLHPGKPLTHPTISGFDRGDSHSAPVQSGLKLCQIIGQAGNPEEGRESVSEIVSEAPGSAEPCSAGWTQPCLLSGSPSRKPFTSFHPQRMLAIFFLPGELWNDNSGGPEDPVLPEETERFGAGPFSAGSLNVWSPLDPGVCAVPPVPCARLGSRPGGPVKNFLWGDEPPYTRCVGATHSTQQRQCKEARPINVGRGRAIKAAPLTGERQLLRCTPNHAPRERQITPHVQPQQLSG

SEQ ID NO: 994766 - protein, 80 aa, Homo sapiens
QEQKQMLGERLFPRYPNKHSNLAGKITGMLLEIDNSELLHMLESPESLRSKVDEAVAVLQAHHAKKEAAQKVGTVAAATS

SEQ ID NO: 994767 - protein, 94 aa, Homo sapiens
PLLCSVALCFEVSFLYSMVLNLLGGKYLEAKYNGKKVFTLFCQMFIFIPSWSEQKLVMGINTTELWWEKKRKTVFPSLCWRTLERVARPLCSSA

SEQ ID NO: 994768 - protein, 140 aa, Homo sapiens
MRSVAFSLLHVQEAIMKPLDHKNLDLDVPYFADAVEVGVTVWPRAAEMKHISIVIVTVIVISKILLRGRFCYWNSCFIYVLNLKLCSLFDFELLSFFFFSTTENVAVYIWESLQKLLPVGALYKVKVFETDNNIVVYKEK

SEQ ID NO: 994769 - protein, 301 aa, Homo sapiens
EPFIETRQDGVSRRFIPPARMMSTESANSFTLIGEASDGGTMENLSRRLKVTGDLFDIMSGQTDVDHPLCEECTDTLLDQLDTQLNVTENECQNYKRCLEILEQMNEDDSEQLQRELKELALEEERLIQELEDVEKNRKVVAENLEKVQAEAERLDQEEAQYQREYSEFKRQQLELDDELKSVENQVRYAQIQLDKLKKTNVFNAIFHIWHSGQLAQSIISDWVRCRGFLLDVGCNPCCLGPEGAAVHALGNNGRSFQVRMSLWKIYWGLANNWSATDGGRAGTCRDLEGSKEDKTVPKEP

SEQ ID NO: 994770 - protein, 300 aa, Homo sapiens
MSRSSVSTWKRQLSSWPSSTTVLNWAFCNTPGGPASSSKSFSEGSFLTSKGENSEEDEDTEYFDAMEDSTSFITVVTEAKEDRKPESGPGTTTVDWTSADNCIRWCLIHAQEFMQIKRRVRIPDKPNYSLNLWSIMTNCIGRELSRIPCQVNFNAALYISQRLTEDLEYNNCWTKRVNLTGSVAAYVALEAGFRGTPNPTVDRLAKPLSLDRRPRLAYAELCRSLGAGCHTEWSAQLFFLMAYTPEKTATFVEQFHEKRSENTRTKEGNTDNYAQQTYTSKTGESTQTENHNHRDNVKDN

SEQ ID NO: 994771 - protein, 268 aa, Homo sapiens
WTFTWAAEHCQVTCKCNKKLEKRQLKQHAETECPLRLAVCQHCDLELSVVKLKEHEDYCGARTELCGSCGRNVLVKELKTHPEVCGRVEEEKRTEAAIPPEAYDEPWSQDRIWIASQLLRQIEALDPPMRLPGRPLQAFEADPFYSRTTSQRSMAAQFPVQNNLFEEQERQERNRSRQSPKDSAENNAHLDFMLALSLQNEGQATSMVEQGFWESVPEADPARAGPTSLGDITGAADEDSGCRVSSGKELFPRELVLDHSDKVDPFMP

SEQ ID NO: 994772 - protein, 103 aa, Homo sapiens
GCSNTKSSDSWDSENTFASHTCPETYEDYGYDDTYAEQSYEGYEGYYSQSQGESEYYDYGHGELQDSYEAYGQDDWNGTRPSLKAPPARPVKGAYREHPYGRY

SEQ ID NO: 994773 - protein, 275 aa, Homo sapiens
DTSPCSMEYLVSRKLCLSGSDSDYVISAITSSHKEHLSLLSPRMAFPPSPLAMEYVNDFDLMKFEIKREPSEGRSGVPTASLGSTPYSSVPPSPTFSEPGMVGGGEAPRPGLEELYWLATLQQQLGSDEVLGLSPDEAVELLQNQVLSLWKGLLATIQGARERQEPSMSSCPRDFLDAALVSMSVRELNRQLRGCGRDEALRLKQRRRRSRPGYAQLVAPAAATGRGLEGRRRSPGRPSGCPCGPRWTAWSEADSIAARVTVNSGAWSDEPTPLL

SEQ ID NO: 994774 - protein, 184 aa, Homo sapiens
PKGTFGFHVAHGSGRRDLRLYVQAMADLDTAKLYSGLLRVGDEILEVGGAKVAGLGLAHIKELLAHAESLSIRVLETKAGPPVTQKYRCSCCHSYRTPDPHTQQEGLETCHPEITCERKMQFTDQASVWAVAEAVLIGPLQEEAEYPCVRSVKITNLYRSRDRESWSPPSQKWSRSFVGGRELH

SEQ ID NO: 994775 - protein, 145 aa, Homo sapiens
PKLDTFLEHIRSHQEELVYSACLLCSWDLSSSPRYVAWRFTSSYFHEQPSMNELQLTRESDHAAVIGRCVSVGVRPWYSKLTESLMRATMVQEEALNNVTRCAYMAVVGRSRSCEKYLHFRGGHFGDNQCEGKGGTSLSVAHVVS

SEQ ID NO: 994776 - protein, 93 aa, Homo sapiens
TDLEMRSGLLGQMNNPSTSGVNGHLPGDALAAGRLPDVLAPQYPWQSNDMSVNMLPPNHSSDFLLEPPGHNKENEDDVEVMSTDSSSSSSDSD

SEQ ID NO: 994777 - protein, 311 aa, Homo sapiens
MANLTLLSLGENEKNIVETKCVHRQAVSIYFEAYLYNANNCTSTPWHLPPMHMSSSQRRPSTAIEEDDEDSPSECHTPEKVKKPKKVYCYVSPKQFSVKEFYLKIIPWRLYTFRVCPGTKFSYLGPDPVHKLLTLVVDDGIQPPVELSCKERNILADTFIRSLHKNIGGSETFQDKVNFFPERASAGYFRENSIPKSTLKVARPACSESLGQAPRTFPISDGPRTLTMFTDKEPAHFDKPLHGKQLDHTLHRCDAIPTYTYHLEFNGHTHDKLGSTHNSPQHTQKKYIKDTSTSMHHSHETPTKRTNNSRQ

SEQ ID NO: 994778 - protein, 115 aa, Homo sapiens
GHGRISCGGGINVDVNQHSEGGPGGKALGSDCGGSSSSSSGSGPSAPTSSSVLGSGLVAPVSPYKPGQTVFPLPPAGMTYPGSLAGAYAGYPPQFLPHGVALDPTKPGSLVGAQL

SEQ ID NO: 994779 - protein, 145 aa, Homo sapiens
MNEEMEKIAEYERNQREGVLEPNPVRNFLDDPRRRGGPLEESERDRREGSRRHGRNWGGSDFERVRSGLEQERQGRRAGLGSGGDMTMSMTGRERSEYLRWKQEREKIDQERLQRHRKPTGAVAAGVGCRERPMGMFKDGPGANQ

SEQ ID NO: 994780 - protein, 268 aa, Homo sapiens
  misc_feature (162)..(162): Xaa can be any naturally occurring amino acid
MGEVTAEEVEKFLDSNIGFAKQYYNFHYRGKVISDLLGAKEAAVDFSNYHDVNSVEESEIIFDLLRDVQENLQAEKCTFNVMKKLCFLLRADRMSLFMYRTRNGIAELATRLFNVHKDAVLEDCLVMPDSEIVFPLDMGVVGHVAHSKKIANVPNTEEDEHXCDFVDNLTEYQTKTSGFPHQWNGRRMLVSPEFIAGELNYNVNPPFPEEYKNPFPSPISLERGPKGFPRSPDLKSRPISGRHDVGDAEEHKGLKRRSQRTRPYPTVL

SEQ ID NO: 994781 - protein, 213 aa, Homo sapiens
EKKPESAENPGQKRAYLLLLSLRLNYLQILGELKTYGGKVFNATLMLQDRESYIALLVGAKYGISQIINSKLNIISTLAEFANISRVELTEESEKVSMVKVYLQDVNGSDLCVLESSSAKDLACLIAGYYRLFVDPANSVFHWSGNRRPTHRVSAEEGYESRACSDSEESSEVDCVLEPLSDRCLVKLSLCRPFAREELPPGDSPHLRQAEEV

SEQ ID NO: 994782 - protein, 202 aa, Homo sapiens
ENPSPSATMVNFTVDQIRAIMDKKANIRNMSVIAHVDHGKSTLTDSLVCKAGIIASARAGETRFTDTRKDEQERCITIKSTAISLFYELSENDLNFIKQSKDGSGFLINLIDSPGHVDFSSEVTAALRVTDGALVVVDCVSGVCVQTETVLRQAIAERIKPVLMMNKMDRALLELQLEPEELYQTFQRIVENVNVIISTYGE

SEQ ID NO: 994783 - protein, 166 aa, Homo sapiens
TCVPMCVHGATCLTTGPMSDFNLWRIWSSSACESPSASLCAGSPLDFSEMWPVIFRAVMVANVCGPSVITHTFNHQNLTHCSRTLAQGPNIHPHSGTPLTWFTTNGDLPRMPWNGRACAFERVSQLATWTPSGYGATTHSTLPALGRPLGTQEPRLQKLLDLNLLV

SEQ ID NO: 994784 - protein, 172 aa, Homo sapiens
MVRSALLRPEAGAGCARLSAREGPHRCEEVTVRELRASGPMGLHGDGGSPAAGAGPWRSGALRGSVAVFASVAAVFTLTLPRSLLGETRVKYSQAASSPRPAPGDLRSVSRPRVPRWTPVPVLIPNSSLSGSGSGLCVSRAAQPMKFKHCPLCPDRVTCITCRALTVSQTKK

SEQ ID NO: 994785 - protein, 216 aa, Homo sapiens
  misc_feature (139)..(139): Xaa can be any naturally occurring amino acid
GGSRCRSEDVGGPRWVRNSGFPVGLPVGAVINGADNTGAKNRCISSPLKGTQGTAEQTSRCVGGGLTVVMATVKKGKPELRKRVHPAGGHSTSEELITVDKEWAVSHYTVGKHKLQELIGGTIRGETVTEALGPIYGGXVANRQVVPALGGPPGMANPNVAGPGNVANGILPEEICGYKQTQQQQGARAPQKDTPPERGGHKAIRRYPRLYGDPTG

SEQ ID NO: 994786 - protein, 80 aa, Homo sapiens
IHVGDGIVKPTTHRSYSMMNVISGIKRIRSYGADRNSIGTVSITLNQSLGWIACHPLDPIHCSYKEMDLPVSSLMPPNDR

SEQ ID NO: 994787 - protein, 446 aa, Homo sapiens
GKSVPTDEHGCKTGPSHSLPGDMRLESDSHVWCGGSVDSSRVLSRLMQTYETWWQCLGMQLVSAQPTTWVGLARALGGAYCEKSTIRRSVRGSHSENHSTYALHVTTLGAVHTDYIKRRFDTEKNTRDWYRLLEDGQRGHYTQRDNVLREECGQGALKGSWAEVHVDVVDERDRFMAPHLNRKDEHAKGSIPAVQSGAQKRHVLAALAFNFFDRPSTVRGPPHPVTLGQQSRGLKTVQGRTWVVPESNSLGRSRECAVGQKGGLGAQDQRVYRLCEHTKRVLVCGATVDLGSMWTSRRGIQIRGENGTDKWEGGDTVVYNQKREGATITKTQDMLRMSAKSNRAMNRPGKETQSRKGVPCSPTGWDRAKLSDGQVKEVPGQREYKRHFPHGERTREATRKPDNQGLPNTNPGAMCSNVTQGEKMHNMKKNDTGGHTQHNEEQRDNE

SEQ ID NO: 994788 - protein, 467 aa, Homo sapiens
AAIAVMLGELAAQAQDQSCEYSLMAMATSVDRSFRGMLCQEPERPGDLDVERASKKRIRSLRLTEEQEDPYHEMTAAEEAGPDKQQSRDTELTRWSAPAYEGLPACCLMVSPCEDVNDMHHEAKPQTDRTCENPSINTVGILTDCQTATARLRGHGYDAHTSDKYSCKSISRRRDEQWYSTKLRYPGFSSSQAILLRNPYTQSQEPQRLNTRQRNMAHKYTTHGSEGQTDTEQYPLNKRHEKYKDPRGHKYERTINCHSNTHTDERSDTTDDQRPKQERQNEIATERTTKLERKEKDTQTRDRQSDEQKDTGPTQSTRLPAERQQEEQAEDEQKQEKRNPKNAKLTAGGKKVEYGAKEAKYQQTTYTTRDTQGIQQGDRWGSRQSEETVGSKDRRDNEGSERRGEGERNTRRERRTEAEDSKQARAEERGDKRGESEKESTTRSSTNNKQTTADETAGDGGPSKRTR

SEQ ID NO: 994789 - protein, 127 aa, Homo sapiens
QVINTCSLCKGSGEGLLCRPKQSQPGARSFHFSENLTSGCILFCPWHQACITLGDTLVWVTGTGTHSPATSLPFPEDVVAADLRKSFGTCGDILFFSLWRSVDRLRGKAAFNLSPALQPELHKMAAH

SEQ ID NO: 994790 - protein, 323 aa, Homo sapiens
GNRVLLNWLRRECRGGNHGVSDNHPTISGIQSRYDLTDSHNRYSLRMTGCATEYTTGDTLSEEIYNDNNSTRPLHTSDRRQRASGTYRERTRETTHKTRTREPTAAGPHKQGRERTETSDSQQPHHYDTHVRPTQTTCQKHVAQLHTTQQTPTHTQQRHTATLHKEQHKYSTTAHPKKHAPNKNTVTQENREQITAPKRRRGAPAHTETKGSTKLPALDGATKTGTMGQKRDESTTHQDMHTTHQRSDLRDKTQETPQQKMKHETQNAHKAPPRHTKRKKSTTKKQRRQRTQQRKTHHTNKDKQAAETTREGETRRKERHNTP

SEQ ID NO: 994791 - protein, 103 aa, Homo sapiens
MDTLWLVTHSFMRVESVLPMRCSGAILRCKVPTESGRGWSPIYIAAEAPVVSWDYQGSLSLSGTIWVLFPIYTGLVSTEGPLYCFFGFDLLGAEMARRVALAL

SEQ ID NO: 994792 - protein, 115 aa, Homo sapiens
MKKKIWWSYTLTIAKATERTNDCKSQEEGETDGNRKNKEKRRSGTENVTEEESERKVSAPTRRGEYTVDGKVVVTATYGLPDSNRRQARGDTKSKTRRTTDITHRAGDRGQAPRR

SEQ ID NO: 994793 - protein, 424 aa, Homo sapiens
FYIQLQADVFHSIVYAGYEKPEKSDTIRAFMANSHLRSVLITLARRVTGVLTCAEQADVMWRAMATCALNLVDNPSGSPRCDEEYSFKVPSYTHEGENTNPLSSWLPSTSSQASSQRLSAWLLLKLRRRHTLLNDLPDGSAPLRRTERGNQTESMARKPLTPPSLARLHSPYTSAAATTHYYSQPRWPLALQPHTPSAHSSHFSGSTAPYPTKAHHHASTHSTSNLLDCLPLRPVTTTSLALNSSLIPYGNPTHPPTTTPLHHSTAFSSLLHHPRLTLHHLLTLTLFIPNPHTYALPSQSMEHQTQHSHPIHSFTQHRLPPAHKLQRSHKHHTTPQPHMRPTYHTSLIPHPIPIIPPTSSLPTTSKSSLHKYTIISISPILPSSTVHQPPTILPQYLHNTPSSLPNYFFTYTLPYTSSTPSAQT

SEQ ID NO: 994794 - protein, 173 aa, Homo sapiens
MIRKPSPSGKPATLKICSWECGLGFDALVLANEHGLMIVRKRDRSPSKYCAFKRTKCSENKSTMLNFSELAGLSHHLLVMLLRTRRGYSGVGLLSPLQVPISQVFLPVNRLMRRHDSGMSGVMLWLNFDSFVLGKQGILYLSAGRGLVRLEYGKGGMQAVAQFLKGWFRKPWV

SEQ ID NO: 994795 - protein, 326 aa, Homo sapiens
RTRGFDYPPPATPHCTVFWLLVDLNRCRVVTDLISLIRQRFGFSSGALLGLYLEGGLLPPAESARLVRDNDSLRVKLEDQGLPENLIVSNGGDSSFPCRKAKKRAFKLMEDEETDQGYKSLKKHCKRQEDSGQNEKASDLETKLLPDETGRTKSKKKSKVTGSPAEEDEEETKKKSSKRKEKCEPKKQTRGSKSSKQQTPKEGASQNCSFPGPPQKASGKARREKQHGGKRSAQATCRKLRRPETDKKATDRPDARRHLSENGASSRGQNEPVTKNGSAKQRGPKQGVLKSERGRPKTLAIQHQKEKDQGSDKAQHRRDTHTTGEK

SEQ ID NO: 994796 - protein, 292 aa, Homo sapiens
MANRGTGAAGSSQTGDALGKALASIYSPDHTNNSFSSNPSTPVGSPPSLSAGTAVWSRNGGQASSSPNYEGPLHSLQSRIEDRLERLDDAIHVLRNHAVGPSTAVPGGHGDMHGIMGPSHNGAMGSLGSGYGTSLLSANRHSLMVGAHREDGVALRGSHSLLPNQVPVPQLPVQSATSPDLNPPQDPYRGMPPGLQGQSVSSGSSEIKSDDEGDENLARHQNLLRDQKLDDDQEGFQIQFTRHNDDEGPDPEQKGEREKNGDGPNGREPEGPKSRGVEVALGAPKGEPNKRI

SEQ ID NO: 994797 - protein, 293 aa, Homo sapiens
RTTLSSRFCLEADKQQKIARLLQLWEKNGYFDDSIIQQLQSPALGLGQYQATLINEYSSVVQPVQLAFQQQIQSLKTQHEEFVSSLAQQQQQQQQQQQQQPQPQPQPQIQLPQMEADVKATPPPQHHHQPQQLPPPSHQLPSQMTTSLPSRCLALQSTTPLQVSRILQLLARGPGPMSRSRKQAPWFDQPHPVAPWGQQQPLSNPISTQQGGPPPLPTLEQQATEACGVEAAEGTPGGNWAQQCRGTTRPEIHWITCLTGLVTYSNHAGVYQRIPLLFHAPHWGSHISQKLHA

SEQ ID NO: 994798 - protein, 148 aa, Homo sapiens
GLYCVAIRDFKQAAELFLDTVSTFTSYELMDYKTFVTYTVYVSMIALERPDLREKVIKGAEILEVLHSLPAVRQYLFSLYECRYSVFFQSLAIVEQEMKKDWLFAPHYRYYVREMRIHAYSQLLESYRSLTLGYMAEAFGVGVDFIDQ

SEQ ID NO: 994799 - protein, 119 aa, Homo sapiens
MTAPDSGSDGDTTHGLLLEAADGTGHGTVAHTAKPDGLPGSCGRPAVTWPALPVCEVAEPLLCSSLGLLRCTRELLPGTEEEHQPVPGRAELVLWQLPFPRQTCCLSPRQGPLSPPTFP

SEQ ID NO: 994800 - protein, 222 aa, Homo sapiens
MLTGKFKIQCHSSVSPLGHTPNPHGVALRRRYERVEWPHWVTEGWPAIRWAQVAPHGWVLMGPGTCVAQQRRIVSGHSQGFRAQFAHLWALRTDIVGGLSQLRCAPHVINTTSNVHHYGGSHPRTRCVTQVGRAFTENMNGISAIKTFTLCFAAHTCYPRYLSFRGTLVSTHKDGKSENFVFIYGPHDTPLVAPKKSILSTTTRGALAPGIHKGTRQTGADT

SEQ ID NO: 994801 - protein, 132 aa, Homo sapiens
MPGATPTFLFEKEGAPHQAGVALIKTNDRAAGGRVKKQAAVAERQHKSCLLVGALCGREREHTTILCGGGGTLFVSGNTPHHQQRILMTLRQEELNNKKNRGVFMWVVTHQTILIVAWSTRKSIVSAHRFDI

SEQ ID NO: 994802 - protein, 150 aa, Homo sapiens
MKPAGLHTPQEESVNRYAASDYTKQQHGAQHNGATSQGPPQQSIGTKNSEGTAKHSEAAHYDPKKDKCQDHNSMRRPRPRSLTGTGKTPVHRNKTRTANRPVEPHNENHQMLGHPEPHNSTKPNPTETENPTRAERKRTRNNKQPTTAER

SEQ ID NO: 994803 - protein, 175 aa, Homo sapiens
MASYPIRNDVRWAHSYEYHKDGVAITPTEQTNAGYVSHALCQESIIIALNVTSFSDESIMVTLSDEVVPVVHKGLHISNLPRPHDEAPRHEVAADPPQVVRGYESTHPNGDIQVNANHMGATGTNLPTGHGHQTHRQAREDTKKQKGASKNQQTSKHTRGEHSSKKATPYSRHAD

SEQ ID NO: 994804 - protein, 257 aa, Homo sapiens
MLAPVDILTGCGDPANKGYTWKTKVPGKKRTQVRYVEKRGSVTKRKTVQNNEATRQYGEQQVVYFFLFLPSRLPSLLTTHARSRRHKRRDTNIHKRTQKQTTRQPRGRGKARRKKEAQKKASETERKSARRREEARKEQEGQKTTNYRQEENRSKRDEREARPNETTEKERGTEDREKKEHKASKRRGEHSSERGRRQNGTESGRKGSREGRGKQQRGRGTRNAGEERREKRKRRGEEEEEGRDERGDVTENADGKD

SEQ ID NO: 994805 - protein, 124 aa, Homo sapiens
MAFEFSQCQKEANAQAVSIFQNEEQKGRSLKPRVKTSSNWSPTAQHHLGHLRSTSARPHTVLEREEHLCLAAPRPGKVTERLCPAAVQTSKCEVTALCVDVSAFPKLALSTLKFTFELNNKIEK

SEQ ID NO: 994806 - protein, 164 aa, Homo sapiens
MTPTGTRLTEGHKNGAPNGHRTRSDPVNGHGGHAYGANSEQRTSGANATTTTVLAESKKIKTEHHILRNKHREAAPGTDNCREIAAQLTHCPSPPSRCPAPSLVETETTKQKKQTKEKTRAKRKKQRRKQKEKEKKARRQTKTRTKKKTNRSKKKRKAEEHERN

SEQ ID NO: 994807 - protein, 33 aa, Homo sapiens
MTREGRRREKQTTESKEATQEKKRETRQGEQRD

SEQ ID NO: 994808 - protein, 198 aa, Homo sapiens
MQKRGARHNKHYADGETNKTDDHNAITRRERHQPETDITTKTQRDAHPTHKKPQARRTTTPHSSDTARERQPKTGEHTKTEGTRQTHTQPEQETKTTTHRSTANNTTKYGRRKRKTAEKQQKKQTPREETKKKTKKTKTAQNRKKGTERRENKKRRRERTNGQTRQKNRATQSKTERQREERNRKTKKTRDKQMRQQE

SEQ ID NO: 994809 - protein, 282 aa, Homo sapiens
YNIRRGIENYIMMIMDLQYNIMDFVQNMFKCCGGEDYRDWSKNQYHIAVPLDPWLWGALSPADFLGIHDKQVRTITIVVVDKTISQRERVTVVAAMVINVAEGSSNADDHLVFMDNYTIMEVGILLQQSCFPSCLWVLLDCLHVHHPGVGHHHGALCHLMGSWGQVSSPSCRRQARDAACATPIRAQPAMAAPTRTVWDSTSQSTSWGWTGLRALCPHSVLSQSQGCVCLCVGPRLCSPGSRAWAPLRGFPPRQSGSVPTWGRGQGLLLQGWARGGNRRLFS

SEQ ID NO: 994810 - protein, 272 aa, Homo sapiens
GVHLAEHAAVDRASQLSDVLRTAADTGSFSAVSTRQTSLPSAPMCRRPGSYPRIRTLRVLPGPETVSAKPAPVDSFVQSGCSIASTNPADRNPYGGARLQALLLPLLWNLSFVGASESTIQMSFCSQRDNQRTNYGKTISTKWGRVAGPKEVARKKARVTILATPPFPEEESVRPQELQNLSDDDRQQLWKEIRLQPDGHRALMKEEADEKRSDVPSKRQLNEQQAIMGSLSQTNTLELRSNRCHTLQYLNTGRRTVARIREAVKIINAEGV

SEQ ID NO: 994811 - protein, 134 aa, Homo sapiens
EAHFFSAIDVRCAGVAINPFLPNEIMLLTTISVRFGDRSEVLFIGLQLSLLRRCGETGFTTCTRQTVTPSRSSTDLDLHMQPIGTRLALTSISVLLSQPYRRLQVTSRIRNTCVPEQVRSSKRTYLTLESVTQG

SEQ ID NO: 994812 - protein, 253 aa, Homo sapiens
MHVKSSTSGGKKMQWDTHDIIAETQGMLCLREGACVVCSRAEDAQWNVAYTSITHYNFTRKCAENDEYLGGKTKVAWLVGSAPGVGKLGRPRGFLWHRSRGVGAREQNVGKSTSDDVGEYYSAKRGLDRKFSTKKIVEQQGTVGKCSRFPLYITTVAGGKQFITATDYTQRGRVPWFAHDNGPYVMRAIPYKINQQYTKKDEGRRSCCRKKLCPTQGGGVYQPCGRFIICQMVVKTDGTAEEENTSCDKVGGV

SEQ ID NO: 994813 - protein, 164 aa, Homo sapiens
YRRPTPFGIHAHRMGMVAVPERAITYSDSQRAPRHAFNALMAEHIHYGAGNMNAYERASGIADRGPGTVKERAPPERAGPLWPGYNNSQSMGPPGGQPGRLPSRPDIAAAEAQQAVFQPSPLTPQTLHAGYAALLQATDERDKTSTYRDCNPKHSGRQQAPPEG

SEQ ID NO: 994814 - protein, 50 aa, Homo sapiens
MATHSWQHTPEDNNNAGESKKARAKTVKQNRYLAAHKGKDSIYNNDEASN

SEQ ID NO: 994815 - protein, 302 aa, Homo sapiens
MPDAVGQAHPILHLHYSLSLQGSTIRTSTPGSMIHPLITPMGIKALLLGTHIYVMWIQAITLHQLHTTDEQNTMCSELNNAVHRCPRGPVRITFICPDQANVIWKVASEPSRKQKWDGPEACTIGADLLKHLYKSQTPRPQPHAIITLMYSKAQYTNPAHYNLRPTHKDRDTQRLAQTTPDTNARQRALKQRTSRSGSTHGEHEEETTRHQRNKHTQAQKQHKGTLNLTNRTHKEYEADTRTQKGTEKAKKDHLEYSTNDRDNETDARTTHSHNTTRTTTERSKNKNKKPRNSGTHQSESGT

SEQ ID NO: 994816 - protein, 280 aa, Homo sapiens
DEMIREAEIRWRWAWSIMKEFSTDDDCKVKAPRAAGDARSLDLSSSRARTSLFNTPLRTPGSSKDQLIDVESDKATGRDFVPKAAMMCSFSLLALRSLSGMPPHLFLLPSPRSYPSSFRGLMRFMNVESPPTGSPVGSLCPPPARMASPPSGFVYLLFRHLISGAVGGCTTPVPGTCWERTRGPPPGRRACPLPLHAALPVIPRADPRAVGAGVPKRGIQRTDRGVEEQWVDWIVAMRRPRDQAQKGTAVDNNHIPMAVVRNHGMGSEDMPGGDGIAPRN

SEQ ID NO: 994817 - protein, 145 aa, Homo sapiens
MPKTQSYTVPAAFCGIIVYHKKQSLVPYQVADCCSIRKSADCSSERLEVHEGQWANIVESSKLLGILSTFCCKNVNGNMKGSSMELINYFGQVMAIFARNIGSSLSMNMGCGTTLFVSSPIPVGAVVQYVSPLKRSFTSLVIWYS

SEQ ID NO: 994818 - protein, 288 aa, Homo sapiens
MSLLKLQASNVTNKNDPKSHQLSSLHRKALNDSVLVKEYSDVETIFSKYGACGRLYLCTRGYAFVHVLQVSAMPGQLCWDGEWAGAGRADRWISQLMDWMEPKSLIGPRGYREQHLPYTVDTVFDYDYLPGLSSTERSRSEGSGAVCRPCHMPRRSRVKRPGSESLGPACRTSVSVKLLCRSHSVSPPAQQDQVKERELRPSDGPGQDKSHIDALVARVGESGEEKAIQMAKQRWRCRKVEGYDGGKRGGVIGEAQNIEHPVTATDEATGARPGSRRKEPRESTRSRP

SEQ ID NO: 994819 - protein, 203 aa, Homo sapiens
LNNLRIGFSHAMRAEECKVVVRAWVRPLGGPAPEIVSCRRPLATSSTWSFSSSHSVIVAIGLKLAKCDGHIGNGGTGRILRATLSRELVNSWTEYWETTTGWLTVSPIGGLEHVVSMPTKRTKCKSQPVNVFFNVNDRNPECETCPNDNTLQKVYSVTHAWAHQIQLSYEHDAYTNYLHIENAYYTTGGCIAGYSTVVDGNIV

SEQ ID NO: 994820 - protein, 132 aa, Homo sapiens
  misc_feature (105)..(105): Xaa can be any naturally occurring amino acid
MPVRIRIGVLLTSEVSGASLVGSPLACVITEQPRLCVLKLADRVSRDFITMDHFILSIRFRYSVPPGCLPVTLPSVTPIAGVPCASFRLRVAPVGGLGQLELELXCCGPAPPCSCIAGPTSSVSRIEGLRVV

SEQ ID NO: 994821 - protein, 76 aa, Homo sapiens
SSRSRAAPFSMVLYREIKPQLYWARRIKFFWWKRVHLPKLDIKELLPRKTTSRIKRTSQSSLQEVVFPKIIGENAG

SEQ ID NO: 994822 - protein, 242 aa, Homo sapiens
MLFSSLIKTAAVAASLIGSVTALPAHQHNQHKRGVVVVTETEVVYVTAGAPQEVSGESTTVLWSLSFLTPQLPLLLSLPTHSRLQLLMLLLTPLLQLWPPPPPLKPLLLPPEMVLFQMMTLPASLRCQGYYLLSITSSGACKSLSEVKSDLAELSFYSLIEMSGVDCVPSVNVLRAKGLVKRFWGSPPGPMGRVPQGLRQPHGWAGYPVSRTTGPGSSVPGPSRKFGGQAVGRLPRVVPSTR

SEQ ID NO: 994823 - protein, 338 aa, Homo sapiens
ESSGTWSNEISFDFGPNGEFALPVQPGATSSPTLTNTSYRSLAPFNACLARNPNLERCSPTSLGTWGSWIAPRPTDDMFYVANDEVMEPEARAAGEGPNTLHQPVTPPVRVTETYEEYQVSTCETLVRLSSDLHGSLIDRPSRPAPESTRLKHPPKTIHDSTLYAWIGRTRVGQGDAWTSSVECCPMPRAPAGACPDLRDLDPLWRTLSVLVSPVCRCLFLVLASSRPCESSLLRLLCWPCLPIPHSHLTCELLPSRRSPPIVSVSAFPSDLGLTGVPPAAWLFLLQKADHNDARTYRQDPDRPKHRAPLASQRAKDTRLPPAGKSRLTHDNTHHPHP

SEQ ID NO: 994824 - protein, 391 aa, Homo sapiens
MESLRSPRMPSLLNDRVLRGQAEGGGDLCVALRMSYFQIVMQKDGPCRSMRRDRGPPWMTGGLRWNRELRRQEVFPTETMKLPGTGFLISQEPGETRDRLQAARGASIGMIQLDLVTMKSKTYPLHGRREERLCTLSTGRIFLYRDSDGSVPVQTGSLHPGVTRLKLGTLGREMTPDECGIEHFLSRMPGGGRSKRNRIDPQTRADLRTPSVPQSGEVQLPIRPPWMADGAAEVGAQSKGWNLTEAHNNISGLLTGHNTTKLHQRDHVRPTVDSVPARKQNGTQQEDQPGQGQENRHPQRTRKKREKRKQKEERDLENKENRRRQNRRQEGERKRERQKTEVNQQHKTATKRNKTGHKEKRERKKKTTRRRRTAVEEREIKKRAHKQHTRA

SEQ ID NO: 994825 - protein, 446 aa, Homo sapiens
KKKQKRQAELLEKLPAGDTKNWHAEKLNRKIIEENITSSCTVPNDQLMCEYCPEVKLKTTGLAGRRLTARKTDTGDKMRDTLDGTHGNDDTTTRPPDDTRHNTTRQKTRNDSHCTIQRNLSQKTIKKHHKRCRYRNLQPTDQPSLRPILLTDIGPQPPSNFGSPRHTPAHPTPHPPHLHLQNPTHLAPPTLPPATPHYSTSSDNQPPTIRTTKLPPQQHFYPEAPPLTWTTTHPIGSTLPPHTMRPRPPQTHVPRAGPQQDPTTKEPPQHRPLPTPSMHSTIDKHPTDSTTARAQPGGHHPSSTDPNRSALPATHAQRERPPRPHTPPPPHTHKTPNTEQQRPDHTPHQAPPSAQHTTPTHAPGGQPLSHWRAGGTQRRAAKPPTRHRRHQTPTRQAPQQQPRRRRANKGTRRAATTPTRHTRAPNHPSHPAAHRAPPTTRSQRTT

SEQ ID NO: 994826 - protein, 225 aa, Homo sapiens
KALQRRRRTPEPLSRTGSQEGTPWRAPPRCPCRARHPQDSLVATPGIDKLTEKSRCQRMAPCGSLEPEPQQSLEGLGSPAKGEPQARHGGEQRADVQPHQGPSWASEKPNARVGPLLGRFEAAACRTIMRLAAVCWFPQVEKICIDQRAWTDESEILRVPAAIGTLVGACCPCPNPILIRKYQANSGPLAMWFRTYMWGVIYLEEMSDPPVWYDTDVKLFEIQRV

SEQ ID NO: 994827 - protein, 176 aa, Homo sapiens
MAPLTSARSTNSPEPTPPPSIQQRAPAYVTQYASPYTYTTNSAPPPLQQPHPPIRPHKLHRPRHTHPRARQPPPPHRGGPRAPNHAPDTQLPPPSNRIIHAPRPPSQTNTPTPAHEHTPPPATTHTHRPPAPAAPRTTNTSSARTQRKSPHQLKKPTPTTTARAHATTRHPTHPQE

SEQ ID NO: 994828 - protein, 189 aa, Homo sapiens
HASRTRCVVCQKTVHFADQVQCQGSSFHKSCCLCMVCNMHSGQYHLWTCMVRRFTARSCYGQKYGPKMAMGYGQGAGMLSTDKGESLGIKSRGSRLATGSTSNPNASNICPEDWWLRTLPPMLPGSAMLRKKVHCVLVEILCHNGLLFDVPTCGKGLESNTLADKDGEIHCKGCYAKNFGPKGFGFGHR

SEQ ID NO: 994829 - protein, 185 aa, Homo sapiens
MTKKAKYKKRERRNHEERQRKKDKKERRRGQAEKTKKKSHKTGQKNRRQREKKARKENGKEKKNKKQAKEHKDKHNTEKEKKEHKQEPDRTTDRETSRTRTADEGPENEERPSQKRQTNKATDNTTRDDTGPRRNRHNEQQARRQNTRPTTAPKQTKTHGNKKERKKKRKKTKADDDNDTHNQRR

SEQ ID NO: 994830 - protein, 295 aa, Homo sapiens
MSCCHDMGEVILMVCYDSVSLLEKKEGGAFYSLELRMYVMLTVGNITGNSEVSSHGKDVSSLVLPTARPVTSHISPSKANGIYIIVQLWYRHHSLSEQDSINWIYCFCIDELFTSLDHTITRTKFYDHNGGYAYCNMKLAVSLVFQHFLYTSNMLGMSVGRDLLEIPIMGLRLRRFYNVLYTRLCPYRFEFQGPQSLTGIARTLLFAQFPSVVNWSLQEWPLLDWDSARVALKFITEVCLAHLLLRLQVRDSLDSLAIGDLTFFPPSGTRYFWPTLYHFRTVGWFPTSSSWRVQP

SEQ ID NO: 994831 - protein, 130 aa, Homo sapiens
LDSRSRAGAESGPQKSPEQPRPLDAGLSYQSTPRRGAAACRSRTRVTIYLTTMSSEAETQTDSGWTITDRETIAEEYVIRARAPDEHNSKRIKNTVKMEEQRIRDRARTKEKEKREAPAWRQKYQSEMSK

SEQ ID NO: 994832 - protein, 164 aa, Homo sapiens
MQEPVGNIWLSPNHQKTTSCGGPTAFKKRDAPWKHQYHFFRRNTTVREAPIVWPSKPPIVCSLLERTSRKLTATQKTRAATRTTNCAGVHTQLPKIVGLSERGGQNTSSHNTDGSPASKRVLYHNPGRATIPAHQRGAPSLTQQRSGAAPTPFMNTPLGRDNLD

SEQ ID NO: 994833 - protein, 314 aa, Homo sapiens
TKWKLLEEQNVVKSSRLPDIFEAQIAGYQWVSLRQCTVDGGRVEADLRTLPGCECRTSRISTGTTEIEARRHECAVRNRRSLWLLIPTDVDAVLHWNEAMRILGGQGSRTALEMYDDHTSSGTSLRRSSYQELARSQISDDICGACSWDDKFCSLDLETGDQFGYSVNGTRYRREIGPNCLPAASRRDMLVVRRTHMLLRTHLKPQAGMLVDELRNTRNENCRDEAGIQQGCTAVDRQHPRTRRSQGAEPPIGMARERGKLAAPRDGRAKQEEPETAREGAKQDMGQAEGRFPELMNAKLASALGCPSPRGEGR

SEQ ID NO: 994834 - protein, 243 aa, Homo sapiens
MTDSLQKPQVVLLNNNKHKQKHTKHTQKHNNKTTNNNTNTQRKQQTHPPTRPARTPTRTRQRKTTHEKKQDAERNGNKKTRGKAARPHTRDNAQHPSERTRDTAGRESRAGRNRAQGGRRGREASTRHERGARRRTQRRKRATRNQRTRAQRGQKRRRRQRAGPDNPEEHRLRWNGGKAGLAKSTDQKEPENRHTTKRTNRKTKRPKAREARRKDEKRKTTTRDATTGEATQESKRESEIEAG

SEQ ID NO: 994835 - protein, 368 aa, Homo sapiens
MAVLAGSSACGRHMAFAADGSSTRLCHAGNPQRLKPWRFSLAFMQQRCCNLYKDTFDIKHNSSTSSKAPNTDRTLTLPAASDGCMAAGTLHVPTSTKQELQARADRQALGSRHTDYTCARLRQHHPQHPHWRNSHTDNGLHAQEHPIQTCATASSDWRTAHAPIPHHQRNRSAKPSHPAHTTTAHRYHTNPTWTQDTGTTPEHKGNSHLAPADNYTLATPRAHNPTCAQAMNTYPSTHKASTMEQHRLAHHTSGPPPPSDHDQHHHNRRQDPTPTHRTATPKYETTQHSTKYNPDAHDPRRRHPTAHRAGPTHSTPPITTQRGPPEHRTTPETTPTNTHTRAHDTRPPPYKAIKHHTNNHEHKQTTKR

SEQ ID NO: 994836 - protein, 333 aa, Homo sapiens
TRGIHKLKPSPDPHWGASALLQPGWLSSILSLFPLVCHHYFWRAWEWLPALYPGPAVEVTMRTSPRLEEHALCRCSATSPCDSTVQIPAACRGRGAKRGIPEGLRGRRRNSGVDWTVAQEAASQGPTHRRGLTDGQPLTSHWTACTANHLIWLFWAFALGWRHCSYWPHLPAYGLCPSYLKLLSKLELTIPGANIPMADPYVTDCTPPTLRRPDLENCNVGALGPHRTMQRDHITTPLSHHMRPNKLKQQRTNPSRPSHTESRHGTHAPTNTTRAPAPSKHTAQERRAPEDGSTNKRMRPDRKTTPHPETGRAATIRARTHNDEPATRRTHPQ

SEQ ID NO: 994837 - protein, 157 aa, Homo sapiens
SRPGVACCARMECREMPWDPERVLQPGALPDRGQRKVSAQDGPGARVSSRLGNLPTSISIRPVADCASLVIQALDGEMRNARRAILYIGDFSESLDTPWNDDMNAISCGKEGRRMLTPTFSLVSIIPIQWTGRLHWKSKEKEFDRCWRIFPNDLPGV

SEQ ID NO: 994838 - protein, 113 aa, Homo sapiens
HPFAVSDDTTSSSPLNLYSLADGSAGKQDNKVAKQYLTKYKQALDLSLQICALNSPQTTLNQLQPHCSVRTYVQARSDVRLLTPTQSTDGHYAVIHRQAAHCALEDREPLRQL

SEQ ID NO: 994839 - protein, 114 aa, Homo sapiens
AAEDDEDDDVDTKKQKTDEDELDSNTRGKVKLRTKKGRRELFTLHFRRLQNLNVVTFEIAEARPALAGASATPVDDHALIQLDQNPKRMKKLAKVGGGEHKKPKVPKGPACIFL

SEQ ID NO: 994840 - protein, 199 aa, Homo sapiens
MSLSRTTEFPVDTTPLTVVNGQEHQALEHRSFYDPICKVSDGVLDPVDRGVREPGFSPGSDEARSGLQATRLVSVSKIAEDEGTRKREGDHEVAQQTEKIAWGLTHAFWRALWGQRTSEVYTNNAGAQLVKGPDRTFLPVRQMLRPWWEARRYGLTGVVAHWLMDAYMRAKSEAGSAGMCNDAGGQITDSLFLKTSPKE

SEQ ID NO: 994841 - protein, 268 aa, Homo sapiens
  misc_feature (99)..(99): Xaa can be any naturally occurring amino acid
MEIMEVQKVMRNTSHGIKTIQSYISRSNELCLATYGSMCIDGLIFQVKVQKNSSCESNKMDFKRSTVLNLIVLSSLPGEANANSSCDNSLVYNEIMNPXKNNTQNTPTVEHKHKQDKRTNPPNDTQTQHPTEGGAPTPKNTPPREESTRKVQARPRTHYLTEPARATLKTTDALNINQGSDREPITTHNTRCITGQPNLSSLHAHILRRTRHIPPSSAADRQYMYRRPHPHEHQTTRTTVKKPRPRAIICGHTPRSHITAHHNTMSPR

SEQ ID NO: 994842 - protein, 135 aa, Homo sapiens
MPRDPSGLDLFFRYPFQSPDPPDLSLNGAANKKHRLGPICESREDPLHLHRQKAGILTAAREGTANPFGGSGHQQLGEHKKQRCDFSGAETMKARWGPMGLGHSLLLIRIAFFGCFLCADCFSRCPYKKEQLKAG

SEQ ID NO: 994843 - protein, 109 aa, Homo sapiens
CVDISSCFGILMAAETLTELEAAIETVVSTFFTFAGREGRKGSLNINEFKELATQQLPHLLKDVGSLDEKMKTLDVNQDSELRFSEYWRLIGELAKEVRKEKALEIRKK

SEQ ID NO: 994844 - protein, 340 aa, Homo sapiens
MPHFPQWTWHAVLLWPLWFNHAWPCNDPADCKCPVQMPYGCCLHLPLLPLRLGPILAHLLLLAPTVFCVPQRSGAAACALLCFQAFGWKLMWFGLAFHNDMCVPWTIGAFLVALLSGGAGTNVHCDVPCRTKLLHAGFDMDVTWFQRSSVPTSLSEMPFWAPQENWGGTVSWLRMTPGQPWSNPKVFDPGHTGVNCPRSRANPVPHYSATRRQTAFEVHRPLMCTAQRGHSSHSCPFRRNAPSRVHSRPLFAQPAPGRPFRAISLGATTHQEWPNCAHGPGSESLLEYVSGPAPGQRRVSMAPFPLGSTFREFPVSAARSICLDVLPPVVVGTGGAPTLR

SEQ ID NO: 994845 - protein, 204 aa, Homo sapiens
PGRNWARFSVGNVRLSLRSWSAFVRIFRGRRYRRYRQHHLPSGRARTQRPGSRVREARARPLARVVAAPRKPPEPHTVFATEGGGGLREEAEEERGKMAAVELEWIPETLYNTAISAVVDNYIRSRRDIRSLPENIQFDVYYKLYQQGRLCQLGSEFCELEVFAKVLRALDKRHLLHHCFQALMDHGVKVASVLPYFFSRRCSY

SEQ ID NO: 994846 - protein, 250 aa, Homo sapiens
MTTIQCAKNNRRTGQWPREWPRRLIHRRVEIPIMQCFQETYALPSPHKSKGGGDDCSWRLRCGSSAMCESIGPPMRRNGLGASITIRGGRMAKWVNLALLCPSVLHGTRHVSGQTGDVNRMEKYCIQKSIKHRSINACPCAIKVDLGDPHVAKVIRGTTIENPRECDLGCDPLGHAINLPPRKTCGLGPPGKHVGREWAGGASSKNIIPCLYWGAGKGWWGKSSLELERGKSLGMALPESPTGEVVQVVD

SEQ ID NO: 994847 - protein, 147 aa, Homo sapiens
PRPHQYSIFEQASIVESLLRHLGLQNRRINLLSHDYGDIVAQELLYRYKQNRSGRLTIKSLCLSNGGIFPETHRPLLLQKLLKDGGVLSPILTRLMNFFVFSRGLTPVFGPDTRPTESELWDMWAVIRNIDGNLDMDSLLQDINQRK

SEQ ID NO: 994848 - protein, 158 aa, Homo sapiens
SFDDIAEGSRNSTVMSKSESPKEPEQLRKLFIGGLSFETTDESLRSHFEQWGTLTDCVVMRDPNTKRSRGFGFVTYATVEEVDAAMNARPHKVDGRVVEPKRAVSREDSQRPGAHLTVKKIFVGGIKEDTEEHHLRDYFEQYGKIEVIEIMTDRGSGK

SEQ ID NO: 994849 - protein, 53 aa, Homo sapiens
MNEPRKAHQKRTHHKPTKKNAKQQRGETQHKDTAQHNSGGGTSDTTDEPSNDP

SEQ ID NO: 994850 - protein, 119 aa, Homo sapiens
MQLNTNFFDTAEEENRIIYNNYSDIRTTRRIIIIYRLGKSPYGTYLVRQQDHGYIERQSKSSGTQGTRIDTKSNEHNNKRTNYTEKQNPSDRKSKNRTKTRKSDTTRPIYNKHKKAQTQ

SEQ ID NO: 994851 - protein, 132 aa, Homo sapiens
KTRRNQIWKPKGRLSWVVCVLLKFVSPQCVCATGLVDIFVSWVAPISWVARVWQAVASSRRAVGARRLLYTRQSLCACGVSHVRSQGAQCSEEPWARCAHVVRRTPRVCRKSVKVLWGHLRGPFEKREERHV

SEQ ID NO: 994852 - protein, 613 aa, Homo sapiens
QDNYSREVIRFSVLEKCCQCCMLNVHSAQGALGNHGIDRGGQHGQHTGTCQYWPASLPASPRWANTQQPCNSQVVTHSAGAIRAAHSSMRISSSIVCTHSINSSTSEHFSHSTCTKLHGIFSPNHSVQTDIGGAHAHYGPLRDIAYSHELTEIRIASYRESHTGSISSPKQSVSTHISGVQTRSTESTQHFPPTFPSTGGQYLNAPSSVPLTTDNFVQAKGISTKVQAYNKHTSQKDKIRTTFKQYPRKFQRSYKRPRRAHLTDGPIQTHHDGTHMPAKTNHYMRRKADPRHGTTGAEATPKRERTFHNGTDFTKDTGQRTQLGTAPPPTLEVAKNSTQPGSQSHNPFTPANVTQHNQHNFSGRIGRANLAARRRRHMGHDQEDKPALRTLDASSGAKGTLNTPPADGTPYGQYGNPPAVAAAQRHETWTQRERATRDTTRRKPSPDHSTKTTDEDVNTRQREHRLPWTSHSNSTKSNDKPTEKHDTTAASETNDQSIAHTKTGQQTPEQDHNHSTATSTREQTNNTRRPPQPPPPRPAAAPQAGRHNQDPHTHRHQHDHNDATSRQATNDNRNRSERQTETNTNTAQHDTSDPEEQSRHRANSSTSSHDAAP

SEQ ID NO: 994853 - protein, 200 aa, Homo sapiens
TAGMAFVGTVCSRSHAGGINVFGQITVETFASIVAHELGHILGMNHDDGRECFCGAKSCIMNSGASGSRNFSSCSAEDFEKLTLNKGGSCLLNIPKPDEAYSAPSCGNKLVDPGEECDCGTAKECEVDPCCEGSTCKLKSFAECAYGDCCKDCQFLPGGSMCRGKTSECDVPEYCNGSSQFCPPDVFIQNGYPCQNSKAY

SEQ ID NO: 994854 - protein, 281 aa, Homo sapiens
MQGPLMLGIIIQTQQHLVCNSPCGFAQPQPTPSDHSEVQTHMTSYTWSSAYEPGIKEKDQATHIDEPWVRLNTRTHRNGRHAHTNKPGHTPKPHANAPWQLHPNRSAGYTITQTATYARHQKPNRNPSYEWNIPDQAKFTNLGQKNYTSTPSQGEPRNVNTATPLKTHNDHRKTEEGIMPIPGARGARAAPAPPNTDRAYRKHLKNQHATSNGPLETLYTWDKNQWTPNTHEPGNYTTTLARPPQHTSTAPHNTLPRAAPTIAHKPRQDGNPLVRPLTAAH

SEQ ID NO: 994855 - protein, 95 aa, Homo sapiens
EETAEPQLEASCLEKCKDLLRATLTHWGPGDPLPGPTQGSVGQTIPKSKTLSSAHAAVSLVASWVLRSLAERPVSRAEVTRLLDWLKSHILPQPM

SEQ ID NO: 994856 - protein, 114 aa, Homo sapiens
CLSYSGGLNPGGRGCGESRSSHSSLGNKSETLSPGKKKFIGCITLKADFGKHVITLKVYLSQLRVVAHACNPNTWGGQGRWIMRSGVQDHLGQDGETLSVLKIQKLAMHGGRRV

SEQ ID NO: 994857 - protein, 135 aa, Homo sapiens
MGRRTKTEEKKDSTHRRAEEERQEDASMSEGDTRNQASTISTGRGARPHKKDDENNDTRQKRNKTEQNQSTRTRQATRRGHKRGETHEAATHNQSARNNQRSNTERTTKRRRQKAKKKEEKKETHAKQGKGRNKQ

SEQ ID NO: 994858 - protein, 202 aa, Homo sapiens
LAAAGAAVTVVLGARSPGKEPSHVMRGVLSRFLNVLRSGLAYGVHHTCMGQHAAEFPRRSIFVSYEKPLHWSQPNLDEEASKLVTFGIWTLLSSVIRCLCAIDIHNKTLYHIKALDASSLPWGICPLWDCLSMELQVPRLAVLAPLMVASFSIRGYAGRAPVSRSRTSIQTEEEKPEASMITFQDFLVGHLAIFIPSSASPS

SEQ ID NO: 994859 - protein, 432 aa, Homo sapiens
MPFSEVPPGVAKIHYIESLSAIRTQLCPTNDSADTGRASIVAVMHKRVSNFSPMSLGKTYPTCRAIGTNAQPGMWSRGLRLPWRLDTASHVALPVCATFCLIPVWVDSGLLASVLSTAPPSSAPLALAYPNSPGGTALSHLGGLLAIARARRPPVFALFILAAAQSHPSVGHRHIPAWRLGASTPACHAGSGHFVPPRPRSHRPGGVPTLRALSCGATLRVPVALADALRSPTRATSRVTPARRLVPLPPSLVRGALAPPPPAAHRHHPHRSAKLNISHTPTHLPSETPFSAPHQSLFDHTPPSTPALMLTSGPVIPHTDRGALSCATHEDSSVVALFTTPIYRYACSPEQLYPLPPSDNWLTSDAVLHYICHHNQSSIAPPPPLPRAHLRSPRAQRTTPSPRSAHSSKYSDPRAWLLAIPPVTHQHHTSPS

SEQ ID NO: 994860 - protein, 264 aa, Homo sapiens
MEREEGTREPGGSRESGRPQQYEDRSAAGAERTRREKKREEESGAEKARKEQQEKRQKDRRCRADTKETDRESGERETVDKKTTSREGRNDRDNNSSEERTEDEETPSHIHTTNPEERKTTTDDARKKGSRKQHRDGKGDEPERPRRRQRPKQEREREQDAGAARKRAEGTKKAARDEKENNQRTTPTRTEKTTTTQQSRTTATKTPRQQQNRHSHSSTRQPKHPRPNTTRPTARGDAPRQKAPRHTTPERQQTAENHTTHKHE

SEQ ID NO: 994861 - protein, 71 aa, Homo sapiens
LTGTQKRGVIEFVSYSDMKRALEKLDGTEVNGRKIRLVEDKPGSQAAPVLLQKPESLKASLSKQTFPEEQK

SEQ ID NO: 994862 - protein, 136 aa, Homo sapiens
PTSDKGRFYAFGRVFSGVVSTGLKVRIMGPNYTPGKKEDLYLKPIQRTILMMGRYVEPIEDVPCGNIVGLVGVDQFLVKTGTITTFEHAHNMRVMKFSVSPVVRVAVEAKNPADLPKLVEGLKRLAKSDPMVQVCH

SEQ ID NO: 994863 - protein, 128 aa, Homo sapiens
MAQKREERHPKQEELQKIVETGKRESGETQRLDKRTRTTTTNKKQGALKENARGAHIIRTQTNRRKRQPKKQRKTKTHASHLYRRKEHNTNANKCSAHIRRRPRAKHPRKPQAKAREQDQALPSHTTH

SEQ ID NO: 994864 - protein, 195 aa, Homo sapiens
NRIVILGLNTIPLFVQLLYSPIENIQRVAAGVLCELAQDNEAAEAIEAEGATAPLTELLHSRNEGVATYAAAVLFRMSEDKPQDYKKRLSVELTSSLFRTEPMAWNETADLGLDIGAQGEALGYRQDDPSYRSFHSGGYGQDALGMDPMMEHEMGGHHPGADYPVDGLPDLGHAQDLMDGLPPGDSNQLAWFDTE

SEQ ID NO: 994865 - protein, 273 aa, Homo sapiens
MECRVELTYIAIIEMRVASVHHMYADESTEGLSDRLHEPDGSPISHKIKQVDLAPDVNIMITGPIHVPRKVTRHLLLAVIMSYMVIGMTRWAVLEDVEGGRRRKGGRIVCVSEIRHVDGQGGSFRVFVCPLVVEMIADQLPWVRDYLRGALVHKAWFLCRAFLFECMAGKRVQPAKNLTKHKGGPKKAGATVGTKMAEGYILTQSHMSCARRKTVLSYEQCGEGHHTAHACSVLVLPFPCCLRFFLASHRLMRRNQPEQHGHTGTHKTKERPP

SEQ ID NO: 994866 - protein, 278 aa, Homo sapiens
MWKSGGRAPERDNFCVLASARSPASSCFVILCFFCLAQGGSRLLCGSGAVQQQGVPPCSARVGSLRPSRGQGELARGPELPKGTEGLTGHAWPTSDRGPKFLGYLIAIKSGGWHNCWRKAWFFEAAMTSVMQHPPGGPHKRGGEYRVMGPTETGRLPRGPLKKIQWGKGGPHCYGTKRDKKLDTKNSGKGNPGAKGSTRAGKKDAHIATDPVRNHVIPAKGPHMEGKNPMVARAKWGVNIEEESFLQTLSKIGKQANDKECLLPIRGIFPLLQVKERE

SEQ ID NO: 994867 - protein, 187 aa, Homo sapiens
WHRGLMEVERGLERAPYIQLLQGYSSVVQALLGTFFTWAMTSAGAALVFIFSSGQRRILDGSLGFAAGVMLAASYWSLLAPAVEMATSSGGFGAFAFFPVAVGFTLGAAFVYLADLLMPHLGATEDPQTALALNFDPALMKKSDPRDPTSLLFPESELSIRIDKRENGEVYQRKKVAATDLAEGVAP

SEQ ID NO: 994868 - protein, 122 aa, Homo sapiens
MSENTHQTQLRTTHNRRREQRNTNKRPPEHRRPGRTGASPAGTRARRGADGRAAEGTTGEGGRGRAGAPTSRTARRRRRRRPAPAGGEDSRTRTEKRGGTSEPGRGEGRAEAQQPGEPGGAT

SEQ ID NO: 994869 - protein, 173 aa, Homo sapiens
  misc_feature (162)..(162): Xaa can be any naturally occurring amino acid
MGRKKKKQLKPWCWYCNRDFDDEKILIQHQKAKHFKCHICHKKLYTGPGLAIHCMQVHKETIDAVPNAIPGRTDIELEIYGMEGIPEKDMDERRRLLEQKTQESQKKKQQDDSDEYDDDESAASTSFQPQPVQPQQGYIPPMAQPGLPPVPGAPGMPPGIPXLMPGVPPLMPG

SEQ ID NO: 994870 - protein, 102 aa, Homo sapiens
MTIYHGALLLLSYRNCYVCRFPMYIDWRLSTSNKKDILCDQCTVLIAKHSSSIEHNNVYCGIVHLNKKVEAVLTMLPLGWIGMWVVVEQIYQHLIEMTKKHS

SEQ ID NO: 994871 - protein, 481 aa, Homo sapiens
AWTEPWRSFPTPWRPDHSHALRHLFTAPSDCPKDPADAPAPRQPPTAPPHYSYSRRHDDTRSTSQVRQNYHQDSEADINRQINLDALRLHTYTLSMSYYFDQRRCGSCKNLSHNHFLHPIYLSAAGQPCMQHNCNASCKNRTQVGRISPFRHHQGKPSTLLMHLARGAADMHTWQCCHDHLSAHTTTSSHIHVPQLDTWRPKPGPTGNQTTSHDTTTGDAHPHADPRNALHQTPRCPGPHTANPPWPTVEHTHGSDDKAQRPAQTQGIQSGNDSTSATSHTPSSQHTRGNTQHRQKPDSAYNSPPDQPPIGAMERPAEVNHNGRANAHCCARIPQHNGGHTQGRTSNTHHTEQGHDGTRAHESPSQPLHGHTVVGPTASTHSLADTATRQNPRAGHEDSANTRHRDNAAQEGHARRSAAREPPVTTTTRANRTPPTLHATLALTPTPPTARPDRERKAHKPTDPRTPTRRTHQHRYRANCT

SEQ ID NO: 994872 - protein, 117 aa, Homo sapiens
NIYAVKTAVSVAQGGHSRTSSPTPPSSAGSGGSFNLSGSGDMFLGMPGLNGDSYPASQVESLRHSMGPGSYGDNIGGGQIYSPREIRANGGWQEAVTPSSVTSPTEGPGSVHSDTSN

SEQ ID NO: 994873 - protein, 77 aa, Homo sapiens
SYTLARDTTVKPGAKEDTKDSRTKLPQEPLQRLGVTKSSGAKHMNKLYMNPRQATNPGMIIHHLDECSHTSSFGESV

SEQ ID NO: 994874 - protein, 401 aa, Homo sapiens
MEATRMRMHLGATVLAHGAQLGASFLTGQDGSVSADEAARTAPISTVDLWFYFTLQNWDSGLMGCTIAMHGIPSRRGFHSTSPVMGTTFHMAYNVITATLLIAKLIERSPRTLANAPITYVEHHHLHSWVPASTMVGDSVNQPLLSSGYQHPPCLYDENPIIKNLQRRRTLIDSFELLYSYDEYLGHCHVVHPPSTLILLPCTISGWLTGIYKLRASELPGPAMLTGEHPVGPALTGTMVTEAQASSQSLHAIISHQFFAIAWALVPCTRKGAARPYIRGHEQGLSTYISSIGSAPCAWVTRLGRRDVVYARHTEAQTPTGYNTANDQPREHNTVKTETKKTTRHGQKQRKTDGADAKNEKGHGNKRETGSRETDVDQGSEPRRAAEQPDDTRNKTRREPY

SEQ ID NO: 994875 - protein, 147 aa, Homo sapiens
TGHYLQLLYIMKSELASTELQYWLLGMEKKMGSLTGSVKNLGCPQWGMNGYFLIERGRTCVAWCWPLPHPSGVSRGQPAAADWRRKARNGQLGLGGNSCPGGSSGRDPQGTTKYCHQTLCPAWKPTDNGGVPHELTRVYDRKDHQLM

SEQ ID NO: 994876 - protein, 130 aa, Homo sapiens
  misc_feature (50)..(50): Xaa can be any naturally occurring amino acid
MACLPFFVYVDRVFYVCALEPSCREILVPDCITVIRCQQHWTKEIQNETXTLKIKREQGHALQVHAAASCTLILKSPHSCPTRSSVRQAWSERQTSIQNGQTTRWAKNDCKPEKGKPRLTDGWIASLNVY

SEQ ID NO: 994877 - protein, 176 aa, Homo sapiens
VAEVEAGCGRRRQWRRLPWLGLCYGSLSALSDPGHDSQRAQRLSSWRVRVEESGGQPAAPWWLPLGRFLQRCPDSLGEGPVPCRDHVLPSRWLLPVLLIPKLPQNHRPDGFKTFTCSWASTCSASSWNGRLAQYCALVLPGRHLYPYICYSCMGETDKPVPLLRFPASRIGSMIPA

SEQ ID NO: 994878 - protein, 174 aa, Homo sapiens
EPRERLVGGQHRAATQNIVVLSAASVTCDITIYDCPMDVRRHYCTLLRVEPAMKLLIEALLVLRRLIITIAKGANSGRTNSWMVALAVAPMGQYPVKLHNRMSRRTMIPSMLFQQSSWLPVVPDVTGLPVLRSERSSKALGGDSNSRQMKRHSCGSDSKILDISNHRGKLTCEP

SEQ ID NO: 994879 - protein, 114 aa, Homo sapiens
MTRELRAVGAAVAKTEKQENKRQYTTQHEEATNNTTAQADKQRKENDKPAAPRDSDKQQQSPKRAAKEQECERAAQMKHARCARRPATKDERRSERGDQEADEGQDAGSGRTSG

SEQ ID NO: 994880 - protein, 107 aa, Homo sapiens
KHSLGLGHPRSLRGRHQPTRSDPTCHPDALTDGAQAFLGGIPRVLSQLNTGIVTCLHLGMLDDTQGIYQAHNRGSALASLTHQRMTPKRRERAGDRPRGGNGHGGNV

SEQ ID NO: 994881 - protein, 536 aa, Homo sapiens
  misc_feature (446)..(446): Xaa can be any naturally occurring amino acid
TAQRETSEEIQQGDDKYKNKVKKRAKSKQSGSQAATAATSNSSQSNSSIPTTIHQQHAQQTAGISRSKAVNRHRAGGGTHIVQQHTHSTQAQSYAFRHKGTHSIQRKQGSQHSSHSSTVSTPVSAHPQAVTCQPCIHQLNTGHRAHTRHQHAATTSPGQFSSHIVHHQTTHRVTHHPVHHISPAHQAGTCKPATVKATSKARTASAHSKAHPNATSSICQPDKATGKYTPSGITSSTPEHITRAAQEAHGLHPQSPEAAAQETTNPRPTIPNDSQKDQRRKHKAGQEEFHGELPGSSNQAHSPNKPANTKRNPHLTGTTPRTEANRKAYQHQGTHPGTHTYRGQTVGTQPTRHLGPSLTPRSRRHPHQHQGLTTVHQGAGQPNHSGAGTARDLTRIPLSSTTNIKHHQGPVQEHTLALPQVPPHAVTPHQGEADQPHNNETPHVAXTSTHPPRNTQRPRTQDPVTSDKTAATHGAAKNHEHRKNKHRAEQRHQIATPALEDEQISRRTKTNHIRRDHSSSEPDIAGHTTSETPTGS

SEQ ID NO: 994882 - protein, 115 aa, Homo sapiens
MTLLHGSAPVLSMTTPNNIRQKGGRYHINARRQLHAGTHNFPHAHHTLRPTSRIDKSGTSQVSAELEGAQYENKEPTIQRSTQHGHGSHVTRHLTRGADIANPTEPCPATNAHNR

SEQ ID NO: 994883 - protein, 108 aa, Homo sapiens
GATVPEVIVCTALGGVRVFGFSLITNKVIMDYEQPGRRPTMTEVSTQLANKLHRNLEQLCLPFLWRGVPLPDKASLTCLGVVWHLPHKTQASCYLLLAPLLESCCLCP

SEQ ID NO: 994884 - protein, 344 aa, Homo sapiens
MDGTEGLVRGQKVLDSGCTNSKFLSVLRLQGRIMNVIGEPIDEQRSHQNQTILLPFMLTAPEFMEHDVLSHGTSLADWLSTVVDSASSPCQGLAKLGLSRLVLELGKTVLIMELNQQLSAKRPLAGLLMLFCWLSRARRTLCKATDFTTHETDLILSVLTHTSIHACHLLTVPAGYMAPTRLAPTWLPRCPGASLCTARWNLMRLPYLLRPPNHTLNDCYLLIHPASPLLPPSTQACLSTRPALPRRPQSHPCWGALPNPYPRPPRTRAHLLPRHTTHAHYHERRAKPRRPTHTTRPPTSPPPNPRPATTPGPTRPPPHSLPPPNSIHYLPSLLPPLNYPHIHP

SEQ ID NO: 994885 - protein, 136 aa, Homo sapiens
MKSLWLLNSKAIFSHTSSPKQLHPHPYHIRVPTSTPRYPKQDTLSSDPPSNQEGPLLGLLAKGHKQHLIRARHNDPAKLGLGPFQHQQDAVTTGENEAPGLHKPIRPKLTRWITRPDTNRARSGHREEIQGSTASE

SEQ ID NO: 994886 - protein, 483 aa, Homo sapiens
MRIEKCLISVRGPSILAHGMMFVRNDSKVFRFSKSKCHKNFHKKKRNPRNSLGGPKAFRTAAGTELTEAYIHSAHSDNTQQMQPYPNHPAQKLMATSTTHPMRMQEAARKQIENQHSAKSSNCTKLDIQDYGHDTPNTQQAYQETDSTALNHTRKDPKAHKTNPQSCTPSEPQPYNMPQSTTKARQHPQPRRHTKENKPGRHHGQRHTDTDEPIARAPQIANTQIGNTVYTHKNFHAKGTQHPQDDSPGSTHTSGLTGKDSTGHQHTVGTRTPTTTRERHTPTTPSGEHTQPHRGTPQQDNYPKLTTRRTRSSDNQYNNDKYNNKEGVTQTPRLYTKPLATQHNQSNGHIVRTRHRHTTPCTSLHHTSDITNTMGPTTDSTQPATRITPNTIRTAPTAQYTQQANTQRKIATDTTPGRHTTHSQENQAAQQNNIGPTKHSGSITQQHAHNSTHNRAQTNTTLGNTRTRHNQRPQEVDNKPDQQ

SEQ ID NO: 994887 - protein, 138 aa, Homo sapiens
EAAANTQQTLTFYELDLGLNHVVRKYSEPIRNMATSLLQFLEGQIFPSGVLICSENYITYKNFGDQPDIRCPIPRRRNDLDDPERGMIFVCSATHKTKSMFFFLAQTEQGDIFKITLETDEDMVTEIRLKYFDTVPVA

SEQ ID NO: 994888 - protein, 196 aa, Homo sapiens
RAPLFAAVVRPRRPLSGASPAAVPLRFSPKPRARACRSADHQPPVRPTASHPPWSARAVPRTAPAPGAPSEVVAGHRGPWSSAPCAHVPGLAVLEARSHREIRARSAPPMEGARVFGALGPIGPSSPGLTLGGLAVNEHRLSNKLLAWSGVLEWQEKRRPFSDSTAKLKRTLPCQAYVNQGENLETDQWPQKLIMQ

SEQ ID NO: 994889 - protein, 177 aa, Homo sapiens
TFAHRIFAECQGERVGRVPRLVPSSVTMLPPQLCWLPLLAALLPPVPAQKFSALTFLRVDQDKDRDCSLDCPSSPQKPLCASDGRTFLSRCEFQRAKCKDPQLEIAHRGNCKDVSRCVAERKYTQEQARKEFQQVFIPECNDDGTYSQVQCHSYTGYCWCVTPNGRPISGTAVAHKT

SEQ ID NO: 994890 - protein, 139 aa, Homo sapiens
AAMSAHLQWMVVRNCSSFLIKRNKQTYSTEPNNLKARNSFHATGYIHRKTVGVEPAVDGKGVVVVMKRRSGQRKPATSYVRTTINKNARATLSSIRHMIRKNKYRPDLRMAAIRRASAILRSQKPVVVKRKRTRPTKSS

SEQ ID NO: 994891 - protein, 151 aa, Homo sapiens
MSGHKCYSWELQDRFAQDKSVVNKMQQKYWETKQAFIKATGKKEDEHVVASDADLDAKLELFHSIQRTCLDLSKAIVLYQKRICFLSQEENELGKFLRSQGFQDKTRAGKMMQATGKALCFSSQQRLALRNPLCRFHQEVETFRHRAISDT

SEQ ID NO: 994892 - protein, 195 aa, Homo sapiens
  misc_feature (164)..(164): Xaa can be any naturally occurring amino acid
SSFKQIPPAPPRPDFEASREKLQKLGEGNSSITREEFSKMKTELEAEYLAIFKKTVAMHEVFLQRLAAHPTLRRDHNFSVFLEYSQDLSVREKNRKEVLGGLLRSIVRSADEVLITGISGLKEVDDFFEHERTFLVEYHTRIRDTCQRADRVMHSHKCLADNYXPISAALSSLGTQEVNQLKRSFLKLAELFERL

SEQ ID NO: 994893 - protein, 113 aa, Homo sapiens
MAGAPGCPIGVWLAGSLTTVICSLPLQIMRIKPHQSQHIGEMSFLQHSRCECRPKKDRTKPENHCEPCSERRKHLFVQDPQTCKCSCKNTDSRCKARQLELNERTCRCDKPRR

SEQ ID NO: 994894 - protein, 199 aa, Homo sapiens
MFISQMQKLRFRETDQAKQNSKEEARLKREPKPVFLCLCPSLPVPGGIAAESLTFTPLEDMIFLKWEEPQEPNGLITQYEISYQSIESSDPAVNVPGPRRTISKLRNETYHVFSNLHPGTTYLFSVRARTSKGFGQAALTEITTNISAPSFDYADMPSPLGESENTITVLLRPAQGRGAPISVYQVVVEEERPRRLRRE

SEQ ID NO: 994895 - protein, 136 aa, Homo sapiens
CFWQFADQMGYLYFSYEVQRILGMSHDRHIVATAHTPQGFLIDTSQDVRGQINFATQETGFYQLCLKNEQNRFSSIQVYLNFGVFYEGPEVDHKQSQRKQLNDTLDAIKDSTQRVENQVFHMWCFYNYARMRKVAD

SEQ ID NO: 994896 - protein, 108 aa, Homo sapiens
DSFFRLLPQCSVATLLHSIFFKVVYCCSWSVQVNQRASNPVDLRCHLWRQKEGQTWHSLPSSAVPLWEHGDMLFKVWCWSDNLMSGIGKIVHFCFLGQRGLKLMGFVA

SEQ ID NO: 994897 - protein, 123 aa, Homo sapiens
GLVRRPPQPMALRNDLGSNINVLKTLNLRFRCFLAKVHELESRNRLLEKQLQQALEEGKQGRRGLARRDQAVQTGFISPIRPLGLPLSSRPAAVCPPSARVLGSPSRSPAGPLASSAACHTSS

SEQ ID NO: 994898 - protein, 185 aa, Homo sapiens
  misc_feature (167)..(167): Xaa can be any naturally occurring amino acid
MNKTIIVEFSTIFFLEVKLQELTDQKIADFAMDLYKAISLSHKNNIIFSPLGTTMLLGMVQLGAKGKAQQQILKTLRMRGTPAGEEFSVLKSLFSAISKKKQEFTFNLASALYLQEGFIVKETYLHSNKEFFQSATKLVDFLDAKTSAQAISTWVESKTDGKIKNMXSEEEFGPLTRLVLVNAIY

SEQ ID NO: 994899 - protein, 193 aa, Homo sapiens
LQTKLKAEEPSGADDSPSGTKSSSSVRIKTFSEVLAEKKHRQQEMERQKSKKDTSCLTLTDDTEMKKTVSLPTVAVSKGQPEEPAGRARSMQEVHIKTLEEIKLEKALRVQQSSESSGNSRPQAEAAPGTKRLLRITKRAGVKEEKKCGLEDSGDPPQSSVTKMEANETSDETISDPTKLAVNRCDTVKEKHT

SEQ ID NO: 994900 - protein, 113 aa, Homo sapiens
SRTAALRGPGFDRLFKMPSQMEHAMETMMLTFHRFAGDKDHLTKEDLRVLMEREFPGFLENQKDPLAVDKIMKDLDRCRDGKVGFQSFLSLVAGLTIACNDYFVVNMKQKGKK

SEQ ID NO: 994901 - protein, 42 aa, Homo sapiens
KSPYYMLNKDKILHEVTKSCQACVQVNASKAKVGPGVRVRGQ

SEQ ID NO: 994902 - protein, 180 aa, Homo sapiens
VSKNKKRKKNYLSLIIVVCLNAGTCSRACGDQKTTFKSCFLHFLQMQVNSRPNLHLARKLLKFLWAQIEFCKNITDGEEKTCGGCEDPDAVYVKSTSSGGHEFIVKREHALTSGTIKAMWGGPGQFAKDETKEVNFRRVPHMCMCFTYKVPILTAPLSSTDILEFPTALELLIAANFLDC

SEQ ID NO: 994903 - protein, 184 aa, Homo sapiens
  misc_feature (136)..(136): Xaa can be any naturally occurring amino acid
MPREDRATWKSNYFLKIIQLLDDYPKCFIVGADNVGSKQMQQIRMSLRGKAVVLMGKNTMMRKAIRGHLENNPALEKLLPHIRGNVGFVFTKEDLTEIRDMLLANKVPAAARAGAIAPCEVTVPAQNTGLGPEKTXFFQALGITTKISRGTIEILSDVQLIKTGDKVGASEATLLNMLNIFPFS

SEQ ID NO: 994904 - protein, 68 aa, Homo sapiens
CPDQGCPQMGHYADKFANNTSVEPQKFFLNTGEAKNFARWRYRVSLTFSGRTVTGQVKVSLFGSNGNT

SEQ ID NO: 994905 - protein, 93 aa, Homo sapiens
MSSKTASTNSIAQARRTVQQLRLEASIERIKVSKASADLMSYCEEHARSDPLLMGIPTSENPFKDKKTCIILKWTRKRPLPLNANHSSNLKGF

SEQ ID NO: 994906 - protein, 142 aa, Homo sapiens
KFPNSEVLVKSIVDFVTSHGNIKAFISIHSYSQLLLYPYGYTSEPAPDKEELDQLAKSAVTALTSLHGTKFKYGSIIDTIYQASGSTIDWTYSQGIKYSFTFELRDTGLRGFLLPASQIIPTAEETWLALLTIMDHTVKHPY

SEQ ID NO: 994907 - protein, 192 aa, Homo sapiens
VISDAPTFASNSLPPPCPVSSGVPDPSTMWKRWLALSLVTIVLVHGEEEPRSKSKICANVFCGAGRECAVTEKGEPTCLCIEQCKPHKRPVCGSNGKTYLNHCELHRDACLTGSKIQVDYDGHCKEKKSASPSASPVVCYQANRDELRRRLIQWLEAEIIPDGWFSKGSNYSEILDKYFKSFDNGDSHLDSS

SEQ ID NO: 994908 - protein, 109 aa, Homo sapiens
RTGVVSVTHMVTVVTVFTEVRLLVEPHVLHTDTQVCTVRPTIGNSTVRAEVFGLIRVVRPTVLSITSRHRRTILTTIMRTTPVSTEVVVKVMVPFLLTVGSRRLELVRV

SEQ ID NO: 994909 - protein, 103 aa, Homo sapiens
YQGAIRYQNGYIAITHKREGAGGSKRRPIELGETGRRAVGTEDPRGGTGVSCLWSEVVSTQGVGDPRRTRYPPRRRTDVVSDPPSRVSPLPPRLTGTYGSGRP

SEQ ID NO: 994910 - protein, 72 aa, Homo sapiens
CIINKIEYVPTLYKGDDIYVQRTINNSKHPDHLRPVDLDAVSSSSLPLLSPPPPAGPTLLQTTTQHSNPPLT

SEQ ID NO: 994911 - protein, 105 aa, Homo sapiens
KGTVRSDNRSRANCMRRTRRKSKRKKGGVRKSRLRTSRAGILFQSRVPKSSPVNNYRNSNYLRRRSETGGLSFHYGSLSPPVTRRVATLPAVPLEEYSFEDSRSY

SEQ ID NO: 994912 - protein, 76 aa, Homo sapiens
VDYSDTESSTPSSPFPRSKEDFSARRTNTYSVRVSGRIDTLSKCSSFFYFYLRIYTGCRLSCENRRLPVTTRSTWH

SEQ ID NO: 994913 - protein, 154 aa, Homo sapiens
MFVGYRAATVARAAGVRVALAGYSGPYGSYAMDNYYHGYKPISTDNPRFIIDIEKRVTCYDEETIVVDIAEHAMSRPYSVADILKAQQIESKVASSTERSIAARDRLSRSFNAMYQGHDKCSHEFRTRTAVKERYNPGCTRGAILYDVITEDET

SEQ ID NO: 994914 - protein, 342 aa, Homo sapiens
TYFQIIWWSSEVGDRKKYFSRVQTMQSNTTFNLEEAQPYSKKASSTSPPAADTTSSNSSSRRPPPIPANGQRGLAANDEGFALIGPDSNLAANTQESTTFHPNEAVSLLSGNLPPDFTERKEHGGTSSSSHMATGQGDPVPLHEVIKGFGFIQLGTSRTSSGASPQAGAGQICHSVATAYWRVRFACHSAHPYSSNTFLTSCVPTELTGRTHLCVKATVETGRTHVRDWSRANAHQATATRDRAKRKPSCQGTPLHGMEEKSALPAHSNPCPEEMDDKDRAHEKKDSSEADPANPHSKRRDTTQTPTVRSSSHLPARTELTNHTLTHASTHNNTARHTHRAT

SEQ ID NO: 994915 - protein, 218 aa, Homo sapiens
AARDGACAVGRWVPVRRRANGGWRHSCDACSCGLTGVLRPQHALSLSAGLSLLVAFPCVVGTSWAPLAVIWLAMDACQRPLACIVGQLGEVSSPLAERRGCHLENGHEGLFPRHGRSLARHWSAWHRGRPACAVGAWDVLQTCCAAPRKRGNSGTGCQKGRNPSSSNTSIDHEHRKRTRQRRAETHLASGLRWALEALGNYFRRNTTCTFSTRTYFLP

SEQ ID NO: 994916 - protein, 310 aa, Homo sapiens
AAVFLRRIRQGRTAAMAPIREMCMVLKPHFHKDGYAARGLLWFNQPARKIRYDVSARHSQRQRQPSPRAPQSESAVRRQSCACPIVFGYSHRKRALHGRRDSSPVRMSHGLARHFTKQGGPATYRVISCVIRGRRSQGPRQIPAVPTVHAGCTEYLLLNSSLFSQEALVPPKQGRPVLTEERDNCATLQADLDRVMPVRERAIQKETSLESLTAGKQHTNSHTPSLALRMARANARLFGITGKRAKDRRMNTLLPCLPYMASLATWIRTPPPPPPGPLSRRATRALSRPCLLASPSPVHRVKFQSPKTRK

SEQ ID NO: 994917 - protein, 145 aa, Homo sapiens
MRWVRPASLGCWIPVDRWAFVVQALQSRAHACGWLTAPVGLHALASIASCNVLALAGNHQNALCWCVCDYCNAELLGPIPATNYSRALGHLMRSVLLDDHRGTPSYRPSDGPPCTAHGNCHPKCGIDYLDHTESLNQAITLLYNP

SEQ ID NO: 994918 - protein, 501 aa, Homo sapiens
  misc_feature (126)..(126): Xaa can be any naturally occurring amino acid
MVVFSRAFFPGLKHSIAHEELRPYVALVYLQASTLPMLWLTCLLCDLPGEPRCQTQCKFVRHREVYEAAIISTTLTSPARDSYHSWPHAYKQTQGVSAVCIAHLLTRGDSYTPCAYMSVLFTTTCXGWITYLGNNPRVALCRPYRTRTLDFTTLLDMRWNVLVHEHSAGRRLIMDTLPCPRVGGPVTAMRNTGGPGALGIPFDGPLPRSSPLPREGPRVMAGDSGFEVLAGSCTLPIQQRFASQEFVIPAINARGSAKSPGSVKGPLRRVTSIGGQQQDLGTSELEYESFARAVFPGGITDELPRRGKNGPSMDGHEPPRRGCRRGPCRLFSKGDITEASEDSSIKRGWLSDARQCLAARVNTLTRCLQDKITCGGSPNPHTYVAWRENDVPDEYTPQVALPRVTLYRTSPAPLGRTQRMVNWALWHSFVRTLQFAVNVASTRGTEAHPRAQQAHLSHFVSPIIVIPTASVQCQSKPVIVLIHSAHSGASDAILHKTSVSS

SEQ ID NO: 994919 - protein, 238 aa, Homo sapiens
ECKGHKMMELFMGKEVLHLCMKGMAIFVRQSSDPGYFEGMEVTDIYFRQECTLITCCVQKSSKERELIQVQTTIKNLEGWTGALKGSVCGTWTMKLEIPDDLNIGHELSKANATESVGHETQKSKLAAGAGHGKSQMQAADKSPNLTRRDASRRLRTVKPRRRWTRKERYNGGAWLILADAIEDGHVWTMRWLKNVLTYPCNYAWWMAPDSETGVGLSTLVRLKRSSKAATCTRRAQM

SEQ ID NO: 994920 - protein, 197 aa, Homo sapiens
MATVKAENGKRMIINGNSIHHLTRSEIPPKSSGAMLGAEYVRGVHQASFTNMEKAGAHEQGEEPKGYIISDPTTADRPHVRHGVMNHEKYDKQTHRSYRNDILKTNCISTTWTKDIHDTLGYRGKDSGTTDHEHHWRTRQNGDGHIRGNWDVNGQGISRTIIPDISLDAAKAVRQRYSHAAARDRSKRMAFDVPMTR

SEQ ID NO: 994921 - protein, 76 aa, Homo sapiens
DATEQQEDSGLSDRAPDESHKGKSVDLYYSETDNATNVRAVARDRSLVWSYIVMRPMKGQDDRWTTGHNVSSQELL

SEQ ID NO: 994922 - protein, 449 aa, Homo sapiens
PCGVRPKRAEHSMIYFFHHYELPAILQQVRIQEMLASGAATGPREPQETPDDMNNNSGRPGLQNTDSDWNSTTQAMGTTKSTMEAKRGSHRGPDGKLDSTKNTMNEEQQEKTTDETTKMTREDIETQWGDEENMGHSTEHSQGKTIKSQTSTDPYPEALTHGKHDNGHTTITCQTSKRHKNTGPRNSSSNHMPISAGPSRGQDKREPKGGKQKESTDRKREEQRNSIEQTNTKTKTIGERTTGKTTGRERQEKKNKGTQRRAHRKHRQAPEEDTNKTRKRNDGRQQTTKETRQRGQWHHPQTQQDRAERDRTKTRGKPAGKKNQQTEQPEQTHRKEKAQRRHEQRRRQTRSRERRTKRHTDKHTDNRRRRATTGKKGHRHDAEKSRSKSHNARLRPAAGGGDKMTNKRKAKAQERKARDERQGGRNGERRIAGSKRGRESTRKQTGRTE

SEQ ID NO: 994923 - protein, 109 aa, Homo sapiens
LHSLMLVFDKPETELWGQRDFWRKICQWLPSCLSPQHHVRAIYAQTHGNQDSESWGYLPRGVDERYSLCDFLLYFFFLRDILIIHLRASFCVPSCWKPLANALVVTSQF

SEQ ID NO: 994924 - protein, 182 aa, Homo sapiens
TLILINYIFLKEYGNFTFSPENTREEDFYVNETSTVKVPMMVQSGNISYFRDSAIPCQMVQMNYVGNGTTFIILPDQGQMDTVVAALNRDTIDRWGKLMIPRQMNLYIPKFSMSDTYDLQDVLADVGIKDLFTNQSDFADTTKDTPLTLTVLHKAMLQLDEGNVLPAATNGPPVHLPSESFT

SEQ ID NO: 994925 - protein, 49 aa, Homo sapiens
GPTSVPANSQNEVITQKVEESVLADETEKFTRYSEGKRVCTPCPSVESG

SEQ ID NO: 994926 - protein, 70 aa, Homo sapiens
CLVYLVPTGSSFRTTREVTPGLRQVLFRRTFLSGKKFLERRVVRTPQDASLDGNRKRTSEEPTIPGRTSN

SEQ ID NO: 994927 - protein, 112 aa, Homo sapiens
VLSLARRLWAAEGGAGSTRPVVSSGLLLHGVVSADHLCLECIYSSLPVKGNRGRSRMYRLTTALFNHPLPGLSRGSPDRACRQCGSPKAEDMGGHEHCQPCCELNQSALGCV

SEQ ID NO: 994928 - protein, 410 aa, Homo sapiens
MATSTGPLASPPSLHYSASSGKRPGGLDSGASRDDDLLLPYPRARARIPRDCTRVRAGNREHEKLASDSSRLPRPPADLAVQHLRSRNFREPAPVNRTTGDAGPVEAPFSATDPRVAEEATGMGPPGAGMQAGRRTERRPTGGHGTNRGGRERAQSWPVVRPRKNTAAQLYLPRPMGNVREHERGHCDEQPVGLAGQNRTADRAMTAKTFPRGRETLGHGKNRTDQRTRGGKSRAPGGKEGQTPFGLPNPGELNPEVYEGHKRRVRLGHATVGTKKPPKEMLETNGLALATFGEAPDGGRPCATSRTNEGDKTLHNRMQTDKQQPKETKHRTGWDDHARTQPRGIYHGASPLVKAQQAMGARRSALQSGPHGEHGDPTCGPRPQPREHKERHDTWTRPPMTWGQQSAPQR

SEQ ID NO: 994929 - protein, 395 aa, Homo sapiens
MISTAARQSDNWLLACANGLLLLVLTDAPPGPVFPSIVGAAPGNQELCMVRPWVQQGIPYVSAHCRAQQPSSRHPRPMQVTHIGATAIRRTTWERPLDDKLCAPQPYLHMSCSVASRRSNPRDCMTEGPPCNPKGPHPPTTDDPKTPVLRHLQHTQPMYSCLLQCLVLIPVTPLRRTHCASDDGTPGRTRGHPTTCDPIYDRAMPSHNDIPDVSDPAPGTGHPDWLRSMNSIPQQRRWPNQTLPIKVPRPGTSLRDIQGATVPTGPRGTTHQEKCHCRLSSSLLSKSLRTDRPAPVPPIAHVDERRHPEENKSTANNPGAMGPAATTRHATQHPTTTRTATTHQHASQQGEGAHAYPIATQEKTVDPTRQNVTIHNRHATHDQQKPTARPRTLTR

SEQ ID NO: 994930 - protein, 146 aa, Homo sapiens
HHRAAAQRTPVRTRPAAPGTVSPRPKPRSASDPLRRRLPPRPAPADLAHPTWPLGGDREPEAMSHEKSGCLGDKYPPPKPEDIPGGPRLHDAHTYDQDIPYHEGTITQQSPISENTTKHQQNRKHKTNTEVEQTKTQQTHTNTARQ

SEQ ID NO: 994931 - protein, 231 aa, Homo sapiens
QLNDSACHTNVNELECMAQSDLHSQHQQDVLRTRLKTTGIVSDTLHLQGPHTCQDVGIVGCVERDLEAVRSGLLLTFEGCDQPIDCATAVGSKAHYDLVLDAPTRRLNRDAMKHALNASSIVICRSEQVVHDEQRPISPSILYAYEEILVNDGRMDLQATDHLVTHHASPLDAITRVTNLQLIIGVQTSCIRKKVTYLKRPGIKAVKDDHREDVYQLVPFHRCEPTRDHAK

SEQ ID NO: 994932 - protein, 322 aa, Homo sapiens
MSRLSYKKLSRRSVQDLQPTFSERTNSNRSSPQRHTASKNGCARKMALTTDGVTICLVCRFNAAAVDPKKKIHTSLSNLVVKGPQYLIIQETRKNLGIPQKSLSCSEEFKEVMDLPTCGARNLKTTLKGQKPQVQGLWGAQNTGDQSPSRPQTRLEASRSRGCGDEEKALSKKYLKRFPGELKCPDGEPQVGPSYIEGKATCHRHRLDRASDVPRLEGARQKEPNMWRGDARDGVSHDEHPHRTKREGSEGKRELNHTRYGGPQKPWSTSEGLTAGEQLKARRRKWGRKETCRMLTTTDAKASPAKAQTSRHRTMPPDLPAA

SEQ ID NO: 994933 - protein, 149 aa, Homo sapiens
KQLDLRPLCLLELLKKGSLLPTIRQTERMRCEMAVASGPPITVQVSSWRKAGSFSYDTWMAEIRLNTQILLQISSCCIRCIHHIFPGLRSWSYRSSPNLSLPSLLLPFEPPVKALMPTPCMMICVPRLGIGHDALRLTRTSSVSGCLQY

SEQ ID NO: 994934 - protein, 464 aa, Homo sapiens
METGVLYVEIVQYGATLRDQVHITNAVIKDKERRDSDNRTQLMSQGNAIRSIRESTDLTHRETGASRERQKTIEDTITAETRLTQDHSPPHTRRAAKKQGAYTQHKDGRPQRTTVQPKDERQHNWHNTTYPRAARPDTFNRRDSNRWDHKDTEPNEHERQTQYKGAQTKTPKGERQHIWHNNGTHDLNEGQVALRHTAHDTYNTPERMKHANKPTVSNRQVQRRESQHDQCPMTIDNDNYRRKEENAQANMWKQQDTAHIEHNINTTAHTQSIKVTNRRQIRKTKEIDNTQEKEKTMKHIDKEKTTEHMEHMTGTDQRDMNIEKDNKARTRQAHREKTRTKTNSHQTQEHQTRQPLSPRRLTVSADNTQTTHKATTQVEPKADKKTMTPNHGHQRQEQERRCRTDNEKTHAANDRHRMNTSHAATVATGSNDDAHTGIGAIQKQSEGHTDNTLHIDVMHEHDPE

SEQ ID NO: 994935 - protein, 185 aa, Homo sapiens
MTSQRRTANAGSYRGHVASRPEQGPDPARGEFSRNGSFSMAAKHAPELAAMAASAPLGTLTHTPVEGNSPETNRATGKRPTPTWTRAHLDRAPADTHNKAKQHRSCPGQEPVHSRPTRRRSGETQQETRATHNTQDIIHATHKRLPSEPHKRTKQVRLTSPAPPPAPAPSPRRQHYVSEHLDTAS

SEQ ID NO: 994936 - protein, 335 aa, Homo sapiens
  misc_feature (248)..(248): Xaa can be any naturally occurring amino acid
VRVAPRLLQPLGRNSKLPDLRTDCEKKNYLIFSAPIAYLECEATHKIENFNHDGKIVLHRSAGSVVATSRIGAKFWEVITDEHGIEPTGTYHGDRDLELDRTLCCTKKNPEVGNMFLVPSWMDLKPGTTGLWFRIRSLGPDLEMQTILSNRVKCWGRKQLGTKGHLDSRGRLSCVDSVLDVVREGCIQLRLTARAYQTDPSPLERGLAMLFNGTPSLLARSEKTGLDRIIIATVWRLQSTVSDPWAEXYNAPLRPPGGRASVNETMRETGPYKSAPTEIAHNYGIDTASAEGYNVSVGNIGRMRKAPGQSGAHRHTAATVKRDHAGAGQHRQTPA

SEQ ID NO: 994937 - protein, 346 aa, Homo sapiens
PKLEADLEKKIQGGKAGYKKQDRRTAKDVVENGRMDVADQTLSLDGAAPWGRRLMVPQDSGENYIEPMAMWSLHHTMNLLKQHLEITGGARVRTRIPSESNGILHIGHAQGHRNYNFGYGQGRKEWLSVFLQFVMTTTPWEGGTAPRFFTDICDMVVLAYGYKSYKVTLCVYYFDQGNMRGAADAASAGVWLIVASSEERSFKGHNTPVFTWRDRSMEESRASYFEAMRKRKCPTCARTHYWITLVMYGRQKEPSLPLMSSIHEWPARGNGGYPLRLTHAVDASRASSSLCATSRRTAIHTRDRPSLARSGHRPTQRAGQSNTLQAGGTHHTGKGPHNLRTVTHHS

SEQ ID NO: 994938 - protein, 150 aa, Homo sapiens
MENITIAGRENHKGKTQGVKTIRTYENLRSTEKNGKQREVVSTKIPCRTKKRLKVAQHEQGVKNKLCNWKRQNRGDAAQPPTHTSGEQGETRRDTRERTRQPTPRRKAQNRNTTHTTQTHNHRDTRNKQTPANKTTRALTNHTKIKQQKA

SEQ ID NO: 994939 - protein, 309 aa, Homo sapiens
GQVMLAGVEKRRREEEGEYRREVEDPGYHSESDTAVFFRHLSGQKKGKVCLNPPFHPLHPLYLEPFSTIGRSARARGPEQENRQLGDEAVLPVRRRPGALGRQPVQHIYTNQHRIAVQHTGIRPSTKQTRSRNWGRKVELSLMSTYIATTNGEHGHRHHISQHCLAELIYQLKAQTHLGDPFWAASRHPHSAQDRIGKRQCTGTGESAGSREDNISSESRWMRCSMGSRHRGNTTGNARREFREAKCTGLRRNIRKGGNTYDKLSSRGSKITATQHCRGDEGSTHASHADIHGKRETRNTWRTRATHLH

SEQ ID NO: 994940 - protein, 68 aa, Homo sapiens
MSTRSAGSKKKAGSKHDANTQKAREDTRTEEKRGRRPTRRRSGAHTSEEQQTSVIAHIDQQNVRHTDE

SEQ ID NO: 994941 - protein, 142 aa, Homo sapiens
CWRWSEGGRDKAAWCSPSSLQLAVPPAGTGLRSLSGNGAVLVMPGDKDKEQELSEEVINMLQDELGRCSMERLGDEVIHPCIRPAAWSDICEWQIRIFYNFHDFSAQASQISRVHTMAKLKEIYENMAPGENKRFAADIISD

SEQ ID NO: 994942 - protein, 237 aa, Homo sapiens
ARRPASTEPRLCRSAAVHTRRQLTMDDDIAALVSRQRLRACARPGFAGRQMPPGPSSHSIVGRPSATRAVMVGMGQKDSYVGDEAQSKRGILTLKYPIEHGIVQTNWDDMEKIWQQSFYNELSVAPEEHPDAAARGPTCNPKAKREKMHQIMYETFKNPDMYVAIQDCAIPVRLWTVPWNRDGLQVTGHTTVPIYEGYDLPHAILRLDWLAGTDWYLMKILTSAIQIHTKAEREHSA

SEQ ID NO: 994943 - protein, 373 aa, Homo sapiens
MRKPRCGNPDVANYNFFPRQWPKWDKNQITSGLIGYTPASGPREQCDDAFVSMLFQGSVSDVTPLRFFSEFHVMDEADSHDLTFGARGSIGPMDTSFDGKDRTPGFMPSLAMARGVGGDSHFDDDELMDLGEKAKWSCVKYGNADGEYCKFPFLFEWQGVQRAALIPGAAMASSGAPYTTTLSKDGKYGFCPHEDLLHHGRQQLKDSPASFHSRFQGTFYDSCTTDGPHRMANAGDGTIEDNDTRHEVWPSALKNACHRKESNQNVPLVFPLPVLAATYSRLPTPDTSSKFGCTQGRYTQRTLEPRPVPRYCVTREPRFEQPGCHPERARGRTTEASPDRSTATASTVRTSAANNKSRPSQPRDNRIVASKPR

SEQ ID NO: 994944 - protein, 202 aa, Homo sapiens
GSLTIRRKPQDSEQEINRLSILALPPQCRLHPPAGSREEGPPHPPKRSFSSMSDITGSVTLKLLVPWASLRPRSSDQRVAFGKARKAIRGSGLWPGLPQMRSLAIRRVWPGAPQGAQSRTDKGPDGLSLLWGRGWSGAVVAQGAVCWPGSAMDGSEESTSGADAAGLERGVAWTCDVPTYGTLLLRIRGPSLPSLDGPPWAC

SEQ ID NO: 994945 - protein, 113 aa, Homo sapiens
MYQEKRDSRTSGARVKVVSDGIVIMRVIHRLMGESLETGDRVACVDIVRHMATKRNTSSRSMEMLEKIAWVANLIHLLAAGERGGLVDDMVNVTLNTLNVRVMIVANVVIPQV

SEQ ID NO: 994946 - protein, 232 aa, Homo sapiens
MSGTTRVLLAKGNDSMNFNPVTAELYVVSPLELIHRVREVVPIDVTDGGSHLPGAAFGKVTNLLMLKGKNQAFIEMNTEEAANTMVNYYTWVTPVLPRQAIYIQFSNHKGAEDRQLSQQARAQAALQAVNSVQSGNLALAASRGPWTQGWRWRAEPRAQDPSCENLFYPCDPGLCWHQIFSKFGTVLKIITSQEHQFQGPVQYVDPVSAQKQAARGGREIYKAVEWAYFPGT

SEQ ID NO: 994947 - protein, 318 aa, Homo sapiens
MRGQLEVKQVNSNIWERFRAEEDPLGLVAPLRGTDSPGLTVAGSEAAGNGRRCDHGGCGPGTGVAGWDLRYGGRRRAACGGVCLVGSERTAARLREVGYHFLIDFILDVKVDVQDFRQNLEDELEREALKQGVDLRSYSKQVELEHEGQMEQKSIRDYIQESENIASQQNRSQPVMLSLERMEQMWELFRVTLSFHQSEIGTLQETVRSHEHSTSKSPGQSGTLGELVMGPGGSPIVRVRGIRGGSADAPRTRSSSRGGRPAGAASSGAEARTRTRKGGPTVGRSEAQSSHADRETDIGPKGDSTTGQAEGAVGNREW

SEQ ID NO: 994948 - protein, 337 aa, Homo sapiens
ALRVVTVALGGGSGLVSPGGAVMAATELRGVVGPGPAGIACTWWRVAGSPCGGMEGGGVEMRGHGSGAGHGTVFAAVAVRPWCPGVPWCEWLVLVVPGPCAGWNWWLGRLWALGVRARSRGLALHTGPRYIKGYHPAMVRLLSNVTPDATYRSKAEIETYLRCGTIEGSPHGKHHRVRTPEQSFIISNGGAQTYHLKGKFQKLSGRRWVTACELGQGKAVKMLAESDDFQEMNESVFTKLTELSYEYPSDLSSTVEDLSTCDGLIAKLGTVLERPPGRWILNLLWQHEDSTVTEEPPLGYLGFTARRNLLFDTKWKRRSEPARKPPGETNEGPSAAT

SEQ ID NO: 994949 - protein, 45 aa, Homo sapiens
MTRPSERHYLRSADFDISRVQPINTGDTINDGNVDDMMNFSSTQR

SEQ ID NO: 994950 - protein, 142 aa, Homo sapiens
SPQRVPAADGALDPPPPFSILLPSVSPAGRDSRPCRCGRSACVVWDGPGTALLGPFLLPVASAAAGDAQPGPMPASSPGSLFRSTARLQSLSTGASLAGALVVLQAPGPQFLPSPTVAAADARAREHAGVPFWQLRMEQQAW

SEQ ID NO: 994951 - protein, 85 aa, Homo sapiens
DLCVTSRYLLVPSAAWEVGCGPCDMQLYPGCESGGSGGAGAPTRAISDARSLSSRVYSNEDDVCWDIAFSMYRAESQVSGAVHSP

SEQ ID NO: 994952 - protein, 55 aa, Homo sapiens
MWAALRSVGPGLAFIDLDQLVTAVYGGGPKATDCNSCKNTVRRKWNTVEPTERRQ

SEQ ID NO: 994953 - protein, 193 aa, Homo sapiens
AKDEDHRDVTFEEVQPKHTIPVAEGSRQGDQEAEPLSTVKVMKLQFKDSTLEVSVGIHYIWFHNGSHSLLRSNSVLSGDETHMNQLKEARTRTFTYKLLRWLCFCLADTNVRVSESMWRSSWHYTGRKRITEELKRFDDARLMLMGFKPLVLREETAISAEALPVQCSPEESLVIGSSTLFSALLINVSGEGR

SEQ ID NO: 994954 - protein, 50 aa, Homo sapiens
MSEHIEHRDNCVRLFAHHDSPLEVKPQNTSGYKRRYIELLLRYIGAQTNI

SEQ ID NO: 994955 - protein, 290 aa, Homo sapiens
MSLSALMIMSLRRLMTPTLIPGDYDMHTGDPKQDLLIERQYERAKPDQVIPGGDRNNFYPGIIQRKRGTQDCDVTEKVSELTRPSLSLTDDVDWTHRGAMRIRGASIEQRAGTKRDVDTDSFKEVSTLGPRAECQLLALGWGMHSCLSWNFIQKQLSDLQCTGICRKCQWGDLTYGGRVLGIRDYNYMQSRSDYKFFNAHGSLLTLELAKQGALGIVIRSSSSTQFQSFSQYRCKTGKKSEEEIDLASCQVRKIVECPKCPQCLHSLVDKFNDQRQVEVYTSGGDLRVWL

SEQ ID NO: 994956 - protein, 249 aa, Homo sapiens
LYKAPLSKSLSAGPQCPLPPARPPPASLPEALVYDLHAVKNELPELEVDMWKNNLSVIMKDTFLAVSSGVDLIIVGYLKEDMESGEKVCIAVVRGFRGCCQALFDYLLMEAMQYIFGITDRLVIMPSGFLAPVYALSCTNLTCCHTKSPEWRQILGPLSITKQDIDLYMGTAGLSSSGSYILDCSHKWTYVRSVLRQTKCSRCIRCSESPGGWQNSFLWTLEPIFSSAEATSEARIGMGATLDIQRRAE

SEQ ID NO: 994957 - protein, 270 aa, Homo sapiens
DYRHESLAQYRGPELDTRLLYPVVQYTHAGPSIVEGGPGVGGEMWRRSLEGAIDHVEYQDEEPRDSDQRCMKEYTRTSQELQTEAYCNGGLSMRRIKIFEEQGQSQEEMQYRNTCERFRREGILRTEMQRIAAEPPSRRQSSLQLPDVSIGEPHEAGSSSAAGPGLRTKLEEIDKRMKQPQAGAHADCAKIREQYLVWLTQKGAREKKINEWLGIDSETEDQVRNSMEDEGLISLNHRRNCGLLTLGYRSTGRRAEDMLSGKWDETFLIR

SEQ ID NO: 994958 - protein, 129 aa, Homo sapiens
VRVSVTAAGVLAGFLPRDGEKERARNDERMSLSDWHLAVKLADQALTPKSILRLRRDRTGRILAQGAIVLSFLKQLIAGRLQESVADPELIDLIYLCVWNAKTMTRHLTSMAFNLGPLSMFCESPGPES

SEQ ID NO: 994959 - protein, 50 aa, Homo sapiens
MAAEDREVGSYTYAQKKVAKGPCWRAYYTRGKLNFGCHVEKLDNLGRVDG

SEQ ID NO: 994960 - protein, 75 aa, Homo sapiens
PVLLSEAPLNPKLWQCSVPPFRRSRSLRTGPVSSATHGDRVASRPFRPATRPLQLRDISWYEVSVWHVSAVRTLS

SEQ ID NO: 994961 - protein, 206 aa, Homo sapiens
GPLLTTCSTPLLNSLPQALCAGLAGFMDDEWAGGELVESLKRFCASTRLAATPLVLFPEEEASNGRDRGSCCFSSCGILGVSKMWYLERLIHCKFRDAPGSLMTGVRCLLGLRTAVVTSVRPFRGGIKKGGFVLFIAQLGEANEESALRVHTVGGQGILGQNRDNGSLPGERSSSDGEGEKEYPGIAAPGMTSLLFDLDSPCVPLS

SEQ ID NO: 994962 - protein, 146 aa, Homo sapiens
  misc_feature (26)..(26): Xaa can be any naturally occurring amino acid
MGRLFAISGTPNDAHAHRVYDSDFAXSTATARLYLFSVSTGGHARTTNADGNNGKYGVCGHEPSRPQHTAIPFHSLGACTHSFLNIRPVSLQARPVHKISVPSRDEAIMCTSEQKMRDLGDVTAFYESGGLTPQQRAQGHTPSMRR

SEQ ID NO: 994963 - protein, 375 aa, Homo sapiens
MTTFIDLNYNGYMYQYDSTHGKFHGHRTRLRNGKLCHHWKSQSPDDNQADAATHPKSRRERMRGRRRYDRWQIHVDDLHKTGENGSRDITTSQAGAAKKGVHSSTAGHHRIKPALDHRTQTVTLGDRCKHTAAQTIERSHARTNENNYKHRSEAPNLDQHTPTLGIRATPHGATRLQHPAQHNLNWENPAATKRTLQLATHNRHHPQAPKPTSAQNPKRTEAWHRTLETPPPGDEKPREEKTDLAPPARGSTTTNTHQTTHSNYQNLGTSHSPTGHCWRRKQDSTHHRKASKHTGERARTMSHMSALSTRDSHNRAHNDGSPKRGTSTKTQYRRSRNQHRPNTTDTTIIDEQTEEHPSDVEGAPHSHEQPRERTP

SEQ ID NO: 994964 - protein, 260 aa, Homo sapiens
MELANSARVAFAANAICTLERGPLYGVRTTNNILCSTKKICPWNADWFYRDEQEKFETIVNIHEIHPDTGTCFKSKKIACRYVNIGLIRELKDGNGKKQGGNTHLCKGKSGTLITYTARHGPGHGNTQTPNIGDAQQPTGGVFYPPELRTGQPRMGSYSGPTVGIITPVQRRTGPPPVNIVKNARPTNTRVRNIPCMQTSSTTRFEKHVDRSHHDSSFPVRKQTNFGVRDPIGDGTPKTGHSATVRTEQGNNRLYEGQPQ

SEQ ID NO: 994965 - protein, 142 aa, Homo sapiens
MLPASASETTTTEMLSPYYSASPYGLISHCSSGPESLDGYETVSRVRIHGPSSDPPSFEGMGIACNNRAVTEFNSIEWEVRGDCIRAISWVDTQMVTPQTGSIALATICHCIVGSAEAHLSNGQLGKRQIGAYACTFRNSTN

SEQ ID NO: 994966 - protein, 188 aa, Homo sapiens
MIKPFQKSPGSPDLPGKGNVATRGSKSLQRRSVALGLGQQPRLTTDGHVPIGTPPRTPVKGKRGYLTSKSKRSPRFKRPPCLERRLCHAQELFLSGTPRGSFEGGWEQTYAGKAWMALKKLRREERIREHTRSNRGQHELTTPHDRPPWGTHPGGNATAADKMGHYTWETAPETTKPEKRRRNKQIYG

SEQ ID NO: 994967 - protein, 448 aa, Homo sapiens
LGSSGSTAYPVRHIPIGLPGCNSIQVVVTGVCRSWSSSGSTAVRTVLSTLVGMMEALVPDPTDSPRAQQLSRTNSASPSQVNALRVAQRSHASASWDVGGANRHAVRHHARDNICCRSGLHQISRHHRHGTQLKYQTSSAIMNQSSRLLTTTAPDLVAPSQRPPQKQAHRSQSVTDARIPRTQRTIQDDLASQPIDSNDTDSRDHPGCHTTTKTIMDQHMEKEPGEYPPEAHSDNTTTQERQRKTPQKDAMKPKGTRSRETGPPREESIRPAREAKATRTPAAHQSTTHTPPRTNPGTSQTTGEQTHPRPNEDAPAPTHQPNYAADDRMHPQQRNRRSRRKEPNKQAGTLNHKREHKHGPPGNKRTTHSHRNKLPHNRADRPRPTRTTPARDDNQATLRDANRWTPTYNSVRTEQYKHNHDDTLKSKTQPRHASTNPYQHIQRTKGQQ

SEQ ID NO: 994968 - protein, 406 aa, Homo sapiens
GGILTFAPASLVKTQRTLPAVGFLPQNPLSGLSSALAEHCCCRCCCCYPVLGRWQAQAGPGALSLTNSSLLRTELQAFSPALDGLAPPSHLIRSTTDYLRLQKMALTEPAHGCLLLTGSFHCTNTGYYSPCYIPSNRVNDALFRDCLRTANSTSYTHAALTLCRTPCKQKGRTGSSRALPPDWPDRSPAERGSRSDRKIPYRRTANQGTGHARTHPTHPHSDTYTAGDHHRYSLRTAPTCARLPPHPPHTQASLEQAPQAHRPHTHPPPPRRHTAPACCHRPHHKPRNPATPHSAPTTPHRTHGTHTGPQHPTRTPTPLNAPPDCPHRHHTDSQRDKAGTPRHSTTTTITPPLPPARRDSLRPSTAEATTDHYTHEHLVRTATTDAAPHTNHPHQPIIPAPPRHTP

SEQ ID NO: 994969 - protein, 413 aa, Homo sapiens
MCLAGGPGCGCMSPSRVKTERLDGCWEPAGWLLAAGCHAAGGMWQFLWPVACCLSKGGGDPKLQFSMGPCECAGCAALARNSSLSRVRLIAPDVEAVLCVPLVTFLTHYAVATSHHWPAARTDRAGLFDVPRRNGHFVSIRDFQASSAGGWTVLISGLDRVGPPGEQTLKVAPPVPPGTSLPETLHRGDKGCFIQRDTLRRKTRGQLADSFHCFGGLGDQLEAWGKTEQVPWYKKVWHRAGAQRFQVEPRPDIRKLWIGSSSNRVRQSNRGQKLLQPNWVSRFQTRYSRDSVLEHGHWGHNELSVTDSLELGNKPLTDFEYPQKRYLRSLTGMMGTVAAGNARNGIREGTDSATRSMAPRHIYQGNRWTHEGEANNPPTLIDPIMQWPVPSRLNPRNNQARKGALLHRIVTRQ

SEQ ID NO: 994970 - protein, 97 aa, Homo sapiens
SYFRGKAGVLCVRVYRTVDHVTQESIRRRKMDTAIRQIACAGSSCEPPMRHTHELGTQTQRCTGLSDGLRAATDGEGDARMAFTGDTRGRTTSNHFK

SEQ ID NO: 994971 - protein, 226 aa, Homo sapiens
MLKPPHDHTPKEGHTRVPRGKNRDRQTTATTNNQTEHTTNQTSRYTSNNNTHRADKPTGRATPHTHEQHKNAAPPNSKRQNSAAGTTHPHTCHKNSSTNQATHADARGRPDDAATRSHTRTGTKTRRHTHTTRHTRTHSANEDHNRNRRATHYSSLRARQRPTPDAPPATNRENEQREREDNTAKKVERLHTSTLHTQTSHTVEIITPQPGRDTTHDLDLYRQIRT

SEQ ID NO: 994972 - protein, 205 aa, Homo sapiens
MEIAAVELDGANLAKCGDEVAVGGLACSTLDAWDLVVLPVETGNGPFKTKDILAYPLIIVLPVDHRSPFEDVRKFMPSAWTLAHVALVGCCSHESQGMLVSRQPAYFVQAGPRKRTSHQLNRVQGGNGIPVPSELERKGEDSEISMWQGHPPWWHQRGQRRSGLTGVVDCIAGDQGPNALGARVGLQVWPWLMSDLIDFERGHFD

SEQ ID NO: 994973 - protein, 436 aa, Homo sapiens
GKAYVVRSILDQRGYVASGLTLCLGRAVQRHLVDTVHFHSMAGPRLDGGCATVLRASSGAVAAAVQGRATIDPLDDDMVVHSLALLNHDVTCLRTAKGYYSLSSHDGTTLAQWLSAWLWERHPSARERPSLASVAALAAHAQARTELLAVRERRTALFDSGPPTYYLLFDSTGHTLHAACGLSSVGRAPAVLAVPQDAPATPSTANRRSSSQSQAGPLGPSAGPRSQHTPHTHRPLHCPGPPWDSRWATARLALSGPVAFPRPCGSDRAAVPALSSLTPVRWRLTHPDPEPRHSAPLPLARPHPNLAPRTSRSSCGSASITRRSSTTPDPIQRPDGLTTNTVTHRPPPPRPPSRTLPAITAPPPTRAPPRPPPQPHHTDTRAVCAHASDTYHDTHHPTNTTPHARPHRHSTPQQKSTNHATPPTTPAAHTTAPPPP

SEQ ID NO: 994974 - protein, 238 aa, Homo sapiens
MQNTLRPLQEVRVAEHSRTRAATAVAMWVELHSACALNDASRISARMTTRMRIRKSLDEVDIRIVQGRWYTMVRGYPQVTLDYGTMNCCPYESGTDGELDSMWQAVNTWAVGECWMEYDNGERGLESSPKGSNVKFETWNMVIKTPTDGARTQRRCRTALLGNGSSHQVYTTQILPKQKTQRHQGNGEPPQWRASAHYKMSWGQTAVGDTTDWRETPEESENSEKEDQNKEVTDRQYS

SEQ ID NO: 994975 - protein, 182 aa, Homo sapiens
  misc_feature (128)..(128): Xaa can be any naturally occurring amino acid
  misc_feature (133)..(133): Xaa can be any naturally occurring amino acid
MSSSDTIEFGASSIHVLGPSDSINMRFGIRQRTNQFDNEIVTKGRLADEWETGVRVEGSAHGSLRYRLENAERRDIVVSHPVDYLLCWIDVVEPAEILVWSCIIWMDLTGSIRRSYYARDNMHLEQRXRSYMXLSVSACCAELWLHWLDGWLEVLKDWIVSQEVAQNPEERCACHGLYIDVG

SEQ ID NO: 994976 - protein, 222 aa, Homo sapiens
MSKGTHSLDDTGNGKPPAAIGVAPRGTWIGTIVGDPGPHGGLTQRGKLARTRGRASPGCIPERHTGKRPSFTGTISVPHWHLKSSLYELIYGAIAKGPTPIRVYATWGGIDGDVSIVCPVGYSYYGRCLQRHTGVHEISQLIGQKMLGGKTIAATRHGSTPTGPAPDHAQASARRWNPVRARRRPCTNNRRTTPEAPRQTRPKRQHDQAEAPTDQHPQGDPG

SEQ ID NO: 994977 - protein, 349 aa, Homo sapiens
PRGRFGTMACKLERAQGHAGSHLRKVVLPVLDPVQEAPGAQAVVQQDRRLIAAQEVAHTHRQEWAWGLCPRLAHGRMGPKPETEGLLDLSLPGAEEEQEAIAGVLQRDARLRQLEDGAGQQAPGLSGRPWAAEDPDRGLGFQEARSQRHHNAQFGSDLVRASMRRKKSTRGDQAPGHDREAEAAVTETRKRGPELRAQRETEARQEQAQGDESFSILRRRSSASGDPGHRTSHKVMRRRAETRPGARAKGKAAPRTSRPDQDGPKRRQGTSPRAEPNTPEPHPRDKYNQLSQNRPETGRQELSHEKTRPNGTERKAPPDGHQHRHSDNHPKRRKHKRPHSERPRQTKEP

SEQ ID NO: 994978 - protein, 144 aa, Homo sapiens
MTEFYESIACGQLACPEWCEFFTLHMGAVELRSTDGRHFIAICRWTVWVLLYRTLPRTSTVDGFHDAQGLGCRYILDSIEGPPETDEGVISGPPGSKNSESMRDRSKGLLVASCLAKVQQAGGGDSYKRSHAVLNDEECVGPLG

SEQ ID NO: 994979 - protein, 428 aa, Homo sapiens
  misc_feature (143)..(143): Xaa can be any naturally occurring amino acid
MGNNGAPITNWNLFQDTGDFSANGHIPIPAIMRLTIGHLANLGTTDRVPELTKGTLADEQRGERQLDARDRALPWQMPTLAPHIRVMYTRPTCGPIHLHMGVKRPACTLPKTAVVSTIQRAFVHPQKAYHRQEATRHLERHSXRWTNDNSARVYATWQEGSSTGTGPTSGTHAKGRPYKCAPDSTQFTPVIRRKRVYAITKGRKRQCQTHIGERHSAIMGGPHDKVRGDTTHTRKHIRGYTVAKHQRGHMRDEHSSVREPNPWKRVGHSFTPIEQASIHSTDKRNQDGISKTQNGRPVPRDEPELAIFTQEEKGRGEWQNDAAAREHPHQKTPGGDSPTVDNRRDTGSDTPAQSGVRQTAPGYPHTAADQTAVDHVEQRQDSQEGGKQETAANTQEQDKAEATTKTARHRHTRQDERIRQVRGTAEKH

SEQ ID NO: 994980 - protein, 285 aa, Homo sapiens
  misc_feature (127)..(127): Xaa can be any naturally occurring amino acid
LIDRTYRRAGGNIQTQQGHLLIRGRHRAPNANAASMLLQLLALCTSMECKLHARNIARRSHCSSKLSGSAQSAPNDGLRIMLRKCSRDLESGPLTWSLMELHHDRMLRRYSRMMTCFRSPVGECARXLCQIDWELHLERNMGPHSVGRRAETLAVHICKMTMFRYLTFAYSGIRPAWCAHVKGDPTQIAVCGVTYHEGSDMTIGFLLPNLSDHLQCRPQRPCWRRAPSHDNSIPPTYRGKYKRTKQDLVPVNSAEKAMLCAILTFPELWRRARSMQGSPVVDIVT

SEQ ID NO: 994981 - protein, 341 aa, Homo sapiens
QRGIFLEICWLPIQQTNVNSLVTGNPYWEPVKHAAAAVYSLMTGQCEMFDLSVTWPGAVVLADYWMLQLLQKWARHVDGRDCHALGALTHMALAVQHPGSRLQCECQTRRSRGQHCESTVRYNHIWVLDLKAANDPVTVILRDLFHFSAKMMVAVTAEKASWEIAVSSVKKTIATIGLGLAARNVQLVTGWSKDKVPDHRVKLQELESLIANLGTGDEMVKIKTFGGYDSHGWERGKVHGASFVRDHECNKMLSRISLDRYMHSDYALTGKVTRDQEISRKNHRKTTGQAGRQGRSTCRTRRRTKEERIEENRTPRADDKDVNTGRDYETHQGPMWETGRR

SEQ ID NO: 994982 - protein, 165 aa, Homo sapiens
ERKGMVQAGTVHWTPRRGHACIQDPLIDAMKRRPQEECIGPQGSVQAASRVASQNHIGKFRGKRHASARDSCISSSTVLAFGHLRYSAPQVCEDDKKDRREHYGAHNNSSCKRIHDLGSSTSRYVVSRNSLDCANLVRAGKEEKQYIGELAAWERLDDDALAQHE

SEQ ID NO: 994983 - protein, 242 aa, Homo sapiens
TKRGDDRTLWWTESCEPLGCRSGFVVFARSTLALRLCRLASTYLIPLLNTGSTLDSLIYIWRTVVAPLSTQEGIGIQSTVSYVGDRLSIRRSRFGPRAVDVRLRQSRMGVPVPVLPTVSMHIPLDLSTGGHSPIAKKTRTWSPTREAGIVTLAILIWPQRSPTFSEKRLLFLPYLVFSILATALFTIRLGIPLVTIPMAFSLERQFRQPGFSKLPQRTAKLNLLLGLAMSLASFWRPAGSLA

SEQ ID NO: 994984 - protein, 177 aa, Homo sapiens
MRLACAARRISDSGEWLVCSALPVWPSCDPVSRPLVYPCDYVTERVPPLDLLPCANDAYATMRPIHGDHQYLMRCIEFAARRECKTGRHCCYPDYNSAAGGCILLVQTILSDDECSTSIASQEPHTRDDTMTRLVRHIMVTTCGQHVADESSHVRYSANVSSLAYTLSASHAAIVGI

SEQ ID NO: 994985 - protein, 137 aa, Homo sapiens
GAERWCISRDNWHNAACKTCVVQDEMPYHNELRECMMFVVLPMLPHTNDLCPLTCYPSHDPVLLCGMCTHSTHHLMHLAVFVTVGVTLSSLCVAPSSCIVTSCHTTNVNPSDIVCTTKLAIIDTLTAWVSDTNEPLG

SEQ ID NO: 994986 - protein, 149 aa, Homo sapiens
MIITGLQSGHKAPASLYDIYLRMTGRGPMDDANNNCRSFRQSLSGRGSGIYATSHILWWFLGHLTWHEMSQDCLHRHPKLEPRREDAHRSVRSLIVPGRREHWGPQESKTNITAWASHESHDIAIDEGGLGRACESETPNSCLQGLAVD

SEQ ID NO: 994987 - protein, 142 aa, Homo sapiens
EGGNRKVIMPELRQREIERERELREKIPGSCQGTGEMRVNTDYEETELIRTYESKVWGVLDLQMLRLDIYLSDRRREDELIEESKFLGGDSGEHTHLVKGLDFALLRKVRAEMCQYKREEEEELMEKPQRERQVKDEDPGRG

SEQ ID NO: 994988 - protein, 321 aa, Homo sapiens
AWIEGTLPTQRSTLDHVRPGNDTPSVTDADVVKRVGRLVVGKDDRKYNSKDQRTQSGQDLHTSGIKSHHPAVHQWDVVFGAIHDRRNVSSGLIAVWNRWSFIVRDADHIHNLDNFEALQSMHVLRIFVESASLNGEMNVPGETWESHNNIDERKGDTRVPHDRKFALRDQCFARTSEAPCNMPLGAFESDDDEDQGRADIYIKESADQGSQGLAKLMTPCTTRGKTLSKGSWAWELCHTGDWWPRTIEVILEPLGATSWCPLLEGICLLCEMPRSRHGVRRHDYLAGSTTGHDSEQYMPGMESGLTRGVLNTSLENIASNL

SEQ ID NO: 994989 - protein, 125 aa, Homo sapiens
  misc_feature (64)..(64): Xaa can be any naturally occurring amino acid
  misc_feature (71)..(71): Xaa can be any naturally occurring amino acid
ALWAAGGSGRASLRAWSLHETFTVRSGETFGSGLPHDAPRTPLATRRGVRSKLTVPEHGTVHPXVADSLSXKASMSRCDDVPATFSGAARLMRGSTVATEPGLEAGSVTLQKRCPCVSFHACRIS

SEQ ID NO: 994990 - protein, 88 aa, Homo sapiens
ARLFLHSEVSRGLRALALCISSVYSTRDMNAVLRAPPGFHSRHTGGARGMIPKMARILSLVVTELRARTESRWFCLFLSFGAAARRRR

SEQ ID NO: 994991 - protein, 607 aa, Homo sapiens
  misc_feature (107)..(107): Xaa can be any naturally occurring amino acid
  misc_feature (124)..(124): Xaa can be any naturally occurring amino acid
  misc_feature (160)..(160): Xaa can be any naturally occurring amino acid
  misc_feature (216)..(216): Xaa can be any naturally occurring amino acid
IYHSRRDKNIFELPDRSREVRCRQSASTWAFQRVDWRCSISQPSQRTLKTRCTVVRETSDDMMNEEKSSHMMELLAYPMRTRGNISASTELRAIASLRNTMAYSIGXFSQYDESMETLVYDELXGARWRFRLLDAGDASCVVLCNHGEINQSSDSRTLDXDDDFKDTVSLAGAPRVWTGSLSRKRDVPVTRVVSTDSQTPENRARTGGVGTWTVMXTDAPVECTSHRRNSWPSWVTGAGDSVGQDREQLKVVEHSSAVTVIDALCQRELGFTLVQMQTFLGPQIYLGRPYAYGTRGTYNAVNILYQLRHLADTHPEIEMEHFGPINPHIGERNPLGVSRRLWACLGKDRLVLWGNGESQMVPKERHRRLTVPSGNFVRGTHCGAGKLRRNFLLRNFSVSRRDIGFGGQTFVRTSAGVNPLFLKRPRIGQGIDVKNHCEVVIQHNKSEPLWWAHLGSAYCENFCATPWKIRAGKNGELGHTATSQCETKCTPQQIAVMREESHNTDKRRGGKQKRYSDTTPGAKQRDGHRKIRDQTREADEAYLVKQTTVWGEETERTIDRTLRKEATARKGAESNTVTTAPAVTSHQQRRCRTNDQHERVHTIENDD

SEQ ID NO: 994992 - protein, 295 aa, Homo sapiens
GTLNSGKAREWTPRAHRWLNTQQTETASDESAAEAFCESPRVCEAWRRGVLSNGGGGGRQGHGRLEQPVHNLPDSDGTVHRLSTDRGTAGDLDAPVDKTVNEGKQRGSVQSHAAQQGQQRRKIREKQRKRKKRNNKKLAQITRNEDTRQKTGAKTTENNTIAEKQKKKTAHNTAKNNSHRPKRRTENRHTSKRANITTPKNEKAQARNQIREPHKEDKEQPDNSNKKNMTNRNKGCKRDEFNPQQDHYHSRSNKATTKNTFHDTRHTDHTMDINQSRQPNQTHNETNKRAHPNYT

SEQ ID NO: 994993 - protein, 270 aa, Homo sapiens
MMTLVCKTSTYDACTQYGRHAYIVPVDDGSSQDSWDHAAIQDISSKDFSSPAQQVSSLLLPAQEPRPSTTSSAQTRRAVGVRKRPVQALDAHGAAGPRWERARSTPSTDHTDNLTTTHSHATQTHQRTKHLDGKNTTRTHCRSYAPHRPTQQHPGIRTRANPGPNPDLNTTQSSPTLTTQPNRDQPPKEADPWHHGRRTHPSPTTTTDSKLPPTAPSTRAQAHRNTRGTSETQHNAPPPSQPHNHTKPTHTNPSAANTTRPPPHRTNNNQ

SEQ ID NO: 994994 - protein, 194 aa, Homo sapiens
PGGNNTGWVRPGLVRCGDQSARGSCAWDRGWLCSGWGDRLGMHAVQCVTLSWLVSGAQMPLQSPLCPLRGRWTGRASVLQTLSVGRPGTACDGSGGCAQVRTRQCWHGDGDVGTWGCGWLPGAVYVAAAVTSRARRHRSRGRSVSGISMLAPRVLQSAGSRDSAGQSTLGRCSSDDNRRELPWEQSTRYLRAFH

SEQ ID NO: 994995 - protein, 41 aa, Homo sapiens
GNAERKECSEPEREQIAVVGSIGLGSPPSEAVKLQMIQVTA

SEQ ID NO: 994996 - protein, 313 aa, Homo sapiens
MSQWDVPGPGALMPELGERLSARPSPPCCTRRSQSHQRSAAMDAHADKTADGSPHAGRGTAQCLAPCSFGYNTGVINAPQKVIDGVLQPDMGPPLWGEHPAHHCSHTLWSLSVAIFSVGGMIGSFSVGLFVNRFGRRNSMLLLNLLAFVSAVLMGFSKLGKSFEMLILGRFIIGVYCGLTTGFVPMYVGERVPTALRGSHGNHAQHGIARRIIIARMSAGSKWATWTGGPDGDIISILARCSDVMPSAEESDLIITWKRVNRATVDKTWQYMRYLLAKDTAKKQTHRSRPTTTPSINTPLRNHQQDLPRKHNN

SEQ ID NO: 994997 - protein, 106 aa, Homo sapiens
MIDEGIAPEEGGVVPEGHVCHDPSQFNGSLPKRNKLSIGIYEWQRSLLIDESGTHFFLVNGRVKSFELSPTSSVQNMAGVTTWQCDMLKCSRLSSFSLCQFSSQAV

SEQ ID NO: 994998 - protein, 134 aa, Homo sapiens
MDGRAGYCSQLSCINEAIEQTYQQEPNNLKARNSFRYNGLILRKTCGRGHREAERQWVSLVVSYSGDSGPGVNACPRIRSGGGPRIKHRHARRHRLTHAIRQHESDKESRYTAPVPCRHGPALVQPRGTALNPS

SEQ ID NO: 994999 - protein, 320 aa, Homo sapiens
DFVSLALRDRRLEFRYDHGQGGQLVISEHGSQSHLVAMDQVSHCELKLAAQVCPDDVVLTVSHPCCCGGRPTGLRKNQILKPVTRGASIYQYEACSSTTFTQSLALCCMPMSICRFDCVAIARLCLSSASALQLAVTPESTVAAGHVWPVTVLLQCQPPCNLLGASGPPALPSHARASLAVPDGDGFAYCRRPVSPVCGLSSNGTCILTNAHGGPGLDRNVQPERRTVGLTIMRPIMDLRAGPTFTVRRSPSITALLNPASTPEEPRHLGKTPQPPYQKLDVPCAPLGRAPQQPGTLVSLLAQLPTRPHRDKDKLTNSAT

SEQ ID NO: 995000 - protein, 500 aa, Homo sapiens
GCQHAIQTEEDHGNFGAHVSRRATDQHRQASRIATPDGARIGAGWICSHPPVSNFRPEYHPGRIFVDKYGYEWQLSTVTRRKPTSFWRANCHIAWIKLCRTFGTSEPDIGVKCMLNNYMTGVCFPIIAWWLRIGPTSNSLWGNGEKTRQRQPCQSLKAHNSFRLELQLDGEELNELVLGGDLVSLDRTCKADHGTRQSVQFYRPGIRPFTLFHKQHTQSNIQQQTTQTSLREATTTTLSQAYARKNNGARVRRNHVGPPWGHPQKSGQFTPLTTPHENNYAGQASRRGEHTQHDGPDTPHAQKYSPAAAHPIITHTSSAEKYQTAGRLTTTWPQLERRHNYEDDTQQRTEGQLHNSTRTTHGHTPRAQNNPSTTPRREHPPTANTTDDRTPTRKTTEPRQPATAPPPVTHTQHTRTPHPTPTQNDANDNPPSHKQRKPQTPAKQHPSQPRPRDNTTEGRRAGRRQRHAKATHKALQHHTRTRPERHSNHHTDKQRAKTST

SEQ ID NO: 995001 - protein, 239 aa, Homo sapiens
GGGGMADTVLLKFLQTEMVAELWAQTRTQAGGTEDEPVGSWKGMGFRVGQALEQRLPRETLAFREELDCPQVLVATDLWVGVSCQTVRCDWLRTNSPGDRTVLQYNSFHPSSVPMALLACSILGGSDPKWPGRSTCGCLMLGSIYTQGFESVVAGSVGALPVCKLPGGDSETPKACLAPAASVTVAPGRHRLRRRWGGCICGVVLGIPGLGVTIVVRKWVSTRSGGCHDAGDMASQGAV

SEQ ID NO: 995002 - protein, 302 aa, Homo sapiens
MQRSKRDATPTRNASSDPTGAKHNHRNKTRAKRHTHNTPNTQPHAPRRERRNRKNPKQDQTQNDERTQHSKRRQQSDYGTADTTNEAHQAKPSTTQKQQGLPGRNTEKERNTPPTKETQQQDGRRRRQKDNTTEETQEEHADNKRKQGRTSRQQKEQGRTTHRDEPTEEGTNKHKQTENNKRDTQEEKEEQRLRSDRTQRIRSRQRSAGARPKRQSAHQHTGRPKQPQHKKSNRRKTRQHRAERRRHTADTEDERARRCKSKQTANTRKTEDNSKHKRGDAPDAGETKTKRQDKRTDKDKRE

SEQ ID NO: 995003 - protein, 232 aa, Homo sapiens
APNNFLCRHLHPHRCRRWSMSVRMGVLGLSYVVPSPRNPRVACVGTVLHRAWSILLLPGAGGRRPSGAYVKRRHRMDRPRRNVVMQVHSKYQDPYKQACVWHDYAKRTRKACGDMIVPIAGQPVHCLLSVLARTWTRLWTYATEASEHTNLCPIEGSEQSSSKRSFQGRTLTSKNDSSDPSFLQGKLDTVMSDKLAAYRWLSLVMFTELFGELEYLDVTGWLRGWVRHSRRD

SEQ ID NO: 995004 - protein, 120 aa, Homo sapiens
MVGSVVDHELGSCVDELRHHSPSSDSRTSRSSQGHQKLSARILKEALLCAVVLVKPHVYRACEETPPAPVGKNDCCTNCSRRQTPDPIRRVQKSPDETSPICLWPAITTRKSVQRPPTGA

SEQ ID NO: 995005 - protein, 104 aa, Homo sapiens
  misc_feature (102)..(102): Xaa can be any naturally occurring amino acid
EEHPRREKLSPTQRPEAWRDKLVAGGSRMRARGRSLREDGWELWGSSSSSREDQRTRRERGCRAVQNGHGRAPVSGAGRRSRHRNPANLGSSAPVNPRVSGXDM

SEQ ID NO: 995006 - protein, 137 aa, Homo sapiens
MVTSKNDQGGTPALATPCPIPYGTLAHSKHQKGDPRSTKPETRQGKCKKDDHETAQAQRRTNQTRQNNPANTHIATDPHPPHAYRPHRTPHAPSHQQQRGSPRHNNTKNHTRPHTQQHTYKTNHTTPPTTPAKTTPT

SEQ ID NO: 995007 - protein, 319 aa, Homo sapiens
DAPGRLGGGGCGDRPGPGPLKPERSACCPKAWDSGTMHRDRDFSDDTRVQARAGGYGAQRAPGGLRLSCRPAPSGPHGSSSWSVPGVQHGHGLWGAAWAAQGEELVDKNIEPLFIAASHARLEVVTVAVDTMYVGKKAGTCVFFPYLHQDWEVQYQQDTPVAPRFDVNAPDLYIPAMAFITYVLVAGLALGTQDRFSPDLLGLQASSALAWLTLEVLVILLRLYLVTVNNELTIIELVASWATNMSGMIGGVLMGLVFGTDGILVLGRLMRWQPWGHESGSWVKNLRSATEGVPSAGPKQLHYPDKAGEGHYAGRDTNR

SEQ ID NO: 995008 - protein, 114 aa, Homo sapiens
AERGGGDGQSKYPRRGRLVAWMRDRVKGMTCESDVYLDSRRLGVQDGYIVELEVRVYTNHRTSNIIILPPGYDYECSCGEDRGRACFRRIVICVYSSEGEYERFLEEVATMYDA

SEQ ID NO: 995009 - protein, 234 aa, Homo sapiens
DQATGSDYDNDSSLDVPEQRNFAPSARSYRYERAESRTVYLLGYQSVVRRIICDNSFPSDGDLHASRSQTAGRSLVQGGLGGPPGDIRRSSLMSVMSSTPRSQVLVIHYGNTFERRTSKGRTTIHHEHLQPETRLEPDVIEGSVKQMRLRTRALIPLVASHRVCQRELHRRIVLHLRNSSWKGRRRARSFPESAFQGLGGFHWARIRVGNGVSSSANPEAIQLHTFAKYTERAK

SEQ ID NO: 995010 - protein, 372 aa, Homo sapiens
MRRQCSRGNATGLRTRIRGAHTMGSLKDTGPVPWQLRGSSSSDIALCLTYEEAVSNRRTGPNRSTCEVKPDALKDKQCEVVLVTRPKMDDISRLIPDGDTRVRMNQDKKDRAAKPAHRTQSRNRDCMTEAPECTKSPSTQTARYATETRTVPPSEQNRHNNTSRHRSTNAKPKQCTQAQDKPNNAAHKTTQSKNKAEQAVNEEAKHYQNSKSNAHEHHSSKKPIGQDRNKTTDNQQKERSTRAWEDVAQRHEDKHDETTKQSGQKRNKRNNPDEDSEGTAEKDETSRGTRTEPLEEQPTQARQTRRQQCQYSTPATKHNSPTRIRSVSDSQENIRTKNQATHPTTNKRRHYHNGEEDRTKSNTHNRRKHRHT

SEQ ID NO: 995011 - protein, 347 aa, Homo sapiens
RVEEEQQRSAILAQCNAMLREQLDQAGSDNQALSEDIRKVTKDWTRCRKELEHREAVWRREEESFNAYFSNESQSACSLLWRQVVGFQCWLVSRGEDVHVSRDLACELGRGAWTQVRSRACPVRLGLGLSNSGATGLAIKSRRPEAALDETGPAAESQSGGDSLRDKVLREKDLWRRQQNAKRPGQGLTQCQSDQSWALAVERVLRSRIWRRITVKKDLTEKLGGPGNPCGYSEQVALVDTRTREAGHGRPLMDLGTGRSGRKSSERGPALSGSERDRECLKAALGGSRTRNQSNRRALTGEYGPRKVYTAVSYRKQVTRVNASLQHSDKESWTHTSDKRKDQNTQT

SEQ ID NO: 995012 - protein, 297 aa, Homo sapiens
  misc_feature (26)..(26): Xaa can be any naturally occurring amino acid
  misc_feature (44)..(44): Xaa can be any naturally occurring amino acid
  misc_feature (89)..(89): Xaa can be any naturally occurring amino acid
  misc_feature (188)..(188): Xaa can be any naturally occurring amino acid
MACACLLTRRRIHGRRVSGGVTGGDXWHKRAQWPGWCNFLESEXLQGFTRHEWTKTRIATKAMWTLTLGPWDLLGRVATLEMMEALGHXREERSYGWVAESHNRSEADCRGREDRGSLAMGSQRKLAKGQYELYEGTSNAYGGALLKRDALDSSCGGETQRSWRSELDRCNCLYSEEEFVDKIVPRGXWGPCRRPYPCIGTNRRVVKRIGNAPVHCPMNGASWLGVGRTKRETCAGVHFAPPFRVHLVIDENSIPSSYGNRRLRYTGLGTTPFEELRQAEVLSDSGKEIGLGGLVTT

SEQ ID NO: 995013 - protein, 450 aa, Homo sapiens
MSDRSPSPVCGSSWRTVGTSRLLVFWPLWSSSSRTHCDGALAGHSSGPSQCWCLVQQTGLPGGPPSHGHAKQCCACCKERVIGDVSRRVRVTQRAHRRGVPSGRKTRVGRKVKRRSIHAVTGGRRSPRGTNVETSVTLRREGQEAFGFAKTTPLFTSTVSFYIALFLPERKAACRGRIRIEESRRERKAKGPDKRTGHAEQFGQAYDLYAGPWTNLGNWGCRTRVEESTRPRHAFPDPRHLSRDGQEPPCAAPLSILDAEASGTEGGTREDFGSVGNPQRERIECPKQIIGQALGTWDTGDPFSLGFEGESSAGLGGTPRGPVTQFAVGNSGELGTIVGYNAGAEKRMCGFSGSKWRCGNLSRARGKIRTIEEVPERNYRQAIHVFDPYGMARKKRLKRSGHGNPLVVYARAGPGAIGELEDPEKVHTQNWCRRRKEETVGMRMCNTPIS

SEQ ID NO: 995014 - protein, 48 aa, Homo sapiens
MRHQSLKGRKRYGQQGLENRIDVRNKRNVTPGVFTGVDTDGGGKEDNR

SEQ ID NO: 995015 - protein, 146 aa, Homo sapiens
MIPDDHRIEGSWRTICRCCRYNLLGEALEILGQLGDMGYSLRGSDQAFKTEQLASEPAWNQYIPGELGGTKKFLFSTGPTRIPNPGTERRKLPGSLAKKMDQIIEGNMKATFSYWSDPDRKQLLFSNVYALEDDPEMKVERYKRHL

SEQ ID NO: 995016 - protein, 400 aa, Homo sapiens
LHRDSRPCVHYYASVFSMPFPSPGRGTYGYGADAMHVMGRDEDRSRSLTTRGGSVTLEESIRSIYETAYLKENCAGLNVKKMRGKMMLGGRVFGEYVLMDEERRTQGFRTDRQEGVQCKDNRACIPTQAFIAHRYAGYLSDTTMSVSVTRDKDFIHVTCICRKIRDIARSGQGSDSSASKASDRSRYSPSESSRQWVLRPEELGIQRESRRHANAMALGPLAREDGTLMLHLQRLEYTLSVCAEEPEHSQLFTTLGRMAWSSTDWHPSAQNEAGHSILQNLCEPVGRRERGLKATWDQGAEHGGIKDAEKAAGWTTWRTRKVEAKRTTKGTQAEQSTKLERRQNTQSKTQRTARRKAQQCKNRKQLEHNTNNVRKSTTPKHHNRHNETKSTEDAPERRAT

SEQ ID NO: 995017 - protein, 204 aa, Homo sapiens
MGERIILAEITSNHSDWCTPALLYTGKPLMWRSRALGGGWEELLAYTQSCVKYAGFFGALSMDPPGKALSGLHRKSLAQKCITLEVRLWHVKSAGEVFCGDMRVRLSHIDHTSVWLRKTRDKNKDARGENKGGRQRGATPPKCETCGASRGRAYKTFLNQRVQGTTPVEYVEHAATSGFYHKEIIVRTTYISLKGSPAFSPIVV

SEQ ID NO: 995018 - protein, 483 aa, Homo sapiens
VDLVMVYTRVGGLRGMRLRRIGRASYFRSSEFPCDDREASGTGGPLVLVLSQGELEKVGQVQVPGRLRFGVSGASMSDAEHVGAFARLRSYLGAEEVGMSWRRQSRWHKRGLDAEDCAVKRTRRWEDPPAAKAPLSMSRRQRTISRGGASSRRIEITRERETAAEYVPTVCNKRVAHVLTWVAICLSGEHGHVDGLRSTRCSKMPLSYLYLTEPGQSLPCRLARQEASVTKLLADAGWWSEKLVDAVVPSLASFAPHCRRLARAKRGPVNLCSRDSLARWAQHSFAMAHSNRKATGWESARWGVHLSKKRAFVGTALGTPREENGRNQFTRGSPKGRSNGSKAEEGIESTWQRETGATPRPPQLGEGACLGTSAFPDQIPTGALGLGTPDALGGFQWQRFGLSETLDVNTNPPEFQRRGPCFRGHEFRRVGTTNPLLEPPGGTEPLRKRILVTSPTTTGGPPGVPRNDATENPTMCIEGQSPT

SEQ ID NO: 995019 - protein, 222 aa, Homo sapiens
RTRWLADEEAGGEPGPRALRATERSDLRRGRGVMVSITQLHASESCSLFRAPLLGCLAWLSDPSSTGLRALGPSKWGDRPVGGGPSAGPVQGLEWLLDTEANEPWGAAAAGCGHEAPRQGARPAMYSVCVLRRLGQALGVSRARTPSCGIAVSTSCRELESMLRSIRRLRSPLSIHGHPRVSGPLQAYLAFHLMVPWCVPWNRSEGSVSLRRHSPFAALLRG

SEQ ID NO: 995020 - protein, 151 aa, Homo sapiens
MYVTEFSTAPHATRDLLRSPCSMRDAVRETPVTYIGAEYDGPHKPTPGEGTEKGTRAQALPHIIRAWPGTPEDTTTRTMRRAAAEGESAQKEDEGAGYDIMAEHQNKREMAGRGASETARSAEKQQRGTARGQHRQGDKKGDGREHSRSNN

SEQ ID NO: 995021 - protein, 121 aa, Homo sapiens
MEIVVTDYSDQNLQELEKWLKKEPEAFDWSPVVTYVCDLEGNRVEGPEKEEKWRQGSRAGAEDVIVTSEARQLGAVHPYPLADLRAHEDCVSDATTDQNSPPTGGQLKETRKRSEGQEGAG

SEQ ID NO: 995022 - protein, 247 aa, Homo sapiens
GGEQQAEQRTEAAGDRPAGSMGRGYSLPVEGWKALEDAAGDCPEAGIPAPHCAQTMFILRSALRAGLHRSSLRMAWGRLRPNLPSPSGLRSARTTPCFPPGERLESGEGVGDVDGAEGMRRGMISTVNKPHPTRQDDERSCTAPQKTETGHHPTRGDRRLTGTARRNPGSTKRDDTDEERGDKDNTRWLTLGNQNPGSPRQTRTQFPPQHKGDNTSWPARRHQTTPRQSSHTHNNTKADTGTTQQGN

SEQ ID NO: 995023 - protein, 218 aa, Homo sapiens
  misc_feature (187)..(187): Xaa can be any naturally occurring amino acid
MVRGCLRLSSPLRGGAGLRESSRVLNQIYPPRDVPIAGVVVACVADGLSPVNTVIPIQWTTLILLGFDVVERRPSDPVSERALRIETLGEWRADNKYNRLLGRVGRGVGEVAPQWRGALCRSISGIAGRWLGVQSRDDRQYGICQTGEQHAGTWIGAGSMGTLRVVHHHEVSSRPTLFSVEPVPSRXVGRRVDLTVCFVGTDSRIFFGTPEEWLLSSL

SEQ ID NO: 995024 - protein, 103 aa, Homo sapiens
PEPTYLRVWVGLAAVEFVTYEVKHPSRSHYRFNVQTGSAMPWPVGIRYLTDHYDTESIDHAEDQLNLTSLQRRHTSHTRQPSTWRHVKHIHKPGHKHSTMPHE

SEQ ID NO: 995025 - protein, 320 aa, Homo sapiens
GLSRLLKGPGVASLCRGLDVEAKTRLTCATSPTCECGYQSAMWYHGKTTLTASHHEYSQLSGGGAKFKKYAGDLNNAPEEEARGIGINAGHVEYRELACHGTELARTMDWAGSCRLCEEYDQRHCTRVGRDASWCDMQTKDGPMAQTREHLINSGTIAIGCGAECVGVIVTLHVDRCLHGTASEWVEMAVNLVASWEALLIEGGGINGEGDPQLSAYALDSAGVLLLGLRTVNLSTSKGGVKKRIGMLGRLHSSGRPGTGCSISWACGWRVLRPMGGRGGEAPKASGEGRRAVGPGNQNSAGGKGAISPTAGTRETRAGT

SEQ ID NO: 995026 - protein, 341 aa, Homo sapiens
AQARLDVLGRAASSATQALTMQLALYGSEAVLDEMIRELVVPEQERLYCATNEVVEVEIAVLVNAVDEKELACENAETSVQAIGRCDWYKDGVQNGCAYRRSQLDKHMFVWLLQVLEHEIRPFCECDGMECAMLDMPVQLSESAMGNTYSTNRRLEASKSSPGSVSVSLRSSKYWVPPDAVEDSPKYDAVLMYQPGDERVDDVTRGYCVTDLYLVGSVGSRTCVNPKGRARQIFGGRPWGLGGGMPHNKKFDLRGDTLPKQDGGSTTTKGGHSATEHWLHARDKPTPSPNEDTADGDTIPKYKTRKDPPTSREPWMYTKRGASRKSDPKGKSCMAAGTLAT

SEQ ID NO: 995027 - protein, 189 aa, Homo sapiens
EQDLYHCHRHRGQPPAPHRRGGEEVLRPASGEEAQDCATEEDEPPAPELHQDAARELQSPAAWRPLKPNSRRRHTPRNSPTGEPGGGGGGQWRGTGLTLSQAACRDWMRHQKHDGVRVLLLGGQYRAPCYVKTLQTDTVLVGGEACQPHRARTRTDDRADMQTGVISFEHDPGLHPELESVLVNFFEKR

SEQ ID NO: 995028 - protein, 212 aa, Homo sapiens
SGSLLYTGGMGTAMYVALGRPHHPHQYLARVDCDVRLAIQVGSLGIFPLVYAMPRSASVPECRLSASNCQSNDQGHGVRAGGWYRHAGAVLMRAQVLLHVSEKEIAAFLPYLVFNILVHSCTISHGELPRVLPFPWACSLVETVSEARPFNESCPEDCEGSNLLLGLFYVLWHHSGDQRGSLAKDLRGQVAPPTTCLPFLEYIKVRVSEEGM

SEQ ID NO: 995029 - protein, 266 aa, Homo sapiens
  misc_feature (116)..(116): Xaa can be any naturally occurring amino acid
  misc_feature (125)..(125): Xaa can be any naturally occurring amino acid
  misc_feature (132)..(132): Xaa can be any naturally occurring amino acid
SFFRKLGSEGLPPSSFSNYMRDCDTEACAYDSVCLLSVPSLSGCCLTPSGVSVYCPSCLSLHGTAITFRLVNPARDENALDRTLVFICRREYSTHWGGDIGGPTSYDDKSMYIAGXVRIYEDFFXTAASESXSVRVHASVTCVASYAVTRHAYYAQMSVAHRHTKRGDLTMGVAPRCHLPLAIDEGSPRHCRRRGMASSIYWSMIVDTAATRTYNALDCISSQANIEGCLAGGHSNLRRSDTGSPPRVVIVTLDGAELTGVEVTRY

SEQ ID NO: 995030 - protein, 134 aa, Homo sapiens
GLCGMAALDCPWSLFTSLGLSEQKARDTLKNYVLLSAQLRRGRYSGSDGPLWFHLLTKLPGSLLYGLASRLRDTRRLSFLVSYKTSKKIHTEAPAKRCPGVCAESTPWYPIDTVDFERECGVGVMVTPEQIEDG

SEQ ID NO: 995031 - protein, 188 aa, Homo sapiens
KHQRLLWTLESLVTGRAVREVRDGDCPAGPGSCSTTMQIQASTQEEALAGWEPMGVIGLILPPDYSPSLDDVEDLPCPWLWAAAGGGPRCPAGLPRRPRPSLAQTGGGAGPLPGESLSVLELVLSSHGVAYPWPLARPGNPDGGRSCGAPGRKGVPLRRSLAGECAELGLGLGTESLCAAARDTVAGH

SEQ ID NO: 995032 - protein, 75 aa, Homo sapiens
  misc_feature (58)..(58): Xaa can be any naturally occurring amino acid
REGKLARTKGNAEPAPAAQRSRVSHCTCNLVHGDARARLTCITDRVGNQLENSVADEXDLGADDLIPCADVCQDC

SEQ ID NO: 995033 - protein, 506 aa, Homo sapiens
  misc_feature (104)..(104): Xaa can be any naturally occurring amino acid
MAARGHPTDVVRALELAALVLMSNGHDSSRPHWDDKFTYRDGGQSCGFMVTRSYSSWVSWIECIRTWPLLTERTDDSERKKLQIRVRLSLGPINALAALNLSLXGPYSPLDALVEGDPGYNGVAIARMYDKTDDDSCDLGDTTCQNDRACGPNLPVATQGLVVFEMGRNLHLIPRYGDIYLVGSLVAFVRSLESCKGLKFRIERHNQEGARTFGSYQALLHRALRQWALLAYPVGPQVRWIAPPVPKRALFWTLLRIHSKHWGGIRTRFGRAMGHISFIIRVARPDEVKANRQPKYEPPQEACVTEPEPRMQVPFSQLPFARILGPGGPNPRTGGGFPHWLIFRLVGAGALWGSRARSRGVRHNGFVARPDRLLHPGALSAALAPTTSDCGPGRGQFARSGPCLLGTTHVGWPNCGGLGPAENADKCMTRRLFGIYVPQGECVQLCKQQSTTERFPTHIDARRETLPLRMKQPTHHGCSVATKKNVCLTHDHHTNSRGESAKQDAD

SEQ ID NO: 995034 - protein, 182 aa, Homo sapiens
MLSMYIHAKKVFCLAYSLMPDSWGDGYPRWVLNAFYLYLSHECRAEAVVPEGRENDPRSNHRKPCLRTSFDGGPQLQGWGGNSTPKCQPLLSSQSTSILRGISGLCPTGNPFLVGYAFQCHRATHPMHLCPARQCWDGQQGQAQCLADRWVGREREKCRLSILLGGIPHKDPGILAGKTVPK

SEQ ID NO: 995035 - protein, 250 aa, Homo sapiens
MSVVTSAWFSCLLVRSRLAPSDSRSVFLGPDISPSEAHCYLDYYSAWNEKLYVLGWAHLTTMNTSHNMMHTRHLYALLVSSLTALICGVVIPVTLWLVTYPPHTRHRLPSCVSQEKSPCVLLTAPRVRACPGLLLPSTKGGRTGCDSFLVAPTWGRPRTPGTTMWGGVILALLERYRLACVRVRSTKDTRPGATSVAPCATPRWYRGGGSGALTTVPVTRCGSSKFPSHVVPIGVFADESLMEAHWRRQL

SEQ ID NO: 995036 - protein, 237 aa, Homo sapiens
MLSTPLFWRYREETPGRIVTHYQVLRYPNAWGEHTVCHPKKALRERQTFVALRKDKFAARRSQRYSGWGRTLVSQLFGIERRKLYNPLCNNSNAMGLKTSEPMSQARKSLGSLNGTPRVESAIEGCAPAHHDSCVEGRPLWYQFLGSICCPGTRNSFRLRKVKVPATACGERTTVALQMERSIVKRPFVVTVKFLPRHIRARSWSAVTDYALVAVHPKRARAWHCAIVNGGLTPING

SEQ ID NO: 995037 - protein, 347 aa, Homo sapiens
MGSSAYGTKYGEETMERSSGRGAPSRPIWSICGIPSRDESNDILVCGCLGTYEFDFYQLSGNQIGKGLGQMNHSDSRAMYQAYIELKRRGINSLHAGLRDNPMYLLFHRSGLDVRLWDLCEREHEPPWDDGLCSSLKTDYQTECEMVGCEGPHHGAILAMYLIVSRHEVPLPAELYGTGMPIADTLTDVIGVSHLMHRFRKSRDSLVHEELVKTDCHLAEVARGINIASEEFLIYESYFRRTYQHDWMSESWTDVIVNHRSEFNPPPGGGVSHHQCVPGTTRLRKAGRQGNRNDRVVAQCKCSVGLPRGNGDHREHKPLWGPTYDTALTGHPTFGLQETPANKKSQR

SEQ ID NO: 995038 - protein, 214 aa, Homo sapiens
  misc_feature (172)..(172): Xaa can be any naturally occurring amino acid
LAFMSLLEEKLLPVLVHTFGIDTKKYVEVTREVVCRGYALSPRTSSCLAACQRQYMERLRAADLGSTGLRIEEGAGEGAVADRLWECLTLVSQWPGLFNKFFFGQCPCLLGRSSSSANLAPAVCKCKDKILCGEGMQVHLLVWSRELISCVLVVSHEFSCSSYIHPADWKLXVPPTNARHHGRAQRRDGRSQYRGQEPGIHNLCWLRLGQHGWA

SEQ ID NO: 995039 - protein, 216 aa, Homo sapiens
MPGKMVVILGASNILWIMFALLKLLKIETTPESRYLAQIGDSVSLTCSTTGCESPFVSWRTQKHSPLNGKVTNEGTTSTLSNESCYVTGTNDSVPVQQQLCDIKEDWTNRNPGGRSTLFLRIQRFMESGPLRRWEADHSQAVQLPDVYPYDRLADRLTERRSSHEESRQSLPAMQNRKSLANPRTLDRYPFNTGSIEESWEKGPGRAEPHYTMDNM

SEQ ID NO: 995040 - protein, 299 aa, Homo sapiens
  misc_feature (255)..(255): Xaa can be any naturally occurring amino acid
RGVAWTFFGKKKKIIFSKNPPGGGGGPPGGGPGGASPGQGFNWGGKALNSNIWPAFSRPPKAGRPANLEEGTRGKWCKLLVGDGACGIPGGLWGGPSRRLEVVPLERENEGERSTTLAVWALTKRGGGKGGAYFSRGVKEPHARKIVVNPSGHALRGRAISCECLCPRSDILHTQAPTILVGSLMNTGGDETSSHAGEARKTRWSGAQSRGGENTAGAPQAGGLTESGVVPLEIFLLGKDNPAVWDERNVLDRAXEKDRPRESDVMRARGAGGTQPWVGGPYLKKGTAEGAPRGGHRVK

SEQ ID NO: 995041 - protein, 169 aa, Homo sapiens
MSGWGVNITGEPRASERTQRKNKKRSLKQVDDYRIFRKRYLIYLVDASKAMFESQSEDAVETLLTMSIQCMHKCVASVRSISSDRDLLAVVCYGHRERHRISVNGSKILTSYRSCDESTVRKRILELDRSFKGGSRDDKRLFPRHDGRTDLDYIDSSESDVGPVPRPLK

SEQ ID NO: 995042 - protein, 536 aa, Homo sapiens
MYRQLTNECSTSVTPSMESREEERQMRYVVEKSIDCGAHSVRFNIVADIKRVVNVPNCTRDCVVRRKRAHGQVCPAYSLVRAPLWGLAALETKYHTPFTKLGVPFPLGKFETRIRKENDPVAKLIQHAPHLQERGHVVAAPNCPSPPLCERVSRRRGLGVAPTSLSRSMEPIVRPFRGNHTDFQPVEPVLRTKSEKGSLVRIWRIEANPRRKAIGASMSWVDVVSRSGLGVWPVVPKAGPLPTHLMEGNPPVGMAHCWAWGAGRPPPGLLKSHPGVWRPTWRTNRNGLFRHHVWAYPPVGRMVGAGSTFERAFPCVLGAAVTHVVVALDPFLVPPCSVGGTLWSAPLEGVALGLLGVLANAIISGSTEEILPGIGPDGNRFPGSCISPNRQGFLGAALKKPGGVRQLSTGTKRPDTVPGTGNPPGEAGAPPDRGPVIHRVEGERRRKTHPEGVYSKEHASPRYEERQAAEVSPNTAWLTEEGGHPTHETMIDWIERQTTRGRDRVINDRWEAHRRESTDQRSERSALNETQTTSRT

SEQ ID NO: 995043 - protein, 226 aa, Homo sapiens
  misc_feature (137)..(137): Xaa can be any naturally occurring amino acid
VPKGVLGWTRNWEQDTQQDADQGQMRPKGGGERVSEGPQSEAVRGVGHRLREVGLSSWDPSRGRVVGKGRGAPKGSRRRLHDRKWRETQGFREGPGSGNRGSTGYYGRDSPGPPGNTTERVEGRPRLSERELSGVPXKGAGGKGSGGDPPVVAPPIKIQPRKSLGPRDPQTGGGIPQKLGGRPTTRNAYGRGQKTRGQYEGPKPTQGNRGVLRRNTPWGKQTDKGP

SEQ ID NO: 995044 - protein, 209 aa, Homo sapiens
ARCCPPRTRSPEPPPRKGMQETPGSVERRGRRAGAEDGMSQAPGAQPRPTRSRVTSRSGERRGRLSCLSSGPSNKRSAAGRSLAQEAADEICKRPLSQLGPGPGTGADPEAWPRPCRWGCCHCRCAGGTGWPCAEVDGVYYHTWSLKLRAPVGPGWMRTESGPSWRLRWPRPVRGAAGSDQGGGGEGQMVRYRLYMVRHRQPQAVPAHP

SEQ ID NO: 995045 - protein, 171 aa, Homo sapiens
GAIQSAGVRETLKRDRSLHSLRFSIKLICRFATALAPEKNGRRLLGDGMGTCAEQLLKKPALGDEILVSGGIVGPVCGLEVFSYECEQAGKSSIERRADVVMCQQRSLLAEPDSQWPQGGVVHVITKCSAASSQSDLRKEGMNLETLRLRSSNKHQRFPGASQRSVRLAPV

SEQ ID NO: 995046 - protein, 140 aa, Homo sapiens
MVKLIVDGRSAKANEYLMMGPLIPVKLVDVGPSVQQKTLVDIAKSQDAEVGDGTHSPVSLLAAELSEPSGEMPMWRKVYTPEIIIRGFSAADTQLAVNKIKEIAVTVKKADKVEQRKLLEKCAMTVLSLQADLPEKGFLC

SEQ ID NO: 995047 - protein, 180 aa, Homo sapiens
  misc_feature (140)..(140): Xaa can be any naturally occurring amino acid
MAHTHPMVSRIIESGRAVSSCLFLLATVSRWWLCRLLPRSLRLSAASVRRGVPVSSSRLGLRGWTCLCDVAVRCLVVWPPVPSDPSTCTRLRERRVHVAEDMRRPRTGRSSPVILESQLDTQEAPTVEETIRLLCPCAPXPKSSAAKLTQLSMPELTAGTLDWSRARKPVWKKRKKREGS

SEQ ID NO: 995048 - protein, 365 aa, Homo sapiens
MESRQDVPCGAGCVVQRRGVHFSTWRPRRSSFREPCSRAKGLRLPTVEQRPRGRVYLKLKEFGAASPVPEVLGPEARLKTLGRVQSMSGSPSTVPRSLPIRALCGSVPGVLEISELEARQPHFLGLFCRPQLVTLVNTFGRPLPQSIGKNAPWESHPEQNPHHTLKETLPVSRESLAPSLERPEHSGCENDGERPTKRVTRMWRSRRNSRERELRGAPERAYTTRGDTGTQPRDSLAYTGRDRQRSRNPEIEDIIRGPQHRGQGEPQGQPYQKGAITTEATVIAEENQRGTGTTEYCRNGSEHTPDKGRYENAGTTYEKGGLSDTHPPEADACRTSGQPEQQDISYRVRYEKQRSDDRTPQTSRH

SEQ ID NO: 995049 - protein, 101 aa, Homo sapiens
DRTRCVGSVRAGACEAAARGRHCPLGWTRRRLTHQTPHDCRRPSSLGTCRRRTWRSRDTPQSCRSKHRQESCEPLKKGIKRDARDYVRLRQPQLQDAHRPS

SEQ ID NO: 995050 - protein, 108 aa, Homo sapiens
GISCTTVILDSWLYPVRPFAWTQHLSSSLNVLFLPWTRRGCLGVYSEGSDDLVVQAGPSCIAEWSRGATRTNMLLVFEGRASAVDIMQAVGLAESHPSLHALVLSLPY

SEQ ID NO: 995051 - protein, 216 aa, Homo sapiens
  misc_feature (199)..(199): Xaa can be any naturally occurring amino acid
MTPSAAGGPGALVALGWGTAGGFRGGFGSGIRGRGRGRGRSRGRGRVRLAVGEVRVIRSGCPITKIRAAWFNGQCKITVPGGDLIVFSTALVMESEIIDCLPGGRIISEDRRVFDRSYVPSVMTAKDTVAGPDATSVSKGICGVRESRELTTLCTAVRVRGVVRSCIQMECVGLPAQSRCEAHAISSSLKLPSYRSARXSAEGVAWGRIQESEQRP

SEQ ID NO: 995052 - protein, 112 aa, Homo sapiens
MEALPLLDRDNSGPRASREGWFCCRYCVFLLSVGAVQELGDMRRGPWTRRRGVPTFYCWVDYKCTSRVYDGISRRTRVAAPRPSDTLKQSRKILQRQGSTGKEHAVIDVENL

SEQ ID NO: 995053 - protein, 207 aa, Homo sapiens
GCLILGSLAASLISFAPDPRNPVVAGRQSVCELLVPILRSSWGHRALRGARGIGDCEPGTSIFLLVRPALWPSPSTWCHSLMARPWSGPGWRWRHVVSPLWPGSRDCLWVLGGRSFLDRGAVIAQDMPRTLGFQHREEEESTRTSTGREEILDRFSCPSQGIQAVITGGSATPRFTVNREQPVLLLRFSPAPMDRVLRCRILLWLFD

SEQ ID NO: 995054 - protein, 471 aa, Homo sapiens
  misc_feature (112)..(112): Xaa can be any naturally occurring amino acid
  misc_feature (185)..(185): Xaa can be any naturally occurring amino acid
ALLYHGEYGRSLSSAGRWTDEQRYMIPRRSCDLCDGGRVCVSLRNRRYQGEGIVSSSKGATSRSKRRVGDYQSGHPSDAKHRIVEEQIENLVRDKSRWTNPLRADASLWLPXRPDRFRSRSLWTLAWIDWDVHDVPLSSPFRAPTDAYHAPREQMLQVFSVGLKGEVVCSQSETLGDPKGAACNXREDVLLGRPSGLCTISCSLAHWLWVERRIGEGRPRKAKWGSKCSQFETELNWGVGTRTMTHRDVEFWDVEAFHFGTFGETASGKRLILAEHLARRRRDLRRKASTSCGTSHKLEIRKVSKSVACFETERGSIEPKEIGLPALVSRARNRRETPPSKTINPKAFEEGPLQVKRVGIPKVKQADGFRVPTGGAKGKGLRLGTLNSAARKGRYGHQEGHGFNRQAGPRGPGGPPAGQAHPPDCDTKPGGAGAFGWWFNLPGGSQLGLLPSRPPSLVFRLHGLGNPGQED

SEQ ID NO: 995055 - protein, 109 aa, Homo sapiens
MAEPKVVLQDQKATVANERHIGQKAGLHIHADEEHQLLTNPVGILRGGAHTRFSNRAHFRFGFDHHQSRNRGCRNTSPKIGEDDRLCECHLFGAIKVAQWHGHILDPPL

SEQ ID NO: 995056 - protein, 68 aa, Homo sapiens
KAKKEAPAPPKAEAHKLKALYRPEKAVLKGVHSHNKEEDPSLSPRTVSRRTRYDDVRFRMTAAEVSSG

SEQ ID NO: 995057 - protein, 236 aa, Homo sapiens
MTPVERGGPGALVALGWGTVGGFRGGFDSGIRGRGRSRGSGVRVSPHCRPDDSSEGKGQRYKDVDARSSRLGRVCVKDMKIKSLEEIYLLLPVTLVNVKSRDSLDLIVPGGVISSRDEVLKIMPVHEARPVPVSSSQVQGHLLLSVDYNGHVGLVAVKCSNDGGQRHPVGPSSWTMLSIVPVLQMATGRNNDRKAADIVPCNGDRSMRLCAGYVVIPAPQRASWHQSPAPVPKKLS

SEQ ID NO: 995058 - protein, 122 aa, Homo sapiens
MRQRLASGAGIYLPCRSSEWIIQTALNQGVVESRLHPLGNWVSLQTTGSHAEFCSNYQGELTQDVLSLLLEALQDSRKEDVAPPRCWTARRVSWAPKARSPKLHRNALIVRVLLESMSLIPQ

SEQ ID NO: 995059 - protein, 610 aa, Homo sapiens
  misc_feature (65)..(65): Xaa can be any naturally occurring amino acid
  misc_feature (78)..(78): Xaa can be any naturally occurring amino acid
PNTYRLADCMRGCYPPVRPLCVRAWSAPGEWEESGGCVFRWTSVPSGGVPEAWVCCAGRTDGVAXRPGGVSCADSRRXSAPEQQRIEAICELRADERHRYRGPALKRFERRNQRRRHYEGLHACGGESLRNSLYTLPLPLKYNKGENYYGINHNIDSVTCNIWGGTRNSLRQRANRTRFLSKRQYELGRRLAAAHGEGRHAQIRHRVAMAVETQEAVPPRGLVICVSDGVPERETDEHECDTASSVTCVVGFEPVCNTKTRRGSSRYQLSSLLQGAPVGNESSRVLKRPHFLEVHGYKPPAFGRANFKVGTLAVGVPLEEPHGGAVASTASPQRDRWVHLLLSRSGGRNQAAAFPLAQSGPLVRALGGVTLGAVHLGPVVAPARKRVVKPLKCKIRFHLQKETSSVSNTLQGRERPSVIPGGIGDQGKRWDLETLGVTIPSARPHRVAIGEAKMTIIPVERYRDPCGKFAQRPCERMSALSRERENSTTIIYLVVAQKEKPYGESMEPVVVPKRRVTPFVKEKFRVNPKLQERRGTSNPRHSSLPEKEKQHRSPGLLRRTQMTSPHTDRLRAEIRENKVEQKRQIARTPQRPTESRREREGIAEKPQKKV

SEQ ID NO: 995060 - protein, 280 aa, Homo sapiens
ALILRRHRRDVSKNFALGQDVIDLLVMLLHLYRTDDDLDQPVIIEHRLIEFKALSPDESIWPQHHGKRAAYLLIHSPWRSVRNLTAKAFAQAQVAILWRLPMMAAHKRPVASNIPFCSQRHSGLTVHFLGLLPPLLSRLDDAFRLGSVEDPGTHSWWSPQWINATPQAVPEVRTPTGWEPHVGIPGQVELSGQCPFKEHSPTPKKQSDWDWPKIPSARIPDQSPNEKHQQIQSDNKSRNSSTGLMVLECLPCMAAHRSGNARARDGRHWIRFAQRTHKKR

SEQ ID NO: 995061 - protein, 151 aa, Homo sapiens
MVALLTAAGLSALALALWPRPRTWRVPPRSPYQTGASSHSQSSRVAVTSEQGPQRVMHVQARLLAYNEEVTFTKHASQMATKGRICGKSTGHQSTELLSCDMKRSLGRRAVSACLYLLFIILLLEYALGSRIGFQIHHIRYVTRISNRRNS

SEQ ID NO: 995062 - protein, 71 aa, Homo sapiens
  misc_feature (5)..(5): Xaa can be any naturally occurring amino acid
  misc_feature (17)..(17): Xaa can be any naturally occurring amino acid
  misc_feature (38)..(38): Xaa can be any naturally occurring amino acid
  misc_feature (60)..(60): Xaa can be any naturally occurring amino acid
MQYSXHRNHDCLEYSGXQVSVSVRRGTYNGARPTWRTXHIKKQARRPDALGWRGAYVRMXWKPRRAKVYWG

SEQ ID NO: 995063 - protein, 397 aa, Homo sapiens
  misc_feature (215)..(215): Xaa can be any naturally occurring amino acid
MGCGRVGSAGAGPAPRNMLVCERPLAGLLRSHADEPTLASPRIPRAVADRPAGPGSSSLKHMFVRLVAANEAHVVVITGVLGEATRRHGGLRSAPCSFWSSSPVIPKRDLERISLEAALTSSTVRECKKVDTLAYGVPILQSTGHLRQVKKIQGPDTTETVGRGDWYMSDSCGEKIVDGVRTCLTFASWRALGKRAIREWPVMGPESRSESDDRXNGSMAGRVAREHGFAKMRPPQDLGSNSGASQCGVHATNSLKGHYKDDEELFWHSLGGKGIETVQSPKKDARIGRKQRPGEMLGSGKVEAQARKRESGAGPEGNPRLARARKELRHCKQGRSMTCRAKTGRTRVDLPTRDRGAKTRRTREQQMQCTARSHRAQSETGTNNGGKDSTVQTREKQ

SEQ ID NO: 995064 - protein, 338 aa, Homo sapiens
AALVVLDESPMSAALVGYSSRGSEDESEDGMRTRPGDGSSPSWPEPPSQAEIFSSLDSVLNMFARVTGGRGLKTDSQKRRGDGVVHLSLLRSDGNLGHPHVYVPTNEAHRRSSLDRAGSVLAAAYARETVCPPGWKGMKVVHRQRRVPELWVLGHPGGPSTFDAGVCKARMIVLPKIRSLLASRLKIVHQVHEENQGLVWALRSRSGHALDSWTWLQRWTESWRKSTQRLSARDPSLHLSRGWCVGWCRFRCEGRAADLRDSGWFDNAVGCGVTLSCPLRRESLSSLGGPGSLRPRAADGTGLWRLPGAPVTGAPPGIRPEVCRSVGRSSLGEYSPSL

SEQ ID NO: 995065 - protein, 192 aa, Homo sapiens
MATGKTALPCNKRLQQLMARAEPRLRTDVPGELLQKLRLGSQIFIEHVADVDTLLECVIKKVPVLLSRGMARLVVIDSVAAPFRCDLDSRAAGRRDRAICGPLGATLRELSSASRALAVLNSDRGMEEQGAHTGRRSLDETGYPRAWGITGATRSGRTREDRTRKNRGHRASRTRSDTANSPTGTERKAKQK

SEQ ID NO: 995066 - protein, 151 aa, Homo sapiens
WDEAGIKDRYGDKGAPAPGVSQVLSGVHYPPERKYQMCCGELPLRWLIGVIDRGDPSVSALIIRGTCVGYYRLIVGPEVRNQMFGYSFTYSYPQGVSGPGARRVSTLVCGIWISRRSGWSRDPYREGGSSHGGTERGDLERGNVVAYVLAV

SEQ ID NO: 995067 - protein, 152 aa, Homo sapiens
MYQSVRVINISGPKKSLCKSIKKDLLPSPQDVQCSPGFLLFVIVLSRVCSWCFLSLQSSGVHLVVCIRCEGLCLMMRITPNELMLLRMMTASFWRSRYWLGDRTRTCDINQCRGTGKGGAQSPLKIYGLLLNRLGSPGTPKGFLPPGIQAKP

SEQ ID NO: 995068 - protein, 85 aa, Homo sapiens
MVPHIRSVTHSGGGGPSDALVAGKPGASRADAEISRIRQDNSGGNTRYTSDPTGNCNMALHKHEVAQYGQKHLDGKPQCTMIKTG

SEQ ID NO: 995069 - protein, 317 aa, Homo sapiens
  misc_feature (232)..(232): Xaa can be any naturally occurring amino acid
MEEEIAELVMDNGSGMCKAGCAGDDVLPETRSFLSIVRAPRKHQGVDGGHGPARDSYVGDAGPERTRGILSPEDTPLSYGHRPPTWDEMEKIGGYHTFVQLELRVAAEEHPECVLTEAPPEPQGRSKREDDSRSYVLTTVSNGTRSMYSVVIQDVAVPSTTSGSHAMDDCHGFWRKVSPTRWPIYEGYALPHAILRLELVAGLTEYSWKILTVRGAVSPPGVRREIVRDVKXEAVVRGLVFEQEMATRSLCLERLPVPMPVLHGKDVRPGAALFGELAAEPSPEGGTELPPVWGPSRFERDPAKNHPGWAPPKTLIL

SEQ ID NO: 995070 - protein, 206 aa, Homo sapiens
GITQRVPAVGGALVAYSRSLRRFQLRASEPVSESAVDSPCCVGAGAAHVVVVGPGSASWCPFSFLLTSAAGWVIALSRRVVCPCLASYVPLPIVSSHTLPRSFSHLTSGLLLLCEVAPCYGCVTRRSAGPCRLVLAQSTASWCGGEDLPYRRHSERIATAVEPGTLTYETTSKTLHEVVEVTTRGDGMYGSHSRRLFTSRRTWDLP

SEQ ID NO: 995071 - protein, 272 aa, Homo sapiens
FPDGHCVSWMRLSIPVTISLTMDIGSIVVTHSASRSTGMWDGGTGAESGRMNGCGNCSSPEILQDSTDLSTVVDDSRRSYAVESMTLLQQDATSCVDDDFLGGAEFVPQDRCVQPGTDFIALDAEACERPGGSGQTNHVSQAQELKDNRVVAMEVEGRNLDKKDFLETSDPFLGVLPSRVMGNGLPGATDLRVINEPKLTSYDGKRLSCARFSICVVGNPKKHPFRCYCADYDSDRVTMTSHRVTFHTRLAQVAGKSGWPLHGFIPGSSVHR

SEQ ID NO: 995072 - protein, 154 aa, Homo sapiens
MRGPDPCARGMRPYDSYSHGSGSGKAMPISRPCDDPCLGIIDEEEAEGRSRRRRAGTTQRPGDPPVEREPRGQEDYGIQQGVPPVVVLSSAGALSAMLVSCVNSRRCGQGANALELFRSHVRPFWLGEISFTLMLTCAGNHARELVRSEELGGG

SEQ ID NO: 995073 - protein, 294 aa, Homo sapiens
  misc_feature (133)..(133): Xaa can be any naturally occurring amino acid
MCDTSQRCGGGAQTLSLLCGERDSDAPVGYKGRGRQRRETHSGLLSISRVEGCVITQMVVLPQWGVNHQGGRSHLLREDPRGRVGGALRARGRFKEPLSHTKAPPIEERMGTPAEQMPPKGGLPPRGVGSSNXPLGRGEDCGGATHICAQRSRHPPWGYLPSGGIYPERNSAPPAGVQHTPGLRVRAGQPPKHKDTSQGGANTGGPQLADQTAINPPLIGWARATQQTSGAPPKEGLPTRFAQKRAHHMAQLRVGDTPSPTDVGDRRSNTPTTQNFYYTPSSQTNTDVTHERYT

SEQ ID NO: 995074 - protein, 165 aa, Homo sapiens
MRQRAQHKRHNTRSHQGAETGSRSKRAKHTTDGGRRPHGSDSRTPPTATESDDTNNTNKKTRQERQPQQQRNRQTNNDTTRNTQLTTTTQQTPPGPHHTGPPHETTQYDRTQQNQTTRRHHTHHHNHTQTTKQNDIKPATTPATHTHARQPHQTTPPCRRNDART

SEQ ID NO: 995075 - protein, 148 aa, Homo sapiens
MNSLFLYGWEIEVCGRQEGCPTCTIVAREPGSTRMCRIAFNGHEGHAVSLSPEVYVKEQFAWRHFYWYLTNEGIQYLQMITVHRAPGDCAMPPYAVSVPDDLAGPSVLKVWRVSDLRESQEGKLTRDTYRTECCAHSGADKKVEGGAG

SEQ ID NO: 995076 - protein, 222 aa, Homo sapiens
  misc_feature (147)..(147): Xaa can be any naturally occurring amino acid
  misc_feature (170)..(170): Xaa can be any naturally occurring amino acid
  misc_feature (187)..(187): Xaa can be any naturally occurring amino acid
MSAVCGRISRALSMKHLRWGLLPLEGTYRPRCQSSGLRDAKSLLYAVSYIYQRSRLVGGHFRVVARIVGDDLSAVSGHNPNIAGRRDEQLKHLIDLSRCPRDNQPENRLSGDLVSELDLYLAYESLSLRVAIACALTDPLHENLDQXDFYNTKRLRGDKRFYADEIINVXRAQIVASLSPHVKAFDXKHSPSNCQLVGSIAVGKGVILRKLGLRISRTDVPH

SEQ ID NO: 995077 - protein, 179 aa, Homo sapiens
MCGAQRRPQLAEHWSSIVPLLLWGWASQRGVLTMAALQALKCVIFPRKSLDSRFRDGVRSVVPVCCLAMGTPLWLSNPFIARVKRVRACLGTVTLSLGKGRGALGDQHSLGAPPAVSPRVCVWSPPCVTEMAAGIYVGVSITTDPLVLEGSSPTRCARGRRCATCITYHIVVLLYRHST

SEQ ID NO: 995078 - protein, 363 aa, Homo sapiens
  misc_feature (134)..(134): Xaa can be any naturally occurring amino acid
MVGVLAQAPRLELRAGLAFSRGIMTDRSTARVSILKVQPSGPDLGSRISCATSMPEWAGPYCTHSKSRNCRLAYCRSGSFAYMNIQTQDRTYNNTSGHIFISHAQIGKIQRVCMIVRTSKAAVRRERGTLETRXMNNSIAKMAVRMRRNSVREDKYDVFTTCRYAFVDGEGLREVRRKYRAISPFRGWFQAPEGNQAPRGLTPRSNGPNSGHGQSSQGRHHTNGEGCKQMKHVLLQSFSPSAPDGGPFEWPSPVSQTVGHKFSTTRLGPGHSHGFTWPEEGPKEKWRRSDGNQRWLRKARFRHIMARTRDGPKEPGPRDDRYEEGEHGETTGARKGTETATTNQERAQKTAPIPASQVKHGTN

SEQ ID NO: 995079 - protein, 90 aa, Homo sapiens
  misc_feature (20)..(20): Xaa can be any naturally occurring amino acid
MRTSRRWISGAPIRAYWKRXCTWVARLGDMDLQTISRPARRTWGSSRLGTAKNLCLAGSRWVDALALVFEHRGPRLLVQPGVWLPSRSAW

SEQ ID NO: 995080 - protein, 138 aa, Homo sapiens
SNIAVPIGGCNGVSASLWCRAVSYWAVDSKCSCAEAVSDPTDWWTYVRVVPGRTSCIPSPITWALSDKIYCVCSTYDSPQSVGTELRLMEEMHVVRVTDRKTQQTISHLMPTLGRPQAVNVLICTLRPQVQGKSVQSA

SEQ ID NO: 995081 - protein, 171 aa, Homo sapiens
RDLAVRNCMLKMNMSVCVADFGLSKKIYNGDYYRQGRIAKMPVKWIAIESLADRVYTSKSDVWSFGVTMWEIATEGKLPYPGVENREIYDYLRQEIACSRAADCLDGLYALMSRCWELNPQERASFTELREDLENTLKALSSCTRSLTEILYVEHGMTGGRLLLNPLELQE

SEQ ID NO: 995082 - protein, 491 aa, Homo sapiens
QGADFPGCRTVDKLVAPCGSNERVLNLPGAAAGLACCARRTDTPGSERLAVEQAAVDYWLSLPLTFHSRKGHSDCPLNAYAKGSLGSTNGTHAHTHTHLLTPHNSHATHCSGGSRQGFCIEHSLGRPTLTWGLTGCASAGPALLAATPHHLSPATKHKGSLTSALQHNTALHSATGAAHPHPCGKALLTPAAYPPLHCLRTPTALHTQRPRPPPSAPLTRPRLTVGPKLASSPGAPGHARTLALNACSWQQHHAKGRTIPIVATRCAATCNAPLNWPPLKCHEGAWPNPTQPLPNSKSLTAKPPCRRLGGPQINPRANPQPRKGQPGRWGLAALASGSPFQTLALQRGRGHSTPGPFSHRVFGPAVVGSPQLFVPNELARATCVAPRITCGLVTPRAVPPRSRGFAHEPPLVFPLGALSAGALCAGAKRTERALRVGESLAARGGAWTEFWKTRRRLQNEAVRNQANPEATEAEVTNTPVLLVMRSRSSDR

SEQ ID NO: 995083 - protein, 55 aa, Homo sapiens
MPVENLVGRGTIDGLERQELKDNRVVTMEVEARNLDKKDFLGKSDPFLEFFRQGD

SEQ ID NO: 995084 - protein, 338 aa, Homo sapiens
ASFQLGHKGVLGEPSWITHCLCTSSLLSLTLTCTFMELDLEASAGCGCLRWQALGNLCNLMTLKSKSYNICASSSDEKTEKFVCVEKLNVLGSKGIQRGFPWYDRKSFRATKMEIGGVYEWTQIILERSRQSLFMYLEGEGVSIRDYMSVMHIESYHESVQVVHRIVSCATDGDISEWHNGECGTFHACVLLTKLCAVPWVWGLLLPEKNGVPSLICKVPLWASNETLEEEGPQTVGIVCLCVGSAQDISGYYLFLVKNSILRVCTMMCLLSTNGVPALHENAPGTTLMTGLGPRLAICEFRPPGGFPYIMDVLETRGSPPWFSGDGTAPLSWHAKRG

SEQ ID NO: 995085 - protein, 313 aa, Homo sapiens
  misc_feature (125)..(125): Xaa can be any naturally occurring amino acid
MRDRKVSLTKIANERLGNGDKSWIERDFGKCAGHRTSSFFIFSVANMRNIQLKDHPDSALESISSECSLAENKVMMVVLGRIADLTELQYGAITDTQRVKQIGFESGDGGVSVSLAQIRDKRDRXVESEWFTETRHDHGLQPELGMKQLSSVSLDPGPLEQFPHSMEPQLRQLGLPTGLKRGVVTLLSDYEVCKEGDVLNPEQARVLKLMGYEMAEFKVTIKYMWDSQSGRFQQMGDDLPESASESTERVSSEDDDSTGIGTEGLLGSSGSHWTITDGGRPLREPLYLAGAGPDWLDPVRTLGPAGVPGSRLE

SEQ ID NO: 995086 - protein, 250 aa, Homo sapiens
VSGDCGCTPPKVVRAPQVAPSSSTIRSVLTALVIVASLRPGRRVPWSSVESQVHVDSRARGFSIGPRTLLAMRLPRPSSGSRRRIAGSLLRCYASQFAPAVVESLGSNPGTSELVSYLGSELRCARPSSAEASLRCVPRRGSVRRPLGFRAVLRLRRSLSSECRGLRPRPIGLVCVPAGVAATGLRSGPECLGRMGWRLGWGLGDHPCVATMRRDHPPIDLRSIGEKNMGGSTIVTTLRDKGRSHHGAQN

SEQ ID NO: 995087 - protein, 261 aa, Homo sapiens
MLRLHVRGSSLVSSACGKKKRLDLAAHSDDPMRIERELPISASADPGMLIKDGLIDPASPDWTVHFPGLGCRERKISWSVVEGMHMGIEFSGKGYRSNARMAVLRLTWMMENEGFWGAKLASGEIAVEVVVIVNRQMYRRDGLPWKGGTGDMSSPEQTKKSRMLMVNTIRTPVGGGRLRQPALKLAGREPRHDGPTRDLRPKGRHCKAPLKSASRPRRRRSIKTLSQVEERRPRGLKTSPLGRVHTGLCDYIDAALHINKP

SEQ ID NO: 995088 - protein, 88 aa, Homo sapiens
  misc_feature (2)..(2): Xaa can be any naturally occurring amino acid
MXNPWLGLYETCGPVGPHVYDSRLPYWTRISLGLMSNLFGTFMVEIVRGEGKASIGAQEGLRTTRKGRPEAWFDFVVLGDLLRYGKGK

SEQ ID NO: 995089 - protein, 110 aa, Homo sapiens
ERERERERERERERERYGGAESSVADARAPFLWSVVCLSRSIERARGRGGVSTVACYVVGCAGGAGVYLSGGGAGRGRHTTHTIVEERDSMLRSRRNVAARMRKASKPVR

SEQ ID NO: 995090 - protein, 71 aa, Homo sapiens
  misc_feature (46)..(46): Xaa can be any naturally occurring amino acid
AEFIKRTGTPWSMREAHAVRRKSEERRMRVIQQCEHKVLARRDGAXILRLSTYARKSVHDERFFKVADQAE

SEQ ID NO: 995091 - protein, 75 aa, Homo sapiens
LLRTLCVGDERAPYELAATGEQRRANMLDPCPLEELTDLRATCYVRCAKCCSKTLMTRIMVCRISGMYCVLTRVS

SEQ ID NO: 995092 - protein, 169 aa, Homo sapiens
MRSKVSLYHPVPGRCATCPERAKHGEMYRTYLDTVKLLMRLHELLSSMNGSKRLLRGSELELQFTSFPCHIMVDFVLRELAWRAMLVMHMMISMVQRLLGGMPHMMRTVQIAAVSKTDSKSNKKYHENHMNDLEGEKIGTRFAVLMDIEQVSGLTIEGSATEICRVRKS

SEQ ID NO: 995093 - protein, 49 aa, Homo sapiens
MATISGNERIGAWLGASCRRITLSMAARTRHTANIRSTPRVGLLSARGP

SEQ ID NO: 995094 - protein, 320 aa, Homo sapiens
AGPLASLRPHPLTACGLVGKPEGLLARGCGLEFLNRCLAIRVSGRSPPGGPEPQDKGPDGLSLYGDRWSGAVVRRGAVWAWVRQDGTKRAKGGSCWFVAGGVPGRPRPTQRTLHHGIRASTVPSLMRLEGLPVLPVCPKACGNTGPGGEPFYIRAESSTRCLSRADPHALCGEYATEILRLVDSAYKRRQEWFCTRVDPSLCGTGPGHRANYQRAQQAPKVQRNAASSGNRGPAVNLKKRAWNRCGVRPAVGALQGSPVSVLSLVRRRDSTYSVGVLCACAVCVRRAVIDERRGNQAGTWGSTRPGAGPRGPRGGTQKTT

SEQ ID NO: 995095 - protein, 290 aa, Homo sapiens
MRTLGRPPTCVGRERYKRSPLCSDEGEGGGVGSYERLPTGKRGASPRPRSDNRHLTTARKQTVVAGQKKNEEVPKRGRKPGARGFPPAGSNQGHTANRGTTMKRGLEKSEKPRVVTDNVSHMCEENGAGDIDKQTERDGEFTTTDIEETERLHQHSAVKTPPQANHLTPTKVRREHQAWCNDAKAHTQQNIARQPPGDMSRRSGARPPMTNGQDDPCGHGQHHTVHARPGPQGGNTYQPGNIGTRIKWPTPRGDDQPPNRQQAPQPTGGPRHTVTPNPRYPGTGQRRPRL

SEQ ID NO: 995096 - protein, 228 aa, Homo sapiens
MAHFNSPPPEDAQWSWIMAHNPKPLNPMGGGGWRKTEEEEEEEEERGGVRTSLRLQRTLRQSKVAAHAQYRISVEQGMCGTREFTAPWRCSMSITDRMVEITRLRDPGEGAGRRTNSPELRGSWWRAPGTQLPRPTNMDGARGLDLVGTLSQLCQETLSSPGPSALRWKTRLKKPLSPEEGGLQGSLVSLGLKGQFQENDVKISGVEVHASMCGVQYQKVCNVQHSMR

SEQ ID NO: 995097 - protein, 122 aa, Homo sapiens
MLCLEHFGGLVGGCRSLGAYRSEVPPTTGIGLGIGSERRESYAPCVRQGDCGCAERLDGRRKGGISKVTAGGRESRIDEAYALERGTVALAYGAPGGIAGVRKVGNGEEFLVDEAEHRPRWT

SEQ ID NO: 995098 - protein, 558 aa, Homo sapiens
GDQAPAHPPGADMSHSLLMLHSPPKANHSQACLSWAAPLPQPMRVSGHPQLACYLLSLDAHTLHAHSTRSPPPDTSCALSRHHRSPTADSSCLLLGATRATLGLERAPLLPHTATHPLRNSHHSTHPLQDTAPIGTYCTHRTPDNTTPTALPIASPMTKTPPNTTPPSPLLHPNCKPHPTSNHHHSTPTRNQRPAHPLSHTTLYLPHPSLTQLPPSYQPTTARTTRPYSPFMRPLYHLAPSPPTRHDTPLHSPRLPPRNHLPFALGQHTTPTLTPNPAFPQTHSATPSPLARNPHPHNTGTHTNLNPPRTISTTHTPTPITHTPPTQPSLPAPTPQPAPTHHPTPTHTPPPPPPQPPTPHPHPTPPSPPHHHPHPPTHPNNHTTPPPPHHKHHHTPPHPTPTTPTPPPPPPPPPPPPTPTPTLTLSRHTNRPPTQHSPTPPNPPQTPTPPTTNTQPHKNPTPPTTSIISHNTTPSHAPTHTIYSHHSTSTHTPPINLYSNTHLTPLIPSTPALTLKHHTPQSNTYTSQRDTHQQLILNTTYSSLHIHKHNPPSTQRHH

SEQ ID NO: 995099 - protein, 103 aa, Homo sapiens
MSALRLPCLGLDSLGTRLPVPCVWLLAWGTWQCALVHPETFLVDILAEAMGASMLAIALWSCAPIDIAPTSVRGRQVRAGGSVGRSGRLKEGNPQEERDTDTI

SEQ ID NO: 995100 - protein, 149 aa, Homo sapiens
MRSAPVNPSLGIAHCAFRFPCFVHALILMSDTLSYSTCSIGILIVDRRQESRQGGTCAKSHGAIPHTRPSLFVRDTVWYSDRFRVGRPGLGGREIESLGALSRSVGRSSAGSLGRVNSRSRYAFSYTSTVVPLSLASLLQGRHCHDKVR

SEQ ID NO: 995101 - protein, 190 aa, Homo sapiens
GGEGSWQSSVSGSGAPVERPQREAVSPSLSPFWGLGKHAASKNYKSRQAGSRDVQALSFAPIVYVGLSGLTRGCCNCSKRRTVQEMSPGEGPEEQDRRRRTTESPILATFAWSRRCVNEHVGVHGSLRGPGFGNKGVTSSRRLLKDLEQKMMVTPNQIGCNAESPVALEEAKTSGAPGSPQTPLSVMTLV

SEQ ID NO: 995102 - protein, 227 aa, Homo sapiens
MLSLLVVDVGNPEEVRRDSKGYAGGTWCKSCLGSSPQEWQRLHQLTRRLLEKQLRPVYLIAWKYLQSEPHNQAEAPGPGVATLRTLPEDYTGTICSIAVVHRIPLAKLEPTWSNPLWQSDPTPGLQSGRYRQIGHRRYNGPRARIMTHSTATEANEPRGILRRLREPTKGPGTNPGGLRTHQSSVTAKENTTYGAQTDTRAQTQPAQNTQGDQRDTETRYHTPRRSA

SEQ ID NO: 995103 - protein, 213 aa, Homo sapiens
  misc_feature (73)..(73): Xaa can be any naturally occurring amino acid
  misc_feature (167)..(167): Xaa can be any naturally occurring amino acid
  misc_feature (181)..(181): Xaa can be any naturally occurring amino acid
GLHLLTSVGLVIRDSGVCFVSDCAIRDIALMRRYAGECIVRLTWRQRVAAHDGASRPCSVQAPSMVRGDTHRXLPVPRMWCDELLTDASKRTRVCEGPAVILIMRLLQTTGPLAFSRWDGNRGGGFGGEKKHLVSATGAGSGGFPGEHPSPEENTELKDAEVCTLKXDFGRAWAAHEAVAXGLRSSHRVEKSRPFQSQGEAKGNTRIGLRRKG

SEQ ID NO: 995104 - protein, 377 aa, Homo sapiens
  misc_feature (143)..(143): Xaa can be any naturally occurring amino acid
  misc_feature (162)..(162): Xaa can be any naturally occurring amino acid
MEEEIGVLVIDNGFRLCCKRVAFDWGLMLHTETVVSIRIDRASRQRSMGQFNGVRALGDRRTGSVHERGADRRCSQDVKALMSQVRIGTRMNTERTEYDVIGQSDTTRLGEATMGMERMLGQPTTLASDRSLGVGWARRVWEXIRSMTGWEPEGPAPEPARXQPEETDLDSGLTVVESLQTSPGTSVRVPIPGPVACALLYALLGPAPTGRFVHVTSLETGVTPTLVPHLTKGLRPSPQASPCVLDLGWAGDLYEYLIEDPPRARVQVHNQGRDGKSCANFRGNWATSPGILSPDGPRGYILFFCEKVSNVPRPGFTMDKTGPRYPNAGLHPYTGEDTCGPQEPSTTKRGDPKRCHSAPEPTYRFTGRETAHQKNLR

SEQ ID NO: 995105 - protein, 79 aa, Homo sapiens
DVEALCCVCCCPGTAAEVPIHSTEQKETEMTTDPQVQTEQDLASSEWREAEGHLRPAGVLPQVRRCPRVLRLRELYTAL

SEQ ID NO: 995106 - protein, 483 aa, Homo sapiens
MVWHEILSSLVSASDLARTEFFKAQPRVCTVELTKTAAVREPVRAHTVVKGGQRYHSCLVSLHSDDGIWGPDVRFSLVSYLHLIRDRDPMTLCALRLLNGESGDEKKLKQYWYKYSRIIHYSLRSCGAVSAPGRICTRRCKPQGTPIANSNGIGLALRVVARSVWNYGVVTDSSRGANRPVGACTHLIEAQRASLGVRNVVRVARGGLQPNGSPTRFDFKLASPFSPRENCKGVLPQGKTKWETPNLARNCGNDDSLFGGTFKVPDPGIQIALLPLVARVPIDMDILSNPSSIANTWVGGRPPIPKWYPEVDFAIAILCWEPNQLGTSGGGNRKGPRRFYVLPSIVGTCARGRSSIWAETILAAKELAGVSPFWVRNSTNLVWGCAVPFVHAGPRSTMERISHPRLFVAVVRFPITSCRGGPSATGNRELYTFFQWFPGAGTRSAWLGLLHKERGRSHARPHSSGIPSRVSASIEPPAFFHNL

SEQ ID NO: 995107 - protein, 470 aa, Homo sapiens
  misc_feature (141)..(141): Xaa can be any naturally occurring amino acid
  misc_feature (214)..(214): Xaa can be any naturally occurring amino acid
CRVWDILRDYGDRSLPIVRACVSVHTSWASHRRDPYDDTGQLILRIVPSGHARRYSPQWLVYLAGYPASVHLCLRADVALERNQQRSTTHRSGAVTLVPNGCNIPSALHDCTLLSVQHMHVMLFHILGAILSEAHGPCGTXVCVTPNGACCYMMTFGGMCLTCSRCRRKRDSQVVPQSRGDDKVPHRARGSVYARAVLVRAKGTLRACDCGKSXAYRLGTRLSVVTQASVLPECQPEGPMRAREALTPSIALTCGNNSLVRDVVSLQPVSADQTIKPCMLVRVSFASPVGLHENKFRLGLTRGRKCFWRLFPGFPWGAPGRNFPTVWFGRPCPHKAPVPEKGVLESAWTVLGPASNPSRGAPAGIIRSWGPGMFVPGRGGGLFWPTLVCARGARKRFGILGGTWTNGVAQGNIPWAYRRSRVTQQEVGCPTSDITRSGRTLGEKRSRESRAPVGALEHLLFHKAVHVIYR

SEQ ID NO: 995108 - protein, 51 aa, Homo sapiens
MVNFSHSGMAMDSGVEAQEGELKKESSGIERRKTELSSDRELVGVQEHPRL

SEQ ID NO: 995109 - protein, 166 aa, Homo sapiens
MEGIPPFQHKQTTFSPLCGPPVFHTLWGEFTIFHSRRERYEVGGNTNSGGLTYKKIIPFKITPGGRRCWHLNSPVLNVSRAPLYVCERATEVPGGPATIHRERSGGNTRKEPNYSVAITHAGVDKPTQFLYTLKQFTQANKTNFSPGGPFGCANCAPAYFVFPKGV

SEQ ID NO: 995110 - protein, 516 aa, Homo sapiens
  misc_feature (222)..(222): Xaa can be any naturally occurring amino acid
  misc_feature (242)..(242): Xaa can be any naturally occurring amino acid
MTFLVGGKYSVCQCILRRVDVSTVYSRDKECTRRSSKGDSDHVGAHDSDMGQEHVHLMKRRVIVVSYASKGLQAWSPGEGSTEAKLREPRRIALWRRRAIDNARSVQSRLKGAEERRASLVCKPKNVDVETLLLALQARVGRPDCRRTSTSYTGALLDFRNNFSLRQATQQREEAMEMSDQQASLGPYDTYMELLHENVADDTLGSTPGSVVAEIGEYGPTXRHVLAADWRWYKRRRRANPXEEKQNPGGLRQGTLGNAGLKRRCDPFASPKLPKPKPKENFPKAWESNVGTDSDRGKRPYLTLPPNGRRVPNRAGWHFKGGSKPENLRWLRWLQPGHTVHQGRNSGAPGYPKIRKGATHEENTYFPLMFEEPLLETPGDILRGGGKQQEKYRGYKAALCCESQGDRPWEGLSTKVLLVRPNRGQGGGPKRTPRNGGTPHGSGGHHTRAICERKEREGDERKTTLKPYSGPGGLSTQLGNKNTKKQRYPTASGKNDRHHKTRARHYEEKEEVLPNE

SEQ ID NO: 995111 - protein, 256 aa, Homo sapiens
MSISVSESRVTPAMSRVAGTRTDVNELCTRWTLQMCALAQLAGARRVAHRSVTLVDGLHLPRCQSDGCGRFTSGEFLALLRSVATAAEQESLKRSKVAQPGAWTRSRGPCQKGRTTAQTETVIAPGARTNRRTPRLKPCERCHTQRACVSDLASRLSGRKVEQVLQALRVRVGQGRTGVSVVMGIPIVLGEVHSYLTGHVVNSLISELSPQEKEDSVIVVLIAENDSKLHFGSERELSRACAPRRCILGSGGHLSL

SEQ ID NO: 995112 - protein, 108 aa, Homo sapiens
PAIRRHSGQAGTPSTVRDRPGPGPSPRLSAPSRAPQRALSVVPCPVSVRIVVMLRGHFRLARRLKILCVGVGLAMFRSQDGGCPLGKEENIIFSFSGKVNICSALISR

SEQ ID NO: 995113 - protein, 369 aa, Homo sapiens
MEEGGRDKGRRCRPSSLQRACPRLARTEKPSGKERRDAGDKDKEQELSEEDKHASRVNWRCSWNDYGETGYIPVSTLALEEIAEGVIRSSYERSMTSGAQAVSRFLRQHYGKAERKIYGEHGPLGENQAFSLLTSVSFPAMTMSGERECLKYRLVGSQEERDHGVMQYVMASGRRQWATGAGKRTEMTQDMSSVRHLHSFSPALTGTLVPLLHLARTMPEALRALRHLPYWINSTTWTLDGQPTSINSAYAKGQPRIYNKRCQKPAMKSSKNTQPVTEIDAPGIFIPETEQRRNPLHRHLSLVDTRMHARDQGEFGKRNIRAARQEQRARHESQIEYRHAQETDYTRDREENIEEKATDNNPSQTTRTT

SEQ ID NO: 995114 - protein, 220 aa, Homo sapiens
MNHAAVCMLDGPGCVRPMVATSSLGTARPEPGARHPGLPAMVNEPPSTCLTVGLEVGGLNVLCRTCPLAGAAVMGCSSVTSPPFSVWGCLVFHLWTPFYYSYISDQSSRTIQPVCDFYYRTDCDSSSHLTLTPFPCCQLSRLSKGWTVDRVLMVWTGRIVLAEELEAARVPCESRFGHVPVVNHFLVHQKVARIIFHFLRVRVMLHYRVRAAQMLDTVGS

SEQ ID NO: 995115 - protein, 208 aa, Homo sapiens
MAREDERDTREERLPEPSRRNDLEKSHSARTRIKKQQHPIRANNKAKTPRLTEKRKALGQSSGEKSKKRKKRKGEEKKSSHQAQQILNEDPKQKPLGVGSPAAARSKAESSDDSQRRSLPAEEGTQVGNNRRAGGGDAQEATKEPVERRETTPGRSAPLSNSWRAEIGGPQKGSSRRKAIGSQSHVTRARGAGTWVAGNTGGDHQATA

SEQ ID NO: 995116 - protein, 235 aa, Homo sapiens
CPGALFEFTWWLLRGLSSKDKYVKGLIEGKSDPYALVRLGTQTYCSRVIDEELEPTVGRMTYECRWYTRSQGYGRLEVEVYDKDPEYRRLHSGRMKLDVEEGVTRLSCSDDLGSLYKVGKGHTLHSEAEKWDVTFGQDAEKAGSRLLASGNWGVSVSTRSRRQRAIISCLPGSGPESLPMVTSELYPPQLKNGEQGTPTLWYNFKYRTETQESKAVYQYQTAQCGKEAYPGLRTK

SEQ ID NO: 995117 - protein, 209 aa, Homo sapiens
PLATEESSSSSEEEEVASSPEPPRSSPNGLGGNYGSKGLKVCGVLWVPGGWSLCACVTPGSLSRDEYVAHMKKEHGRSVKKFPFSLCERSLLLRPQPEAPCAELITEGYRELSLPLQVLLHEGKKRIFSSRLILEKDVQVRHGLAGWGTSATMARGDHLELWGSSARAQGQVGDADSLLTLAVRRPDRQKRSKSGRCGLDLDGMASAAT

SEQ ID NO: 995118 - protein, 96 aa, Homo sapiens
GRTVDEVPDAYSWSGARVCYLRDVGGPVVHPFRSLSQIGMLELGMLVTNDLLGRFLHRGTVEISADGEPDVRAVREPHMGTGVAAQHFKRIPTTNW

SEQ ID NO: 995119 - protein, 103 aa, Homo sapiens
MCRGQAAPSVFPARYRAHTEPKERAHQPGMMNAKKIKALLGDLKSQRENKEAEESVRNEGRRDDSPHPEEEHPQYNNTDTKQFNTNPRCHHNQLPAELQNKPT

SEQ ID NO: 995120 - protein, 155 aa, Homo sapiens
MHAFVQRLSSMRVQCRRSETDVLRGNTDVPYTGDRIASGAKVGRRSHNGSQPRRTCGKTQRRHPNTRGGAQGKTTQAGGKTQGTRGNEIIGHGYIAARGEEPRRADGTTRTTSRERNPAEEVATKSAVGPLCTPPPAEGDTGQRDPRSDDTQPLG

SEQ ID NO: 995121 - protein, 233 aa, Homo sapiens
MASIYSQPYELPPQSGDEYTGDRFLYANSVNVISEQDGHRPRPDLGSWCSFMQTAKPAAAVASTCGTLAEFLLKQDVVNAINLDGGGSCSFVLNGTLAQDEPSDQLHETTCGACSRHSVQRDCVCRNTSCPHASMTQHTGPLPVQRTSNRPEKSAQRGPDGRVSLRQRTALAGRPPETGTGQPGYQTHSLECTENKWKRNVALLMAMSRNDTDYSVDATDRYPTRHKHCPNKP

SEQ ID NO: 995122 - protein, 287 aa, Homo sapiens
MRLAILCRWKALNKPMISRLVGLAVQTIGGNRYANVCCLGRTSFGKLFHLLNFPCRDENSLEANESNAISGWLGRGLGASWGPIPFAKELQVGFSLPGTHTMHALDWDTEDWARLSHKSHFRGTRKVPLGHLWETNVKELGLGKTERKVTNRETYQEPWGQGGPTKVANAHIRRRRPSGRGLSVGKFPLTLRQDGGIRGGGSTTGGKEKTQEGYPARRGPTTWAPAKAQRAPRVKTAQGWRHTVRQGLPGGPTKGKEQAPFQEEAAMGQGHSGDIQPEVRPEGAARK

SEQ ID NO: 995123 - protein, 343 aa, Homo sapiens
ADLHDASDSSAMAAPSEEVLRLWRKSGHDGIVAGMLMSWAELTLVALIAARANRCQSRSPECESLLLHRYLHYYSTFVARVMPMLRSSNALSLLRLGAMHTMPSSTERCTVKSGDLFSMGAKHSTPSCVYAIQTYLSGSTTDGGCVSMRERSFTKQDMRQWVSRVRSISTCKHWTLRAHECEVAPPNAYVGQRMVGNLAPYALPILPPMIYLGVAELQMRTGNFGTIVRGTRTLRPQIRTFACQRGSQQYAPELRSDTKHTEFQGSLRSHSQTEFERRTYTLGGTAQRKWSQNYLPRAGTFQVCNEPPFALDIRGDPYYYRGLSFVDTSETDTRGGGDLNSTL

SEQ ID NO: 995124 - protein, 217 aa, Homo sapiens
  misc_feature (77)..(77): Xaa can be any naturally occurring amino acid
  misc_feature (133)..(133): Xaa can be any naturally occurring amino acid
MDIRRFILRLEKPDVDDYTNVSSLSEDACLGLLLKRDVACSIERINRHLDMLVTTRETCSSLNRPALKTNTKPGWLXTRAVRYRSNSHALMTQGDKVAMYTEDRTRGASAEEDLSLLTVHPYSGALEKQRETXHADSVTRADAGEAFLVPAESYASVGQQQQDVVPYEKALFPGNSKPDLVGRIDVCRARDEQVETVWCASGSYRKRGELCSRRQVA

SEQ ID NO: 995125 - protein, 590 aa, Homo sapiens
HAPGATLPPTPDIPLPATKPTTGAPSTVQLGALAYLARHRAGARERGSAVKTRRTAAGSHDRSRSGRNKHARRTTEPHAARGSTQNTEPDMTSTRAGIHWRPYHQKQPTNTPLTTTPTQDNPLKKAAAIVITAPAVYNEPQATTHGENTNRDWTHPNSIEAKTHPMTSPWASPTTQTTRHADKTPEEREAENTRRMPTGAEARHWPPSHEYRKNQQRPARQQNTTTQGKPPRYDRHTRPPPYAKEQNQQSPHKEPRGRPSRTNSPLAETQPLSGSGDAEMDSITRRHTQDGPHTRGNNFTRVSYMRPMAQDTCKPYDEQMKTMRAPTQAKYTTQQNTESVEEDPRTNPSEKRVGHTTNRRPQGATTREETNILGQSSTFRTEQRTTGATGDNNNTERMRNRSKGDQHKTTTTSTNNKRIKRRTTPGGTDKKPPLQRRTAISTRRSEGHTNQIYELGNKQRLGMKQKSNKRSRRQQTMKMTKMQSHAGDEVEKGKNEYSSMITDIMSGSAPNRDKRCNISQAPAECRHRRTHINQRTSASNRHKHAQAEAEEKTSKNDRKKREQKANTQEPDSHKYRETDDSIVHVQPVVN

SEQ ID NO: 995126 - protein, 297 aa, Homo sapiens
GNIQVEDIRIRAILSSYRTAHPSGLEGYVEVKEGPGPGMHDSVSKHWMGNDIRRVVCWHCCGLAAGVRRTSHEVPTQGDTEQCVAVDGTASEMRDWTHVSDGTCDAAQSGTYHLPGCEWLRTPQGCTPRDTRGNELISPGAEPGAYSGCVDRSLWCHGARVLQNHDREPQSKRISRNEDEYKRRQQDITPMRMAAHCSESRDDLVTIREDRGRGRMRKDWHTDTNMGNASCARATAHIDDTERHRTGDNTQTRSQRPQAGVGGTGPLRACNAETLSGQTRRTTGHGQEHRNAHTREP

SEQ ID NO: 995127 - protein, 572 aa, Homo sapiens
  misc_feature (88)..(88): Xaa can be any naturally occurring amino acid
AKLRKFRSTVGRLNGRSGSRDERVLPEDQDFVDEDAEDIPGHKKLGAQRQDRRVGQALARYAGLSSLSLQYPSVEAPHNRMVFTVDQXIGYGSERTVVPDVSCERERTRNSEQVMDFTRDCPYVVVRIPLACGEKSEIQEVIHRPGTINAHIEYQFSRFSRRRSAAKLLDRWIGINSRHAKGETERHTGHLHQVPEDVRNTCASNGKRLRQEDVEPRNSAYKSHYSATSHCHVAWYRELTGPLRACEGPNSKRIQREDNKCMRNRTKLFGETLGGSSYISFHRGTPIHTLGLFFQGNRKSPTHGTITEFPLRGSTRCNPVPPVTDCSGEVGSNLDSKAYDPPRPTNSTWPTGLALVYTRYTHTWGFGTLVTIKDQGTISHNAYILSKGQVARQARRSCEARRRIELTQTVTARSVQETYVNRRKAHLVDEIQKKQTKYIAEHNHDRYTPNTLGETQNHAATHHDISPTLGTQSGHHHHTHRHRVANEGVLTKESGAHAPAEHQRWRQGHPWLRHSKGRTWTELASSVRVYIVSGVYKRADRRPQYTPCERKSQTGHTRSNGYNKRHPHREPV

SEQ ID NO: 995128 - protein, 327 aa, Homo sapiens
MVEKVPDSTYEMIGGLGQTDQGDQRSDRSCLLSILSSSKHWALLSPRECCCMDLQALGSTTCWARAVGSSITGLYPLFRVILASRIALEHTFITGEGAHRMVWHGQLVSQLRYWRNHCLRSLSSFMAPKVALTSGSVASLDGRCSWQGVISEKIAKGSRCCELLEREARRRIRRPLEVEHRTVIMATNRIDILDLALFAQGALTRKIEFPPPNEEARLDILKIHSRKMNLTRGIQPEKNIAEVMPGASGALRVKGVCTEAGMYALRETGSPCHSRRDFEMGTLAKVMAEGRGDKTVLQETLGTELASFVVFSPNRALGGQWKCKKEK

SEQ ID NO: 995129 - protein, 141 aa, Homo sapiens
MSLNDSRCEWLYTAKKGRCRREAARTSLDRDKESYESRHDHSHRSGRARRLLSTPENSLKLFSREVVAPQDGNRSLDPTMPINRIDFRAMTQRGESCLMKEVSRKRRDPTHVLCSFGARCYKAEIYSDSDLRTGMSNDTLL

SEQ ID NO: 995130 - protein, 519 aa, Homo sapiens
  misc_feature (24)..(24): Xaa can be any naturally occurring amino acid
ATEESDLVQQYGVRGYPTIKFPIXEVEYSGVPPSELYMSGREAVSDGRDSWLKQDDTGPVRARHHCADGGRYACEQSCGSARPSVGWACSIGPSFDVDVGSSGTSWAPAGSFSRGARRRGADYVVHQYDTVLGQSSVSRIEMHRCAVPRIARRRPQRIRASCSRRFRRNRFWTWTTAPGKPRPLSESGQRAASTRHWALKTPLPLGTYITSKYDQTDQGFDLPSAQLPSGFQPQEGREHSGHPPHTGRSLLAARGCTQLHRETSNQLHLRPCVSVWPPTGKGWTGPGALTATAARNLCTPNRFQQEQAKAQECKPFSPVGPNKKFIIGFTFSTNIGTQGSNSPQTRDQNLQDQADFPSGRYTFMQRPLNMQQRRRRLDHGTGWPPLQFQPPGGGEQTPWKTKCSSKEPGNSGTNSLDGDRTNVILTTTGSYDNPSLSQGQETTKDHDATPHHGMWKPAAALVLGSDLREPKRGHQYYRRARVPAPTSHFWRHAAHYPDVTTLTTYHIDCADTHTSQATS

SEQ ID NO: 995131 - protein, 70 aa, Homo sapiens
TSTLKIIRFALVLYCCASDIDRKRDSGPDVMRVPHGLRANGVMRERRLGSCIHAECNSYLTNGKGTSYTA

SEQ ID NO: 995132 - protein, 378 aa, Homo sapiens
AGHPRRGAHAPGLRSPALAYGWLAPPVSRDLAFRVSAPVIFTAPREEKFGPGGGPKAHSESLPARGTAMPPPASPWVPVAHHDGSGCGEIPPIVLRKIFPLSPSPLAGDGEECMRGCSAEGGIPSRSEFPVEDVLRTRPQEAGISDSLTYWQASPPCIPHTSTAPIPSDGLTVVTEVIGATEIDHPEFDILTLPQCKAPGEPKTKDGNMKLRPGHPHSGMYTRLTGLAIAISQEHSRYLPATPTPWLATTRGSADSDAPGIPALVTGPNGNIRGSLVHYLSALPGACPDTRTPKHRQYPGSYGDTDPQDNTHVTKHNKAPRSDCRYQTSRHVKPEPHRAQQHLHNALETQCISHTRSPHNNADPKPNRHTPRARSVRS

SEQ ID NO: 995133 - protein, 271 aa, Homo sapiens
MRCGVRMSRRSSEEWQALSASDVEIILQSIEQRLLCVTITIASIGALDETAVALSQQRTTSVSTLDTLRHTLERSDSVIATWSQTLGFLKTRVAQSNYLVTSWDYESRPHDGYTEMTHQTTSGDHRWVGPLAQDAGWTDRAWMNSYQRHLTEIINTVLRPMYEHESCTAKTREIMKSTKACERYYADLAVANHYTPQVERGTVTYKKLGQDPHRDIRRDRAGITGPHVGAPPCRGPWSQQPEGTIEDQEAIPGIKGEHKQGDKQQKTAHEP

SEQ ID NO: 995134 - protein, 164 aa, Homo sapiens
GYLQAGQLPLRSGKSAAQRGLVMDLHSSWTLPRSPCRRSSPSLRRCRRCCGFEGRAPIEIGCGLCVLGWLRVSGATRRADLTVTASWHMDSFQVDADTAVTRGCYPRNRAAGWYLTGVWINLPWISTAFAVHQRALVMGAPLVSVADCGPYCGPSMWNKPLARV

SEQ ID NO: 995135 - protein, 476 aa, Homo sapiens
VLLLVCHDSEQSKAAMSSVLPLQMMVEDRAVCTSDIESRVGTSCPGWDKKDCGADPEGTPGEDSAAEVHRVPPHTSGPVLPISLPDNRERVDYPVRPRIAWAPTVCHVSDASVSCRSGRRRSEPAGPVLASEKIDEGDRQIRQTAAPVTDIRVVMCDRACMTRQPDGLYKARSHTKADTTRGARNDRGKDRAAKQAGAVPTHLRWATAPHLLEWQEIQFRRASTQTKIQSLGDYKPLACANGLAESNHLKESPQRDRERLVAHVSLLIRGALLWEPLNTGTTEHFEQLAAPGAYRTGIQGKKAETTVCYTHHEGMGQVRTSTLTACDTHVRTLQRDNCRDLLETDYIATETEMEMREPHDSRKMVAQRVDDTRVRPELQFETEYQKDYGTSTTDKRAQGMTREEPRSRGSETDVNRIAQQQERTIQDSSGERKQTNDERQEEEEEREDDMEEATRLRGRPGDSATPDRLDQRKAQA

SEQ ID NO: 995136 - protein, 202 aa, Homo sapiens
MYEEQCAHDRAPSSRMQREEMRREHATSNGSVASIHETGPQRSKAGALETHNLAEAVLRNIEGPKDSLQNEPEKEELLLRRGKTLLSWKLSTFEDAFVLAPGIGGHHFTADPTCLKCTSALCQECEGGDRYADTGFQSLKPLPRFQMLRQENHEQLVQVREVKATPRASRRLGDTRAPNIQPPGRKTLRFHLVRGKLSPEVD

SEQ ID NO: 995137 - protein, 451 aa, Homo sapiens
MVRCTVTLVATNIMHHIISQEGVPVGPCCVHVEQACVCIRFWRIMHVWDSRGLMPSRPKRALNSLNQHKWATLTSYTGQVIVGRQAQLDIAPHGHAHEPFTPGRRSRIYTPCGSLLIRERNESDIFFSAGRWSGPLLTYFLTGAHRKLPRFRHTPTFGALDLVGTVVLKGDLPNAVIWRRVQAMGKSMEYFRRGRIDRFYTTKGTNWESAQGDKPVQAKALKYTTRGVRIKAPAKGIYHLYGTTPETENATGPKKGLTEASQEGEAITAALRPSECIPGGNEHLNPKHPRRNASIEHQDPLGKVEPNPGLRLKGLLGTISPYADRVRMDKRTQALDQPSGSSTLHHMTTGAQSPKKALGRNWHGDKQPTNGSQRSLAHGHLTTHQKRGGRKRHPSHKHTAQRVIPTPNGRQQPGPANRRPTQRTSTRAHDRKSAHTERGRPQQNESRRRTN

SEQ ID NO: 995138 - protein, 505 aa, Homo sapiens
GFAARITGVVKTTPKSQNGKRYTDSYPGHWSLSRHTVGFAAKVHCITGPSGSSKVLVAVGQIDTIETHLRRQAADDWRNGRPFNVLHWDLWSNIVNMLKSLNRWVSASWTTRALLENFDGARAQVNSVVHLTFELGIVPPKDERAGSCIVEKRAIVLERRGYQFVTSMELVDLDPWELLLTWAGLLAVTLSEMAWYSSRSKLVQEPKKEAFAHIMALSSTWGVMHRGKHKVGQRWFGNQKTCGISPALEGPTPLTRTRGNPGLIAWDRVGFNRGTVQEQTSTTFKEHKFGALTNAPPETNQVIIASFPVDPKVFPGDSSPALGVTRNHMAIEHGREWWPKPSGPFGGFPRRALGKHKRSTTPVLRGSLAPQLAHVWDNPIGPWTFYRGYPLRHWHVSYIKPKTNARTVDEKAPVWTLASQYRGLFFTNTFAGANWVTGTQVYGPQYRKHRRWSTTNPRHKGREHHLCAQSKGISPEKSNTVPERAHTDSLVLKTSTGQQSRQSTT

SEQ ID NO: 995139 - protein, 581 aa, Homo sapiens
SDGLSADPEVLVCAQRAADASECRAPAPNTMRPLEAFLLHAALVALVQHAWPVAVVPDGPLDRGHSSNQRNMPVDGLTRRTRRDGRDLTDVTDRTRPRTDPLHRHTGHDTHWTALWVHYNLTCQTPSMRKLPDGPDQKRSTTNVHAMVKNVYTGRPTGADWHRLLHTTRHIGATRANYWIPTHCPHTIYLRTRIQHAFPPPHLPLTTGHKELRNWATPYTNGSEGGHGNQRPTGPHDALHAARYPNSHQLTGNSHLTEHREGDRTMAKQPKQTGRQTQENTTQRETTTVRSGPQVRTRNAHALRPRPPPNPLRTAPSPPSTHTIQGAQELIRTNEAHKTQHTADGRRHKYVPAHSPPPHGRNARTGPQHGPRTHSGRKHRRHPRRLAQSGPHHRTDSEQHRNVPPNIPPGHKTDEETSRANKEDKEQQNGTARHPAHPRHPDRTTPHTSHRQQEHTQPRPAPTRTRRETTDQEQREHANTRQRTAQHAPPPSTHSTTNHRANDRTPTPQTNQPPDHTTKQRHTQDQQEEERNNRRRPPAKRNEHRHKDNDTNAQKPPTARINSNHHPAPTPEHHHTRTTHP

SEQ ID NO: 995140 - protein, 82 aa, Homo sapiens
VVTVLGRPGTPRRTSFVGGGATVLGGSGCLREGWSPLSAPSATYERFSAKHVGFVQHRTHHGTKDGRCDVVAISAGRPRRHF

SEQ ID NO: 995141 - protein, 404 aa, Homo sapiens
MSWQRGGLCYTKRSLGLLCRYAPGHVRLTHAAPLRTNVPGQDARVLSPLLFPDQRLYFTITYDPSEQTRLTTATSQRLLPSTPLWSAQHAPGNNSSPGSLLHAYFPPSQISELSRDHLTPATHTRDTYTARDFTLKRQSTFARLQRHLYPSCAHFTAQRSPGRLTTLNLRESTATSTSTSLPRCCPTTQHRPSRPARRPRRTQQHHTRATGTRHLLTPRCGHRTPLSDARTPKARGAKAHCANDITPRRDTNHAPANGPTSNNQETTPPHHARLRETNPATQNTTTTTPLPHTTRAHHDSTDPRPRPRPPTPRTHPPDATTTPQNKHTTREHPYTATDPPQHATTPHAQTPPPKNPQRHPLNNDYGRTQPPTPHHTHDNDNNHPSPTEHDTARCDDPPTPNPPA

SEQ ID NO: 995142 - protein, 444 aa, Homo sapiens
AELYTGNSSAASKGMTRPSRRSQSLRPTKTESSLKLAARPSFCGLSLHSMRAWAALQGDDDKIYFFFSAALARQYECYGEHPLCPALPAICKGDEGGEQGRYSRRWNYLTSRHQLAVLTALTHGLTPYQRASRHSPLTLEHPEPQDLDVPPLTLWGLHHSQMAPTGTLQTGSADWCLSPTAGCAETSTRRHSYTEVKPEAAHSRGYTRRPQAGMPRSPGPGTQRNHPTGATSTKGRNHTSQPLQRRPQNPRMLKASRSKDTHIPAWQRGPGPEHPHKQLHCRPPAHSANTHSDQHNNQSARRPCTTRPIRAAHHTLGTLEEHSTCNPQEQKDPSVGPTGGGTNNNETRTGQKLTPAERPHAVTKNTPSEGTTTHAGATRATEEHQTGRAEQEAHSPVERIRTRRNNPPAPQGRKNTKNQKHKRGNRARRQGTNTERNRPDTRKE

SEQ ID NO: 995143 - protein, 74 aa, Homo sapiens
MCGPFAPRRERLGRDARGPHPLSCFWRLGCQREGHGPRPGIHVPTQTGWLVPTVPRTHFTPQARGGAGDKRCGC

SEQ ID NO: 995144 - protein, 344 aa, Homo sapiens
  misc_feature (81)..(81): Xaa can be any naturally occurring amino acid
  misc_feature (157)..(157): Xaa can be any naturally occurring amino acid
  misc_feature (168)..(168): Xaa can be any naturally occurring amino acid
MVDRAYWPDEVVVGTRAGKNRENQYEGLASDTRSLNQSQSAVMSLHHAGWQWPVVGVADQVLTRKEFLVCMCTARVDAWTXCMLPSLYALSSTRDSGTADEHVVLVTAGGTWCSMLVRHTKRHVALYVLSGTHEDARANINGVRYGAALNEPRGVVXTCREVPMCTRXSSNTALRRLRDSQTVVSLESTDARRGRGLADAKEHGFNGEGIAARCCTSGPQGDAVVWGPEYSRCCLMRCEKRGASKAGSACALGIQGEDGGNLLGTKGVQLGEHLLSLVAWVLKGGHTDRTGGSRPGALMGRPARGRLGRAWILPGSRYGERVPYHTGDSQQFGGAPEWPGQIWG

SEQ ID NO: 995145 - protein, 142 aa, Homo sapiens
TTLMLLSLRSDRGHGASVLREQLSSFGLTNESDGEEEEESHGDEDVEEEDDSRDLRDRAWMNVLRIRLTNGRTPCCLPVGGDSSCDTTELWPFRSSTVDKVSFDTKVVKDLLGGATQPELVREEHSPVKASWRHALRMCSVH

SEQ ID NO: 995146 - protein, 150 aa, Homo sapiens
MGKVKVGVKRIWVVMGAMVTEGLACKLLVKWILVAIKDRFIELNYMVYMFQYDSTHGQIAMGTVRRLTNGKLVHLEWIIHITNASRRRGSLHRIKWGDAGAEYVVESTGVFTTMEKAGAHLQGGARRVSISDASADAPMCVHGCGTMRNV

SEQ ID NO: 995147 - protein, 108 aa, Homo sapiens
MVWALNGREANDQGTDRRKPGWDLQAVVECFVDGHKEGTGSKPCRSVPIGTRVVFGSKAPRYLLGCVVGESVKLGAHRGLVVGPLSWQSKVTNINFVGRIVTGGWTWG

SEQ ID NO: 995148 - protein, 233 aa, Homo sapiens
MAVMAPDLLLLLSGALALTQTWMSALGNEVFFIRSGPPGAVSGLVEKHVRFDSERRETRGWRRGRRGEKQGGAGVWDTGKHQRQCEGPQQITERNEPEQTFARLLTDQSEALVSKQSKNQCMAETLRIETVRTYFRGGNREEERITDRAKRLHSTAAHEDTLRLIGDRERTIESSQNSTKGDTGGKGEPIDRGGSQTRLAMELSTWSGRGVRKYLENREEATLAEKRTPQRNL

SEQ ID NO: 995149 - protein, 274 aa, Homo sapiens
MWHFAPILSTQNTQTQTKTHSTTGTNEHMLPHGGLIRSYPYTPNPHHTFHIPPDHQRSRLANLGPPPYIRSPHYKRDPPSSKKRSDWAPTTHNDRYTTPSGKTANHRTHKPSNTGTLQPPTQTTKRAPTIGTYTSDPNYGANFAHQPPKTTNTQPLKHNHQNINANRVYHTHKLSHCVYSPPNETPYKEPPTLDKDHTQQHTTETPIKQPKPPNEKHHQVRAHQSEQRQTAHSEAGSSTHTTYNTHHRKPKGKRKRTPYTPAITPNKNTRGERI

SEQ ID NO: 995150 - protein, 243 aa, Homo sapiens
LQCHGALQEVLRRGKLGDERAESRVWGSSSVLWNAGKVPADTEVVRAPPSAYIDFGAVESRSQDSGVVAAELLNEVSNGGFYWRTISPGMIYDCGAMCVVVLVVTQMHEEACLLRRSQIELNYAQQSGHCSGVRDLEYRCMWEKEDELEGNVEKSVVEHDKGHRDKWRMEQGRLGYELCGPWVQAKTEYPIGPGSSTRSSEDGRSPGVSDAVVRSTRIIYGGSVIGANCKELAAADVDGSLWV

SEQ ID NO: 995151 - protein, 315 aa, Homo sapiens
MVLVPRRRVEQRLRSLPEGTFQNGIRNFSQVFNRSLQIARRVAKQSKGSKGPLDSPESYAWSSIAATKGHNPEVQFPAFPEAAKYEGSEESLQNTGQPLGRLEKLIANPKRKDRPGRRHEEGTKLPNKGAGHVKNPFASQTLSKEPQPYIPHTQQRNGVALRRPGRRGNDPARRPGGLELANNAEQTQRGPPTPNATGPTISLRQPEDLPNKPRPYEPRPGHMARKNPPHTSARKTDAPQQKATTRPDTCQCAKKSQEQRQQSTRGKMRKANTKPETITTTRPTAHPAKPDNTKPDRQDTAPKRERHGHNDLTGT

SEQ ID NO: 995152 - protein, 209 aa, Homo sapiens
MSTGLLVGCPGHECLVEQSLEPVPGSHAVHELTLPSEETLPQRMAAETDDAGGSWPRGTRETGSWAAIKGDAVNTRAAHPPDWFHWAPGRSTAGPASRRHAPAEAAGRLVGGDAAAGCLLVLLDDPCASFMGLRVWRGASTIAARSTAGLYSESSTAAYSLEPALAARFAQAVLCSAIWLDRRAFRPGVFRYGTQDEDSQEQAGVWGEK

SEQ ID NO: 995153 - protein, 120 aa, Homo sapiens
MPHVSAAQRIRPLLPHGLPRTSSNPGNRTMAAASKSARLRVMDAKVAWSCNNTPPDSQLEGEYHGTNAGTANNKSPPQGVSGDPSSLSTEGSRLGTEWPFGPGSIRAEAPGFWKNPMCIE

SEQ ID NO: 995154 - protein, 267 aa, Homo sapiens
GVSACHVCLVTSDRSFSCVCRWPLRYQEQLGTQALDGALRILRELHTGLYILPGLNRELQPRTQMCIQKLTVQAARVMTWVKSLEVDVGYAESSSVIQRHQRVKNFLKEGKLTRSQTSPHHRCVIVLAYVHEPGPIIYDRKQTCQRYIEIYVQTGQPEPDPGVIGGLLDVDCAERKGLKALNHGPCAADQEPRTCVSEAVAETYARTEPYGLHTTRTADSHAKRKAPKNPGKRTDERRPGARTHSAGDRTSNNEEGATNRTRKRHTG

SEQ ID NO: 995155 - protein, 240 aa, Homo sapiens
MNLWHMPGPGDKRSVDDGVAPRCPVHSTSDSENAGGGFLRIRTKGLANHPPSRVCRGGINIDCHSKGKYGGSVAVNSDTSTRVGFTTNGLELTGRSSRKQQRNIPKENHFFPYRNDPKRRGDEPRTFLGHLNGSRTKMGRTHRGKLRLEAFLKTLLEVPGGVFHHFPHAWHPDGAVYIAKSKGCPSQGTETGANLRGSNNNFGDPLQLQPREEGNMNIGDRHDPMTSTTPTNTAATLIYT

SEQ ID NO: 995156 - protein, 90 aa, Homo sapiens
KNLGIRVPAGNIPSVSSSVLDRRIKQSGIVRHAVGPPSNLTDHVDIHACLYNSSRHMALPDQGAATCEVRAASAMNLNRGKSPSDLDDTY

SEQ ID NO: 995157 - protein, 406 aa, Homo sapiens
MQRALVIVGQYCELSTDHDTSVCMSHFTNYVSISSQDAGYNVTHYGGSSIASWMFPLVLSSGLMTSIDSKIVRAIDNPLIHLIEYSHRAVPDRKLLRFLNKKLSTGANARKIAHCPVELRNYSPDLALTARIEEAFLIHLRRGSFHFLLNSIELILFPCPSCPIGNWEDSRYRVSDRPENKSPSNPISGRRHSVSDIENVGPFEMQILRYVPPTIDRRITQGVTFRETDKPPLFNNILKKSLRDRRHTGEGRHFSEKAPAQECAWGDSNRAKNRRMCGHPPMSAFLFSHRRRQKESEHDPPRERGTLPKSTAAATPGTENTEQTSAIADDNVLAPISCQQTASEFDRQQPRQKSISSCANTQRGEQIDTGGDPPNKTEGARTIQHLATKPQGGNLHHKIQPASTSK

SEQ ID NO: 995158 - protein, 414 aa, Homo sapiens
IHDSKSPGDIKPEDFSNGPRPRRLCAGWTTDRLLCFVTTVPTQTDHVTVRFYDGLTDELDWHGLWRTFSPTDCALHTTYANCVPDHPPYHNELNDLKRPDEQMILCNCKRQREDGDDDLTSKQIHLLTTLAGRQGQTVQAARRSDRPYATTIHPQNPYRKRLRSNTLSDETGILRRLLDTRGDITDENAELEKRPAQTPDTSDNQHPTHIHNPPSHINRTPPNTQTQRRTEKQHPTAPGLTPQEPHSRHSDSARPPTTRRTRPTPATRTTSHRAKPYRNTHAATPTTEKHHQNTQPTTHHNRNPQTPKDAHHSTEQTPTTTPRPTKTPRPPNQHLTTTEADQLSTAEPTEPTHTAATRSTENTTPTDPQTPPADSTTTRNRHTTTQHNTTQKRHDQPTANTAPATHTTRPPQQT

SEQ ID NO: 995159 - protein, 139 aa, Homo sapiens
MTYWKQIPHLAVDRRVSWGVWPHHPSIDQSISSRKYLQRFVDGKARTITGNDPDDPVTVDAGIGDGSPKPDASCRHDTEEAVHMVDHKRVRKFHGFKPKNISWGDAEGKKWTTHATETHVSTKFPCGVYHRRTRYRRLN

SEQ ID NO: 995160 - protein, 79 aa, Homo sapiens
MSTEVSMRMSTFKVLQLRTCSQQASEALGSPLAPINTTHLSDMRSLLDATDLSLGRLMRSFLTNATGVLSVTLYASMTG

SEQ ID NO: 995161 - protein, 241 aa, Homo sapiens
MSPTKEFRGNPHRVFDVHCPNSTPYPPWDILPNTKTEANALITQPPSRSTSIPHQTHIMTRVTPTLAHCVGPVGSCWHRDEDNVTTKHHYTILCNRTKRQSNTRTAARHDNGDMNNTDREPRTNARLTGHYQLDPLDSKHICQEHRQPTASKRQQGYTDYSGALHRTATNASHSDHTTRDSKRCTRHKHSHQHRWESSDDSKTHYIHKSMWATCHRKFNSPGPLTPAGLAPPSRATPSATH

SEQ ID NO: 995162 - protein, 569 aa, Homo sapiens
GTIVPYRDTFCLTRHAAEGPEDYIIDQCVPSQWTNTGEELYEDLRLRVRYLVARTVCLCRLTCEVFARPMRLNAETKDECKTGVNQSQTDVDCASQEADSDRSALLRPLSLQRDTSEDSPITSVDYIQSRVIGSLCKRPSQQVAEPPLNVTSRNSDFDMRIMYHTKRIDTKEGAYVTTDNSTRYLVARNLGAPLREWRTTLGDVRPMCHLIRDDSSAEYRDSEQCTVQVMPSGLVSAPAPRIGLAKHNPPAQPSQITSRHETAVVALTYTTSKHQLYDTAPANNKTTTTTRITPNTHEQAPHIPTQHQRPADASTPTLSGHTPLQAHSITTNQHPHGTKQHPPRYQLGASETNTPHAYDTRQDNRTNERLHHLTTKPEQHPQYTEKQANHNPEKLTPPNHKRTSDNATTQPAINANRHTTHANQQQQNTDRDQAKPTTDEHDRGRTHMSATTNTHPAETWRITKDERNIHNTHRGTTPHTKKTQEKQQTSNTSTAAHNNQTNRTHNHNLPHHTLSKSHSSPRRQPQTKTTVTQTTYTTKPITHRLHTDSDYTTTQHINHLQSSYNIVPL

SEQ ID NO: 995163 - protein, 133 aa, Homo sapiens
  misc_feature (82)..(82): Xaa can be any naturally occurring amino acid
MGKTARILRTDEEEDDEMDKGKLKPNSSATGADLCQLTAGSQTLSDAVILDASSFCCVNVRGIEKGGNREHSGLGLGTSFAXTGLRSAHGVRSSHGGTAHPIILTRVEALSIESERWEESSVGVYVDGRAKVG

SEQ ID NO: 995164 - protein, 288 aa, Homo sapiens
  misc_feature (102)..(102): Xaa can be any naturally occurring amino acid
  misc_feature (158)..(158): Xaa can be any naturally occurring amino acid
GRCRVQSIIASVMQMVLICSIMEAELGELSINEMWIDLCINVGLCFAPFPGPWNARRSSGGGTQLHTKAMACMHGLGSAQVNSDALCAEATSVTSDDLSQSXLRRLSSQNTVTGAMHLGAEQGRAMGIDGKPHLLSMLRTTNTCMTTWLGTSLQHPAXWLLSLVRSCSVQATVRILYCTGNHGYSKVNRCTYSQGFCKGSVVHDTRARHWVGNCCPSRIIKQGSPGPNSLGMHAMGVLNVEHSPGRVLVNSEVTELRLRRGTYISPPMRRPKFHFFPSALREGFFAKS

SEQ ID NO: 995165 - protein, 149 aa, Homo sapiens
MSKFSESPKELEEVRKLFIGGLSFETTDDEPGGSHLLSNGEALTDCVCELMRSNSTKRSRGSWGLVSNATVEERGSGELSEMQGRARKDGHGERKFAGEKHKKINRTAWVLPSTIRMSSLTRCPLKLLHIQTIGGWLPRKDLNNMQLGD

SEQ ID NO: 995166 - protein, 256 aa, Homo sapiens
GIRTESARTRRRERARQELEALLNKTMLLRMTDGRTLVAASSALTVTADVILELGAGVPLSRRVSARGMHTRVIPSLPGSPVVLGLAMVPWTDTSISIRSVHEGESDRVSVISDHDGAYLSALRIKTFIDLIRDQEKIGPKTTLPEADLWPAVGGKRGSSDIGGRGSRCRGPPLGPKISCCVMPSGGVEDMLRRDATQVRGGGSLEFLEKTPGVPRGCEETMAGKKGPRRVTSVGPSEFAIVSATLLGSKSDHDCI

SEQ ID NO: 995167 - protein, 257 aa, Homo sapiens
MTPVQRGVPWLLLALGWGTSGGFRGGFVHWTIRGRGSSCRGTGPVTEDRGRLDGGKGRRNKDVCCPYTKLGPLGSMDDEASSPWHEIYLFSLPIKESEDIDFFLGASLKDAGSCRIHASAEGIIPMPGGSCTRVQGTLLLIVGRTTGPTSCLGCEAAPKEVVLRAISWVRIYAVPRLCIVPVRRGVLGGNKIWHRPTLVPCNGDQALLLGSVLGTASSLTPMGHLDIVFQHLCLKKAAHDVAWYLMTWYTSDPGLEC

SEQ ID NO: 995168 - protein, 171 aa, Homo sapiens
GAGGSTSGCAFTLDVCGTLRFLCLGDETPVGYKLPISCAILKDREWLEGKNTILDSSSGYPVGRALISSRSQWSSSELTLCRMEACVSNPYSDSTEATRRLLVTVSKTRYSCGQGCPHPSRRYVDQPSSNKLVSSSVAHWVNDHETVVVNQNHEEDVDRDKIDPEMGIGDT

SEQ ID NO: 995169 - protein, 217 aa, Homo sapiens
NASGSAPGREHRWLTAIGSRRQHALMRRAFHATSMNFIDIQKDRTIHIECPDMGKCKRSQAYADYIGFILSLKDGVKGKEADRSRYSIVSRWPIEKSRSLFSITAVTKVRLSETPPVDHASRFGSIGIQDLVCPKLMSESRNTCGGHSGPYPSGSLLCLTVAVYLKESVGNSTRIDYGSQGIEAAFAAFLCCLCKIGVLRVDDQIAIVFKVFNRYLE

SEQ ID NO: 995170 - protein, 254 aa, Homo sapiens
  misc_feature (130)..(130): Xaa can be any naturally occurring amino acid
MSQTRLRSSDTDLVQRLIPCLMCGGRLIDILKDAGFLVLIWLTLAGCPHRGLPCCLWSLCSGLTLHAVTYWHACMVQYGERLAMGDLSGRILRSSQRAVARVHVVPSRAPWLSTDHEYSCMRERDEQLRXAAAHNASCRASVRPVSGYISPGVDDYVSQLNSQVTYFCKPSAPLSGTESAFLFLTQEITALRAYELQVRGEGTGVLGSLSLPLSELLVADQLCLDRWFTAQQWSGAGATESSSYGILVSQHSGV

SEQ ID NO: 995171 - protein, 114 aa, Homo sapiens
MTESRQHIKEISDAHLIPTPNEGGTNLPQRKGKHVLTGLAKEATHSVTPLGTAQHWRDQRRGGGEHVRTGSEQQGQRSCECHQRTIPGDHGESKNEDRTSIKECEETSAAKGGT

SEQ ID NO: 995172 - protein, 146 aa, Homo sapiens
MVARLTNGGSPLLPDSIRVTCGVGTNYLKSILASPGRSKWSINRRCSMLGEQAGHGRSSMILPVGCRPTSGKPCAWEQRFTRSLKKCPSTRTLWRKMAAKWGGMKRVLGNKFRRLKKAGSAELLGKARPPDRGTAGLGPNYSGTYG

SEQ ID NO: 995173 - protein, 178 aa, Homo sapiens
AVPLRLLGLPADAAFLSSTGGVPTYLGCPAACILLALSGNGACPGLGPGPGWGPLRLLPAPIVTCLGACPPTRDEVAEQTGRDSLLSKNDNVAPHRTIARTPHWTGGRQTERARVDKGTTRDQAVKHCVKIYLLTTRQRLTHGTLNGVCPVHAHRLAEADYRLDASTLTYRPVPSFKA

SEQ ID NO: 995174 - protein, 276 aa, Homo sapiens
GIVKSRNSLKSSIDLLEDPYPMVRSTGILGVRKITSKYWEMMPPTILMGPPEEGDWGTGILTRAQLMFVVLSLSVCQEILDKQTEPPMCRADSFQLSDTVSTTDSGESEGSFVDMLVADHSCEGCYVRKICPTGAHSGSSGNTDFSTCVSAPGEPHLLILLLPVTSAGRRSGASAVSPPGADEPTPPARRFYQYAHEQHRLTKISKLIHVIAIASMPVSRGQLREPPRTRRQRRTGQPHAPARPPPRHHAPPPAPNPGPGPFGSRTTRHPTRPAQP

SEQ ID NO: 995175 - protein, 295 aa, Homo sapiens
IERGGGGDPHMIDQVTAHGLAQVGKLTLQEHARWRTIDPTVGTKDRFESLSQRNKGPCRGDVISHRAKATGEDHRRVGPVASLAPASQPNASGAPRPRFVADARRWGAPEIRKEVVHTRVPDTEILTVINSAHSGLPVRYFSGDTGRDQRQKSVSQINAKGGWVARWRARAEIKSRVTLLISLERRVRTCCDIRISLLLPQPGPGEKLTPGRHGLVIIEPPRNRWTIKRRIRGHLGIARAPRQVYHPIRPDLDRGLRYRSSKQPPVTRREKDTRKRDSSGNFGVQKGRMACRADL

SEQ ID NO: 995176 - protein, 132 aa, Homo sapiens
MQGAHRNTTCASLLALDTLTSIYSAPHFKATFDIREPTPNPSDSGTSLTQDNIEPNPPTLLSMSHSMTLTIYTHPQQLYTSHQYSKLHYTLLPRTNTTTNTTIQDNHNTYQPNTYRKHTTHTLHQTPLPSKI

SEQ ID NO: 995177 - protein, 61 aa, Homo sapiens
MVPGEEQQVVWLNCMSRTCNRSEDVTDETDRLRDYSDDDRYIHSLGHCYRRDIRRRRRQVA

SEQ ID NO: 995178 - protein, 396 aa, Homo sapiens
GWRGLAGRCCGPVDGVRSRSRSRLGWCACTVDPGNPCALPTILLLRNLERLYNECVILVLLVVTSPTPDHSPSHGEVTSTEEHENNPEYLRRAGTWHQTFARTFNTDWTQNDTTGVQLTSATALAFCEELGPHMTTRTHIYNERGRHPQALSGITRQIARLPTDPTEMYPNWSYPKTDSARQGMACLTNIEISGMVTSCEPDSHTESDFYYALLTTGPPPYYRPEPQGTTNHHNTLKKQYYKHHINPHTIIHTNTHTHPHTNIPQSPTKHTHPITSSPIKTPTHTTTPTHLPSTTGTPAHHHPASNNHSSNRRPPPHTGRHKPSARPTQYPTLKTNRTPHPGNPQERPRHNNHPVRRIADQSTAATRTNATTPLTRNQISSPLTNRDPTHQQQNRQ

SEQ ID NO: 995179 - protein, 324 aa, Homo sapiens
HKLLDEIESLTLRFSEEQENKRRMGDRLSHERHQFQRDKEDTQELIEDLRKQLEHLQLLKLEVREQRRGRSSSMGLQEYHSLQRGRAEAVEHVDGPQRLTCRDKRKLKEQNRGRLNGRDRLTLSIQGRQVSLFSRAFSESLAAEISSCLRDELMEAIQEARRRSTFRLQDYNRQDHRGHHGDQPSILEVKVEAGRSSLSWIRGLKHPGVVPGTTMRSQDPAGPTVDSAQSMREPREHERAAKTGCQGPRCERQGKARPVGVQGMRQGRSTEPARTAHSTDSETGIHTRGTHTIHGASTQTGKKPVTSTTRHKKNGEHDTTDGES

SEQ ID NO: 995180 - protein, 498 aa, Homo sapiens
GGGGGGGCSYRRGSGGSSVMEVDAADKSPSVNGPDGDEMGVLSDRSRIAHCSILKHLRRTGVRSDASQAGAAVVHGEYAGLRDIVAKTRQGPHNYLKCCSETSLLLHDCSPTSSVRNARTRIYQSGPDANILIYNPQGSDCKGVNDKWWYPTDDWEAFAGAWRNTQQRASHDMTPLVTVHGFTVNAQDAVRTQSKQAHRPFPEGLNPIVNQDEQHGSFPGTDDMAEVMVETAYQITSGTRANEVAGTRWSLDHRLLGPHERKRNTAIWELDTAEAREMNEQTRQSWGRRNTYPTKWCLTQALGFEPPATKATHSTRLACHTKTSRVQAIIPEKYGSTALLASRDEGSPISTSLKNPPHREKGPNAPPWVPTLAIPGATLNPPRTTASHDTDISTGSQAGNNTVSAGHTDRNPWAATTPEKLVTDPRPSLVDPRHTAPYQTQPADPASTHTRATTPKREATNSHHRTHATTTRTRHNRHNPALKREPSAQTNDTHHRPQ

SEQ ID NO: 995181 - protein, 319 aa, Homo sapiens
  misc_feature (45)..(45): Xaa can be any naturally occurring amino acid
MNTETAQCTCQSITNGGDTSRQIGESVELDSHADRGHTPSGTHAXHSPVPHTAPRGLHRGPVAPQEHTGKVAQHETKRSNGEAHGRQFSRVPYATTLNFGRETRGWRPFLALQRRRGKTLMDLNKAETEALLLHSKANSLGNIEPIHNRAHILLASVSNGGSLDIGMDIQTRGVLRRESSPLSAFEFPVYKRLRMDPLGGLAAQRHSLSQGNEFGMPLNWPYGRHSARLANGNELTSNISLGTLPVSGSAQHWQAASPLRPVNPKEVASNPFAFHRRGATECAWRSCQCSVLGHWSLTTRNTREILRPSKSRHEGTYIE

SEQ ID NO: 995182 - protein, 308 aa, Homo sapiens
  misc_feature (27)..(27): Xaa can be any naturally occurring amino acid
MASIWHSRERFLVEPQEDIGLGQELRXVLDRFYDTHIRFSMRPETGQLIIMETRKKDGTVAQAQLHVMNNNMSEEDEDFKGQPGICGLTNLGNTCFMNSACSASAMCHRLNRVLPQECTWRSSIPETTGHEGVTIAEGLMQDLVKAGVVWTPRSHCGHNVFKKPRWAILIPNFWVTNKHDTQGAGCHFLPGLGWIEDLIRVEGKKGGMWHASSGRKMREPELQNGWTNGRTVTQHHRTGGSNICESCPHSQDITTNHKRVWPHMGAKAHGEQHTVGKPQDKAITHKGSDSHNTPDRATQQRRGPKGNT

SEQ ID NO: 995183 - protein, 243 aa, Homo sapiens
MGAGDGIGTNRVAACTRHGTGPACVAEPRADETATVPMRPRGAQPMDRTVAKGKDQPRALGAHPGRGSYNGIPPKRVQPGRKREGGTQGHETRRRKNATIAQATHYTQRPAHRLTQLTEGGTPEAVNTGPSYGSAKGRTHSRPDMVTHNIDDLLLAITPDTGRLSGTPAHIQSAQDRGKQGNHQEQRNQHHITVARATPRDDKPRAPRPQYSRSTWAQTEERVVHPKQQSNTKRSSLVNSQTP

SEQ ID NO: 995184 - protein, 291 aa, Homo sapiens
  misc_feature (92)..(92): Xaa can be any naturally occurring amino acid
MEQVSWSSRSTGGGELQLLTSSALGGFQLVFCGSQWVSYSPFAVGAGAGRGTYLLDLHHSGLMSEGPVSPGHSTWAWALENLRRPSSPSICXNDRRGDPVTKAAGQDPTDVGPQVGRSGLPPGKSTSQHCLPREGTRLAGMAGGYRLKKSLSMWEWEVLRPMLAAKPASMALTEAVCNSREEATMMMEEPGGSEDPEVTGHPRQREEEKGSILWKDDPNVKGAEPESATGEPNPLPGGSCNEEHGPAKKGPCQGGRGTWDPGKRRHTPRASTGATLPGPKNRATYNGPAQG

SEQ ID NO: 995185 - protein, 74 aa, Homo sapiens
MDDDIARARRLTSGSGMCKAGLRWADDAPRGRLPLHRGALQAPSAVMVAAWVRKDSYVGDEVQSKRGILSREGT

SEQ ID NO: 995186 - protein, 521 aa, Homo sapiens
  misc_feature (36)..(36): Xaa can be any naturally occurring amino acid
  misc_feature (83)..(83): Xaa can be any naturally occurring amino acid
  misc_feature (104)..(104): Xaa can be any naturally occurring amino acid
MMRTLCFRSMGSLGASHGKGRCSSGSTQVAAEDCQXTWANVERFILGSSVCTRALGVGDSGMTRERVPRKHLLYLRHHEVIWXHASQLSDDENLSETTMDEHAXDRHKVEHASNSKKLSWIVKSWKCFGEYSWTMNMDCIEFERTGWRDTAITEGGISRKGSRVYHSVGLGHAATGIHSRRHWLGHPEDYVAWRTPLDAEVRHLFVEDRANGACINEYPPGAWMRRHQLGPSLGSKRSAGFRTSHELFPRPARPAEHFDTEVSRESLGCRQAALGNPLTIACLSQLQGIERSSRWWLPPSCSRNYGDDCWPQAELQHLLLRCAKHARTSLTPRAGRDHPRGAHTARGRTTECAYGARWYCPIRGANPLDRGHGGRPASTPHRPVHSPETQAQTRHPWPHTKRGGTHPSDTTATGDKTPVGDPNELARTNAHPTAPQTRPGTKHQPRGPHTALATSNYDRSSHAHTTQNTHQHPNPPTTRPPRRTPPPAASTPPHNHQSSLDHPVPYPPPRCRSSDHEPHTT

SEQ ID NO: 995187 - protein, 465 aa, Homo sapiens
MIGVRGWVRTLGHVVHEARHTTSRFVTHSRQGSRLRRYLIVNAYTRARGAPIRTSYSTSVETWHIYGPRSRNGIEVLDLDARPERQLVGTPTTLCALGGRVQSILTFTPNCAIHYFVNIAINQGRGVCAPFDTQPGSGQWVPLGGPEPYASPRDGDGTSSGALPHAPNLSTNLSHSGQQFSRHLIASSSRRHPVHPLRHMLAIGHCGGFPPFPWRPLLRHLMGHRCGAPYRPPPCTAHRHSRGPPGRTKRGTCVRPHLEATERRYRHQGIPQLPSTAAPTLHSWFRVTSGSPNKDRANWHALTSTPTARARALCFDPNTCVRDNRHDTRTVGRVPLGPQELEHHRRAHKGPPVPHKGQQMWRTATLIGTHPRHRHTHNTGALRRHLSTARNELREPTKQRTSGRGSAHNTRSHTTRTAPAATHLLPRHNPRRDQHIPRADRHTRRRRDNHNAQQPHTTHAVTATA

SEQ ID NO: 995188 - protein, 487 aa, Homo sapiens
MRPCEVPGCPCHGEHLAHGRLVRCTIVDPCTWALNDSRSARYLTCTQYVGPGERTEPIQRRLLNASGLDIACPKRNRACRTAANGIGWPYATEIEKASLVLTRGVNLGIDHAYWAFNTRTWGAGAPVMDVAFSLGSAESLGVGTALSPLPGELGDHFGSVPEEDTQLLSRHFGVLILYLGFRRTEVRFSANTRQTVVAPVARGNEGTRGRRGGSLACLEGPKEALPGGNIGVRTTPLAVSRLASSKRVLEPDGTAALGKRNRCSKLAPVAVDSRVAQPTPSGDRAKSRLKPHGRETKGQIPDAPVYTSRRRHGAARQGGNTTLSPGKGAASPQKYRAPPEGPRVASWARAGTTPGPRTTRLTPRGSPARREVAPGARGPPAATHPHNWPHSQDPTPYTSYSAYRARAKTHAHQQDDTHHASHEEPDTDANTHQLTRAHTATPHSDVHGLTYRRNTTQPAAPKHHAGDSTESDATVIDRMTDSRHIDT

SEQ ID NO: 995189 - protein, 398 aa, Homo sapiens
MRRRGMTQAAGLGTIVHGAHWRRLRRPEGQPGAQQRNERGAEDGRSHTRLLGLELLGGDIRVISGHRMRSVRSGNGRNRLMSSPEGRFTGFQVTGKPPDGVGVRHEGAASGPTPMFLVGPLKCTTRTLAPDGLSANVGLVGAQLDTTPVICESHLMLAPVEKRLRTRTGPARSAAPKNRAGTVEQPGEHLRARGTPVTLNEPIRHGGYRHGEQGATDPSWLRRLRRGPLTDEADYGTHGRKNIDGVQAPNRGTPSARDPQGRINGHYIQVCRNPIGDPAKRGRGAQAAPEDIPLTTEHVPRALITRNRATGTRGAVTHNCEIASCRSTHRTSARSRARQRQDAQKNQHNVDTSEPKHYSETRIPEQNNTTTNIQRSELSAQQHSAKSTQPHQLDDASA

SEQ ID NO: 995190 - protein, 425 aa, Homo sapiens
RPGARPADCCHLHTPGKHAPSPTHRTATSTYHHALPARTTAPRAPPLRLRPSSSYHRTYPHTLPCTHPEPLAALTPWPRPPYPARLLTQPPLARLRRATPAPSSAPRPPAPRHALTSLSWAQGPLAQHPRRRSSSTPLAPPLAHALAHRPCTLLPQPSQRPADSPERTAPNTHPGAPKLTLSYPPPPRGLSQPGLAHGCHAAAPPNRDRTGPLPQHTAPTPNAASHAPKPRPTGTHNPPATPPPPHTQLQTPPLNQRPTRDGATPDHRTNQRRGHPPSIGPPRRGASLPTRHLSRHTIPASPPHPITHTPPPQPPPTHSPRKHPHRPTHAQQPATSEHPPAPTITHTPNIPHPLADRPTPPTALPAPPPTGQHQHLTHTRTTHTAPTPHPPPPTVTPPHTSPPTTTPPTPAHSSALLESPPHTTQ

SEQ ID NO: 995191 - protein, 207 aa, Homo sapiens
MRTTLGRSDVDSYSWYTIMCTCSLQGSNKKEAYLMPHKKLFDFDLGGDQFVQGASNVVSLGSLDSRLGFVLVRCGVVQFVEVSGNFGPQGKFGDRNTRKKQCRISRLVTSNVERWLEDERILLSGGLSTYTWDIATGIPTPLSEGHAKDELSDAETFALRTWIRSKASLSRILICNWPSEFTKPTRTEPGVTLLLWWPKCILGLWVH

SEQ ID NO: 995192 - protein, 156 aa, Homo sapiens
  misc_feature (148)..(148): Xaa can be any naturally occurring amino acid
  misc_feature (156)..(156): Xaa can be any naturally occurring amino acid
SAPHGWQQILEDVRGAPAEDPVFTILGPEDPPVPFRMMEDAEAPGRAVLPVKCRAYVGANTACMSSQAEQCAEAIGVSSCSEAATAPGAGGGPDEAGSYYRCKLSKACHHSGVTLSRVPDRSCGQRSEGGLHPGLSLGGPSAPDWHSXGFPAPRGX

SEQ ID NO: 995193 - protein, 399 aa, Homo sapiens
MLTLTSQDPTDVLLSVCPQVMSRVLSTREGGRRAVIRRSLQKQASSSVLMWDVVVNMVKACVTPQPLKSSSSCVGLGGYAASMDDRLEWVPDLILLTSLLAIEEELPYHGGPECDVMTGSRDYELRAIVIPHLTFGRDALACHDPTLIFASTCSPLTSFPEREGDPVVHVARHYRHRRMGHQVNGEQIGLRTLDPLKVPNLVWGTLNASNSKGRTIVSGISKMVARFCGHRYLGDLTSLAVAVNQLVWRKGIGYAPRLVLYGPSIKGIILHPSRRSIADTRGPDALSPCEGHRRMQCPCPAACRPSFGWHGAQRSVGSFPHHGGTHPLAYNVVTQGVPQLDKSHSGQLCGPRSVTHLVIILLYTVVAPTQLQWDCAGSRIRNRQYHDGQSADDFRCKCR

SEQ ID NO: 995194 - protein, 215 aa, Homo sapiens
GELSARAVNACGAAGVGAAGLTLCPLTPVPVLIPCEPPCCCPCTLTCAQPGRQRNTPYARLLCLCLMVQAEAGLLGDPCLGPETWGGLTMDQVTASSAMSSDCDCGDHIPPAPPSLEETDYRQLEKELQGQNVEAVDPRGRTLLHLAVSLGHSESARVLLRHKADVTKENRQGWTVLHEAVSTGDPEMVYTCSPTSRLPQHIHGPLREFLSCPQN

SEQ ID NO: 995195 - protein, 118 aa, Homo sapiens
RSSSERRASQGRRFTTYFPYSTRQAGASCTFNLCFPASLANPRHLTQRRRAPVSAGASLRPPSGSARVLGTQRAAAEQVRWLPDCAGQPIRLLIATTGTTGCDGSEETAQCLWGCACH

SEQ ID NO: 995196 - protein, 71 aa, Homo sapiens
RVRPRETQSLDLVRSDGLVHHPTSSSPWDDDIAVARTSITVLGDVHRRTSAGATNASPGAATIAPHIRGSD

SEQ ID NO: 995197 - protein, 130 aa, Homo sapiens
MYAIQNRPLFRPCADASKGDDRVFLLATEDYIHIGMSAEKRQEDRLLVSQGIADDYGSTQQKLVKAFKREFGCNGTVIELILEYGEVILGSEGGARREHMHSSSLEMGRVKEDQLKVHGSASACGSLKLT

SEQ ID NO: 995198 - protein, 220 aa, Homo sapiens
MGVPRMGRLWPRDMKYGSGWRVCAEQGVERGIRVDSSFLWRMLVALGLLLFFPQGHGRRERTGYGSLLLQNSPGTAFKSSLHSAGIKMPVTLVTTVDSCLQHAEGSRNPPGARPFPSPPCGQQIVRLLVETEGRTSLMTRYGGVCTEGNNTRGPQALSPGVHSGLTLNCGEGRAGGAQTLPHRERATRGKGCPQQRGGGLRAHPPARQTASTSGAAHKGG

SEQ ID NO: 995199 - protein, 139 aa, Homo sapiens
  misc_feature (89)..(89): Xaa can be any naturally occurring amino acid
MERTVGKELALAPLQDWGEETDGLVRCTVSSLTVFWSSAGARLEGPGGSQAPSPIANTFLHYRTSKVRVLSGSAACESWLGGDEVCVVXEEHPVQTGQTRRRYIAPGRSMGHRYRDLLYATDCLLGFLAATNATDPNSR

SEQ ID NO: 995200 - protein, 351 aa, Homo sapiens
GLIGPRATTQREPSWSSSVRDVVEGRSQKSLGLVLRRGLRRAGATCSGRVRNGVRRWAPCSSARMPGRCTPDRGMNSFSGHGASPRDGVMTSGWCEPSAIASLSVHQLVENTDETRTPLITEALYDICFRTLKLTSPSYGDLNQLVSDTMSGVTSCLRFPGQLNADLRKLAVNMVPFPRLHFFMPGFAPLDQPGQPAVPGAHGARAHPGDVRVQEHDGRCDRPRAYLTVAASSGAACPEEVDEQMLNVQNKNRSYFVEWIPKSGDGPVLKSGPGADDVGTHREQHGIRSGKAIPNSRARSGKAPAAGAGCARVTRQHRRRGTTAQNGHTAQQRSAHTPRTTATDKHESETE

SEQ ID NO: 995201 - protein, 290 aa, Homo sapiens
AAVDGGGRPGQGRPVQPQQSPVGGPPAVTVREAERYEERRDAGDKDKEQELSEEDKQLQDELEMLVERLGEKDIIAWYRAMRLVGTCRTASIRLLRSNLRMDVQVAQGLSEVSASTLWAKLKVKSSEEHGALGRISVWLLTSSPSWAMTMSGERECLKYRLVGSQAGIGIMGSEYVRASGREKWLRSGRSWMTDRIVQRRAICISPGRREICRLYTCATNAQHDGWRPGPCDMAPRWDIACGTGQLTAALALCGKGSAAPGFHTVEVNYCGFLTPLRNSLAICDSTTRTC

SEQ ID NO: 995202 - protein, 75 aa, Homo sapiens
  misc_feature (36)..(36): Xaa can be any naturally occurring amino acid
GKGGGLGEKAQGRELVKVVSGDVRYGPESLSEFTQXRVRMISEELGGLSRSQCRRLRGKCESLMKGRLIDKSVCV

SEQ ID NO: 995203 - protein, 94 aa, Homo sapiens
MRPKARTSEESLPITKNRAITIGEVQPWKKGAMPRCAGGTTGRDEKQWQRVASEAGERSSPCSGLCQDFPGCKSGGSCPRDPKWGLNFSTVGPK

SEQ ID NO: 995204 - protein, 133 aa, Homo sapiens
  misc_feature (64)..(64): Xaa can be any naturally occurring amino acid
MPGCSLVRELGELEKWKCVKTPSSNKDLKFMCEKNQDLRSVNIQIREVFANRFTQMFADYEVLXGAIPNPARIRNPGLPTGSKCKTLIKHLFCQISLSPPALPLKIPGDAQEVVVASFIDNKIMCHDDDDKDP

SEQ ID NO: 995205 - protein, 235 aa, Homo sapiens
AGVSDCIPAAATGLESDPERTLAMDSALRDPYNGRVAEAGRLPTKQNYAAVLPGPRASALAYGSLLHQSWVRLAIFYLGAAVASWYCCALEGRRLHRMTEIITRPGIACPRSCIDLVKLHISLGLVFSYSKNYSSPGVHLMLRAVHGISSCWESCALSQTHHALHEEVFTMPAFQIESISCSSHRVLGKNEEEIINYEFDTKDLVCLGLGSIVGVWYLLRKHWIANNLFGLGLLP

SEQ ID NO: 995206 - protein, 469 aa, Homo sapiens
PLLVQRALPGQVKRQGSDGADASDSAEPWTHQTAHPRHAKQLQGILLTKDTGLALLPAHSHGSVDSDQTEATPRCPEAALDRTPTLRPRMAYSRDPNVTTRPRKHDTPCPAAQTHSTRPPMTIPPCLPNPTPSRTTHHAHSPLQPPPLRTMSPSLLPFRPLGLRPPATTPSTTRPAPGPCTRTCPCLPPPATPPPARPPPTPAPPPAHASPRTPASRPQPPPTTPTSTPLHTATHPSPRTNPAPPTPTHTPSLPPLAPHYPTATTPTPLGPSHTAPANSPARPTPHSPPPAPHATPTYSRPLAPTPPTATAPIPRPPPRQHSPRPPPKPPPTTAPPTRTPRAPHHPTPRARATTPRPTHRPPPQSTTPPCTHSTDPPPPHPPSYHHAPPLSPNSTHLATPITPQTHATPHTHPPPHPPHPLSPHRPPTTQPHTSPPSPPTHPTHHPPHHHPPTPAPSPNPQITTHHPAP

SEQ ID NO: 995207 - protein, 102 aa, Homo sapiens
  misc_feature (4)..(4): Xaa can be any naturally occurring amino acid
MSGXTFRSAFKSQGLRRNTRDRKRKLAPLGNAGHSSAESKRLSRYQRGRPFTPPRNAWFYESGRGEVPGRAPLTDIGASAATLHEFRNPTLMASSKANNRGI

SEQ ID NO: 995208 - protein, 625 aa, Homo sapiens
MRLSVRTADVLSVPGHCGLGSLGMRPAEPRVRQADLNAAELGDCRHGRRSRARITCATELPALCESPLSRNPSRACDSTRAAAMGRRVPLSLQSARTPPHMCSQAPRPPYASSQTRAHRVTAWALSRARAHLATPRSVDRGRSRSPLAVCAPALLLPRERTIAATRQSPYDSRERLGNTAAYVATDRYSLARAAGPGACGDNVGRRACPPVPTAASSCACMLPGPRRPCTRFPSLAHRLAIASSPVLPRPESVARLPLPGILPPRDYLDPPPRLGPTLNPSSSPQSRTPTSLNSPVLPPPGPEVRPVDCPDPPLPTHPSPSSAWQREPRQSPCASRAWRAPCLRPAYPPHRPHSRRQNASHPKATPPTTATPKAAITHIETQRQPSTQLPTQYNAQATIPQRRPQQATCNTEDKPGSTYARKADSQNMHKHSTPQPDGAPSRTTAQAQPERPPLDSTLSTKGQKPSTPRYAQRTRNPHANPPLRTQPRRQLHTREGHHPPTPAHSTDDPNTPRPHKQHKQPHDSRHTAHHTSSNTHTNTHTTAHAAPPPPAPTRPTTRGPQPRPRAATQLNSTRHAHHTTAPKHPRQPPHPPHPTSHTNNTTNQPTTSHPHHHTTTAHQTQHYTT

SEQ ID NO: 995209 - protein, 283 aa, Homo sapiens
  misc_feature (74)..(74): Xaa can be any naturally occurring amino acid
  misc_feature (166)..(166): Xaa can be any naturally occurring amino acid
  misc_feature (182)..(182): Xaa can be any naturally occurring amino acid
  misc_feature (198)..(198): Xaa can be any naturally occurring amino acid
  misc_feature (272)..(272): Xaa can be any naturally occurring amino acid
EGVVLGVLRGAPFSRPARGVGGRDRGREMCVRAAARRCGRRAQGAAGRLGIEDRLPGRPGAMCRQGSGARRLLXSSFIVLSLLYGTVVAVSVRMARGRRYAKAGQRSMRQYDENRPGVDLCALGAVSKAGVYTSRAASACSPSIVVGTSHECSTRRALVPNPSRDXGGTLGMRRRCRLVDGXLAVDLTTHMTECSPPXTASPLSEHLIDSATVGQSNQCHVGNGLRRGSQHAYAHVATPAHGQMRMGVHDHDPREYPAMKPQSMVVHVVGKXLTMGDRQASAP

SEQ ID NO: 995210 - protein, 589 aa, Homo sapiens
GSVVCDSHTVSRYEGTRWLLYRTLVTDNCPYTYSATLDDIYADPALLLQLTTRKTTENVTLADGGLSQGKYEIHGSTLLMVHCTAQLALHAPTPQPPTPNSDSKPPNAHGPPPQPPPNTQITLRTGAANLIQATPGDLPNSLNTKNHPTPKPPANPNTPEIALHLNEHWRNPPLTTHPAPASALHAPSNDPNTSAPNPLTMLRNATAPTIAPPHQLAPHTPPNIPLLQHAHPPTYTSENPPRQHTAHAAQPQEEALGHTHSQPQGTHNPAAHGPIPSRRTTRKPHADAPPTTSTGTSTTHRTPNTPPPHPRRPKTGPHTTTHNTYRHNVPPTRTQHGHPPHAPAQSNPDPHPDNAQHTHQDTAQAWRNPKPSARHKTHLLDPQPHGNTRLATRPMHQHHNTTHTLPHPNESDHPPTVSQPSTATTRTRTKGHTTTDLRHPQQARPSSHHRRHDRQRPTQPTNPGTRKHRAHIETPATPRRLPRHDTTSNDHPDTNYTGKPTHTPEPPRHQKRPLTTHRHRTCGHPRPPASAPPTTRPPYGSKRRHKNRTTHSHRPQTNDTQHQTTPTRRAPTTQTTTHSPTATTPHAKP

SEQ ID NO: 995211 - protein, 223 aa, Homo sapiens
MRFMRGSDHGRGSTLGCLAVYSSSLPKWSEPKAWHKVHVLEKEANCGMRWSNQREGLPWRGDRAPVIGHQQTLVAGLPLLHSTRMLLSRASQLIQEPVTEKERGLKASSGLLAALRDRFIDKGSQAVLPIGPFPQKGSCAELTPLVVIKRRFISTQGTVQAVLSFEANYRRRGKWHPTVEPPSRQNFSSRIFPDERARTLSFHTAKVLHAVYVTLGPAKQRMW

SEQ ID NO: 995212 - protein, 423 aa, Homo sapiens
GKCRVLVAVTPRRYQLGRGEVEVKRELGEHVCCRANRKLEWCKNAAVIKLWTLESKQNHNSQAKHPSTSPTQQAGTTSTHQTTQTAHTPPIPCNTRANRATQTQHTDTRLDLYEPSTATRQPTHPRQHEAAVSNRTPNDRQHLNSGAPPLYHTRPNQLQRTQHAGNTQFMRTTTENTAPPTAPPIPHRAYTATPHTQPPRATPATHQPGPPAPRQPPAQQPTGPTPSPTASPQLMPPQPPTPPRHYPQQPRQHLTPTPRAPTEHSQRTNPTPRRYAPKHRRRSTYTTWTTSPQRTRPNHDPRPHPTTTPAQPNHPRPRHRPHTPQHSKPPPHPPAPTERPDNPTRPTCPPPRAPPHHLPTSPPPADRTTPTPPPARAPAPNQRGLGATTHRTPTTAPRGRRGRPPRTQHPPPPPHRPPPPPPR

SEQ ID NO: 995213 - protein, 160 aa, Homo sapiens
MSPYKAPPHKRGLPVCRKRQPCQCAQKSLLGTHTRGSNGVQTRPTCLRQYRGTRDRMSHPIQSGRTHTASNPTQQRHPTREREAATPSHTNKHTVEKRVHQHEQVDYYTPNCARDPAPPHNPAPVLKRHTNTKRNPNTPPRRTTNLAAIKKNNTTKTRTV

SEQ ID NO: 995214 - protein, 295 aa, Homo sapiens
MHQRIDTHALPLPRGLTHAHAPHMHRNQIAHYTPHTYGTTLLRRTHRTARHPIPPSSHTEPPYPTRDRRPIPLHCPRRRPPAPHPCPHTPQQPTPWPQPANTLNSQNPPRPHSAHTTHTARTRPPHTQHQATRSTPLDRTTGGESPEPTPTPPPPSLTTHRRQHTQRPQRHNGPGPDTEHHGTEQTPTRTTHTHTNPHHAKHTSANVNTPRNNTPAAHHNPHHNTEHAHPHADTENAQHTSAPPEDPTHRQPTRSHPSTHSPTPPPTPTQRRARTTSNTATTHARTPARRAHAET

SEQ ID NO: 995215 - protein, 188 aa, Homo sapiens
MVAISVRLCDVRMPKVFLSRAKDRAASALRPCPPELSSLDELPEGCGNGIPAGPRFKTYSVPGLQLQNSPGPVGPTHYFFGRGGEITHGRVHHWRTSHFHPGDLGSAYQGRLAHHPEYRVECFLALHLPFGFELGYPSALIDHLDTCHSRCHLYSKAAYICYTHKSRSRAADTVGLLAPTRSVYTCPP

SEQ ID NO: 995216 - protein, 453 aa, Homo sapiens
KWRMTPVQRGGPGGPGGPGMGNRGCASAAAFRHVALRGPGLAAVDGGRGRRDSGALAGPPTPTALRAWLPAPARSRPLAPPAPATPSRSPETRRTPPLLSSPCTTPRALPRTPSASPSLPCPAPSSLHAPLSDHTRNPTHCPPPTTATPPTELHDTQPTNPDASTRPTYTDSALTSPPPNTHPPPTPSPPPPLLPPMHHHTPAPNTPTHLPPHPHLPSPPPNHHITPQHTHTTPTPHPLAPTHNISSQQRTHTHHQEQHNENKHKTQNQAYHHTRPHHGAHGHEQSPQHTHTTAATLPPLPDTHSTTPPHTRTPPAPQTSPSPYSHTTPAFTHIHHPTPLTTLATATSHTPPTPSSNHYYATTPTPTHQNQHHSTPTDTTTRSPTTPQTHTHPQTPTYTNISKQHQTKPTPPSPPSRHNPPRPTTTHASNHTHKPTPPTPRTTTPNTTHYHPH

SEQ ID NO: 995217 - protein, 125 aa, Homo sapiens
MARRGTPPPFWSKGATNTGARRSQAAQWCAPLISRGRSSCRLKIWQPTKEPQRRGTSRASQAKTRPRGRTTSRLSAWNHGAGAQRASARDSSGMRRNPGGPRGHPDARGGTHKTDVRRRPPRQQR

SEQ ID NO: 995218 - protein, 62 aa, Homo sapiens
MDYMHGWHSYTTRNYKNTTEGIGPCTSPGAKKPITELKSTVAVEVTPNAQTKHHAPTTTKTN

SEQ ID NO: 995219 - protein, 265 aa, Homo sapiens
MGFVRGPRVCPSRAIHDRNAYVVKRAGRNCPGVQLYQRLEKAGRKECGPQEASVSYIAQTQFVRESLALGGDTKVTQCASKVPEPAASYSALDKTPHCSGGQRASKPLSSSGAVSSPRAEHLESRQLGGKVKFPWDPKSDSRTQPNEIKTEQSWGPKGALGEETGRAKWRIRPETRDTKRKRDKGKTPANWVDQQSGGGHKGAHCKTQTRTWEQSAHSDFAQTRGRPRPVVGALAHGKLTYEKPRTNYKKGVSITPEEYLSKHRV

SEQ ID NO: 995220 - protein, 340 aa, Homo sapiens
GVFCAPGPLSFRRCRGASWKPRRAAEWGAVAAGPGWAVGARSQRCTSEVARFIMEAGVSLGLRSIPQVVAACVAAIYHSTASLCRRITLFAYDPYLIATVFNCTWPLQRWESTHLRTRDIHQCVRLRYFNPKSVSPLEFGLPPSGNSGNSIVQCALLMLRVLRFQVSFQHPHKYLLHYLGLPPGTGWNRHSWQRTPVAVPAWALLRDSYHGALCLRFQAQRIAVPVLYLALPVSELRCRAGPRCTRGWQVFTAPSKPIIATLALPHTVSLGGVPRSGQLPRSQVRPGLPRAGWPHVSCVRAAHTSSLPQTAVYARHIVPARLARRPPACSFLSFSSLSPP

SEQ ID NO: 995221 - protein, 63 aa, Homo sapiens
GRGSRTKEQGLLAGVDPPPTLPGSLRKRALVYYATMTAKRLQAEAVRDPVRPSVNCEQSSTMS

SEQ ID NO: 995222 - protein, 408 aa, Homo sapiens
MPSSSIVPAHYPNDIPSTYTDRRSTDPIPFTTHNSTRATHTSDHTRNPSPQIHPELYRDATYHSSPTSLTTQLSHPTLILPYQPTTRTHSRKLTYAPASDPHPRTLTYLTPDSRHAPPRLPPPNTDTPTNPTQPHPPTAPTSRISKTSVTHHHIPPRLVRPTPQHSDHALPPPKHPATFNTPPNQTSNRTTPHAAFTHNRDPRATRLTHPHPGPNTTPPMHPSPPKRTPNTPHPRTTHSARQHTHPASTPSNLNTTPSPTHTTPPRTHTHTSGPPAQIPTPPSTTATHPPTVTTTPTTTDNANGHAHPNPPRATHTPTHHHTPPDGPHHTHTTQRATRSATPANRPRHPDQTHAPTARQHTHTPAQHHHPTRTPPRHPRPAPKHTPHETPPPHPTTTPTPTTHPRPTR

SEQ ID NO: 995223 - protein, 365 aa, Homo sapiens
  misc_feature (159)..(159): Xaa can be any naturally occurring amino acid
GKTVRPSSVDVEGHTGELVPQFSPHGSVLLAGALSRAQVISLVTFFLVFHCGSQRLRAPSLQPLCVVGGRRSRPACRFLHQSQRLPQSSIETAATEEALCLGECRLKFQTMIAVGSSGLIKRRMIFQSPMDEQCMPRHGWDIQLRDALLVPGRWATSRXGLIQSRGKGAEIPKTWKANFDCAMNSLPDIEEVKDQSRNKGSSAVRVYRMLPPLSKNQRKDRQSKSSRDATEQGKRKSCADSSPDTFSDGLSRSTLCLMTTAAYTSSRLHCRTWEVGAGLNPALVGNVPRPAALLPEWTIPSGKLVPEQHPRDPASTFPGAPQWASKLGGGYTELVTDERGKYLRALCEVLCHWDVTTKRGRGSTQ

SEQ ID NO: 995224 - protein, 131 aa, Homo sapiens
MGLKTISALGKVPHELYKHTAQEISQKHTAQHRTSQQVHTTARNRTSGPTKDIQINTPPAEKGNPQNDRHSNSTKKSDHLAHPQPPAHTQAPDAPNEHHNSQSITAQTHSTAERSDVHNADHAANQHAQRS

SEQ ID NO: 995225 - protein, 539 aa, Homo sapiens
IAAARVWRLDRGFEPGCPSVLLRQPGAPADLGYDLTPPWQQAARFIISGGQRPEFRRGLRGSSLDDVGIHPDPTVISGNPHLTELLMEPVKCQITQLPARTSTPDRTDHRCLERPLLSTHCTTDLQPRTVHPASPSYAACLSRAQGPGIFTSTLQPNLMRQHGSEPPANRCRDSCPPRPPWDTNHRAPLRCSTSPTLHPAQGPTACCPATASLPGATLTAPLAHDPHSPTRDTGTAWRLTWSPQTKLPRPRNASCGHHTMRATPTDNRHPRLTNPKTAPRHKGEKPAPNVIQQSHPKLPSPIPFPTLEPPNRRTEKLPAYHSDRRPAQPGPARRALTDPTSPKRADAPLKRSPHNPSTDSAPHPLPHTPLRDTNADRQNPTHVKRSEARAPSMSRGPYQPPPPPAPPTPSTRAPPTQVAPPPRPRTNHQPDPKRHKPFTHRPPTHSCYPRPNRPAANYGTICHRHEGPHATRATHGLNHGLCTRHTSSPYGSAITTTTTPSSSHDDPQENRNHHTPTRRPSPTGRRAPRHPTHKPQPVQ

SEQ ID NO: 995226 - protein, 418 aa, Homo sapiens
MSQDGGQMWDRCFNIRKRFDLQQLQSRTRCHRNVYWRTGRMKREQSQTRGLIEQSRELQEEHSRGIAASKASASCLQAALPQAAASHCTELNTASHRHTRAQTSLPRTCSYQPSIALARSPRIPLPASWHPRDQHHSSLKAATLPCTDYPPHQQQPTTPLAANLCDTTYQPTELSPARVPHTPSSVPDSHSHLTQTEHIPPTYCTQTPRPQPTKARTTPTKPPRPHTGHPPPAPHTLTPSPRTPTAAPPSLAPPPAPHSLHPTPPPPATRTTRRHSTGTRSPYPPPRPLRRQHPTQTNHTDPAHPTTTAPQHKPHAQRPAQPPDTSPLHRTLTRDKPEAKRMPKTHSAPPPGTPLTHNNSPNENTNPRPNGPGTKRRPQTYNTMRPDSNNSTATHPPPPEQPDHPLRNKTQTPEHPPP

SEQ ID NO: 995227 - protein, 137 aa, Homo sapiens
RRGFLASTVLGRKPGARSPSRPDRPLAQPILSTSFTRNSIGRHPKDRLGQLSSLAPGQLNTHWRPGSTSSVSARAARSTEFRVHASGKRCRPHEILPTQCTFEYGPTKSNRVARVTCWHASYDLATVLMLDRYCSMT

SEQ ID NO: 995228 - protein, 111 aa, Homo sapiens
MRGLGKHRTLKIVECNSTPPKGHNDHMLEMEDCLGFPGKPYPFCTLALGKHAYPRRETNLVEATQRCNRSMVTMCHYRLQKYEVLKDTANQTRLLKRIQIMIDKQTCSHRG

SEQ ID NO: 995229 - protein, 295 aa, Homo sapiens
  misc_feature (21)..(21): Xaa can be any naturally occurring amino acid
  misc_feature (58)..(58): Xaa can be any naturally occurring amino acid
  misc_feature (185)..(185): Xaa can be any naturally occurring amino acid
MGILQSKRLVQDLQRSKGDIXRSNRIVGRRCLWQAKLRRGGSTVVHELAVRRRLTLAXSTLTETAGTHSPMEQWEPDPTVQLSLGVQSSLWRHSSGRLLVDTMGEYVWYESPLGQGDTRSPSHLSLSGCGTRTWALAGHRLPPSRGSRSSCRSDIFHLVGMFHASVGTGSSADARSPSSPDSHLXAPALELSSASVGTVDVDCLFHCWSLWSPLLPRLGLPSFQLSKKWKPGLRPCVSGPLTALPGPVPSCAETCSRTDFGEGLPGIAHGWFLLPLCLPGLGVALGHFLKCQGQC

SEQ ID NO: 995230 - protein, 179 aa, Homo sapiens
MSPPHEINTCQRAAAILTFDPHNPHVTLTRSRLTRLLSDGHLQHLACRTAQPSPITATGASARSDYISAPHTHSMQQTTSRPYSPHPPHTVSHTLTPSTTPCDPALMWIVTPLRRDDATTRHLYPWTHGRTTHPHLTSQPQRTTLLYPRHARLYPTQLSSHSPDTPPTKTSNIHPNTTI

SEQ ID NO: 995231 - protein, 190 aa, Homo sapiens
GPTGRWGAAPHEHQSRVQVLIASRMADQDPAGISPLSSDRVVASCATWGRVVTIVSFDELAPWDGGESVRLQIVMLASLSGRAMLSALRSHVRVGSLVAYYSILPFLSSEFSSWWNVSFRVIARVRVLASLVVPCGPRWCRGCDQLGISSTANAVFIGYRVGCLSSEALGEARGPPRDSLLVDASPPNKR

SEQ ID NO: 995232 - protein, 149 aa, Homo sapiens
MGALLVSDAEGTQTLKGNLWVCWEHWLTLTDSEYVDAHLTPTFGRPPLMQQTGLFYLSMVYPLQLLCTAAAANARMTLMRRQHDQQKRESLRIDIQHSHELLMTDSRNQITNQGQIFNPHEMAQYISIEQTFHTPSKNNPMTHIHLNRT

SEQ ID NO: 995233 - protein, 99 aa, Homo sapiens
MPAAVQCVLRKLLEEADGAPKREHSVSMKVDACDVVKPIVCRSCHGCALCIGDSGHRTGGLPLAVKRPENEDASRGNSEEATNREKSNRVLRTNIMPRQ

SEQ ID NO: 995234 - protein, 321 aa, Homo sapiens
MARLLPKSCGPMFSDNRRGQVSDYVTGALAQGAVAGLRVCVLTWWKAVGVNLYAQRCPADMQGMTQVQSRDQCCPVDTVTNSNWRLAIEAEQEARWWKSDEVDSLVTSALVQDCLREEIGSRLRDTAGKPNKSSTGRGYTVARIHSSSNPCAEWQEHPVPPVQSRQRIRTSHRGKSQLQQIRLKKHRHHDVQCNLGHSHHKHALRHDGAVQNKPQGRATARKKGEHSGRDTQILGQGTHNSLSDGRLRVGANHSDWSVNHRDERTIGAVSLRRRQLCTPWRIGIPHNYPGPEAQRREHWGGEDEPQNSATRTGIDDNPSTY

SEQ ID NO: 995235 - protein, 425 aa, Homo sapiens
  misc_feature (45)..(45): Xaa can be any naturally occurring amino acid
MRHPKAVVDCGWLLCSERLLVHCAVRGVTMRQRIPGGTDSSDCQXHRICRTLLSLGPQRTGHPSGVADPVTYAAFRTIMDQCPRAQSSGTNTAERFHTDRFVELKRTDRAAELGRALRRWTRGFSHVVLTVVQHPMRKMRVDAMSPGTTRTCAGSNAHESVHMLTKEVHSNDGEGMELWNDGTRFNAFGGWYVLEDAWLGSDGRVKTAPGARSKYLVYERVEKVGKGWQQDDPEAIMRGTAKRNHTHYTLQEKPDTSDSHRAEPNSQRPAHTQSHLEGDTQGSKGARVRPNSRAKEGPKQPGWRQREEHKGRTTTDIRGIRGNEQQSDPQAHEPLGDRSNNEEHTRGQTHGESHPTRTTQQKARRHHHHPRHNTKYSRKPAKSPATKKAARNKGPGTPGEHATRAPWETTKGPQQKTTQHATTPG

SEQ ID NO: 995236 - protein, 103 aa, Homo sapiens
MRVISVCKVWVGELSPMWCWVAQHYVQKGRYAGRGDTYLSGGSSRVIRSGQTGALIWHSRGETVVALLTPQDRESFLPEMRVLTSGGGGISGAQVSSPRALWL

SEQ ID NO: 995237 - protein, 555 aa, Homo sapiens
AILSVHCRDGNPSSVKSIDGYTEFLAGYARTCGSLAEKSEGGTPCWRDLVLRSDTLVHGIIGAQCISKKRHITFWSHGYRQGTTIERVHSEAKKEQRVNELSMVRERVIQNLRRDEYDEELDRRSVDLPATVHKARVAGTSDTYRSEISRDEMQAEEMDCILRVETIIKNIMGETERMQHDDCGDQGQEAAWQEVLGNARGTFARISKARIAWAHEFSLRQITRLWTRARHRTEIPRLTTHGVTHTLVNFWAQRGYEHNWQRAQRRRKVMETPKGFALTEDTCGGVPDKEIVSPLKTRKKVAHASCLHECEHHESSWAPRYSGIKEKTLNGSYTTMISRIETPARGSHAGRGDNTWEHGHKKRALHGRRERGVKQGKPYMGYVARHFTPLEGIMCCTAKRVAIQVKTHKVGFNHTWDPTRPCAPNSGAYNAGVNTTLIFLPPNVVLIITERGKTECVIPAKREKVPHIETTGNRRFTEDASNGRRYCLKTRRKRSLSQLAKKNQNIATQLRDQSLRYMNTHTIDHDDTTSHLYGAMIFDVTVLTCLSSQSVRDDQ

SEQ ID NO: 995238 - protein, 100 aa, Homo sapiens
DGGGYKSRTRRLPGLDDPSIPSSHGQQAERDFRLDVDQIMVASEYSIGSGPKEDRCKPGRRMESLSLTQRSNRNNSHRELYRLEWYQEDIAHSDGVLRAR

SEQ ID NO: 995239 - protein, 299 aa, Homo sapiens
ARPRASPGPPSQSLTDAGPRASPLLTIRGRAVISGEALGCCDAGFSLWPSYGVTWSLCNEAPEAWRMEHCGAARYPCGRAALDGNRYPPQGGGCAGGMPHGGWLGVQARGGGWGRAHGGGWGLSFMVVAGVEEVAHIVSGTSRVSQKARRSTWLVLQQLAAEVVRALAGLHAGKCHEQAHHTFLAGDYEDRYYRENMQRYPSKCDYRAMDEYSNQNNFVHDCVTSSQIKQHTGHHKQTKGRNFTADRRLALMERVAEQMCITQYEEGNFKGLFTTRRLQAFVTFFTYPTVWNPSSNSIH

SEQ ID NO: 995240 - protein, 247 aa, Homo sapiens
MGKVKVGVNGLVVWALVTRAAFNSGKVDTVAINDPFIELNYMVTCSNMITTHWIFHGTVKAENGKLVQHGNPITSSRSEITPQIKWGDAGLLRYVVESTGVFTTWRRLGLICRGEPEGSSSLAPLVTPPCSSMGVNHEKYDNSLKIISNASCTHKIEFSTPGKVIHDNFGIVEGLMTQSMPSHAPEDCGWPSGKLVVCWPRALQKIIPVSTGACKDVGKEIPELHGNITGMTDRVPLPTERGDRTGA

SEQ ID NO: 995241 - protein, 337 aa, Homo sapiens
MRPKLIDTKLSYVLHGSTTVLLRHRSHGSHAENTMFLSTLPWYHRIAEDSANGVARLHGAQVVVEDVFALGHAMATRRFSDENRQDALRRVSRIGLSDSGQTVYMTYKETCATGVTVHKGFSGSFTGLIEEKGIKCLRWQFLLTIFWAHCTWTRPPTASAVEGLQREFTRLIGRPIFAHHGNSARGPWETPIPFPTYEPLFDRATGEGTGGARENELNLYMCISTCEPGGHSMYPNQRPWLYHWHRLGTSNPVRAHLDSFGALTAILPVLGQAFGVRTPPCLCGVGLEVGSASGRWIPSVRGGVQVQLGPLSLAFSLVDAREPWLSSLWTQYLPDFD

SEQ ID NO: 995242 - protein, 188 aa, Homo sapiens
MVRASRGWLALTPSRQEWAMISLPGPGDQTCCGFCPGAGALGPLAGQLQMDLPANRLQAGGGRGSGASSVVHLATGEVSSSQPWEVPFVMWYFKQKEKEDQVLSLHQMGSQQANLEYPWSTPCPPWNLSLRLEGLQEKRLWALQLSVNVQDKQGKSMGPHDQNLESMYWFLQSSILPSPVLCPCGCKL

SEQ ID NO: 995243 - protein, 296 aa, Homo sapiens
VGADRSVRVSPSLRRWRVLSPLISVYSEQGESSWLKMSNSCVLRVFNVSYSSQHSREHFGSHQLAFRMTSMTTGPYDCQMKLPGQSVLMAGVLFDTGGQPVDLVSIPEFDCVGGTHRSGPGVLRDNMVSWRAEVFAPTKHLDTVWASYRRTQYQMTIRQSWMLACGSSNSVPELGVMFYRFIVLREGPWDFPLGKLKYNSVKATRRPTVSCLLLKKLKALDPEYQKSLFLSANEELGTGKMRKRRVSAQGPCIIYNEGYGIMQASETSVNNLLSVGKLTCEAVPGTVGVLLGEGFG

SEQ ID NO: 995244 - protein, 194 aa, Homo sapiens
AGSGIRGTGVVVPEKQESERRSGGRVLWLFRVFPQIRTFSRLFADDIVTKMWNSGFESYGEILIGVMPGRTRKSPGGFGSDLQLRSRRYWKIQEPEPSDIVPCIYISAAFCHFGVMNVFRIGNAEISQAHILVGIIRHAGEVLQTKMVQQKLDDADWTVTHGSFSHVGLSTDDEPAVKTLWFLQKHIVKMWQAT

SEQ ID NO: 995245 - protein, 156 aa, Homo sapiens
MWALLGRRTALCGCCALPAVWPADWSCSCVSSLLPSMPPALLLLSLLSRRRMPRVTSCDGAPAVSARDRAVRGPRCVTCNQACGPDIALTTGERPQRSARTPLMTALARDPDDTDPARNADDDWHSLASARTATSIAMAIETERVPTQRPTRLSSS

SEQ ID NO: 995246 - protein, 220 aa, Homo sapiens
MTHLHRNHGRPVVPQFGRSQGLPVVAQGRTDITLPNWGSVPRRNGGYHFWAIRNRIPHFYFHATDTCGRVLAESNPARHSGRGFFQRVSGSLGLLSIAQEKSNAYGKTHGAQFETGLYERPQELGQASARFGPAVQGYEWPPQESLREPRAKRTLAEPHRGPTEAQSGRPARDPAKEARTKITGPSPTGRAKASTVTPEQIGTSMDTVRKTPHHPNVQTA

SEQ ID NO: 995247 - protein, 114 aa, Homo sapiens
  misc_feature (20)..(20): Xaa can be any naturally occurring amino acid
  misc_feature (30)..(30): Xaa can be any naturally occurring amino acid
  misc_feature (60)..(60): Xaa can be any naturally occurring amino acid
MIVAHPGRDFPSLPVIMGRXEANKSVGARXVTRGTSPVMPMTGTRGSRKGRSHASFLGVXISQRSRDPRSSSRALVGSRKLVPPGLGAHISPLVFRDTLHRYISQKGGALPHRE

SEQ ID NO: 995248 - protein, 320 aa, Homo sapiens
ATMKDTPSLASLIAGSVFFLLLPGPSAADEKKKGPTVTATVSMTYEIADDDVGRVIFGLFGKTVPKTVDEFKTALATGEKGCGYKKLANSDRVPHMDFTESRGDTSSGRRWPQEERASTVSALPDENFITEDTYAAWHVVSNGRRQQAKTPTASQFFITTVNTAWLDGKACGVGQSSRAAMEVVRKVVEHPTEDSRDKTPEGCDRSQDLRKIEGEEASCASPGVGTTGRPFPLEVTDLGRAMDPGQGVFMLTGPVLASGEADHPPSTFGIAFGLLYVETTTGLANNENGEPEKRHTHYKHTDKLCKLHRNSPSAKTCSLN

SEQ ID NO: 995249 - protein, 329 aa, Homo sapiens
VAEKFAIATKEGDLPQVERFFKIFPLLGCMRRDEESSRSTFASRWPAKAEENLLMAAGDMDMSDRMERASHRLQIRLTSSCLNGIARIVETHQPIVETYYGPGDIYNLIKYLQVECDRQVEKVVDKFIHCKGSTTSRLRHVHEQTDEKFYIAVNKMETKRIWMRHPEREVILMKRRHGELYLRFLEEEDELCFEVGDSMASEEVEEERQKCLDILLNEMPVSCTMQELIGYMFTKEESLHEVDCPISCVSGALWVRPVDSQLGMRRPCSKCWGDRRAQMKLLRLTPAPRRVLRIRKAGAHDTSDTAGKPDTTARIHVISERLTHEETQE

SEQ ID NO: 995250 - protein, 524 aa, Homo sapiens
DAAYTYFYKGTSSTGKFDMEAPCGVWARAYPKVQSLAGHSMRHGERATWKTKGPRMDPNVGPCRAVSTRPAGRCQESPEGPDLSDKRADRCAETAAMGDLPGARLTQRQRPSVVHAQRWLVVPSPCDRKSMCTREPAMQLSCPLCCVRSRNKSLHQRASMTPPFGALYTLTVLISGFHSTISARKSWHHRIDHVDHSRMNTSLRKVRTTFPEGSNLACYSDPRRRQMGINPDPYIQVLDELMTQGNSDAGHTYIEHNEMRDYLQQAVSILTPISHIRPHKLNKQRTHTLKTKSITVEENTPTITYRMTHPTNPQPHRTHDTRGYAKRGKQHKRRHKSAPQQANKPPAKNTRQQAYASTQQQKPQSDNHTRPTHTQSSQHNTEEQKQQQPPRTERKDNPCQSTMQTQEPTDTNNHQHQNTTTGTTHSKHSTQRSDNTHGTRKSIQTIGTDQNRLRSLQTGNTPHADRDTGHQRALTNERADIGRQYIKPPRETDKPMPTNERRPRRLTQKITQQHTSQTSTPHSW

SEQ ID NO: 995251 - protein, 266 aa, Homo sapiens
  misc_feature (108)..(108): Xaa can be any naturally occurring amino acid
MRLRKHPGSCTDSMSWGASYLELLHSQMALQESPVEVIPLKQYCRTVDLSGSTLVGSHKACTDCTVIDKAQAFLSYLASIRRTNIYTLEHSKSITLGFRSPAALITWXFRYDLVGLNYFLDWSPNLIRLTGSLTEQPQQAGTQQQTTHDRHTKHTQRSTYNTKRQTRRDITTNTNDDTDNKPSQGDNDQEEKERTKRTEIRRHREQKTTTPDAKHNKTTRTRTTHATTDKADHDEETNRTEIHTTKRTQQKPDERESVRETKEGET

SEQ ID NO: 995252 - protein, 440 aa, Homo sapiens
MGKDKTHINIAVLGHVDSWQVHHYWPSDLYNAAGIDPKTPLEDTFDDGGMLSTGKRDSFNVCLESRTKPDTADALNRGTHAWHISLMDHRRPAQYYADYHLSAPDDTSDLNHKSMQFTGTISGMTCDCTMIVSLHGCLDRKSERLCILHMTMAHEPRRGHDTIPGLPTNRPKAQHKNYTGTEQTHTTTLRTPTWKPTPYSTEHGEQSKEQRANGKRQRAEQHQEQTRGTTKPAQNKPDHTMPQTHRERATGEQPRPGQPKRAKQSHRAAHCHMRHDNADKRMRQSAQGEKPRRDWQEPPDTKPSNAAKNMAPSETNHHDRTSTPQGPTPTQGGTKERNQKDRHHNRGHTRTEPSRRPPGTPQPSTQRLTPGRRDTGQTQNNTGGARRPKPTTAPSPKQTAEDNKADKTQAKTEEEHPSQHDNATPPETARAYSHATTQKS

SEQ ID NO: 995253 - protein, 292 aa, Homo sapiens
MDHGSGMCQAGIAVDDAPRAAFPYRLDRATPVHLVHGRLAGAMVPKRSSIRVVAKRPQEQGVEILTREEYPNLSNVYSLLNWGTSIGTKNLVQAHSFYYKLLRGRLGVNTTNARLTLTASPLNAPIGPNRWRRMMKSRIIGFDDHLDALGPLLLLSQSTARRMSLLGLLVAPTGIVLDSWRRGHPLGWPVLPTGYSSRPPGALFCVVRPWAWLGDRVAGLPHEEFSLRRDTGCVSTGDREKSCAAINGESCANVCPWTSEQEMGTADLPLLWRKVTLAMAGIPIGMTVRVRG

SEQ ID NO: 995254 - protein, 237 aa, Homo sapiens
MPGSGEDDERGRGGGRIPSQRRVSIRGGSALGEPAGCGGGSGGSLASSSSFLTVQPLPRLLLKGEGGSQWARCGSRLRSALVLVGWGPPGPGAGRGRTGGGRRCGMEVCSSRERGLSLTVQPYSSAGNAGEFGLSPFYCLQNNELCGWPAGNITGTLGPVFKPPVQPGRTDHTDGQRDFRRTAGSDGKPLGGLFDFIQTFLLPADSRALVDEEKQASRATTQQQRKNNTGGANKVEK

SEQ ID NO: 995255 - protein, 107 aa, Homo sapiens
VLTDKARNRRCELMLAGGPPGARGEAGVRPHAACLCSMAGSVVLECAEGGESSSLVPTSHRRSPGWVSGCPGLGIARWESVAVWTVDLGSYVDSMGGSRRNWHRTTS

SEQ ID NO: 995256 - protein, 150 aa, Homo sapiens
  misc_feature (3)..(3): Xaa can be any naturally occurring amino acid
MRXNNPYEGSYSFVRSFQTIRYSAEDKTLEHVLIGAPRRGGVTHTKRRPQETAKHFGDVCDEMHTQTLYSDPVCCGSFWTCRKNPSTFGGDTTIVIAVVYVREVPIVTTIAARGPGVWEGCRQSWNAQVRNLNLSACGRKRKIGRLSTEG

SEQ ID NO: 995257 - protein, 214 aa, Homo sapiens
  misc_feature (24)..(24): Xaa can be any naturally occurring amino acid
MSRVIGADESRVTEPTTMAPQQLXLKGREAYKGHLQWELVVTWALAAATDVRNYHSDSPSYGLSLSPSTVFEQSVQCARLNGHRRLDFRATEELVIGRLSPASGARHAVPLCSGSQRKPECGSSSGMIAACAWDFQAEPRRLWLTEQMSFNALIRIDRVVKRVSVTLWRGCHPYHGLGPSYVTAARLASYSQSKQFLLDSGYFSDKNLVHFCAS

SEQ ID NO: 995258 - protein, 383 aa, Homo sapiens
MTRVTGGVSSVKRLARSLAWQHARLAPRLPSAWATSLGAGEDYRDPSTMNALLRSNGRAAAEEHAGHRAVDGRRRSRAWKGVVEQGPKLRPFYVRPCVVLISNLPCAADRAVGVLLIFRCEVASLNNPDEAAPSMDFLKQPGPRDLVFIIVVVNILHHGLTGSMKPLMDMAPQQYVTPRSLDASLPCKLSCRDPGVAIPVKVSTSLHMAVPRLSEPRLASSAHVPGSAFALTAGKQPPGGHVWSLSRCSQEAVPLDMWAGNNRPDGQTWDSEESLCQRRVSNPVRHTQHVRDGWILTGPRHRGQRTVADRTRGEVLPVPKEHGPAPRGAVTDALEAQPVTPTRGSSRKGQCTRARLTQGGCDERRTVCASYHRGGTRDAKNAR

SEQ ID NO: 995259 - protein, 408 aa, Homo sapiens
GPTCHGQYYQAEPILAIPKSSNKKSESGYDEETTGNGAAARRYRSHEIEDRDDSKERPTSFLPPEASQCQARQACNSRVERGLMKNNSGIGGTLRHLEDRTGPLSFRLLLYEDEDDFDGYPCCYVTPSRLRSSSSRWAEIGGSGYPFTIEGFCIAVVRSPCQLWGSREGPCTASSMKINEDISGEAGFRLQRPEPSSGPYPAGALDVLWTPSEAKSLDPMGMEALGTKFSNRRVERLEETRLEENDVMGALGFDVEMTGERVFHQRNVEVDWHGVDVKEKPEGELGTTRAKHVLNTRQQSGATEDLEGEIDEERGLETPRGETEKLADNSQRSDLETEGTLEQQQQETTRNLKVKQQKRKRQKGKKKTRPEEQKSKAQTKVSTHEREKCNKQQSKQLVPLSQIRLEKE

SEQ ID NO: 995260 - protein, 470 aa, Homo sapiens
GEWLVCSARRGPDCDPGPAPTGPRTWTNCSPSSSRTEPAQAIVDPICWRSLSSHQDRRGMRFQLQVRGALRGQHPRREEHRYHQDPHPASRSIGYTRTRDRAHHPMVTKDPTLTGLTPHEHSHRNGLPRHALLTDALTPLPGPDMTSTEPRNLANSTDVTHTRDPATQANSSTSPIHRPKPQSTSQAPYSTTQRCRTYDAELLLPAPAYPERDQTPGTPNSASDPSRPCPDMTHHINHHSFDTPAPPKTLAEAHEIKQTATTQPPSNPNLRERPTRKAIHKPSDEHSDSPHTQGTTRKRHTTTKTHTTARRTKLTQQPHHNNTTQHTKHKTTHQPPHHQHDKHSATTNTTRNPPQRPPQTTPHRTTQPPTQTHATPTHPTPTATTTTHHARPPHNEHISREPQDLMPKTRRPRPRQTTEATQPHDTHNPPTHTHNSAPPPPHPTHTHHTHKHKTRNRHHQRNAARPTTRQ

SEQ ID NO: 995261 - protein, 112 aa, Homo sapiens
MAMWKSNVGMEKQGRYIDIYLNSHSLCDETQENVLEVREDCDLEFEEQCEEVVELRIEWQAEIVKIVHESCQCERRNEREEGEGSEEISWKTMIYLCKCRAMKSNIRNNHIE

SEQ ID NO: 995262 - protein, 136 aa, Homo sapiens
NLRAQLVLSSQTTGSRHKRLCEGSANRASYILSELVSPEAPIQGHSSGDGLQVPVQWEDPGTDSPGTAPCIDRAAPFFERSSSKRCTACPAALMEPAVLPPKALRQPRDHGMRGPDGGSSGMSDELMSGGGNGPEG

SEQ ID NO: 995263 - protein, 359 aa, Homo sapiens
PEVAHSDEEGYRRPGWTPQRVSEITNAWFRAMLTTISWLLKVLTRVVGDMGPKREVHDVHFPQYRSRSQVLTRAHTHYLPFGTLAYLLGFTRSRLSPVGTPSPRFEYRTVVGIDKQGRSRIARLGSLLIAEEHRTQSRTQEGRSQGGIREVQRIEVHWSRFRIGNAAVPDDMGNSNSEGAGQVSRLRGADMNLVLQRSSIVTGLIEGSARGGLTRSHARHSRDGRSWSVVNEQSKAGYRDQPVGWEFPMNSSHGTIMTVSMHEGLGRPGPDAEDSTSPGLCGVRLKTPDVGDVSKNHPLTHDTGCWKLHLQETMGSDLHSAQEAQGSCASHGKLPKTRPHSNWRDQQPAHTTGTQPKKQ

SEQ ID NO: 995264 - protein, 44 aa, Homo sapiens
MKDPGENARENLDPGPSWDVLMLGPRYHMLELGPPKGDSGGGGH

SEQ ID NO: 995265 - protein, 148 aa, Homo sapiens
MAQKNGTVVQRLSSAFQVCRPPLEDTSPCLMHRPVMESHPDLERTPPTKPGPPEAASPQMFSSPRKLPMIVWLTVQVSRQVTANGLRSWLIKSRMPPQKAQMVSMISLRLIMPRMCPTRSPEAAFTCHICTPKGPHADYDFSQAATNW

SEQ ID NO: 995266 - protein, 112 aa, Homo sapiens
MPNRGYTTRLCIRSTHRGDKWCGDGRALSSRSGGRRDRCTLTLIERVKAMLGGMLGGRTLDWRLHVGPMVSVADTVRANGESATGGHAREPETNKKWQPWRRPTLAGWRNDK

SEQ ID NO: 995267 - protein, 281 aa, Homo sapiens
KITDVWHLRFKRRGTHTRCVDAISISSIVNMGQCGGASGCSTDAYLVVPERSTSSNICADIALHPLGSLVLIITNPSSWMLAIPKQDNSVYLQTDDETATTCACLYMSLFLRQTMQDSCDRGPDDCTFVMNGGRHVMPRIASGVQGAWCPRKSRIVPCDGYLMVHTYKAGMRANREVLAIDSYCCSSTWVQGAMVRYPVGGLSDEAPSHQGVPCRSRGTAFILVPTGERLGEIVLIWIQARQRNARRTTRTACARNHSPLDFHQSKMELASKQDSGVSVLP

SEQ ID NO: 995268 - protein, 245 aa, Homo sapiens
GRGLAALLGHWAGGVCLVVLVMIVVTENSSMREYQQPRRIIKVTRRIVCAGHSVEILKHGEGLGVMSQLCCRDHHNSIVRARVDELYLVEKGFTGSSVFRPLMSRPGATCSNESGAQESSEQVPAKMPAKCILSRIWESARSKSQSLITLGRPVGARSRGNCCWWSNLQGVPPAELTGLGLAETSIGRDKTLVMVEEETNVTGSLRLSSETTLWTTVVYGLRSHASYLRMSSPLGYVNGVPDKVS

SEQ ID NO: 995269 - protein, 264 aa, Homo sapiens
MEMHAFEGTDPSTPDNAGIMQGILRGAWDPWGIGHDSIGHACQRCLDCALREVAPILVHNELELMRMLFLEQALPQADVALVRYTRYEVSTAQEESAGLLNVVSGSGAPQSARQRGAPSGLILRPMCRQNSDCLLGGGKAGLMTQVSWDQTSDAGSSLPGKYAEERWEVVLSFMVGAPPKCTLSDRELGSGPQQGGSLKSMEPGEPAGFTSVGFQFLFVGHPGSDLELLVGSIWRKARTGGPGKIPFPSQEVSGKRIREERGHL

SEQ ID NO: 995270 - protein, 399 aa, Homo sapiens
GAGCGAQSQRARWCACCGTRRSGTGAGVNAHGSAAAWATLGQSGAVSSRANWAAPGALLERPVLVLSQLRSQYLRSQMCPADILNEARRAGRTPSLCPQHGTPETDDSHVDLPAALSLLPQLFPPTQLPAELLDDYPMRTGTTCLLSSLPLPGADRPLPLPTSLHPPTQCLMRGPIVHGACRPMSTPAPATTIAGDQRLHLRPSTCPTSVTLSPSSSSDNCTPRSGPIHFDTPCSSQRLENRTIRIPCHQPVTNSRYIRPPYSLSVYYKETGGALQTLTPRPGQRKSEQYSHDTTLAGTLRHLTARSRETRHARSHVTHSQAPHSAKHYHPRNRPLHSSPHRCRPHSTSQTATRTHTTTPTKNSHHPTPNNIPPNPTNSPPTPHNPHPHNPPHPHHTPS

SEQ ID NO: 995271 - protein, 119 aa, Homo sapiens
ANLSEVSGCVIASLREEMFVVSVGARWAAGVNSHIRIDGSRIWSWCDGVALEGPSDSEHPRMGPTGPSPERLSAIRGQVRPTGGKKYRSDETLATDEKYGMTTVMGYRLEESCRDLVGY

SEQ ID NO: 995272 - protein, 131 aa, Homo sapiens
SDDITSAEIGEQLRMEEGEQGDPQNCNPGSSMLDVDDIHASATDPVPHSTNGSTMYKVISCQIGVQNTITPTTIVDMLHWMMEDPEAIPRTSTSCPGSEAIFRITNDGTHDNRSIIMATERSRAHYCQPRG

SEQ ID NO: 995273 - protein, 505 aa, Homo sapiens
  misc_feature (294)..(294): Xaa can be any naturally occurring amino acid
LGADGERGANMAVDSELGFVCKIYVNPAEYPFASNSRLAAEELHTLSLAEYGLRYIKTVQASGRGQTLAPGADDSVKARSGKLLCAFAVRTRSPPGVHGLRRVLEDRMCAGPVLGYRQYGGVACDLKGPEDCNAREFNISLVGTKESNKDAHCAVTQKERRVGDERTKGYYTTRLERILGATEDPQVRKPEQTSDGVTSRYARDQGPSQLKIPEVRYAENTVQRGMMSVKTTFSPGITHYPKEMGSPRTRLARQIYHLRMSSTWPDEVLRGKRYLTFAIPCDWLVHYARLLTHXARAVFEDHWSPPGGWLSSTGIRTEENVGEDAKFWPPHENKVGGRNIGEYGGSGHFAGVGVWSVSDRRNNSTDDICVESVNFNTENLNLIRYPPLLRLRGSGNVRAQVTETLQEGKSRSRARKKRKHIAAAHSPARATLLRTQPTTSNNRSRTETNKGSTSANEHAKTHTSPKTPSGRHEHPSVGERKRNGRARQQIARDDTSAHQNDITKW

SEQ ID NO: 995274 - protein, 242 aa, Homo sapiens
MPVNESGLGVALLTLGWRQPTVETIRSTGDQDKEETIRGAREFGRDERAVAGGPSGSVMSSSESQARTEEAQWNGRVKRREESVLESEVNSEENSEITVRSVVLSSYMSSLHFITENSEKSRVSLYSPGGARAPEMNEGLFGTSLMAHDVQEVMNLVAPEPMKTKRGIYTEPDWISHNPRGELWNVRRSAALCQEGVWRNCHHDMQGVETQFEPIPRYVWSQSTYSVGLEKACIFEIEFALG

SEQ ID NO: 995275 - protein, 269 aa, Homo sapiens
CAWGVGFAQLHNLDEAVGSGGEEDGEPGGGGCVRRRRRQRARREQLDAHLPLLQHLLVLLGLPLRLPALPPGCMEACCRSAWRQTGGTSLLQPPASPVRRTQPPRPSWRLCGACRRRKVERPWLDCLWIVLALWCSSGGRGPPTCVHGPRHTYRKGGYVYFEPDPHSSVLVAVRCWLQSLSFRWLRGKDYTERPGLGAVAAGSPCRGPQGLGAGNVTGSGPGGHAVGSPPTPGQQRCVASPGGSRESVYPPDEMRKVVELKERHEGSAK

SEQ ID NO: 995276 - protein, 411 aa, Homo sapiens
ADYESKGIKAHFNLDEQWLLSSSTGAAALYFCDTWYTDSAERGTRTLTQTLATPLSSLLRARRLPPPAMPRQNWMPDYMSKAGNTAGATATQGDATRPTPWREHRLRTPPRHWTRPSAGPQPATEHCAYLKAPPSSPLAHHIQRGLTSLDTACTARPTAANHEPQRTNWAEHTPVAGHPRNTHPARFEHNRPRKGAPSPLARDRLADPKLPKEAHYRKRTVQAKPPDPGDTAEAEDLASIMRPTAPAGPPAPQPRHPAHRTQAPDAHPPTAPQPVPAHQQTPRTPPATTTTQRPTHATRPTTHRAISPLQRPHTTPNTPRPPPATPTRNYPQPDHQPEHQSHETPAAGPTHPSTRRERNTGRATPPRDKRHNTRPHTNTQPTAKHSPQPPAPRHTPLAQTHKHQNTHPGHP

SEQ ID NO: 995277 - protein, 258 aa, Homo sapiens
PGRAGACLLLCAVRVCRLCVSPSCLGLALACASLTCATLYPASLLPLLPTCLPRHDTLCSTTSPWGSATQPSTGIPRDRTKPNLREPGHSLAKSETNSTSYYHLARLANWAFSSYTSKSPPNEVPQTQTPFLHRYVHVQTAAWDQGHPRPNTTCQLKPKESDSASSQVLIPEVRLRSCKHNHEPKWFPRPWITGMSPKPILANRTIPKHFGHYQKANIKHLWLTQQRAVKGSHPQARLRSFPPAGPQSQDWHCLAPMR

SEQ ID NO: 995278 - protein, 182 aa, Homo sapiens
MGAFGLGGAETSCRAVGEEVYHGRHCQWESQLSPGVNHPKVGTGPRGVDPGNMANREDTLTSNQCKTETKQAQQGSKRGGESQRRAIPGRTSEQAPTPGIPSVITVIRYATRCQQGDKEGPMRLIKNFRPEHQSGKTATGDCYEDTNEGAMKCSSNMHSNSVRIATAARQVAQTTQPSSDHK

SEQ ID NO: 995279 - protein, 302 aa, Homo sapiens
DAAYTYFYKGTKYWKFDNELPAGWMPCATPMSIHAWTSCVLPVMHCVSQCPRTGPDCVTCAAHSTSHWRRDMNDPVGLGTDCHGCVLDTVVVWDLRGTWRATYLLCAQSGLQPTTVTRYLWPIDYDRLGTELAKNLLHVNAACGHGVTWLQDRLRWHLSLTSRMASACPSPLSLALYLPAYALTRRHPTHYRHARCAFALATAHAAHQPRIAVPYSLALTYTFTHHLGKTRRHLLPSAHRTKRLAANPVEDRELPHGKTATHSRVKHRAIDQSTPELAEVHHCIGTSVLRTANLKTIPPRRE

SEQ ID NO: 995280 - protein, 434 aa, Homo sapiens
AEHAPYWERLLGQRTSLQRDSMWLEAMEAHTADTLSSVPAALGTLGHPGRRPMTPFRGLFRGVLSRAMVGMRIPTGRDTRTAIDECGALLPDSRARPRKAQWAPQLRRLLLTPGAQGRETPVPVACSNDMRGKRVSPDLAPRRLGSLGQGDPLSDMSRWKNGHNTQEALTGQPQIGHSPLSERPHAQSNGRPRDRTALGNRTSSQGWQQGETPEGTINLGPGRDHRVPPERPCALHHERPHPWPGATRSKPRTRLRLAGSSIGAPQTLDTNARRMRQHPNKNPVEKHLLHQGVPRPLHTGATGPHMWPTPKERSVIIGTPSAPSTDEAPLDRNRRGLPNRQTGCTTGWPRGGPQREPAHPGEAAYPGMRPQPIWVVTNAPGYLRLNTALGESGPPTVPPFRCRQNGEAPRDDKGKLGSDSNMATLVRHHWLWHL

SEQ ID NO: 995281 - protein, 347 aa, Homo sapiens
MTGGWPVALEPHLMLPVSSRWGQLPSGSLAGLLAGGSWLAFLASSSSFLTVQPLPRLLLKGKVEAVGSGGSRLTARPAAAAPPAPASGGAEPGWRLAGRWPAAAPGQGVRVACHHFPGLGTPGELVISPSTASNTGGGGGVHIQGPGPVLNLPSAAAAPHRGPGLPEAAARSAAVPEDYSVFSPYPLPTLPGPLAAEEKQAQYVESSSSRCRTAINLAAGPEAMRRTSSDGPHVTAESRAFHSAESPAQQSASSPLFFSKGSRARGVTTRILAQNHGATPQACLTLTLTLLSRHSCHCIPRSPRRQPLSAAHLTPPPAPLPRHHTHRRPLAPPPSTLSLPHPCPPTF

SEQ ID NO: 995282 - protein, 357 aa, Homo sapiens
PVADSLPWSSVMYRGTAATRHGMAAPLAAPADSSRPGRYLRLTCFHHELPPGPCRADRTSPRQSGLNNTGNTGTRRQAAAGGRTDGRPRPGDHRRRLIGPGLALHSRPVEAHCPFGIEPHAPRNPASLAVPHRRRNPDGPSRANARTDHMRNPVPPRLGRRAALGPRATATADRGNEKPANNRPAPPDLHGKATEPNPPPPRPTSPSCAQPAPALQPPALPPRQRWQPFASAAPPPRTPRRTAPPPPLHLPRRPLDPCPPPLTVSAPLNPVVRFAPALRSPPRTPPRPPPPAPPPAPRNRTSPSVPTPLHPLRPHPCPRPRPWTHHWASPSTRNTPPPQLAPAHCPTATLLLLPSRH

SEQ ID NO: 995283 - protein, 165 aa, Homo sapiens
MRLYRHGLVRSHIAPTVVSRASRRERTGNGEQRVEKARGGEVRVTISRGLWVGMGTLGAVSMAKTMVVEVSPGAVICRASHDSADYLNSYRADALPDQAMSEQEGQVPGGSGAALRDMLAEQCGAVVVPAAAALVRSAFVRGRGPRVQAVARAAGTAVNHQQPSG

SEQ ID NO: 995284 - protein, 65 aa, Homo sapiens
MSSVCRTGIPAGQLTRSEEIAVTVKEGSIRVEQRKLWEEVCHERSELHGLISAARNAVALSEAWW

SEQ ID NO: 995285 - protein, 346 aa, Homo sapiens
KTPPHTKRGETTPKKSAPPPLSQKSARKYRGGGHNPTQREGGGERGKIWGGGENPTGGERNGARHKKGERNTGETRGGKQKGGAPKRRREKSGEERENTTKNRARRAGERRASKKHNHPQTRRRKRNPPRAKTTQEESTRREPTYTHTREGGETLRESRERHSARRRGRENNAREVSSTERGEETPPRRAHSSERRKNRAGVQGDEPRQRPPPTHDRRGGEQDEGASHTEREKQVGLTNREPHHQTNTTRLAADTKTKKQPRCEGEHHKTTEESIYTHPHMRREHSALRYNEKHSTTVSNMMDEGDPPERKKMRGATHYGGGRTQRPRPLALPREREQEENESKKS

SEQ ID NO: 995286 - protein, 343 aa, Homo sapiens
EGSCGCNGGGSTRTVRLPQTRSGHAGTDMSPPRLCWVWLMACGEPQRRERVVTAGGQTWWDCHLTRARAERNLSEQSGRRWGTAVLEQADGEPDLSASVLCAGPLVLRSNVAKPASSWVLEHALRDTWIRSQLMLDEGPVTPGNRGHLLADMLRSLAYWAGQEQLQAMMRRRLRVALHQLKAREQPHTIGTVSREPLWRALGRSSDSRKGLATCSLRAVNVQGLRTPLERLWTRSVMHDVPTWWARGVVEGAAAGIVTMQCGCGVCALGSKGPLRYVRVRMVGHQPVRQSSASKVALLWGRRAALATFASLPGLFRALAFFRAGTRGNCSSADGWEWQSLICG

SEQ ID NO: 995287 - protein, 246 aa, Homo sapiens
  misc_feature (130)..(130): Xaa can be any naturally occurring amino acid
ERAMSQCHDRLGERQSVNAYNLPETLIRRQLSHATVQRMMVEICVEAVTTVYAQQIMIASLGLRSTTTVALKTLGHARCRPSVLRTEPFRRTPLSRQHHHQTRLRSRGDFVYLHVQGPFRSTVVSKLIAXTRKVLCSSAVHTDEGSYDYESKPPYIGRLSTDVYCGRQCVEYYPRGIHAQRQIILGSTERYHRTTTPSPVGLDFAMKTAHCTINVRTVVAHCLITKRIAPLQGLCSVGDNIARSIE

SEQ ID NO: 995288 - protein, 178 aa, Homo sapiens
TLRGLRGSRGAFGCGGCCREPAGVVRPDPAGAPRLTFEASEAGSRLLPFCRVDYFEDLQQGAHRMLVCVTSTCNSDRQSSTGVVHRSQQRSVASGVNSVLLSEPRSTDEPPRKRGEALVAVLVLSDASLLAVGGLQCRKRCQLRARGEPAWALRVQSLGAGLIGARVGTGVVWCGVAL

SEQ ID NO: 995289 - protein, 321 aa, Homo sapiens
  misc_feature (132)..(132): Xaa can be any naturally occurring amino acid
  misc_feature (146)..(146): Xaa can be any naturally occurring amino acid
  misc_feature (151)..(151): Xaa can be any naturally occurring amino acid
  misc_feature (171)..(171): Xaa can be any naturally occurring amino acid
  misc_feature (174)..(175): Xaa can be any naturally occurring amino acid
  misc_feature (182)..(182): Xaa can be any naturally occurring amino acid
  misc_feature (198)..(198): Xaa can be any naturally occurring amino acid
  misc_feature (227)..(227): Xaa can be any naturally occurring amino acid
  misc_feature (248)..(248): Xaa can be any naturally occurring amino acid
DKAHLGRDRGSELYELRVSELLDYGPYTILDRGLRQAIYSRQLNVRRYQGTVDRNLAGANTPRPGMHRSLFSSILVVDYCYRRAWLTFPWTSTRGGRRSKRTDVHETGGFHESMRIKASAINGVVSAPYARXARPSRTRKSSKGAXSDRVXSSVLGKRMWGIRVLERESTXVAXXSCFSRPXATSITEESGSLERECXCHTYSHRAPERRQRAMRYSFAPTPGWGPXLDSAGCCGHMRVVTPSIVPCXSSPRRVSREPSSEGRNPFSRAWVRWTSWTLLVRPPNTRESWALSFGYYLARKKVGPRGFLVGGDLTRRGRTQC

SEQ ID NO: 995290 - protein, 152 aa, Homo sapiens
MCSMRGDLDSNRVTEVYMAVWYYRPCYGRSEGACTENSRLASTHTHLVCNVTTAAIGSYDCRCFRASAVSESNGRFPTQIDIVSTVLVVNAAWRKVSTLPLAPAATKRRKAMGGLIGLDEVKVHATELSIIERKGVSLFWVCYDWFVVTVKD

SEQ ID NO: 995291 - protein, 435 aa, Homo sapiens
  misc_feature (158)..(158): Xaa can be any naturally occurring amino acid
MSVANRWRHRQRLGQLWATRRSDAEGLLGQAESRMTRKRLASSEIRLDRVTSNSIGGMRSRSRVTSRVARESSGDDLMNCKSTQLVGHNYWYPSACRYPGVGIFSKPWGVRKYVYVVVSRFKVVALLALKDSLEEARGTNVFVIFRVDVVWGRLGSTXHCGPEIVHTGNSLSQGQSGQTLGLRIIGDPLDIAWVTEQRGGAAVASLSHLALLGRVAETDTLTCSYGDVGAYQGLLGHTGANCIPLIQPRIPEEQKYPLKAEIIDIAAIYAVVVRFNANNAVLDNPVGSGMPYTKLSRPIFQVPIQVGDEDNTGHGRHLIGHFGPTDGPFIMENTRVAGENQKRVDTEPKTYRGNIGPTVVVPATHERGVNNRESRYRGPAKRGPPETVHTTVAPLQRHNTMHGMTNYTRREREQKPQGKHTKFRAKEGGPKGPTH

SEQ ID NO: 995292 - protein, 98 aa, Homo sapiens
MLSYYERPHDVGRRALYLAHIVGAHVEGGLLARRKFSPWKVLAVGIGKQRALGGTVPVFARGFGKPKSRYGESAVIEPVDTRYGDTKECNFSREDLNS

SEQ ID NO: 995293 - protein, 92 aa, Homo sapiens
MWEGARDNPAVTIEVPRLIEESPIDTGTLTTDTTTHEAPDTTQTQSQTLPNTAYCKGPARRAQRKRLRPPYTDTQNSADLILAPHHRNPTLP

SEQ ID NO: 995294 - protein, 146 aa, Homo sapiens
MAPYGSWFRPTEEDSKMMGAPSGKTRSKRLRPLQGHATKKPGLLHSETECVTRRGIIGTYKKHIRQKRKENRSGTKQRVKPRKLCFSLALGEWRPMGASGSATSLGKAMAYPTRNRFVGHNSNLGDHWELVAEGVKLVETDNFPLS

SEQ ID NO: 995295 - protein, 157 aa, Homo sapiens
SFIIFKGIKTKHLKPQFREKPLVLAGLVSLFKLDLGLPSGLALKEQDSEDILMDRQFGPGGISTESLGGIRWIGELYTFTKRFNLWISGQIFFLAHGQLVTWRGVRGSIPATKSQWAWRGGEPGGCQSSEWSLQRSERGLGVRGRIGVSSPRAQSHT

SEQ ID NO: 995296 - protein, 270 aa, Homo sapiens
AAPKWRRLSCEHKVTKEAGPGAWNYRIELAPQRQCSRDDNWREIDLSENELTNRELCKGATDTQTSRSKYILILGCRVCPVRLRGPSEFTSSSEKGQKRCLGAERPHVGYWGTYCRLGEVRTHYFVWVLWVFPRVGQAAKPGSNEACKRYSGGMTNRWRAVPGNYHNVMREQGLTLDEGSVRSLWMLPRLVARAGAPNSRGGQRILAVTVQVQRAESWPEHTVTPRWRSHPASAGNPGRRFPQYLWRSLGSRTTDDTFLTADGTTVWGKE

SEQ ID NO: 995297 - protein, 298 aa, Homo sapiens
GSVVGLWALGGFDPFGPGTIHGWLLPSCRAGPMRTPREGYMFVVQKAPIPSVFRVVDSTLRQDSGLVMWWTIVGMPEHDFTEVKGHPMLVFQANSTSRGMDRSEATCWEGSFTRCWRIPDENIKTVADGWDLMLRVMDPCGPRELIRPINHGDVSSVLMHSIQRGRRSTTLRGGGGGLRLYLLSWDVVRNEADASEELASPSDDVERRRGEQSAEAGWQRILTAYLGSRAGTAAQCSWRRSAGAIEGQKKRMEALIGNGGGWKLGEGRFPACWWEKGNARAYQICSEQKKRTPKEKGA

SEQ ID NO: 995298 - protein, 309 aa, Homo sapiens
SSLHTPCALEQTRLALDSCLHRRLSRLRTRCRPSSVWWWEMGPWARAAFSSIYISNRLSPGVDTSPTHSCFDETYFRSQLMSRVVQQLGPCCNPWSAWCVTSCHGARERTYRRVFRVSILLIFSMTGTCLPSIVSFFLFVHDSTASLVSKIRAMMDSHKVRYHVPQHIQSSWVGTKLDLWDEKDTILMKLKEKNAGSQSLYTAEGVWRLCPMEIESVKTTCSAQLSPRGGLIIRVRRGIRCRAVSSALAELKRALSSSRGLLPALPLDGSDPPDPTLELMEPRLVCGPPVGFLRVRSLRLLWSPERRHG

SEQ ID NO: 995299 - protein, 168 aa, Homo sapiens
  misc_feature (32)..(32): Xaa can be any naturally occurring amino acid
  misc_feature (116)..(116): Xaa can be any naturally occurring amino acid
  misc_feature (142)..(142): Xaa can be any naturally occurring amino acid
  misc_feature (155)..(155): Xaa can be any naturally occurring amino acid
MRLNPDGKSIRNRYSTILDQSNVKKRVEEENXKSLSPKVEEHPDHSLNEPFASCNIDLYVSIERTSASHDILYREDGMLSVEFIACQGSSLRGRRRSVAVTQMKLSPSIVDGLGTXYSRSILSKHDYSGHWAMAAKKDSWQXEPSRALLAMNEPXVNTVVGTSIELDV

SEQ ID NO: 995300 - protein, 344 aa, Homo sapiens
GCCGRSENVLRWLREMSVPGTPAPVARMKVLKAELRQLQSWSEQAAAGKAREFTPRQRSGSSHPNGSSDVKYVGRKFRGGCSCSWAMGALKVHQSLQGTSQYRISNAGKTVAAMAIGKQSVGIRLWIDSPKSSSFRFCFGMSPGWGSPTDATGTEPGVPWGSVDPECCRPASVACSRLVHLAVRRVSQCSTPDCGATGLPRPCRVAAVGVGACPRQVAPSCPGVWSMAADFRDDGRCREREARLSTVFATIQRRTRGKGAQGSSEKNPTGWVGSKLHPRPHAYTTSALMHTGLSLVRENLPQRCCAAFIPEQPGPTESSVRRIPGRMTNPLPVPRISDSRLCPS

SEQ ID NO: 995301 - protein, 186 aa, Homo sapiens
MCAILSMCDSQDLVTLDSICSGIKVPGQNAFGSPTQDPRCQPTFHQGPFGHGQRPVRAEFEHQRSARVAGPGLGSSRASCKPGPMLVCSSVASKTRCGSDSAAGRLSASASHFSVLRDTSSGQDGRRRMVVQRVADSADCAPSPRAVAGIGEAAVQAAEGHHQAELVEAAHALEQGDKLVLVHVLR

SEQ ID NO: 995302 - protein, 216 aa, Homo sapiens
WRRLNTLQHYKVPVWSELWPSSPASPSMCSGKTRIMSLESGPRMLEDVDEGGIRSLAPGEAKVMSRSRPGLGVGSAFVGRGSVSASERSYSLSIYLTRPDCPVKGILQQRFVDDLFQVILSTSRPVPVRVKYFFDLSGLLSTAQKRHGQSSQTKDTSPHSRKDQEACHLRVLETQVVSNKTPQVVFRWYKPFLDNIECCAPCHCNMTFHGLPASLA

SEQ ID NO: 995303 - protein, 556 aa, Homo sapiens
  misc_feature (252)..(252): Xaa can be any naturally occurring amino acid
  misc_feature (387)..(387): Xaa can be any naturally occurring amino acid
MPAEIRLREPGCAWGSRKVRVLLPRACVSRPVDPLCERAERAFALTWAESSTEEGSGLSAALRVVLRRHVTLETRGSAREGGAVGIQWATLGIAERGFTPKIDGHGLAAYTAPLVGIPLWSGWDQHKRVIAEERVENAQFRSLSRVPITPFRVRQRHPMPRWVEYAAVRPPSRIVGIGPKRVWAPAMQFQGWWVLNGAEKGARGGSPGERNHAIPVEGESHKGIPKWGDRIEKKQIGKRAKEQKSLGNRRKXRDGVNKEKRYPGGGAERAGPEEAHLEGTGNTGGIGPGPKVVRAPAICGKPKEGRPHTGTLCDRDQQIRPWAQSQHVLKATDKKGPSAIGGHAALLNPMFTRDTLKQTPNKGRETQLDPRHKQNNQGGVLDAEATXKDASGMCASVETGKGTVCDETNVHPSFVQGTDDKHVLSFDTHHWHGGLVTHREREDQHCENSESDRIAHLTHRWNPRKVGAIKEGEDSVVWSMATQAGDSRGKAQIDETTLCEERKLPNRERRASGTRPKRWRVGHEENGEITNRRTSSEESGNAHDLYAASHVRGHHE

SEQ ID NO: 995304 - protein, 246 aa, Homo sapiens
ATAGHDRDAGVVCSNETEVAPTPWTSPGSLSEGPWPRSLTASWWLRICPSVVNVQGVGRAWASCGHYRSILDCPTMAGPGPVEGAVAWNVDHECGNAIDVCAHGHRTFSRYFYSRRIDIDPVVSQVLPQAGPLSYGARSSWQGYLRIASCCHPPPPGPLVPDAPGSCYAYVSGHMGDALLEKLCLQFLALELRGLDAGLRPGPVSPQTAPSAAAQERLAVPSELALLKAVDTGAGGSVLHEEVEGW

SEQ ID NO: 995305 - protein, 171 aa, Homo sapiens
MGDTHGSVTSASPALRPGREVLQRIGPWARECTRCTLRPREVSAPKPRKISKMRRLPGKRTKETLGGIQGPRDTESRLKQQTLRAPQKGPIPPKLSSGYTEPPPSTKGAAGTHSPRAYNTTTDDQSNPPLGKPTAKTGPPEIKGPKRTNGHPLPTAKAPAAREKHCFTWRG

SEQ ID NO: 995306 - protein, 514 aa, Homo sapiens
MLASDRACLTPLCGAMYRWCIRLSGLIERCYQKQREQITLSVQLMFNRNASCQVYYEDSVIRIQTVRSEPRYGRNLEAEPLEQIMSQPLDECGVIESFRHCVPFTNVTCFKIALEAKLREDMRVVNPIEYPPGRSPARHEHECTLSNGPCGRYLGPTLNIFKPRTRRVLNTAAAGYHQECSHENLDRSRQERHRRRDRNVKWIFWNRTLERQPIVTRDNGAVDKKPKLDSDMVDPTQKLGTSGYSTVPRLLSHGGAPGQLRSADFEQPWNADCRTRRNGLAPFGPYYQRGNRRGHNAFMRTSEVHTGLNVKHWGLRHELVDNVQQPRQANTVHMEQTLAGAPVDANWNTQAQNTTQTTMLDKVGPLNTTNMVIPRPLNCRLSTHYHGRANTRRRRQRTSATANTPRSNNLAASTTENKADIPYTDNEPTPYTSQTESSTSDISREQNQTTQQERRTIYNNENNTIERTKTHRRSQDKGGPQIVRRNEHKYRELNDTQTRNAVPKKQAYKDTKQH

SEQ ID NO: 995307 - protein, 109 aa, Homo sapiens
MVPVPRNATGQGARKVGNGETGTRLVQRWETSVDTFGGNPDWGTQNHFYDNWIGLEKKTQANEQSTNGRRHEFRDITTLRERQSTQRRNETQRDVEIYSRHLDEETGFP

SEQ ID NO: 995308 - protein, 293 aa, Homo sapiens
MEATGTWALLMALALLLLLTLAGCPGPGDLMAICPPGPRRTTAGKPPAVYGPGRCIHGLMREEGKSQAQNSATRTCCMTVIYLLYAGTMTGQKHGGYTLLLLSEIPSCPNMWVREELNRELGAGKDQAGLTVPASLTPTRDLHEAAGAAGRVVTMGNTPGPLMRSTTASDGYGTVAQGARRSCPHRLGSNAWMSPRSFKQPERVQTRTVYWMQMDGSRKHEAFLTFYLRASVSALGEGPGQKRSLLFFTHLQLLLESRARGKPELSHGIAFNFPSSRCSRHGLIHTRRKRMHG

SEQ ID NO: 995309 - protein, 252 aa, Homo sapiens
MLSAIVARSRLSLQHSHCGFHSTRKVCLIVWIISASGSFLQNVSLSQDTSCANAQVCVGVIELSDTPEGVRIVWVLLEDALYIHFELLDTWSSFEALNPGNHNPKVWMRSAVVEHIDRKRRKCIETGYCLSATKRRTIIGNLHQQLMSDLIWALETVIGWPIDRHLVQYRRFVSYKASMKGLGPDDDSLIEIICSRNKQELLRKLNRVSKENVNDLIWSKDIISDSLLVTSAADGLPLAQGSKSRRMVSSLI

SEQ ID NO: 995310 - protein, 130 aa, Homo sapiens
AIFVSSAQPQPHSLQHNMRQSVNGSEQLPRDSVSLLSSPASSCMLLTQVISEIIVAITDLSKDLDYMVDMVTIIIACPSILVQNIPLAIAIQVRTIRVKLSQIHMCKSIIYPIYPYGSRVCAHQNSVSRG

SEQ ID NO: 995311 - protein, 270 aa, Homo sapiens
GHYTEGAWAGVIRVLDVVRKEVKDCDWLHGFQAEPLAGGRLRAHCAWVTLLISKVREEYTLIGIMNSFSCCALTTKGVRRLVVWSHYYDCTRMSYLTLAGWRTRDEDAYWDPSIQRRLVRTSLASEGLKVWPTPTYGDLEAPGIGTMSGSQQSSLRVPGVSSTLTCSKARAVNSGALPGACTSSCPGFRPPHRPGQPASTGALTVPELTQQMFDAKNMMATATASRDVADGGTGVPGPMSMKEVDEQMLASMSKNSSISVEWIPTGEGGG

SEQ ID NO: 995312 - protein, 572 aa, Homo sapiens
  misc_feature (431)..(431): Xaa can be any naturally occurring amino acid
  misc_feature (510)..(510): Xaa can be any naturally occurring amino acid
MGKEKTHDQNIVVIGTREIRARCYHYWPSDRSNSAVGIDETEPVEKIREGGLLMMGKGVLRSMPGVVGVRIVERLGGEAVVVTYWISSLCRKSSETSESTSVDLSILIAPMDHHEGPLHSKITIEFTRGNNATRARTWSPLMPWNLSVLAWARFRVREFSETAIGGQSIFAHGDGGDQVPRRMAGPLGPHSTGDLNHHVHLCEFASERITTVTPWGYRGLVLELEDHYLRGILSPFVGDAASTQRLEKHGDPNGRGAKSLQLWTRGENSMGYENRGEQRSFREGEHIHRSFNKRGTTPTFRGAFNRETRAPEITTRHSVSAHQAVCRRMVPRNSLCTCGNNAVQNVEEFGPPKTHMSAMVEPVTSQIRDESIINQLCPHISRTISQTEGGNSGAQTHVCPRHTPLSKGPHSCCAQKTPRSVWHTTSNGLWXLGEEAANDAEEWAHSTINTRAKEVGTTTEGRTVQSETRSGRDKWPRMCTPERKVAPNHTTKRGEGVAMRDDTSDYTQAXGDANNLVTRTLREEVPTPNNDSLDERVMQGHTHVADIRERKEREEQAREGLRRHGRRNDWAP

SEQ ID NO: 995313 - protein, 214 aa, Homo sapiens
EKDVLKAGVNQCAAGELGLSYRGRLMSSVIAVPSCRASYETLMARGKPGTCGSAIQTTSVVSIGLDEKFRSEDLHGLAAWRLCASSIDRDNRRDRRNAVLWVKSSSPAPFRLASEVTHGCYDAICGETRSQEKAFVRPREPRLDPIQRGGSDPHLPTGQRAPTVICAQILQGCAKSMALENARREAEPVRRTRRSPPGMLPTFLLMNLLSLAGD

SEQ ID NO: 995314 - protein, 106 aa, Homo sapiens
MIIYRDLISHEEMFSEQSTRVREIADGLCLEVEEEDGHVATEGIHCMTRSLGGQCRPLRGPEGDRYSKGDSSSLVSSIVMNAFTMLGEQGFSKTGSATETVTTQED

SEQ ID NO: 995315 - protein, 126 aa, Homo sapiens
  misc_feature (45)..(45): Xaa can be any naturally occurring amino acid
RCLCGALTSGVCGFATLHFVGHGPLGFLRPLEFWYPRRIGDCPVXEALVHSARPLLTDKDRLRTGKARRDDIAAVQLWPRMNYTRHSDVLRRTSVSRHLSCTRVTVESLETSLCQLALGDKACVID

SEQ ID NO: 995316 - protein, 245 aa, Homo sapiens
GNGSKVSAPVTARAVAGGGSGWKIAVAFVTTLRSLTSPVMPSDGFRKQQEVSTTGSSDGAREGSQGEGAHPCVRDAGFVDEPGKFTFPSPHEETEICPEPQTLCPFPGACVRAATWCTCRGEKDAQGLGGPSCSGGNVTPTQSQHNCLASPILVTQVVSGGPWSWRALGFPHQTCSPGGEGQVRDSYPPSSPPLRLDLTFDLTLRGRTTCVIAGGLRVVSTSPHRRNPSVSGGHSKRWDKAAAGC

SEQ ID NO: 995317 - protein, 491 aa, Homo sapiens
  misc_feature (34)..(34): Xaa can be any naturally occurring amino acid
  misc_feature (120)..(120): Xaa can be any naturally occurring amino acid
  misc_feature (198)..(198): Xaa can be any naturally occurring amino acid
MTSHSRSIAIYTVRLGVQYTTCPMDSKTLDLSRXVGCHWLSCYSSAPNELVEARSRSVFPCWALSGQGVAFTTSQWHAHRHHTCVQHRKHLNRTHLGARTHGIIIATIWRYIVGLAIQSXTPLSLSPSQWEATDYAMAAPWAPNGLTGAAVLPNSESCNILTQSLTTALSNGLARTHSHSQTCTPVGPFRSPQLKPGXHFWRLSACLTSGSVCETPTEVGNPKASPWWAICKARGSQQAIPFVSSQDKLANHLGTRPIRANRIVTFQSLHLKGERPTMGAMQNRQVPPTRSGPPTCPRWGPLCVPFGTGRWVSKGTCLEISGSGRSPSCGHTQTFGFARSCLRHRVPLQFWANLQGILRGVPPGAGGHGSRTSSFKPNTVCLTTTGLGMANTTWDSAPAGPRKQLPGDTTHETLTEPTHPGSWYKKRQANTAYAHPPYLSQRRKERPPIATKNIAPAHSTKTTDRQGEHPKRPTPQHKKDSITTTGHDREK

SEQ ID NO: 995318 - protein, 377 aa, Homo sapiens
RVRAGARAGDGVVGRWRREAGTMALGACPMHVSRLAVPVEARTEKPSVQWMLGGDAVGQGQRTGAVCKRINSFKMNWRCIVERLGEKDTSLYQTSAGGIAEVQIRSSYNFHDFSVPKPLKFLRPHYGKLKEIYENMGPGENKRLAADIISVLGMNMSGERERLKYRLVGSQEELASWGHEYGQASGRRSGKGVAGAWMNAETVKETAHVQSDAGNRHYNTGRTNAEDEGLRSEELWQMEQVDMGGERNFDAEGYEKGTDEDITKEGNEMSDDERNRTERRVDRRAVKSTAHPTATGKGFRHKDRVKKKKRIQRRTEGRPMQESETDTGTRDRRPPERHEAKEGKGKDEEGETERDKRSKQQGTTKEDSKRGAHKNTT

SEQ ID NO: 995319 - protein, 202 aa, Homo sapiens
ETSTGELLIRCFNSFNDRHHGSGLLASWWIRTLDGQSLCRGWCGEGSWSMEDVGLTSFRPELGEAINFCDMTMTGGIRSESEWDIRGCCLLHSYVAMRSHPMNKRPHSRRVLCWDATRMNRRRGPIVEHFEEPIRNPSCRRCNSRRHRHGIRSAEDGGCGMGRNSDTGGVETHEGNVLQVAASLRYPWHRNRRRDASRSKPV

SEQ ID NO: 995320 - protein, 232 aa, Homo sapiens
WVGCPGPRETPARLVVMPRKIEEIKDFLLTARRKDAESVKIKKNRDNVKCEQFDAADTFTAWSSLTKEKAENLKQSRPAPVGRVNGTEMKPETSVSWYLYYIKILIDPTDEIRKRRAAQGLYSDVAWEAKRCKRAGGGPFLFHALPYGGPRGTMRGDTLMVKELENWGQHHSVIRHPVHARSRKSYNEEEKARVITEEEKNFKSFASLRMGPCNARSSAYGQKEPGKRRTGC

SEQ ID NO: 995321 - protein, 340 aa, Homo sapiens
  misc_feature (130)..(130): Xaa can be any naturally occurring amino acid
PTLCAVAHTFQTVHDIADRRGIRVMPARLRGVGTGDEDCSANLSPVRMGGRAVWLERCRSGRGPEVLRSLTPGAAGAYVPFCLHVCIVSPSATGAGRVRPCYSDCHLRPTILSALLCHADAMWLGPCVPXGAMHVIPGDFINYVYVHTDAHHSLIKSIFSSRRGACHWSTYPSLLRSGSLPFFLRAGSVGFVSWSQNMWLRTYCASNDVSSRRHGTSSIPLNVQIREGMARGRCMVARVYPGANCVLRAHFRFRYSQKFRTSVNRNTGKHESYGLRACRSMGERCLPEKITGGAMNRCVPNLGGPGLWDVCPPRDPVLPTMNLLMFGFANGTHAFEGKRR

SEQ ID NO: 995322 - protein, 79 aa, Homo sapiens
MRKNLGDQDGVEKRAHNGTGDGYRTISDKGKGGPDGAISNGTKRQRTEDNETKQGATGQRHVERLFALHKPARRGSREM

SEQ ID NO: 995323 - protein, 176 aa, Homo sapiens
HIVGPETPSLLPQSELETSNLDVNALHPQRCRSGASRIIVRVLTEDAMGLPKIRDGYRRGSMDEFLDLRMTVCHGRYLTGCVDRRSSNIIPGCCVDTDESGMLDSGLRRRTCDFVGVGLSIVTCGCNDMYSRKDGKNGPSCASSPYTNRKPHLVRISSKVSARRAISGMAHSDRIA

SEQ ID NO: 995324 - protein, 95 aa, Homo sapiens
MRDTVKCERRAVTHKEKHLSTRNEGHLGPPATAPAQTPRNGKTSLTVRPIGNNISPRSDESGDSRGNNTASTSKVTPKQGERQQTKQDITPQGDK

SEQ ID NO: 995325 - protein, 593 aa, Homo sapiens
  misc_feature (429)..(429): Xaa can be any naturally occurring amino acid
AGSGVTVGRHGDPAGMCMVLKPLISNQRELVMQDAVVIVMDSNQDQELVKILRDSNGPAIDRMDVAQHQTSRRPAIGVPIAGPNRCSLCPTGYRVSTSRHRVGAARDPAGFPAASERSLPEAGARPISTEKDWVGSPEHTITGLVYRSGGIAEGERAETSKGFPASQVPMAYGAKRVVDACRFGTCDEYLGHSTKQRFDLPVHFPTARGKGPPFRGTRTQQGKRGGTEPKDFRRPLDAAIAFAHRLVAPPRRVRSSPVNTGILGGTAVSRRKPGHSLERTRRRTKASRKGSHHTLERDTGMKWTIFGEQRPALPAITVPFAGLVGSPLVGLPKQPPRGIRIGRQITGVRKTTEEAPQGGKGPEHSNTTGHWVWTHTGTTTHTLTQWPQFTFGGEEQFYGEHIHQCDSGQKNTEQTHDETRTNTSSERAXNLIEEQRALRRQMTTTQEGNKNHDGCTKAGQTQREGLLRSNTHEYDRWVHNSRGKNTTDEKPPIEGETRALRQDKDTTDKTAVQSRHSENNRERKARQGEQGPEIRDKDTADQQTEEHIDNERRKKTVKTDNTAREQIAKERCKRHKTDTEQTKQQTERRQLKK

SEQ ID NO: 995326 - protein, 439 aa, Homo sapiens
MSIYSCKQRISCELDHLLLHLAQQHWSVSYQDHCVHGSYATRSKWSLHGPLVHSKHSTHGHPLSIPRAYQAEALHDTTRTTICATMQTPDSDVRTAASETTRQKQITHNQTTAAHIRRTKRTKRSQTQNTTESPHHQAQYEEDNAKDDDRSKRHSPRPTGDYTRPTTDKENRAAQTEAGIPRANDRTKDERNRRHEHSDDNNRGTATPPNQKDTHTRHHTTHYKATHQDHNHETEDRANKQQQKTNNEEHTHNTTQERPHRLQVSHRNETDKSGRLTAEPARNRNTEHALHNRKAHDTARRMGPTHEEDQDRPTRDGHIREKTAPHTSTRGKSTHESRTAPQQEQQHNRKQATRHDAAAPPTGTGTRPGTAQANTERETANPPEKRTEERKGRKERRETKATWQEQDQAQATDRRRQGGRDTGGKDTNKTQVRSTDAEG

SEQ ID NO: 995327 - protein, 220 aa, Homo sapiens
MRLLAAHQHGSKAVPHPMGQRPLKTLHYNAKPKGKRPPPTQIQHSADNHNKARLKWSTQEEHNDIKQQAQQTHIHTTPAGQDTTSMVTTLENKTHAYVDRQQTETQISPNASATTKRHRKKRPRTASDRQTQGTSSKPTGETNRRLGAKRTNQHTRFDRAPSCTDGTARHATRSGTSSYRERDIRRAVDGGTVTTHVLLVAPRPVTTAVRPLHVPPHKTV

SEQ ID NO: 995328 - protein, 399 aa, Homo sapiens
VERGRVELEVSMPRVGSTELTYPQQQLRDDDDGRALDDQVDVGAAAAGVLYDWMSMRTQMIATWCQKQENGSHVLEPARLLPTAGVPMMASIRRCSAGCHVNQYAAQYIVQLNPTDVCCIHPMQDQGINGKQALAEPPARTICTIHHGAPLSGLSHTLQQPSTPASDSHHAYPQKESRRRALRTELDVSLFTTRGLAVSMCQIARSRTQGVQLSTVEQARFHSTRRRATAGNSAGCAQCELSRIAQKHSLHDDWAPKRYKAMDPRLANWHHTGAEQATGHTALRQHHRKHKARHTTPHKDPSARTIRELHIERHQNINPTEHAIPMYPTQTAPCTDHDTPYTSAHSTHSNPLVRPSPTTLPTIPPTLTTNSPPPQYLAPPPLPPHESTTPNSNHIHNYS

SEQ ID NO: 995329 - protein, 441 aa, Homo sapiens
GGWDPGTRILKTGGPSRLSSAAQYSGARGPSWLSGPPHLPFRTKTEPTPLNFSANFLPARSQLFAGDDGFMCVLAGATPLPYYCAAMTAAAGKIRPSRQPSARWSARRSRALRVKSGYITKPPQTEYRGVEPPRIRAIHDSNDTNTADLNATAKEHGQMERRHFWGALPCALTTTSLPTPAHLILGRATTPTPDTSGLDNSTTAGPQDAPQRPAEPSYYTQGTRKTAPYMNTGHNEQTPKNHPNPTRGIASHPGQLKPRTPKALPEGTGHKAGGNDCKPMELQNSTRHPQHRTCSYNQPLPRQTTDTAKTEAHTEQRGQERKRNTSRQTPRHDTTNEHHRTNGQDTQRPKPTAAKETRTRKTRKTATSTRESPVHGTTHRPHAPPQQQSEETKNETPKEHPEQQAHPTTKANDTKGRKNRTQTPDTNAHTKKRAQRQNKAT

SEQ ID NO: 995330 - protein, 229 aa, Homo sapiens
GNATGAAYLSTIRLRRCKVLCEKCKEHWLSPPEASPDPSRPRARRRLGSGRTGELRKPEEPDNGSPRLGATARRTARGRGREEGQGPGRARYRESPVNQDLLQHAPGHRDEGVVKIPVPPCTSLWSPSVPQQGPRRTKAAGTRGAGQRVREPGGLRRPRPQSPKLKLDTRLVPAGDAAATPKIRLKALPVWGTAKHETVLLRTILVSAPNEILAEDRGAMCRRTSVGDD

SEQ ID NO: 995331 - protein, 461 aa, Homo sapiens
GFLAAAWVMDRPCLPSRTDNHLDPLSCSPLCIQGVAAVSENISNWEEEMELTWTYPVAHYYLHTLSLSNDQIPSYSSTCCDIAQIHKTDIPCLPMHAMKQTSITASAARRHPGGTDTIEHFNGSLLLMHWMITYAAHLLPYPLHDHHNTTSKRRIRRISTANYTYKRHPTQLMRLTAKQPRRQKPHHTENDDIRRRNTNTHTAAQRTDTTLQLEPHKRSAIRGHTTNKRRTTPHTYGERTPTNATRNHPPHSTSHGDEHRNLTEHKNQIHTAAHHLAARRPLGKHTNTTTDRDTLAHKPGIRHQTTMQHHTQTTTSTTRTQHDTHGTHEEKRLGTQRQQEDHARIATCNKNSCTRKQTTTEENRDTHHRHKDDQTPENNSTRHRQHHHHIGDINPGPTVRTHKTTQTDANSNDKPEPPRQHTHISETRKPTTNNSNTEVTHHTYSNPNTLLNHYTLDHTIS

SEQ ID NO: 995332 - protein, 178 aa, Homo sapiens
MSARGSKGQKIGTGDSPGEAGPGVHPRSVPTTRGRISLHLHSAWPRAQTLADIRLCQVGVAHNVRAVPRGSVLCGARGVARNTKQESLYRARSFGELPCEISLQKKSALLNRFCGIRAVVSQGVFLNVIDHHSKTGAGLSCVSSAPLSQVSSGPMEDNEQRPNARVFPHKGISLTLRI

SEQ ID NO: 995333 - protein, 294 aa, Homo sapiens
MSSFPWPFLQCAQQETSVGSLQKASVGHTQSQTSEALSDTEGYLGGNHVGRSQPGRPPRDDSQKPPLVPEDDRTKKHNYKLYTYRLVKQIPPTRNIIKRPKDRLRKVTSIHPEILRHIMPQRERTNTHYHNTGAHNNRGPPTPHEPCTSEGKKAKQATGHVEPHGPQAAHNELNSRTTTTDTRGNKKQHTRRRDPIPISRGTFPKPSNRTPKGKENRAKAPKVTPPFDTDTAEITVPHTRRTTANKEEQHRSKNSRYIYRAPRNVPEAGRPKSTHTKQKRRGRRYAAPHVENHT

SEQ ID NO: 995334 - protein, 103 aa, Homo sapiens
GVGLRRGTDLGALPACAEFVRRLPHPNRGLCSRKHSSVQSPRGCRLVTVAAGRTMPKKTAAVHGSRSEARRSNAWLIGRFVARLRLPTLGAGDEDEELGISHP

SEQ ID NO: 995335 - protein, 329 aa, Homo sapiens
GDVSQKVLRSQHMGPARFLSSEIAAAAHYVKVNSFPKDDPSKPATSQTFLEIQWVPSEIISCGKSTGRRSKAEQASERGASAVYTLLEKTHRMRWIGRSVVAVTLEDSLDGLREDFVTVCAEAASLITEGLFSYVSWPDSLTKKGTWTGVPGVRMRAERGIGESAGRQRPISPGGPNSREPVKDETDGAHGQGMPGVCAGAAPDGTKSTGTGLKWRIQGDTGRAGGEKPGLLSREKALKQAGTSLNTRCEGQEMKRTDVKGQTKRRSANHGSPDGDHKTQPDEPARAGQVGRHRAGPAGSLVGPGAGERPDRGGHTKGNEGGHNAGKHK

SEQ ID NO: 995336 - protein, 86 aa, Homo sapiens
LHCTAIDLTRHSTWTGLWYVRRLAVWKLCCVSELLSVSCRSLEMLSLSGIKQLAESTNVQSSTDRAQWLISRWRPFKLRETDAVAL

SEQ ID NO: 995337 - protein, 200 aa, Homo sapiens
MTICITTEEDVGKGSKTYSEARGNDQFVNDQKERRKGKQYRTERPNRVALPTERGERRAHTIYKGHRTIERKVWDSAEALNQSHLRYTQQESSGEAHTALMEQETQDTSHPPGQVDTQQHYAPPRRSSDKMRDNGTRNTPKGSSRGKMRETRRGEETTRIDAEAVGKPAPEEAGQKTHSTVQATTGYDDSESKKQARLVT

SEQ ID NO: 995338 - protein, 367 aa, Homo sapiens
AKSRGLGARPSSFCPWPHTYAHHLFFCMVDIIYSLSFTRVLCGDHSKKKPGTDMCVGMRESRSTTQIILRVLARHRVATRTASSVPQCSQYLDETCTCFARETGKTYCKRDYIRLLRPLKCATCQVGFSSSRTCVDEELLGQQCTHNHVLSACLRDCSQPAACLRTDASRLAGKTRRYTHSRADTRKHHWIRERAASLEDHAPGTRTSYPRRTQELHSAPNAWEQDPAGQRIAAQEGCHKTEHGTRPDPALPGTDTRTEQTNCKDILRTRLTPAKTEDTARLAIDRRKWCYAKNRAYTQRDNTNLGYTNLSRCPRQEETHTSATQGTTGTTNKPTNGRQAALSKGTHPQATPSDRSACNLHTRIDTG

SEQ ID NO: 995339 - protein, 118 aa, Homo sapiens
MGLAPWRTATAGNTLTCAPLDCPRDRITHSALYIAMNESTSYRRTRRLMPRQYATLSTHTTTPSPTSEHLAPQAILHLRMAHTHACLLLYIISDTAHLTPSHIHAGCDTTAPSKHDCY

SEQ ID NO: 995340 - protein, 404 aa, Homo sapiens
MALELMLEDSCLPIQSLRRLSCGPPLHTTTSILLGNGLRSRPMTGPSGHVQTTLEAPGAPTLYGHPSQSLGALSHTNTNSAHINERLPKGLEYVLRSLTHTFNAVPLPPYQSRMIRTPGTLDPEPRQPGAHNPMDRKVAIPVCPGPTHITRPAVTLTPHPPAPAPTQECTLYSSLPQPLPYTPSPFSTEPQTYHNYTQTRIRLTLITSHTYSTLDSSTTITPYQKYTLHHNDNPSNHSSINHQQITNPHYQPPPHHAQRQNKDTPPANTQKTAKENHTQPTPRLNRAHTCPDQPTTRNKEGNNLSPTHSRLETHNNDIDTEKHIGGTRDTTDSRARETTNDTEHNDIGYETENRISKGKTNNGQSANNDGYSHRSSEAHRPEQNKQPSGTKKELTCIHRTLTLK

SEQ ID NO: 995341 - protein, 48 aa, Homo sapiens
ALLTACTPAAMEQRRVTDFFARRRPGPDRATGRDAEERKERNTRTEKK

SEQ ID NO: 995342 - protein, 122 aa, Homo sapiens
RFFCEGTAWYVCMCVCVVRVLCAEPWCPPTSAPLSFACGSQYGTLSELAVLHRHALWMGGRGLWSRLQGSPVTPTERRSPTRWPIHGSLMARTRVVGGTVLDGSTSASMLGSGPVAGSCVES

SEQ ID NO: 995343 - protein, 107 aa, Homo sapiens
MFVAPLSDVLDRLLPIRQVLRRGASTVSDGESVQGPSPSWHALIVAPESKTHKASDYSLGQTDREFLDCASPTSSSVVTNKGFVLHLKTMLGLLAMCSHFVEGFARS

SEQ ID NO: 995344 - protein, 69 aa, Homo sapiens
ATRERLGEAPCETDPGSSKCIVIITLLFGNGCIIIGTNVNVPQKRFFSILGEKLALQVVAAMVCKISLP

SEQ ID NO: 995345 - protein, 231 aa, Homo sapiens
MGDRPSTFRTRGDINIETGGLTTKQETTEQRTTGDNTRIPRVILNKSIGGSQTPTEKGGNHRQNARKGAQKTPVTERFKRPEATQERIRHRQSQTERDKTQRNRRSYPHRDNGRQGATCRAAAQNNELKPDSVSTVTLLSGEEHERGTTRPPQGSPKNRMPYKTDTTTLGEMRSPHQRNTETRQAPHTSATHTQDGGEHPSHSGSTQDTKYQNNSTPHRADRPTESDNNNT

SEQ ID NO: 995346 - protein, 318 aa, Homo sapiens
SLLPQTQKSRPQPLLPQTQESRPQLLLPQTQESRPQPLLPQTQESRPPGPRSSDPGVQAPASSVSHIPGGPDPRRPSVSHSAGDPDTRRSRNTENNNSPHQNDQRGPRDKTRDHTEAHTQRPDGGLKHSSRDTVKRQHTRNERNTSQTPGKKCRRGGKTGNAKDKKERKEEQEEQAEPERRHDAHPERGRSGQERAKTAKTRQQEPTEESKKVRQHTNNKQGKEKEKPGAEKERQDKSTARSTPRQQEQTGRKHQKNKNDDTNQTKKKGEPQEKESKKEDENGREHSGDGKMETQKQRKKPNPTNSTPPEDEPKGTGK

SEQ ID NO: 995347 - protein, 175 aa, Homo sapiens
GTSAGCVSCSVVHRPHGCRPWMLTPCWHLEATPSVAHAKLAMNPLLRRTSVMECASSEMPRHAHVVALSEDVRTDTLLVRRGPTEERQGMDQRSMDYQHSRLWTIVTRVQDPSNGAPRDRTMTSVVSIFEVMISGAIVGRIIGMRSRRQAKREIHTFSWSSSYYRHMYSENREIQ

SEQ ID NO: 995348 - protein, 173 aa, Homo sapiens
  misc_feature (36)..(36): Xaa can be any naturally occurring amino acid
MVVSLQNLGGPERRCHPSRRGTGPVSDLTSRPGMYXSPHGTQDPEATMERGRDDRRLQQSSPDGEVGQCGLVVSGMQLEKPNLGTGSVVVGRVLQTTNSPWEATGATGTTGLRTRAGTLDTWKDNKVVTPIQFPGYVLTAFVMGKLPCSVWLGGPLVALLNPCPHRILQPGRL

SEQ ID NO: 995349 - protein, 122 aa, Homo sapiens
MDTIDEKKREIGLSMEKKIQMQQMESGINVITLTVLREQRDELYAAELLNDSQMEELSKVVTQIQARSCKVRAGWTGSPGFGIQLLEPRSDCRPELTQDFPLVTAAVEKAIPMYKIVNKKRC

SEQ ID NO: 995350 - protein, 192 aa, Homo sapiens
MAVWDRGPAPGTGAEALALAAELQGEAECSICLELFREPVSVECGTAFCRACIGRCWELALVRGVLLGPAAWAPPSHCPVRSACEPWRPSQLRPTGSWRLVATLLRRFSPARVCPGESTGLRRTRAQGSGLARCGPAMAEPFKLYCMERTGNATICDGCAERSTGRHRGGKRLLAVGLRAVQEAKEALGVQG

SEQ ID NO: 995351 - protein, 325 aa, Homo sapiens
MGVVGARTLVVLLSGVFGLTLSWAGSPTPVRYIYTSVSRSGRCESRFIAVGYVDDTQFVRVDSDARYAAKRLEPWVRRGIEVTRVVPGVISVNRKQHREDVEWPRVNKNVFLSGIHVGKLCSRLIVSDSRRLSASVLNTHSRISCTWPCDYAGVWDWCRSPSEVLLWQEEPLLDVLHVIDIQRLTSTWNLALFVTPQEGSLGRSTGPQLIGTFLVTAGLRSVEIYGGGGLIWEGQVRGVVPLYCLDNRDRKDCAALGRPPRYACDRHACSLDHEVTLGCLGHELLPAEITLTLARVLEDLTTTRGSLGTCFGINLLMDGEYRCPV

SEQ ID NO: 995352 - protein, 330 aa, Homo sapiens
MNLMLGTVCLHVVPLCAMWPCAHAPDSFLGALPVMYIPMIPVCRLDVPAGLEATMALSRVPMSWCPMPQCSVPIACAHCRSALPCAGVALWLHTPAECQGPGCPCPALSVACRFRHAPFLALHLPGAMLLPPQTWALPATSVGRASEAGWAWFCICGPIQLAKRPICLSQMRDTLLATKSSFELICGRCHLLPGGPDLHIAATVAELCQWTASCPQAVKKLCLTQAEPGLGPVHVRHGTAPGPVRIVYAPIPLSPLCRYTGPGDTSHCESAPGAENTVEYCSRKSPNLEALPHSALGRHGPTVERPTEVGSLLHRSLDYVRSSPASLLSA

SEQ ID NO: 995353 - protein, 541 aa, Homo sapiens
MPTNAFTMHFMRRRDERRHEITQQNKDPENNHYRHHATHEDPTTHTEEPHTACYPQGRHPHMGGHDITIYGNTQRSKSPPYATSPQSYPNSPQNTRAQSSANTNTNTCRRHETPKPTRHKKRKRENTRGPLDNNRRITATKRRTNKTHHNINRREYLTQRTNSAVTNTHTTRYDHKSRYLTQTPPDQLTNIEHSNSTHRTNKKQLHKTDTPPIKHTTLTPTNTRATQYRAQTEDNKKETHTTHYVRHTKHPQTRQQQQATRERKTNHPTTINTTTTTPTDKQNRHKRNTTTQTQNKEQQHKTNAIQTRYNIITHQTTTDTTNIQQNPHHTLQHNNTDKTNKPHPSTHNQPQVTNTHTTTHPIHKHTRTPTHNNNTKYTTIPPQQTHNNNIHIIFTNNRNIINHHAKHPPNTTIYTFTHNPSRRPTQTYTSRQQTHPSQARPDAYAQNLHTPAPKAQNTTDAQQQNDRGRRRPTSKPAHDHTQQDATTPNTTTRTTKPDAKSRHHSLSATHRQTTETDPSQTAGTRPPRDTNTHEPLTAAHR

SEQ ID NO: 995354 - protein, 230 aa, Homo sapiens
MDTKYQCVKTEGWSLHACPGIGTYAPAEVPKSKALEATKWQLKLASAILILLIIYNNEEQVGLDIRSKYEMAVVEERRHILHFNAMVQEPIDQSWSDSTWYQVLHKSIHWHYVDLYLYSISPGVCPRQVRKVIPTDDNMENYYKKQTESTRCHPNEKARRAHTTKHAGNGTTTPKRRNQQTIHEQAKRALKYSTKRIATNRHRDKTHSSKIAIQQHNPKQIEQYDKHSKE

SEQ ID NO: 995355 - protein, 84 aa, Homo sapiens
ARAYASTLRVAAGEAERKRRDVRRRHAGDADARAAEPRSAPDAGRHARRALSARRAGRDVHVTVGLAGRRDLEVRSIERAGELR

SEQ ID NO: 995356 - protein, 78 aa, Homo sapiens
SLSAGKNGFPQGRSPASYVPPSSPASTARRQRGKEAKDKGGSRENFRRYSKLQYRVAVVVLKEYTQTIIKQNKEQRNT

SEQ ID NO: 995357 - protein, 426 aa, Homo sapiens
CCTTQLLCKTPGGWQPPLIHTVSLAQQPSKHSVPKTRYWHDGRQIVTPLTPLTPSITTSHQNALTHCTAPTAHAHTEPPSTRNQRNAWLHHMVPLSTRRLPHGTLLPLHKSNALTGTPSTPRATSKSQSSKQTVKRCNPSRQTCTTLAHVGKEPPASYRPLQRHLCASPSTARPYTEAPRETADLSPARTHRASQDSKKRTSATPSKTPENPNQRTGPSRAYERTNAGQPRPPMRHTTPNCALDNLGTRGKTQSERGPNANRLRHSTKNQSASTRQTADDSRTKQQLPTDCDPTGTRAPSQPPIDATHFTSRAQSSLTTRPSTPWPSAPTTGQHPHTDTPSHHEHSHPHGNILATRHRHQDHVNAPYTGLAHYTSPSPAPPTTTHSKTDHVSRFTTHPVERTIQSTCHAHTTSNTQNNKHVTHDHK

SEQ ID NO: 995358 - protein, 292 aa, Homo sapiens
MYFCAASARAPQTLPHPRASKHDQTQTLISTKTCTIPTYCATLTLNPILPVLLLLCHAQLLSPPLAHPCAASRQAPLIDLHSPPNDNTSLEHAHTRTPTSNPAQTPSRHCTRGGRPTCERTTTTRRMRNAPPTSTPTFTLPPVQRTPRIKAPNLRTPYTEPSTAAQTTCTTHTRPTRRADPMTTRQRTPLTPVTIPQHQYIPISQQHIHPVLQTPVTGAANTPKQGTNITMRHYDPHCSTPHTGHAPHRDHPPASNDERPQIQKGTNTQYADTRRTYEPHNDNIADVDKQET

SEQ ID NO: 995359 - protein, 303 aa, Homo sapiens
WLQRDYRPPPPPPTRAVPAARLPWRSRPQCAQASGLALLRFLAAGCQLTMPWRISWRKAWLAGRHTICAGLPCTPCRLRALLTSFMLPPTRRHAAARYARLLALDTVMGSALLNTLAALPIIHCTLACRPLRCAPAALAGLHCAVGLLAGLALLLNAPSNKLHSANTGHKALRQAMMPNTTDYSQRPAKQENQRTTADKPAPPHQNKHTNYNHQPYYTQYNNSNPLHPHIVTHPKTTHNPHTHNTTTNNNISQPIKNSATLQRHTHKATTQQKSSQKHTQPRNKQNYTHKRATHPEPKIATRA

SEQ ID NO: 995360 - protein, 241 aa, Homo sapiens
STLSRAKLKASSRTSGPPLRFAMVAMVEVQLETQYQYPRPLLIAFSACTTVLAAVHLFALLISTCILPNVEAVSNIHNLNSISEFPGIGSAIGPLYIELGWGFFTRGLAGFSIFSLVAECGVVLCVVIRCSSRVVCPAPVWTPTWPWESHGLAGRLVSTIIMVPVGLIFVVFTIHFYLSLVRHKTERHNREIEELHKLKVQLDGHERSCRSCEGPRAGLGAACARESARRDLSDADICKLR

SEQ ID NO: 995361 - protein, 372 aa, Homo sapiens
MSSSRLACERLHQLRICYWRRIARASTQLRTSRGIGNRPEMTSVPSRRNEMQGVSGHCETAGRLPQQRAYRAAHVRHDWQLHHCPAPPALRPRMTNRRNNTQAQRQRNTPGRPNTRNQNQTGQTREETTAGATLGAGTKRTEETMQTDTQNGTKQQQRRHPNPRHPTSKQTDTDRTKQDNSKHAKHKQNRPPAHHTRENPHGQPPQTRRPEQVSATTTPNERQQHSEQDDMKEGRDGTTEKEKQQRKRTEVNKTTPDNYDKRHRATTTQHRHATKSTRKPKHHMINPRRNTTSTAQLSDNILQYHSRKIKQRSSNTKRQTYEYVLSDMKSTRYRQQRRKSRQLTTIVNAQRSQHADHNNKSTQSRLNYPYPC

SEQ ID NO: 995362 - protein, 354 aa, Homo sapiens
ERSRDEQAAGTATDSLYPIAVLIDELRNEDVQLRLNSINGKLSTIAWPLRLKGPEVSFCLSLQIPSMMNYDVLLALAEHAGNLHYPWMCGVPEYVHMRCCHRWSRWPQWRRQVVRDKEVESLMGPYSNMMTLGPSELEKAATFSRPGIDESDWLGERLAINHDQRAFLSHDETHYPDMINHKQCTKLSEKEETIRQRPYTKHLCFTNDHRPWMQERVNTIHDKGSDGQVAGDWKSPKVDIHPNGYYTTWSYKEKTHVRMTAEEQHDNRTIETTKGSEAQNRKIDRRNNNQGRRTGETDRENTEETQKASTQDRIRREDDTTEELHTRENIQRRTNRQLQPPHSTIKAYNPNSKK

SEQ ID NO: 995363 - protein, 515 aa, Homo sapiens
MSLLDNQDITQDTSDSHFSTECVEDMDMHTHYSMDDGKEQTQSVASTCTATHHLRTWSAQHTQGHTASQSSNSSWRLSRTARPRTRPLGETYNQHVRRRHHDWWPRAHASPTNTTHHQLIQAGCDTGDKHEPHTTQRLIEWTQGTSRTPHHSHPNTRSPPRHRDRHTTAHSEHTITPATHHTPLHHTPRHQPPPRDSPRPRHTPDPRAADDPHDSLAPGEQHSRNNAPNNSPARAAQAARARRKTTNAATHHEHQTTTPQERAHTTPQHTHHRRRTGTRGTRNETTQSRRHQNGKTEPTNTGRQKTDHRTHAQEPQGYTEPEKDKNTHTTNTSKPDPQDRNNNETPRTPHDDTTTLSTLTRHTQRADDREHTKTPHNTNPAGTATHAGESGAPTAHNDEPPPPDARQRRQAPRARRAPAAARHLSGRRTGDSPERRERGPAQPETAERPMNQTHGEARTPPRRRDGQKQTSRENGPHRRPNTARERHRADEHDTEPTDPATTDDTDETRPTRERE

SEQ ID NO: 995364 - protein, 140 aa, Homo sapiens
MMYSGTDIHRQQRNATNWMFQKLTTSEWRNGYTPGVREQTNKMRGQQLRERGMGTKKWRGKRGGADKKGKREQGGQQAKTAGTNEGTKEQAGSTKRRETRRRNREQARNKREEETKTERNRRRSSKGEDGDKKKKEKDSA

SEQ ID NO: 995365 - protein, 179 aa, Homo sapiens
GPAEVMRVREPELEMACYEGVTPPGSRICPEDCLVLYNVQRAGSDVMEWEAMCDQFPSLGKTNAHMGLARSVVRRIGTNLPLTPFARASFEILTQASVDLVFERCAPSHLTWRDICWIAADEEETYARVRSDTAPPEAHLETRPLIVMQAQCLCSQAAWVRGEVLALKKPALQRLSRTT

SEQ ID NO: 995366 - protein, 283 aa, Homo sapiens
MDPSKPVHLIAFLGLHWLDMTQIVQEVRAGRGLDLVTHDRAVVCEAVILLVDTRDPVVVVVALCGYVGAPLEGLRTFQSVLADAHHALTREKAVISPPWPMSEKKAFYAMYCDHVAVMYRWPAAAGERTFKPGIDIKIIVAQLIRCHFARLGARVPACVCSCDQQSSGPRRALADSMLNAVHMRARQHSCDLRSPAQSAWRQCSAAWFSPVSRGRDAHDPRPSGLRHGQRLPHGVTSRFGPPRHLSPHDPPCLARGLSLGAGSRSAPLLVARPRTRLPPPALP

SEQ ID NO: 995367 - protein, 307 aa, Homo sapiens
NSLHSSPSGSGPCDELRLTFPVRDGVVLEPFRLQHNLAVSNHVFQLRDSVYKTLIMRPDLELQFKCYHHEDRQMNTNWPASVQVSVNATPSTFEAWGEQEPLHKTLYLLGMCGRPGRKNIHINVRTGVWVTHLIVLHVGARATSVRSVLQGPPQKALLPVSTCFTKDKAELQQGTIPGTPGPTEEDGVEQTVSGVPEVPITFRGSKLPARGHDWSAHTGLLTWSRYPADSNGAGDLEGSGVAQNQLLGGPGGGPNNAGDSLIYFGKFACEGRHIRTRVVYYKAWIPTDTKEDASGNNKSANDAPSLM

SEQ ID NO: 995368 - protein, 326 aa, Homo sapiens
IAAFIQRLSGSSNIFEPGADGALGFFGALLSLLCQNFSMVDVVMLLHGHFQPLQRLQPQLRSFFHQHYLGGQEPTNPSYPSGWDNHHNLCTQRGVKKEYVRGEFLLGCMVQPGVVIIRTNLEFLQEQFNSIAAHVLHCTDSGFGARLLELCNQGLFECLALNLHCLGGHADGACCCYQWRIRRMSRGVNPSLVSWMTTMMGLGFKVGLEHMPCRPDAIVQNTYAGLGSPQHYREEQCKAREAEELPDASGRRVPGRETAGESHVERHPAREGPRRTSGVHLTNLGDARRPYNEGAEGTALCDQVRKQKRAIYGGKGTPKGTSNTAT

SEQ ID NO: 995369 - protein, 313 aa, Homo sapiens
VGSVVQCRDCAEGSSDQRRCVLCMWGGLHAAMCVGAVRHVLLCVPEADGVLCMQVYLVSCWLTVRACGPGGLVKCLVAVGVCPVWFALVCLLCVRVARLADRWFARDVALVPGLKCENVLPVRSAQCPCLPGCQLFDLDMIGFHLLEGAPSLRVNETGRAGQRCAAKSPQEEGPCRGPEFGREQRTGDGRIRRQHVATEWSLPNGNVNLSSPWNCTPFGLSFPKIFGEIEDPTLAFRTPGQAQIHKCQQTSHSFCLASGKSLADGERGCGRGWRPETGQHIPWDEKTSAPSNGECAYGRMKHHIIYTAGEQPF

SEQ ID NO: 995370 - protein, 392 aa, Homo sapiens
GERELVSSYYIFIYLGAVTVFTFILESRVPRWRGGMNTSLWAPCGELLRGGSPITLCCVPLTRDSTPPKRKGSKRIGGRYLPSPFETPWCPHLCSRENRPSVGHTTPFVKKRYEKDRREDVRGLRLTRGLLWPPHNTIQRPPRGKCPAAPSKSPGELKGRPTQRPAVTRNNNIRGRVEKTLEVKQEGTTRANKNGKGAPHPSPTAEVANVPTVEEERETGEHPPTQPPNGGGPKRRQEHPQKPPHKREPQQALRRHNEGITEESSHHTSAPPQREQENNAEHKESNKKDKADTDINRYGPRTRESSTQRKEPRTKKTATQNKAKRHTAKRNKQQDPKHQAAQMKRPTNTGTPKPMNTTNTHPKKTQKPTQPKLHKHQRDRGNRPRTDHDTER

SEQ ID NO: 995371 - protein, 166 aa, Homo sapiens
WGTKFLNWKDGSKSKTLSGCLGTTYKKGKGNPKMLALPVVTREVTPGLGGNKPEANASYITGLPGCAGHKRYSAKPDSGRSHLANVGHVVTQYLEIGFHLLHPGKGVSMNVTTNGGLILGQVGQLVALSQSVTGSTFFPNLVMATLHGISSPLLPVNQQSGFLRYP

SEQ ID NO: 995372 - protein, 80 aa, Homo sapiens
MHHDSPGTGSRLTCAVMALAEKPVHGGAQGKSPEKALARRQGANQEKADSQGGQNRLQRARIQKGALSSVAHPLHTLKRK

SEQ ID NO: 995373 - protein, 100 aa, Homo sapiens
DGTTRVEGVNVDEEQVSTCAVLGRIIMKQFDGVICNGHMGVKWRWRSRSGGSLTNAIFPLAQHTRRSIPHPIRCIDGTFTRERGWWAHVKLRAAFSVLLP

SEQ ID NO: 995374 - protein, 420 aa, Homo sapiens
MRAHQSGRGGDTSPRREEKRRSRDEDQTQHICNFTQHDEEIEGEEKHQHIRDEEEKTNGGARAHRSTTRRQTTTRRDGEEECHVNAIVTNTRARGREVSKTSRRGRNAQLHAGVEDVAQPETTQQTTNTNTKGTSTKTTEEKGTPHCLLIPETEGRGRVGRAPNKPHTYGAADKKPPPQTGPHTQTTAAGGARTDSRMTETITQMGGTSRRHNNKRRRGRRDSKHPPYEDESHTRRTQNKDSGEGPIKKYYLRGGSINIVCRAPTTQRKVVSHARYQEEGAGPTKRTAAGPTRKRQRRQSDAGNQRTATRIRSHEGDTQRGVGAKKRARGGRSIQKPTQSGGNNTSVTQTTRMKTTPLLRERRRKSTDRPRREKTEEAQRSTPTKKRARYCTSMTQQRQRKQDENTRAERKAAQQTRDSR

SEQ ID NO: 995375 - protein, 181 aa, Homo sapiens
MELVGSCRGESTRRIPGLYARSPSAGLVVERVKGGRSLLSSARNYPSRDLLTVRLSASNIVAAADDHVCKSAENYDHESTQLFNAMNLFMGAVNKMDQTVMVPRRCMGDVPLAEPGLDNDVGVEVGGSGWLLEERTPPVPDSGSANGSFFGPSRDHVQPLTVLLKSIRNDIRVGGVLHQAP

SEQ ID NO: 995376 - protein, 241 aa, Homo sapiens
MVEPDVGQRLARLVATGSNGPITENMPSAHGEHGHWTDGMMVYDCIEEKYRPASEENGVRYTNTEWNRRIDSPRWDKKAEFTMSSFSSEDNSKRYDAILLPLLRTTNKSTRTRRGAKLAKMTGERSGDFQVGVSLSARVAGPSSNCSAKGPNFARYTNAMHERATENVRARQMTQVSDPSREYRVYVPQDGGSPIRRNHAPRGIAPREEGVCMKAVVKEHVRQMLNNYESKLLNFDQGQKK

SEQ ID NO: 995377 - protein, 250 aa, Homo sapiens
GLDWMPSTDHPDLPAAQNIPSSAEWPGSASATYDVCECVQGAWSHCARRTHDNGLDVAVNHVGEFLASGLGAWLQASCHAAPVPLSDKFDCYNVSLGEKAAMCGYGICEYSTDEVYKGYFHVKGLRARDLGSLRCGPDGPTMPFSVQLGHLEMMRARQAAGLIAPLSSAETAVSTDALERSLHLEKLLRTRHGRGRTQYTTEAMRPPQGQGADTWVPTGNTDLPKPEQKHESETPRDNIIHAQGKRAQST

SEQ ID NO: 995378 - protein, 113 aa, Homo sapiens
MPGRRSPPTVPGALGCLAAGRLLGPGPLCGLVQPWGRVWSPSARAKAPQQVGGAARVIVPSKVKRAQNKPAALISYDVASNSSRSGCWNEKGKALIPCKKIILNIFPLYKRWT

SEQ ID NO: 995379 - protein, 121 aa, Homo sapiens
MFQLMDTEQTHAKRVSADVRCCPVNWASKNGMRLADMTAYNELVCTSVTYTWQCIESECDHRDDEVEESLGFVATAQDVCPRLTHMASCKAISCEPRDLGTFITLRAMTDSNHHCTEKMGN

SEQ ID NO: 995380 - protein, 140 aa, Homo sapiens
MAFLMLTERKISRHIYHYAQDHNVCRHPTGLLHNLRLTPLKHLHRKSPIKPRHIYTSALIHHTTPPFRLITHTLIHNYGHHPHPHNNTKPPHGSINPSQTSAPITLIPHILTTQTHTINTLVPELSLPKYTTYLHITQRI

SEQ ID NO: 995381 - protein, 414 aa, Homo sapiens
MATPTTHYNPHRGTWRANAFLPAPRLAATPLLATLKTLLNAQLLTTPSQRNYLAPAARPAACKLSAVPAHLRQPTSEPCLARLSPSLRNPFTYTSTHGHAPFPRDATRPSPLLALPEPPTGPAHTKPLFTGRRHSSTALTPYPYPTCRLLLHTTHFIPSAAYCWTTLATPPFQQTKRARLTFSCALSEPAALRTALRLRGKVTLPAIAAWATHFFPRCEPTPHCGHALTLPLAPSWLTFSYPPRNPWPVATLPPPHRQPAPSASPVTQRAQPDTQTRHSTLSTRDRITFGTLRSPGSTDSYQPMAYISSPLSNSARQPAAPRTRRGTRAAPPRRPSLRPPPPYLPQRDTHPPAPGTTQPTGLCDLHHDTHSPTDTAPPAPPAPCAQTDRPKDANEPANGLPRHQSTPAHSTTPR

SEQ ID NO: 995382 - protein, 113 aa, Homo sapiens
MPSDMPSPPMQGCVNECACDDDDTMLCKCDAELMNDAVCQCTLCVPKNGMCVALDECDVRSANGLLLVDECMLHVMLPVLPVLGSDATVFKCLMHSLCKALVMDTGEAVHEML

SEQ ID NO: 995383 - protein, 336 aa, Homo sapiens
AERAVHGMGYVNGKKVSVMKLPEKRATFFSSRSTVLGHTRMRKISNHGSLRVAKVAYPLGLCVGVSIYVRLHQVAPGHRHQAFFRHHQGRPGGPDGVQQAQQPLGDSIADGHEVFYGIMSQQEALAPEYNVYQYHPAPQRNSHVNPRKPSQGTERQVFSALMLLMLNRERSGNPGNLLGCCYNRDIPYAFWEGRHLWSSEATDGARLLLEDTRPRRMRNVKHRHLKLRTNPEGMAALPPTSGNRRRAFADHHDAARQLTYHRRETWPADLADDHTLSSSADAPSEIHPRHGARHNAHKMLKHRGNDRTASEPTGTLPGPTTAQYGDAHSSPADTQR

SEQ ID NO: 995384 - protein, 682 aa, Homo sapiens
  misc_feature (638)..(638): Xaa can be any naturally occurring amino acid
VCVELESGPHDDALMQPHLPEPVPSYHHTPGMDAAAAAAGPRSPVTCKPVMLLRPETHASHARQKHTATETENRKFLQQEQKTQKAREHIKERPDLSHPRRTDVNGHPDHSRTSTNSRATRPPMHQDEIYQHDTAQSQQYRKEITTSTSPNNNTYNRRHTDTRRQPATLTGTDQTTQREQNTMTPPHTADTSGATDSITPTHETWTQLPKGDTESEGAPRARHPHNTRPVTAQRAPQAPNDTTHHEAETDARRRAHTTGKPTEPQKTERRRAQNRDPNRSNHSRNTTQGHAPRSQQRPEPTEQTRRKTHGNRTKLTTADEQRSDKTTATTHRHDDRATATARRDGPDTRREQTPRTSTPERRRQSEARYHETRTTRDTRTNTHTRRTRTPDESSDSRRKLKQQRHHTSTPHHEYTDNTAARNDRATLRQPRRRQRERKPERPTRGDGQRRHQRTPRPPNAQQAQRRQTPRRPPRAEAIRAMSRTHMTLATTEMQRIRMRHLTTALQMETREAADAGQDETKSRTSNDGSRDREQRRDRGDRRQRPQTKAEQDKTRQQTHEQQDTDDEQHADRRKRDKQTRRRMRSTRRAEPMTHNDSSHDHESTGRDETKRERQNDREEKTERNEDRAAGEHRRPRTXRHDRKADDSDKRKRSDVATTPAHHSNTSTRMTQRAAWTRRNHYA

SEQ ID NO: 995385 - protein, 208 aa, Homo sapiens
AAAAALSAIAASAAAPPRGTRAGGGAGRERDRRGRRAGAELPALAPAPGGPGPCPAACRPTEPCVECLAAVGPPQQQVQDGHQKVWAALEVALRELHMLYIIDAIFKSYPDSSQSRFCIVLQIFLQALWCICIQYVFVILSANDHIFKFLQAVQLSLSVRLQTSDVGELLCFFAQLSSMVPTTRQGFGIELLPRKRSLAVDGTYRIYR

SEQ ID NO: 995386 - protein, 443 aa, Homo sapiens
VLTREHRASPLPDPPPCPHPPASSPCDDDIALRSVVDNVLLCMCKAWLLLVLTMPPVARLPLHTWVQHPVHQWAVIVCGIGDHSKDFLMLALTDGPKSTRAWPSYDPCNVPQSARTGNRYTQTGEPTTGSNNRGHQQPYRNTCSRAACWDIHAGRQRHECIARPRRTTTLDTPKRAKPSAAHAEHPKKYTSTPDGHLVKLARARHNSYTANAITPQRGHGCLSSTLVSRPITGHRLNPNLGPLPLEWRTFPEVDNQWVATNHKTTLGMAPPNYINALNVTDVTSGRTFPAHTEIESRNDTPLDRHTWGEHIGGTSAHHERTPPSRNASGQHEYPHTQAGARPGKLAPDRNAPVQWPASVCVLSIPRDPFDQQPKDTPTTTDGEPRSSSDPAGGINKHKVPSGIEPRAGSVTTPHSLLETAAGQAEDNKQSHSRDLESTAIPEA

SEQ ID NO: 995387 - protein, 73 aa, Homo sapiens
SSHKNGSPRCCPGCSPIPGVKKSSGLCLPKRGDYSWKTPLVLCTGGGSFTGRNIRQVSARPGFKNLRKAGSGM

SEQ ID NO: 995388 - protein, 330 aa, Homo sapiens
AGIRYHDLLYTGVYVAVRGRCAALRMGGGRSWAWARERYGWVVTGCEHAGMDGAQRAKRLLSDTGQGPPDVPECTGDLDTVYQVASNQVTCVGASARNRYGPRMRARDTKLRDGLVRCVGRVVDIWTERLDCSLLSGKLQSLRSFPTIQPDSGLETPALYLIGRERYGGHGSHAWNPRKGETRGVVTLEPSGRADEAWQSEAAAIMNSARYAWMYFIRAVDLGLGVSRRLDGFTKSSVGMGLRNVAVTALRPINGAYVDWGRISTPRVSRERPISSRKVGIPWGLSTVEAYRWKAVTQFKSGPERGTQTLHGRLSAVIIPCIRGQFVLRL

SEQ ID NO: 995389 - protein, 109 aa, Homo sapiens
MSCPIDDISPCDSSAESLSCERDCAVHTVLCDLHVDVHPSFWPSSLNASPMTKCPFSHVLVALLMPITTAAHSDSSAHLHFLITRLHTYQTTNVRIRYVDNTVETTNTS

SEQ ID NO: 995390 - protein, 248 aa, Homo sapiens
APRRRRPHWILQLLIPSFAHAPLKNCVLPAGKLHGAALTEAKGARSQPRDALLYSAAVLLHDPWPSQLMAELLHMLLVCVQLRIQPLVLLCAVAARTCLCSTCTWSDALMPVTVRLVNLHPHLRWSCLFCDGACCCVCALLVTSLCDLGLRRNALIRLEFGCGCTSRLACLILIRRWTFVRDYPTDAEALHSWTRWPCTAHLASLSDPHHGKRHRTCGRLEGDPYPLLDPLGIFHYGRNPRDTPGYRV

SEQ ID NO: 995391 - protein, 313 aa, Homo sapiens
GARAGAQAVARASTKVEAVPGGPGREPEGLRQAGGQEAEELLQEGLKPVLEECDNWLGLGRQSMRDVLPVANYGSDGPLVASSPPLMACYGPCEDMCGWLGPMGLALYPDYRVSGPPHFALSRGPALSTLLPRLDPRMYHIEYPTMWVRAVCAPSILLHSGASVLVESSLVDALVCAHWGPPSLIRWSPHSFLLFPLSARDLASLGAWPWFFFGVHARGGGASCLQSGFPSSHWELPARLFPGADGPRPGNGRLSGPQLVLPSFPVCPLRSAASRLIFVVDAIVFVGPRGLLCGWLPRRLPVLRIVVPCAFPG

SEQ ID NO: 995392 - protein, 196 aa, Homo sapiens
MLYARMDTTGLNYEVPLRRTIDHDLPRLRSHPDPRNSPSRLLFPHTRTATQTEHKGPHSLAPTTEHDGSARDAHGAPPLRPQPKHPTQSTQTHSHTPKQGHHHTGYNNPPEPRQPHHPPQAPRQPQRNRAQPKHLPCNPPRKAHHRPHKHQEPMAPTPNRHRTHRPNETCHAASPRTPTSKANKHPRRHTTQHAPT

SEQ ID NO: 995393 - protein, 344 aa, Homo sapiens
GHTGLRRLARGPYVSRAGGWSERTPGGWREDGETEECRDRSCRSPAVLTSPCSAWDKVPRTVTRRTRMQSLLNPRWLTAAGLTSLTSRPYGARAHSLAAALVHSAPRLAPVPALQPHAHSCSRAFTACHCCLQASSPHRRPMLPQLCHLGTRHLLSWDATLGSMAPNGQPPIYHSEQKPPALLDTDHNADCARHASAAAAISLYYQRKLRVALPTLPNNARRDSPPAHPGPGREFQPNLYQPTASPNLDPSNLPSVTPLTPTFKWADQVTTQPVQRDRNTPNARTGGITPAHSRHPEPPVNGAPRTRLRNRRPEPHPPTDTQPRPLQGLLTARAPVQLNDRQFR

SEQ ID NO: 995394 - protein, 166 aa, Homo sapiens
MVEVLRFVHRVIQELLVDYYVKIQDTNVSSEDKKFHETLEQEAVVTELMRLLGPSQEREIPPLLGLEKAELLEVMPSQRICVDEGSVQQRSRGAGSKEKCFTLVCTMIPIQMLTVKPWKAERCGKLAEVLVGEQKQCRMPRAEKEQMLCWEESAVTRGVLGAHLRE

SEQ ID NO: 995395 - protein, 324 aa, Homo sapiens
DESDRYIASTVAGMDVQEMEPVMQEEIFGPILSIVIVVSLDEVIEFINRREMRLALLAFCKEQAGGLRRVLTHDTVEAGSPFCVDNCRAFDVAMEPGRGCLVGRSGCQWDGPATMALFSFDSFSHHRACLLRCPGEETLTALALKPCGICARRLRGGWLRVAQWEVPNGLLVAAAASDASLPTGAQARQSTMIVPVRLRSWCETGGLGSLGPEEAATDGQGFRGTPLSMGLSPPLLGLSSHVREAPPSALASMKAEVDAWGNSGVIVPPWPDNGQRIPEKGEKRPFGGPRSGAGAEGRIGRARNWSATALVHAFREKIAPGGGT

SEQ ID NO: 995396 - protein, 101 aa, Homo sapiens
DPHGGWEPVHVVRDNNWQWSARTLTLVSAVQRGSESRDASHAPAANIPVYRCTIQHDTSAEPFVPTTVSCAAKDPTTFEGLERVEFCDGLRRCQDVAYAIT

SEQ ID NO: 995397 - protein, 383 aa, Homo sapiens
QTFDAHRGPGDLWQPSKVATTSVITIVNVHRALLHLLCPFIVRCSPYVACACVWLVGVAVAGCGWRGRLGGGTFPRTCHWDADISDIRVQAQAPSRRRQSHQEETVLQGEEWAPVGPELHAGPQTHSRPATCSPTGCVCVVGIGILHPWESGHIMERPSGSSAYSDWGLPEDTAPGVRALWSGLAWGWIPLLLYSKLRHLYLQRTPRRCGETINALTGFCRPPAQEHGWIVARKASDPFQIGHDEQCTVNPGMTTSTGHEMNLAPSDDTSRKQYKMRTRDVKRHMGSPKARRSERSSKLEERDQRGRAHEDHRMEERSGHKRREVPQETQGTPRKASTQTADNPRTKEDQPQEMRPRRHRGTGRREGQHYRRKQTSDRTHTQA

SEQ ID NO: 995398 - protein, 169 aa, Homo sapiens
WLGSTGKMKTILSNQTVDFPKKVDFTLKGRTVYREEAPEEPWRRDFNHFNVKLSLLGKKKKRLRGGQQGGVTERNGLTGSDYWKSCTEHDQGVLHWGFRYKMRSVYAHFPINVVIQEKGSLVEIRNFWGEKYIRRVRDETRCGWSVSQAQKDELILEGNDIELVSNPGV

SEQ ID NO: 995399 - protein, 306 aa, Homo sapiens
SGAGGLSIAFHRQCKESPPDFRDTVTQEHDAVLSCLVQVKLAWRDGEDIILQGAIHDIAQFYVGMSCTPGGPEDSARNQDLPQPESVCGKFQRPQCTLPVGECSWARGGMLLVILAAESKVAAEELAVCRTGLTGCYTESSIDFLDSSEYLMGPLHRTTLSLHRMILLQKWTLTETTTWTARHFLASPESVDVGGESRPTARHISGRAKRQSTRANEPPCGHNMPETRTKRHHQVDRHMPHGGREPKRRPTRSPQQPGAARDQRKSRELRSLTLTTADLWNSHHLLSDRTPAAASAASTGTTKGTG

SEQ ID NO: 995400 - protein, 110 aa, Homo sapiens
GTPAADVCFSVMCGRQKGPIEKPWRGAPNYTPSGISQSEANGATASKRRRGSIRPPWRHSPGVLSTVPWDAVDKLVADRRNEVVQKNEERIGNGSLWGSLLKDVIIGTQV

SEQ ID NO: 995401 - protein, 121 aa, Homo sapiens
MTRSLIEELESIVQAFVIRDQAHARPENGSKDMVESFESFTLKEGVMIFKCLSVALRMGPCPTLRLFRHYGQEEGKGSLESRIVEQGTNNAAPGDLDILTTENIPGPFRVAEHQGSRLGLL

SEQ ID NO: 995402 - protein, 478 aa, Homo sapiens
VSESGVFPSFLSQAAVATGNVCASKETAVIVTQHSYCAGGPGLVVPGMPAGCQPLPCVNVATFFVRTVTDTVTAICDLCRADYGSDGAMCQGQQERTWQRRHAGAQKHNTGTKHRHSAQGTPPWDAAQQLGTRAEHNLGQNQKRSHRRAIFKPRTEHTHRRNAIGHYHTYTAGPPTHVPVSPYATRSIMTISQLAKGPPGAPGDGTNPNQTCGSHRLQHTMVEYSSGSRRAIARTPPSHSLLTFQAHTAQHASVTCASLRPRISRLGHPKRSTAETQNSLWTPITHPIQIDITSGNSRRIQPLSPAFSKRDSCSRPHSNTTAPRQAATLNRKGTRTPAENSLPPIADNHYQYCTHTEDNNPFISYAMHYWTKAPGNYHKVRTPTQNDSHTVVYHSDLHESDPTPQSARRHTMPPSSVSTHHLQKMRGALSEMCSCVTHANTTDRHETISTQENKCQYTARHTVDAHSTQNRHRTPMLD

SEQ ID NO: 995403 - protein, 179 aa, Homo sapiens
ASVLTSIASGYQRAAGLNSGGWHSAGEHAEQVCEARVSPRRSSRLKIRRRMRELLGQALENEQMEQAMLNGEDYRPSGKEVKASQPARKSTGTGSTEVAPRFIDGPYPIGRSVIGDWRCRIGRWHLRGFIPVVAETWGGNTTIGKDLRGSVGGRSDPVRSVLPIHCDAYAHHNIRRSKR

SEQ ID NO: 995404 - protein, 156 aa, Homo sapiens
GRSRSLDKEDVDACDEVSRMALLGPVACFRRAPNDLPMVVVDWTVALGVLDSGLRRPSWKLDLTGDLESFKKQVFCADEEGVEYRIYISFRVSREIVSGDELHPVIRTGKASRLTRSDYMVGELQHLSPASQTDEKTDHLSWEWNLTINDTDWKVL

SEQ ID NO: 995405 - protein, 146 aa, Homo sapiens
RWCAEDSRFLPGFHSFVPCTVAPSLRCQPAKTVCPVAGVMQRARPALGRWLTLMFAVRGPRWAGLVLSSWGALVSRGAADSPCGRRVQWSTCAPLTRGVVLLRIGTLSRGWVVCLSAALERGPPWGSTPSRCGSGYGGERCRIEGS

SEQ ID NO: 995406 - protein, 228 aa, Homo sapiens
GPFFSPHVGSFPATFSRKMPTFKADRGVGGQEKHALLADQILAGNAVRAGVRDNAVGVAGSWISVRKSMWGPGMSRQDVCSRRTADTRRNSKAESVGLGTSPRRRRERTTAAWVQEVPQEWITMTRTEEWPILGEGCHNDEQGDNLLLEGGMWTRVRMRRATMQMFMKKNPFRAIVHPGMRLIMWTFLNEKDRRDVETGSVRRCTACLLPPLTPGSDMFGGSAGMSTC

SEQ ID NO: 995407 - protein, 270 aa, Homo sapiens
VPRPEQQRERRCEAITCLIPVGNLARANFSRLSRQEVARTSRRLGGARRGRAPPRAASSLLPPAARAPGLSPARAHSLRPPPSSGPLRAAQGAGVPRNSDPSHLDLPQCPRAAGADRRSRAALLRLPVSPAIPGRGCGVDSDPGSSSPAREPDRAGGARTAAEPPPWLKPELRRKPGQTQGKGDKAAKLARKPDKQPEDNDEEGTPGDGAANKTARIETLRDTDRRYRPPHTRQKEATKRQPQHPTTNHNQKPPNQAHNLTPPGTTSATS

SEQ ID NO: 995408 - protein, 529 aa, Homo sapiens
  misc_feature (72)..(72): Xaa can be any naturally occurring amino acid
  misc_feature (106)..(106): Xaa can be any naturally occurring amino acid
  misc_feature (114)..(114): Xaa can be any naturally occurring amino acid
  misc_feature (117)..(117): Xaa can be any naturally occurring amino acid
  misc_feature (119)..(120): Xaa can be any naturally occurring amino acid
  misc_feature (135)..(135): Xaa can be any naturally occurring amino acid
  misc_feature (143)..(143): Xaa can be any naturally occurring amino acid
  misc_feature (146)..(146): Xaa can be any naturally occurring amino acid
  misc_feature (154)..(154): Xaa can be any naturally occurring amino acid
  misc_feature (210)..(211): Xaa can be any naturally occurring amino acid
  misc_feature (214)..(214): Xaa can be any naturally occurring amino acid
  misc_feature (223)..(223): Xaa can be any naturally occurring amino acid
  misc_feature (258)..(258): Xaa can be any naturally occurring amino acid
  misc_feature (260)..(260): Xaa can be any naturally occurring amino acid
  misc_feature (299)..(299): Xaa can be any naturally occurring amino acid
  misc_feature (304)..(304): Xaa can be any naturally occurring amino acid
  misc_feature (315)..(315): Xaa can be any naturally occurring amino acid
  misc_feature (325)..(327): Xaa can be any naturally occurring amino acid
  misc_feature (411)..(411): Xaa can be any naturally occurring amino acid
MSGVTCRRVLVSEQSRRTTFAPSGSSWGLDVVQSGAQRNPWSRFAVTEHQRNARRPWAATLSRIHRAVREGXFNSDLCAKRLGEEIIGGGVCTSEGRRMWTRCPWXVRTDGMLXFSXQXXGGRTIRGLQVNSQLXTIRYSWVXFLXLIYTSVYXCKTRIRVKYPQVRYKLGRGKLSRFWGRGRAAVHEPASFGALAQNSLQLWRGCGIPXXKFXDKTMLASNXPSELAMARKRKKANRSVSAGKDRKLWLRGPRIVTXFXRRGSEKLTRWFFGFTASIGGTKGSLLPAMNFKGTIRNGXTSKWXWRFTMGGGADXAGSVPPHGEXXXLGIWPRDMRKRVVVPPNAPNSELIMEIRSRVDFMPGIGYLKVDKGYNALHLLARRLGASDGAYIPMLQLLSRHWHICRASAFGXWVNRYVPLVVAAQPKVRHAGSDCLLRLCIAGKSSAKKGVSIQKRGLQSAAELQCAPVASTSKGLLGPKKRGRRTRGGPQRTLTEGEEGGPPRGRTQAWARRPPNVIRQKEEGGSRHPR

SEQ ID NO: 995409 - protein, 81 aa, Homo sapiens
MTEEAHPPSMIETRVVCDATTKHNNGRVMTPQQRVVCLHVLHQQRRGGPPPAGRKILDTPLVQPTSSSPTEMKTGEHDKQN

SEQ ID NO: 995410 - protein, 262 aa, Homo sapiens
MCKVLGIPFLHLKVNGIAQQFEMHVSGPYILSTCDKCTVGSSESTRVGFTHQHKVQWSFSLNALTLCGCYTHKWASYILSETGRTNLAPGVETETRNETPHSPAGNLDATTCACVKNQQDHTRKSRKRAHKAQSTHDMSGAPKNQCYNTPTITKACNRRTPPKRGKPQTGAHKKTTPTRGSQQGGDTSTITPPREDTTERAHTNLPRPPSNKTPSTAPHKPRGTAGQHMGATTPPAVQRETRRQSIFNDNTAPLDQNPATRT

SEQ ID NO: 995411 - protein, 221 aa, Homo sapiens
  misc_feature (98)..(98): Xaa can be any naturally occurring amino acid
EEFSPAYHEPGDPQPYGAVVRLYLKLRPPWTDLSMLGDGRGRTGPSGRPTCLSTAGWLRTLTCLTGAHLCICRWSAEQTQRSLASRLVPWSRVTSRRXSPHAPQGAFSDALDEGTTVSRWSFVLVGDYMTNVAGLESSPPPVGMIAMRPRCRNKDVQLPGIRHARDSWGPALPGKWRIETSSNIASLRREALIARVGDQGDAWGDRFRKTIQSLGNEGKLE

SEQ ID NO: 995412 - protein, 109 aa, Homo sapiens
MDSYRRDRNVFQVVMNDGRQMMKAHVDVEGLIRLVTLHTILIHDVGIDCERTAKQLKIPEMTIVSASVERIQVQHKSPGENHWSGKSIGSPEEVARPKWNFGSGTVGAN

SEQ ID NO: 995413 - protein, 103 aa, Homo sapiens
  misc_feature (50)..(50): Xaa can be any naturally occurring amino acid
SQKHLPFLECHCKKACEDKGLMQDPVWGTGAEEWRKVGCKVGITGSRGKXPPGLWGRMGREIGKDRMSLWRYSGHGQEPPGLNRWASLDSYTLGAWDRPTLGD

SEQ ID NO: 995414 - protein, 102 aa, Homo sapiens
MMFTSHKTSHVASMKLLFDRIFEAMPPPFQSTMEFQNQSQPLIFSKKRLPSGIVTMSSRVLCRDDAWSCTEPETKFLPLCDWLEQPPVNATSLGQDFLGFGL

SEQ ID NO: 995415 - protein, 271 aa, Homo sapiens
TDSLPSFSGPTPEHQRALSCPQDPIPPTQAEPIRREEVRGRGEEGEPDRGNPAQRPEQVEIDGKSGRDTATKKGTNTQDRQRTQQENTETHEETREATHTIEEQHARERERKRETHNPEENERHTRRREHKNKKNREEDERQQKQRRTRSNNRSTTQGTNERRRAKQRHGHRGRRRAHTGTKVTPKERRRKGRGDAQRTNGTEHRDGKEQEELKKTSTTTLSKQKHKAKDDNRRDRRVDTHTEPRRSQKQDPAKAHDEDHDAERDRRRQAA

SEQ ID NO: 995416 - protein, 220 aa, Homo sapiens
EKLCSGQRWIDFLKCALHAGPGEHASSRGVREPHSSVVCSICFPHLDGADDAMRSSQHQSRVLAMAVMPGQWLPWCKMSGQLYWQDCHRCHVGVLCHAHGVLIFYGDQPEIVSQSMVRRNCPSCDSRVLLTVPHWSVCIMRMELAKCAHVLCSLGWKDPRYNPWHQSPGACTPRCAHTGTALRKWALESAVHRRGELGTIQGNTLNSCTASRELSLDAPY

SEQ ID NO: 995417 - protein, 290 aa, Homo sapiens
MAGTALKRADWASTNRLTLKSVRKELVAGPIELKRTFLEWEALIMGPRRHLRLSGGVLPAILRFPTLITRLSPPKMRLYLVMMLSVPTIYPDGRVCISILHAPGDEPMGYEELAAVAVESCAECGEDPAVRCVEHAGESPTARIVELRWMRPYMWSDEREQCYKDCQADRPEVSGTVRPGLAQARSSSREQLSHSPPGHLVTVMLCARYQTRQTCKKPWASCSDRQPFLIQTRPSLLEMDVPSSVRNYSASLHGKFKQEFLHKGVPRLDYSELVQKLPSPRREPSQFTVP

SEQ ID NO: 995418 - protein, 201 aa, Homo sapiens
MGRSPPPAASPTPSEDEEPEDEEEEERQRLRKVKRRRWRRGEESAGRFLSRGCLPGARVGPWTCSCLCDLRLLDRAASPRARQRLRSSSGLLLPPVVTEMSRGVTVLPVLHRHYSGFQPYVRPIAFSRGALHAPSERKPVLHSHAKVHGSLRGPPSGNGRMALGSPQSFPCRQGLDTVPWAPVTNRPGREYRCSQGFRQAR

SEQ ID NO: 995419 - protein, 234 aa, Homo sapiens
  misc_feature (83)..(83): Xaa can be any naturally occurring amino acid
ASIPAQATNEHFSRVLLVLCGRLIWSPSGPFCFPLGGAGVAPSSPRPGVPVCTARGRQISPFRGRPHVSRSRVGAACVLTCGXCFLAPVFPEHVPYGARKRAARGEEILTLVRGANVIAPAGGAPSLRFLPHPPDEGDEKGVPKEVYSGPAKLSRGLARRVLEKGLRAPRDVRAPRERRCLSQAWGVSPSPLPVGAGASESGENPKRENQKEAKRTLACPPRGGKPPFSQPFIL

SEQ ID NO: 995420 - protein, 244 aa, Homo sapiens
MDSKSPGGLNFFFSTSGPAASWALLARMPKSRACGTGHTETSEGLEILLFLSDDSSFLLLIDVPEGHDRSGQLGGQFQFFSKTVSLLGGRGLLRGKRMSWERTPSAVCTWRLQGLRWTLSRLLGSTENAEWSGPPLWVNAGHPELLQAEAAAGAHLRGVPNRGAAHDWAGVGPDAVATGTMLGAWVCRAYRTGGSIRAGWLEPRGHAPLPVLCESGGFKNHAIPGGRHGCLGPWGSLRQERERR

SEQ ID NO: 995421 - protein, 265 aa, Homo sapiens
GEAVSKNEWNAYYEEVVYVLEEIEYMIQKLPEWAADEPVEKTPQISAGAELYIHSESTGRGPRACGTVEIVSPFNRHRSQAPWMVRRVACEGKRELCPLGALRVAEVRTMAEHLLGVTIHSPLVNLGTGDSWFPMVNPNGAVVPVKNRGETVFQRQQVSTYIRVTLVQSRGVGSKHHHERLLTESNLEPLINAGAWEGKKSLTYVDENCDLGRGLPDSIAWGKFMNSGQTCVAQTTSSVSPRIQNQIVEKLKKSLKEFYGEDAKK

SEQ ID NO: 995422 - protein, 260 aa, Homo sapiens
GPGHPVGAEERSSLLSFAALTALRRTLPARTRHVNSTTPYSQKGKKFRNPYNENREPEEYDEGINHTGKEKNIQQHDRSKKKQQRTARHEQKKTKEERTKAETTQQKKDQKKENNNTQTRRDRKSDKAAQQHDTETEPTNKQKKKKEDHRQNTTKNRQGRPKAPTSKHNTHNKAAKQRKDKHHETTTHQDNRQTQQDRERKDNKNHLNNKNTKHAQRKKTEQGQRKKEKTNQNKKQKARNTTNHSKDTTKQQQHNTKRTK

SEQ ID NO: 995423 - protein, 362 aa, Homo sapiens
RERERELVSRFFLIFFGKAILWKNWEGSLPYYFIIVKILKWNVAKKTPGLQTDSGSVWARRLGGAQGWPPPQGVREGRGATANKVKRRKGQGATGERLIMRGEASRWEQSTKNCDTQRGTGERGYPVVHNRLKTPPKSALRTNRSIPQTKHSMETHSRHPYVSQRGINPVDPIHHIPRGSTSQGAQAPPGVTVLERHGALKSEERSKTCNSPGQTPPEKARRAWHKTINPKDRGYRTSRSAHTAIKTLEEPKGHQKENRPGIQPETNDDTGTRGERSVARGHHERQTGVQPTLGGQQRNPRAGGPTDKCATRYAAPIKVGKKAAITNVYPKVRITTMCITRKELERANNRERKKPRGSRKHT

SEQ ID NO: 995424 - protein, 138 aa, Homo sapiens
MSEAGEAEHRAGSTSLAAGSGRRRPSADPAGPRRPESPRGQLVRHQAAGPERPTTTIAGNPGEGRGPRSHGHQGRRLFSPRRRAAEDAREKSSRATKYVGQLSTWFNGHEMRYGIYNIENDTRRRCISNIRLASRRIT

SEQ ID NO: 995425 - protein, 116 aa, Homo sapiens
MGAGGEEYTTTRRPCDDQEHDGSSLEKQDVRPNTQGGVHTNEDGKCCVRTPKGIARTLRQGSGPSQQTPLRAQTSAVHKHRGLPPTRRGGGTTTPPRRKKTYTRAEELRADTKLDS

SEQ ID NO: 995426 - protein, 318 aa, Homo sapiens
AGFSYAFPEAVRVFFKELIQELGIGYSDTGWISSILLAMLYGTGPLCSVCVNRFGRSQGLFMLVGGLFASLGMVAASFCRSIIQVYLYHCGSVTGLGLAAQVSQLRRSSMLNRLLQQRGAPWRKRGWRQQVHLSSLCAPEPVWGRLTVRNRYGVDGVGFLILGRSCCCNLLRVCRTHEAPGGQLAQAGSGPSRPSRRLLDLSVFRDRGFVLYAVGDSVMVLGLFVPPVIVVSYAKDLGVPEAKGRFLLTILGFIDHLRAAGAGFVGGAWDGAAYSVTFSVLHVFNGPADLAGLRGAIRGLVTSASLWISTAWWGPESK

SEQ ID NO: 995427 - protein, 105 aa, Homo sapiens
  misc_feature (102)..(102): Xaa can be any naturally occurring amino acid
MPGICLTVARFSLVEGASSGYTDVSSSDWAAEIKSLMFVSLSEGELRDTGPVREKGRGKGFQSAHCRGNTPVRCPMGPYLERLSEFACQLRHWDLAVEAYLXASP

SEQ ID NO: 995428 - protein, 265 aa, Homo sapiens
PSLASQVPWTQDPTWSRDAGSPPWGLVLAHPAGMPTVFQTPHLRGAPGLVLLLSLLHPRPRPAPQAALYSAWREGWENLQRHYPHLSHCGAGGCMLYATNKKKRLFFQTKKKKTKKTPGFFSCFWGENPFFRFPTYNGVGDSGEKPRTIGGNKPPAKMIPSGRRHICGHGGHSRGTGSKTSMCSTKAAGFLVCDPPHSTEVRDYLPKGPTDEYTVLRPPPVGLNNTAQRPPVVWINHGFSRQGHLCHTVDMAAHHGRHGNRGWNN

SEQ ID NO: 995429 - protein, 121 aa, Homo sapiens
AGGVTLYFMVRKKDGSGNRVDTVQASAFHFRAGFRAILGPQGLPGAQPVASRGRQARLTGLEALFKSLGESCVRSTSNVTCATSVQFVQGSGLTRGNTVVHFLSTANSVIGSGEKPPGREL

SEQ ID NO: 995430 - protein, 108 aa, Homo sapiens
MMGGDLWLADYMKTSGNDKFAVFYGESRLGRDMKQFHEINLEIEDLEQVSVLKVFPKVQKESDLPGRTFKNGGLAQELGKGGHWKGARELEIHDKRLLAEERQSGGEG

SEQ ID NO: 995431 - protein, 100 aa, Homo sapiens
AFRGAVAMKVESVQFYRVQDLARTREALRQDRREELTSNLNAKCESGLSFTKRKSSLQIRLDCPLQKERHKNRDSRKTIHQRRTRRCSRIPEGHDWCISC

SEQ ID NO: 995432 - protein, 100 aa, Homo sapiens
KVCLNSQLPSTDSPVIVRRSLGKRFISLDNQGCSVWILQRNELSSESTVKLAIYRAMHAHTRYPVICIPVSTQRTELVLTHRSPGSDGTLWRGAVLGVRD

SEQ ID NO: 995433 - protein, 235 aa, Homo sapiens
RVWDLSDIDKDGHLDRDEFAVAMHLVYRALEKEPGPSLPVSSPPEKRVCPGPSRLLQPPQRSSSAVPRRSELKEGAVPKKLKLKSKVNWVVPWRQMRFDEISRRLTGLDGYVSGQEVKEIFMHSGLSQNLLSTHMGPGRYEANGEVKQRPIRVAMYFIQKKVSKGIDLLKSSRRTWSRFGERHARPDIQALSAPGELHGVKELDDIINEIAQYKERTITGKSIREKEEDPTENRR

SEQ ID NO: 995434 - protein, 372 aa, Homo sapiens
LPGTSGPSRGRDSHTLQSVPREFALILWHPYARHYYFCMMTEDRSEAQWCAERVLAKDVRVRARADKWESPEALHTVRRARAYHRMPSPHVTEPVQGAVLAPGRCCVGTTVTDSVRQLVGDGGAGALSLKALASDRVVKGETRKDAERRPAGISESPDRRVNHKWVVSDDKAKVRSLRRRRVACAKGCRLGVARTGAFARGPVHSDTWTYWILTLILPLLQRKATRLDAGPKESMRIPFHSPSRYWDTKSSCGGWESQWYPTSALIIPTIAHVLENEGPLEVGPPSTSHGLSNFDGDRELARLIPRGGYNGKPLETLGNGSLPNDRGRPIGTHRPCARTLTMGKRTGWSRGCESNKPPRSRNARGCDESTER

SEQ ID NO: 995435 - protein, 91 aa, Homo sapiens
GGPAWTRRAHWFRSPLRSSSPGLQSGPPEALCVCVHARAWCAQVRGFARCAWRGGNLTRKRAPTLCKECARSDLDRPVWRSGGVVFQFSMV

SEQ ID NO: 995436 - protein, 114 aa, Homo sapiens
MELRQRVVNRSVCKNESMTYESMVKRRARAWDAHDCIAGRGRRLSVMLYLLVYRAISQDLPQSAMNAAEYHRQSGGCISLRLTGTGDIRVSCTTSGDGLYEGLEWLSNQLRNQK

SEQ ID NO: 995437 - protein, 262 aa, Homo sapiens
MARAPECSGEQFLNLRGCHRAIDFESLIEENHLLYLEEPLDSSLHKDVPCGDYPVNEEHVQIPLVCETRCFSVPSVRYHLKDVQATSRYLLRAWYGVKHNSGKGVEDKGVYRGKRRSGVPSWKMLVVEREMKMKVPVKKLALPERIDGQDWHQQVVQVGSLGSESLGEFRYWCPFDCMVQLGSETLVREENLANPDSRVRTPEILASGLPMQGAVTDGREHGAHTVIAPAHDSLETPSIPQTSFPRDDEPPQQRAPSNNRLI

SEQ ID NO: 995438 - protein, 110 aa, Homo sapiens
GWSEPPEVKTGGTGEAYAWLPRASTTCAQMSALDLLDGSSDGFVDSAWISTRAVAGAPPSNLLPRLDARCLSSSRVVSFRARSLERLAIPWRGCLTRWWDLVIDKMRMEG

SEQ ID NO: 995439 - protein, 306 aa, Homo sapiens
MRQFITPSCVGSQCFLCGSCHRVRDSVQNLLVSLRCQFAAAICGPFPPFSAPPVAWRHPAVPHSCEPRLKWLGLTAVSLTSPIPLWPLEPTPGPPEVQVPAACGSQSRVKPVLIVGSKLLCAVASLTGHLTHCGDFQLPGFFDEGCQSSARNSCVVHVFHSYLPGILRQRLLLRPLPIGSTSSGVTGCALNCHGYVGAPSFPGRYPSRLWTFPWFPNISAPSPLSAPPVSPFAGRLRAVQIRLAGAPGLSDISAVPCDGAPAGCLPAGPPLFLPASSPVLAPGASACDLAPPAAYLCSGACPPTAH

SEQ ID NO: 995440 - protein, 284 aa, Homo sapiens
MYKAITTHKGGHTNKRGRRVWPRAQWATHKPLTDTALTAFKYCLTSHTIFAAIPNKDHLERRMSYHKQATPENPPHTVTPATQTRARTAPDSRHTTTPDRTRRHDRPTRTTHTYTPPNTRTNTTTNTKRPAQHTTLKHALTRAHPTPSTPPSDQKHAHETDVAEVARPQQEAQQQHTRAQGPVRLTNRASRVFSNKQQRRDKVAQKCSPMTPRGQRAQDQNPKSPTADIRPRPRWLYAPYTRKRHATGSREIRASAAPAPTTTQWRSPSDGQTRIIALAGKRRD

SEQ ID NO: 995441 - protein, 407 aa, Homo sapiens
GQMPCDGRGLGSAGHPVWCPGAMACAACLKVTELLLMELLRLLACDTRMAVNGLELAERLQCGVGWPEEPDDVARSSTPTTNRGLTRAHHSDGDAMDNITRQNQFYDTQVTQHNETRVRLRDGDHWHTWQQQQAYRPEMTDSRLKHRSTHQHSSRLTASQLKPDRQQFQSRKEALSRKTGARGYFEHPRGYSEGPLLLSLLLTTALTTDFDEYPRLLSTTYNLAPPLQGGPENRQQVATPRHHLSVLSITCWSTGALCASYSGSRNVGRVNASRMTTPLYGHIFGDIAIASSLTGAPAPPHGWTAIRVRPLAHLEGPQLRKRRLLQHCAYWEAPLYKRRPQVVRVDPAPRTEPGDNSCDQLIVSAYNYRVSQTRNSQHARRALSEQRDVRRGRSRRHRLHRHRHQQE

SEQ ID NO: 995442 - protein, 303 aa, Homo sapiens
LELSSRGLMKVSRSPARIPVTSDDIISVLMYAVDWVYTLPWNGNAPLEELVLESVIFGTLGAHIAPDDVTDEMDDSYGHCIHERAVRGCASTKRDTNECPWDDHGMDIDTNDWRVDLHVQVVIQANFLSDWTRNSPVEHPGEPWSASEADCPLAPHSYEPTLQRTVHPLGTRSSDDNFNSLEAPPSLTTYSPFSHFRAPKGGLVVQRPYDSPRDFADTSHALLESSTFGKHHKSAVISAGRLKNWRKPTVTIVDTHTLYGMAFAPLVRKLLGRKRLGSRCNMGRHSASIGTPLHSRTASNLNT

SEQ ID NO: 995443 - protein, 214 aa, Homo sapiens
  misc_feature (159)..(159): Xaa can be any naturally occurring amino acid
MRPQRSCAITPVLESRGNESAQEDRKGRENAPVGTQEANGTEYTGRDKDPRCWKGAEETTTGQRKANSGEHQSMKKKGKQEVKGELRGKPNTNRQAEDNKRPDQTAKNGAKTSSGRGLHVGIDRGDDDLHALLSVGTAEQTGKSERLSRGGLVRVSRAXIWMYLRYDCELITSARVVTDRSGLECAAACCFHGGLRVPWMLQSTMIEVGDSEYE

SEQ ID NO: 995444 - protein, 293 aa, Homo sapiens
MAVGRPPRACGCGASEAGTSLVPATAEPAARDPAREIVDGGRPAKRQLAGSDSDLDSDDEFVPYNMSGDRELKSSKAPAYVRDCVEALTTSEDKSGWEAALRALEGLVYRSPTVTREVSSGAGQGASASGGRRLCGREYQAGHATPRGHCVGRQRAQNPGTGGRLTWTHKSNPTENSSATHGHPWMADHEMPQEQVRQGVEQEGNPNTGPQVQTAVCLQENAITQERPGKEEKRKRKKTDDAQRRPHRQRTTTNSGENTDTNDKKQKKTTAQQDRETKNNSKKRHDTGAHGKH

SEQ ID NO: 995445 - protein, 262 aa, Homo sapiens
AETLVSLRVHTVDDIQQIAIAALAQCMGPSRELVCRSCLKLTLSSELEAMMRILQDQRPTVVGYRDSATARSEKAILNITGDLIHLASSDVRATDKTAQSWEPELTICGWWRPGYNLTSALTPILTRSRVLKEEPLTAGGPLPVLMERQSPYPGSLTGTRSPGPMSANLLRVAGGSGQSPSRVTDHRAYTLRSFPRGPETEWGDKRLNLSRQFRWSELECVPVGLWYTVPCASTYCEEDLGVADRRGQGPLEGALHGQGRLA

SEQ ID NO: 995446 - protein, 438 aa, Homo sapiens
LTSSMGGGKNKRLTKGGKKGSQERKLVDPLSKDKIGDDVISACYVQSIRNIGNDARSPGPRGIQRLLLMVLKVSGCVLRSRGLDKTLHEIDEVAVLGREFKSRLLERWLQGYNELRMELNFASCYGIFTPWTTHGVSSGQQNGQTNDGELTWMSRLTEWVYVGSRPVSCDRGLDLNKAASQNQYTAMNRLEWLSQREEGPTNIAEEDDGQSGCREVQTNIDVEKKVVNYNLSSRAGMWTRRSKEACQCYYMPTPDDVFSLEPVPGCCKEKPKVWNWGKLMELAWLDGQEFSEQPLGDQTGRKLNEQGWQFERTKSRSRVQRDQNYKSGEIKTTNHARRQQRNNQRKDPGATINDGRNTTRYRKGRAETHSRRPHCGASGEHSTGHLTCSQHRTRDDTQHKKGATRASQKTANTNQPTSATATPPDAPPQPPSNSRSDT

SEQ ID NO: 995447 - protein, 426 aa, Homo sapiens
FFFFQVEILNSGGRKGVSMLRCGKGPAQLPPAPQVHVPRPQLSLPRLLSCALPFRGIHRVLRVHTLRQGQPGLNTRAAESPACGQCHNGRLRGGVKQQDHSPGPRRGRGATSGSKGQDWENHILGRPGAQTHKVCALKRGGRKEDGETAKSQPQKERGQETHEPHDTNDSKNQYRAYNNRSINMNRRNAQTQKHQSMTIRARHERATKAPRGNTKRMDTEQHCITKEENTGGKKETHQKGEKEEQIITREGGTGPKGRKNNTRTHRRKRGTEMKAPKAVYVENPKNTGTGPVSKEEHTNNETRRTNNTNKGARGEKTNKEIKRQNYRNKDPRRTTAEHKHRTTNKNTDKPQEIEKNKDKKEPMHEKERLIAKHKRKTTSRPQKVEDKTQERKKAQNKRETTQKSTPRGERTKDKKQTEKKHKNSHQ

SEQ ID NO: 995448 - protein, 77 aa, Homo sapiens
MTKRENKGAPQEDANKQERNPEKNARTNRTEQHRARRAEGDTHRNKTGETTTTTRKRKKTKNKNSTKQTYNRTHTTQ

SEQ ID NO: 995449 - protein, 571 aa, Homo sapiens
  misc_feature (496)..(496): Xaa can be any naturally occurring amino acid
MMTIASSRHLVKTILQGMEERGSECSTCSEDDTVSGLSSPFCSKLHTSLGQDAMIAVSENQCRRQRRRRRREEAREEGRAVLLFEHIDDSTELINWEIGPSHEVIRYDAGYAIVVRRSLEIDHCLDEWSPVRYWNLKQERKLRVAKEANDYTFKSGKSPVDWSAKGCTLAQCGSQICAPRYQYQTEKTCREIEGKQIINRACRGGKHWNITVISFPCCERVCGSNPALGLGIRYMRGTIDWGYPLSANWFRRAPIVWPQQQPQELYIIPCAKDTKRFPTAALVGSSIWDWAIWRIQMEHWRGGFSIRGKGLSRFLAGRQPNCGGLRVNVSAWNAVAKALAQQAQANKVCAKGDSRLCDTLTYTYLLKGDMQHSVVTRGSHCDSFRTTGHGPYGATTLANSFVLYICTCGANATTEQDVGHRHQSTESKIHTLRTGGIPQSHDKRACQTAQNTTRYKHIKAHTKIKTEEMRKTPVEESRTEEQGKNSDSTLQEEALXENEHSKETNHREQRDVTTKEIRKTEHSNQSGAPHERHTSGDRVSVTPAKDTKERHNRNETTVDAHKRRRTEEHQE

SEQ ID NO: 995450 - protein, 226 aa, Homo sapiens
GYGDGYDDWETDEDEEIVWAMKREEEEEEGGGSSGHSCVVGVARDSVKRKGDLSLRGRGWRVGAAPLLLRHLGQGTSRRRLMFSQALTVPESGASPLDYEGGAVTFTKRRVTGTHLHLHWQRSPGAWYPSCGSRGQEHCLLLIDPETAENLTPVAKPQMLHFCCNARTLNWGDGMPGLKHLETGDPYRLVAMLRIVVALKSHSVLLLSLIGLMSALFAARVMIPEG

SEQ ID NO: 995451 - protein, 230 aa, Homo sapiens
MPARQDASSRCWPAGGLTALLLLLLGLAGWRALGRPGPGGGWRVLRTGPPRQTVRGRDRTRSASTLYTADMFTHGIQSCRARSSCSSRPGVDTARRLSRLGMTWETNTNSMEDAKVYVAKVDCHGHIRRVLRPQGVRGYPTLELFKARPRSCEVPGPRDVPDTGKLDAADNWNEEPVTPEPDVEAAQCPRSSKHRACIEALQAEAHFEPAPVAQTAAPRLSKVTFRFQWM

SEQ ID NO: 995452 - protein, 85 aa, Homo sapiens
PRVLASLGLGFQRAHGDDQKYMADPSTVSLEATSAESACCYRCGSAPCTSVVWLGRTIVTRLIRRKIAMDVFSALLLYCGKASYR

SEQ ID NO: 995453 - protein, 629 aa, Homo sapiens
  misc_feature (85)..(85): Xaa can be any naturally occurring amino acid
  misc_feature (597)..(597): Xaa can be any naturally occurring amino acid
MGAVATARVLTRRVLRSQPVVKSREADQSLVDVSLVEQPWAVNKILGHGHSARVERCTEHLNTLVESLCVPRLCHACCMLSHNAXQYPSEYTPRSKRMSSIAEYKYQDVHSPWARVSTVNQTRSVHFIPRVTSRAHKTVDYEHRPRNLRAKTQEKTRQGTYTVLRLQGAARWGTKRRLSLVGLDKAGGTSGSPGGGTPNRKRPPWGSTLLPCRCRKAHRVVEKRKTPGFLNTQKAVVAGVGGEGHYQQPKYKGPGEKNIGGLGMRHFGGPFIWENPELEDRSPPICRRRGGVGEYRALFRFIVPHLWLLFGVVCVLIQEELAEVVNLPLLKSVGDILIFLEGGAHYRGKSRRLSRVTGFPYEVSIRERAIIASTVVRPEEEVAALVFQWNQMDAWSKSLWWAKSNFPSMGGGTVSLGFREMPPEEVVAIGLSKSKRGIPDVCPEQLNGMKVGVETRTGDLPRAPGVTTKCRAGLGLVPLCHGGALQLKVVLGGAIQNRLRTKRFLEMDIGQREVHKVSLSAQALYKGPRTKMMSFTPVGLRRRSHWVTIMRYYSFVAPYRCHLAFHHLPERTTVSKTDSPGGANTNKRGGQTNTTTXSVTTERATWSSNTRVMQQPAIDTTRTEETNES

SEQ ID NO: 995454 - protein, 64 aa, Homo sapiens
MPMAAIGRDRDLTTSAAVPKSDAVLETGRLQAQSAERAQSRRPVTQDGTREPIEHSAHTPRAPR

SEQ ID NO: 995455 - protein, 211 aa, Homo sapiens
MADRCFTRVAGRCGRIRASAVYEAGRVEDWDFKYACISRRLSQFSPMIELFGLAGNVWTDTVLLNVQKSIQTQEDRIIIKTTMPEAVSEGPRSTHLRDDKSQDTVPRRLARFALRTPYSLPTLQQMSTYRKTTCLKRSGEGAEFQPSDGMSHSRETPVPKTSGLRHPPSQNSRAPYLQQDEVSTTEINSRRRTGGETEHSQETRPGCPDTY

SEQ ID NO: 995456 - protein, 93 aa, Homo sapiens
VLLGVSDGTGCADAMVLVLVFLCHDSCWCPPCVLGQMQLEKAKVPGPIFHYDYHTLRIERLVYSCAVRLLGWRESSLIPKIRKGANVSVALLK

SEQ ID NO: 995457 - protein, 295 aa, Homo sapiens
  misc_feature (28)..(28): Xaa can be any naturally occurring amino acid
MNPLFTYPWAFWGIRSTGREGGSRNMSXPVTKPAEHGVLNYMHDVNHKGSYHTDASLHIRLKTYSGRNCTGIPVSYSSGESFPFNLENGQFCKPTGRYSSRQDPLSIDSPFIDDYCRVKRSRGTISRPAIATSPPSAYGVHSDSIFNPGNVTESNCAKANEDNVHFERDTADATPYLSLRIVIERHTALYIRGHTRRRPTSVKLEFGRYNYTLGDDCQTTTAHKDIDRQRTVLTSRHSMPITWGPQDTAVSEPRRRENQNTHECCPTAVTQRPRDELIAVDDKQLLLESSRQYVV

SEQ ID NO: 995458 - protein, 282 aa, Homo sapiens
PLQSAPPSPLPGPGPLLQYLILPFFREMKCGWGLAPRLREPSPAAPPDYMDTRSLSQLIFSFDSPETPSHDIPAGNHFLGTVVGAGATAEPPLYRPWLTWTPEWSRAAAQAFSLLTLEAASQNQSSGEAAASFLRSPLHSPSLLGRQLHLSPAPRRHQQLGSGPERWPEGSSVVTVSKRKDTSVDENYDVGLQNSLGTCDTCWRVCTWAWHSSRLENLKLSRELGVKTPDEGGLWMLPMYWPEAVCALRRNPASRANVLGRYHYESSPNRRPFGIQGAEGCP

SEQ ID NO: 995459 - protein, 398 aa, Homo sapiens
MGPTDGGDERHGHSTKRAPAGRVRHANHKGTYCTQPPTEQTTGRTRTTNAKPHTNPQHAHPRPPTPARPQHPPRPVYTPGKPPNTNSHKRATQLANTTPQHRTNPARHTQEQTSTTTNGRQHDSSTPRHRYTPPAPHATPPHHPHARTRQDAAPPLSHPPPHQRNPQPTTPTSHPTQGKRDKSTERPEQRKRTTHPPTPPRPQQTTQQQSTRHNEQTDDERSTHLARTEAAPRPEGPHAPPAADAPRLRYTGPATPTCNTQEHARRLDGIQRIGGTRHDKTYQAGTHDREGARTKREESTQTATSRCIARDTAFSDPSPSRPPSIREYREHCKSDDSVDGSRDDRTATDTNSKPAAQTGTDYLATVAASRRTRQDAKSSMAKRTRSADQTANNRQSER

SEQ ID NO: 995460 - protein, 364 aa, Homo sapiens
GACPGLLTPPQLVGQFCPVSGDGSCLASWGLTDPPCVVRLCPVHVPHFPAVLQKLVVDNCSLMCRACANVSLAVAWALAGLTGPGVRACPRAWGGRRDGLAGSAHGPPVCEQLAVCRWDPVTRGVLNGHLKCMYVALLTHLPQHRCTPQCPVDAHTALTFTLNWWHGEVSAWWKSTLVHKTLPAQTCPRTGNALLSAVTERNSRQTGRAFLKHHHVGTLTEKGTSNLEDHHRGTRREYGRHAMVSNTGSAENPSADLMWEPGSFVAGFLQYERTQPEEPSNTQMTGAYQVIVPPMGHWPWAKAESGFPGTDIDERKCHQRAPDCANLRFCSECNRKQAERTLEHYQSWTHTHPRVNLRKHNTRD

SEQ ID NO: 995461 - protein, 157 aa, Homo sapiens
MNSRSSGNPLLRKGPILRFGPIILQAPLYERSSLVKSGRGPLMQARQPTRQAFRLHPAAVPVKFARSCQPKLDSYICLDTSEFLLPCLGSTYCTPGGTFQLQFSFPRSNLVRPQRHGATASHTPDISTFPLRHCSNGPQTNQHTKETLSDNRPQHQP

SEQ ID NO: 995462 - protein, 30 aa, Homo sapiens
MKGETVTSNTYDSSLTYNASSITQTERNKN

SEQ ID NO: 995463 - protein, 90 aa, Homo sapiens
EETAHWKPPPWNDVDPPKDTTCEEHYPELWAPTPSSAWCPATSDGIEWGDGAGSVILTSGIHAPEAHEKLIEYKDLSSGPSITLDRNRHM

SEQ ID NO: 995464 - protein, 307 aa, Homo sapiens
PLNVDHFSCTPLMWACALGHLEAADAHFSDWNRQDTDAFPTSLGRSAICHVSITSQGVTVTTIARVPCAGNYEQTGSHSGWSPPVCPSSHTHIHPRPQHNMDRDADVITRPSELVEMAPFSVTSAYSRCHQNGSPTQLHLCQHSEMTMEDMDPGQLSSGVPEAPLLLMDYEATNSKGPPSPPFLPSHQTSDDGAAPEDADRPQAVDVIPEDMISLAKQIIERTPERITTRGLVGLPEAGASLPDRTGAVRLSETMPGRHLTWTIGDTFPRHKPIQRPAFEPRRLVVIQDPPGQQPLHPPLARGTDSA

SEQ ID NO: 995465 - protein, 111 aa, Homo sapiens
MRTNTSNKRIDVHTESKESTDRSNKSRHSRSHATMRNKRELCDTEQRRSSNRHGRAQTTQRSSSPDARRAHSSASGRGLAADLTATGQRSRRPETRHKHNSTHTERTPQRK

SEQ ID NO: 995466 - protein, 454 aa, Homo sapiens
GRFCTSVRRCPLIRDFHLAFSGCIAGTWLVQAGRGADLLWQSFHGAPLQQECRSFANISSEQPAATASDTAGLMLAYAHNHSTSTPRRPHDVDTGRWAWTSRRRASAKQDTRGWTTHMQAANATQGNSEVHIKHPHIHPTTAQGKQQAPSQGQANSPSTDKPDVHHYCPMEQGNTDQASIASRTQQTQKRFSPRTLEARHQVTPKTHERDMTDTRGPTGAFGIHHGNTRGDGTEDRAVSEPWRARRDFTLTADEQDTLVNTTKHDYGRPTLSGLGQGQHVVQAHAWHGTHNGTPGKTGIKDECDTSTEAALEDRQTVQMVNGRQNASRTTRAEGGNTNGKSEDTPTIWAQGEDDKPHSTSSHQQRPQQELGHIYSTQRHREEKRRGQKEKSERRTTRTKSDTGQQARDNDKKTERRSRQGRQKKRTARRGRSSKSEAPPSPGKASNVKRQRRAN

SEQ ID NO: 995467 - protein, 488 aa, Homo sapiens
GRSRVFRPDSQASGMWVGHEPSRQHRSVHLCKTQASAQGGSCNNWSGPSKLPPCCTAVHQQVAEPAGMPAVPSRLVSRAGIQAQIYCTQAPGAKAGLPSSSLKGHVLHKSTYVNPGARISVQSKQSQARRVHLETRKLASFPYIQANKQSCTKKHKTTQGIEEYPRGNFQAKWQAKRGLKVRQQKRPQVVIHVKVPKRTRGQTTLQKHFGVREVQGNTAKDSHGTAGLSTDGGTGHQGGPAIMATIRAPRRGQLKRPRANAGGQRQMNAMGHATHDRSDTRDWRKTATPTTNVGWPKADISTAPNGEPTQSVTTGQTDTHHANHRANGTSDNTTTSDQTLSRTLGANTTAPGRAAGDKTETSHSPDQHREATITTEPPRPAGNPGTTQHQHTATQDDAPNDRNQDRTEEATNDTIQQVEHRKHSTDTEHAHTENTAQGSEHTTPPKTATDNLTSRPWDTERVTPTQKDSQTQRRPQPAERMKPTRHRA

SEQ ID NO: 995468 - protein, 175 aa, Homo sapiens
QHYEIPPCHGGPPERHGGTPVMAGGGLRLRQEAERRPGAAPPPRGGRDWGEHNQRLEEHQARAWQGAMDAGAASREQPGVQGGERGLSGPSVPGAHGKPRWSGWAECGFAQGGHSQGQRGARWRTGVVAELPARTGAAESLTQNPHPRPAYPPLHPARLLRSHSLLSIRVGRRHC

SEQ ID NO: 995469 - protein, 350 aa, Homo sapiens
IDLLSKHNNLNAYQRRRMVVHTLWFHHFGRLRWADHKVNAVREQPGQHDEYPVSTKELQNNYVVPCARCLVVSLECMRERRRSHRETRLTDAKHGVTVCGEHQYCQQMTPRILVEHSSGVPPPCIEWQHEVIKQDQDYELSMLEESGSTGDHRPARGVGKVEPSTNSLDSPPTMAQFRGPDFSERKEGQSIAWRAKLKLCLFEGGTRRPASKKIPDFRPRQGMLLKHKFVTRYIKKTPSQGGSSTVYALACQRVLARSQRLRTLTIDGRVRRGAGPSGYAYIDVVTPKLQGEGAIRSLRAQRGQVSDRPRIETREQKGNGAEELVGPASRGGGVTNIRHTNFKNVKNPGS

SEQ ID NO: 995470 - protein, 106 aa, Homo sapiens
LYLCRARHGFGQLNALTTSVMTILPPVEKLKTVLTEGERLPHQLPVIIRVRRLSPSGDMYLVLFLPNARQAELASPVTLPRGLGKRPLVNFVIILPLETSSLCLDC

SEQ ID NO: 995471 - protein, 440 aa, Homo sapiens
  misc_feature (424)..(424): Xaa can be any naturally occurring amino acid
VLVWVLVFEMDLLAQLISRRGVCRWHDILWSPCNLLCPPGVSSVILFTKQERAPSLTLEPLGTWTGLREKGQGLKRSFSFCGHPWEGCLPIGLSLKIMHHSSGAPAWPWAWIYKSFKQWLGAMSTHIPLYYYWNLFTQMSLRPLWKRFSGAPSEGETRFGIHMSQQEAALGLSNLSLRSLFFPPQSWIFPEKLLYYSEIFWAQKLSTLSGAHIYYPPLSYGDISSAITRFDTNLGRRVSRETYPWVFHTNAVVPFTPLFSTPRMRGLKKSFPTGYVVLWVLRQRFGRHHYNLKTRSLRTCGHRHPLFSSRRPTPLVGPHQQGGLYTRASPPVSPLWASALWCTRSVQPLSCCRGAPTPYKGRCRYGGPLGYYHPLLTRERLLCCDPLSPVCAAAHTHKGGSDPHDKLVGRTITSCSLQRGGDLXPELISQTVLTETLRST

SEQ ID NO: 995472 - protein, 295 aa, Homo sapiens
  misc_feature (151)..(151): Xaa can be any naturally occurring amino acid
VFNLFFKQTRPNRSYIFFLGHTHGAATAARGLGGAGPRTQRPQKVTQPSMAPRIFFSRIQGLQRDAWWSKTIGLETWSWYFPSLKHPSGLVQENQFWGILGTWAVEIILRINWVRSTTVSHLNILYRMDCFSRAPIYGEKCTNGTEHIPLXKHPHYEIAIYFYTGPKQPSVRSGPVRWRQKELNIFPAPVPHQMCTRCVSRLVISRHKIYAPGRQPSLLQGEHLHLKRHEPLGVLARDTTNGEAGENEYNYNDRPPGREISARLSHATETFIRQPTSGAAHPTRFETPGVWGQHR

SEQ ID NO: 995473 - protein, 154 aa, Homo sapiens
MIQIANSMHRKTTQQPSEPITQREPGQRTAPQQRARGRTTRHTNETQHENNTEALPEQLQKRERKHEHDTPNNRQRKTTTKQDRTGNAKATGGHTDTRQRTQHTNTQPPPQQTPQMAQRTQEITKHQRDTPSSEHHHSKKTPTTEHKHHTVKHR

SEQ ID NO: 995474 - protein, 290 aa, Homo sapiens
LIHYYCAFRTLVNVGGYIPHLYSHLLSEGDEVSAREDGTEYKHKDYDENTSITLTREKASLQDVMIATTSVSDEECYLVEYSPILHVCQWQQCDMRACHSECTLRLRLTDVLCSDSLHPQSKMILGFVSLWIIIALGVSTVSTVQCAVGGAFHTNVVLPRVETSRTAERTSFVPGRYHHAHTTFMEGHMVSKDRRQSLGLVEHSKYETHNKWNHNKKEYHFGRNRTLVLIEHSTELELLITKVLAGTQVTVSLHQRINTMSEEIYPFNHKSHFGLKNLPSRARTKEGLSL

SEQ ID NO: 995475 - protein, 606 aa, Homo sapiens
AHLPGGSLPSPIRIPPPPVPIYPLCPYTKTIPSFAIIPHTTRLDMIHASTLSTQSYTIKKKNKKKNRKTSEQREEQQQKRDADDPQTEQQETEATSEDETGEEREGERANRKNKDRHPTHTQKKKKRKNDKAEERKSHTGRRPDAEKDEARTRDTSRPTSKQRRRKRQREPTQGGRQTESREQNEPSEPTAEDGGESGRGGRGEERHPAAREQEERRRQRRRVQHTQRTDGRREERGGARRNRRPRSAGEEERRRQKKKRCDEPGRAREEGEALQTASADRREGEDREGKRRARSERDRRRERGREHGSRRRGERGGQQEQRKGEGERRRGQKGEGRERDAQREQRASAAEAARARGASGGERRAARRSGRRRREGRRGRGERAAQGQAGEKQERGEGGAAREARAGRSAGRKAAEPPKRERKAARRARESAKGSAGAPEGGAARHSDAAHSAKRPGRDPKASPAATREHDRSRPTRHSEDDARRRREQTDQPSTRAHGEAEPQSPTRHSTPSGGPLPQTTRRQRRKRPRPDLPSRPRKHDRGALDETRPAHAEAEDRKHGSRLRASEPTPAQHRPHAQSRSEPAHPDAQTQENAEKTREQTQRKR

SEQ ID NO: 995476 - protein, 193 aa, Homo sapiens
AEKDRYSIADLRCHDWSCVASGLGSPHVRNILASCSYDRRCHYLERGKRHLWRRAMETVQETRAPQLNSGVLGALPGLQDMILCRVVSSDGAISLSDLHRGRPMGSKEDQQLLITIGVQCRSAVSPCMLYLESLSRPPIVVQKPNLHHSRFAITVAVTTSSMLCEGGGGTAVEGGAEAEKRTVTGVRDVVWGP

SEQ ID NO: 995477 - protein, 445 aa, Homo sapiens
  misc_feature (263)..(263): Xaa can be any naturally occurring amino acid
  misc_feature (359)..(359): Xaa can be any naturally occurring amino acid
MPPRGNESGGPAGASLFDVTCRHDATLVWPALALSACPGPDEKRCHNSCTSLTAMRAARDCPAGHPPGNLCACCSPPSYFGWSSDKAGTADAGVPDVGGYLGLDTVSLNGARPFRRWAALNPFPGGLVTKRRDGGNPRVALVALWNTFAGQTEGKQVFRFPPTTGHLERTVVGRKAGLVYATFWPPSVGRAHHYHDGVTKKQAILYHKRPGYNPPGVKRTVPKRALTKSLCEDRAGPEVPGGPWEPGKAIPAGWFRRTHQARXAGFGPPFVGGPGFLARSGPSLFPHAAFRPLFPPGLERPMGGLYPGWLSDSANALALGDTQPGVFPFGRRHTWRTRVGRRLWFWVVAGRPPGTVPWXPTWCRYQPPWGKASPRAPERNSVVPPFPRAKPCLEVVPRVHPCCGAPRYSGSPTAEARASHSRAATGPPQQGVVQRSRTAPHCVLL

SEQ ID NO: 995478 - protein, 185 aa, Homo sapiens
SRRPGKMADIQTDRAYQKQPTIFQNKKRALLGKTGKEKLPGYYKNIRSWASMNTQGGYGGPLTCDKKVPLHVVSVLHPRADSSRGVVNQDEDAEDQWSLRRDYLHIHSEDYNRFEKRHKNFVWYNLSSLFSGTVQIGDIVHRGQKCRPLSQDSALQGGSGSPRSAGTKKQSQKVLRLGYRPVPPQ

SEQ ID NO: 995479 - protein, 152 aa, Homo sapiens
  misc_feature (56)..(56): Xaa can be any naturally occurring amino acid
  misc_feature (82)..(82): Xaa can be any naturally occurring amino acid
ENCTRLFVSLQTVDIPRKHCLAFTSCEGVSASSLSVKGLAPDANAWRRRRTSISSXHSDTKLLDAYHLRRDATEIECRAYRXVMTTCGLGELKRGEKDTMGILDIRALNFSIRCHWISDAEQFGVRKWARLIDPRRTFPRFIEKSRRRSVVA

SEQ ID NO: 995480 - protein, 325 aa, Homo sapiens
QCRPLYIDTDSDVLDKASSLMRRRTRQLAIQGTLRASSGLPTVAPSSDPGSEPLCQLPTCARRDVDNVPEGESDDASKRPPEVTRFLLALGHFKKLRCRLNDKLLLGCHQAAHRTGAGLSGNPSGPGSSLRTAFGQEFSTFLRSLVWRWQARLRARRTEPKFVSNLKGISMSSSTLLLAAGLPRTLMPYLESQVDCTVQGSQRQHQSAHHYVTPRGRRQKSVDNACGNGDGPELLEKPVQHKDVHYLGLDETRRLKVREPWMALQTQTAPTSGSATAKQGPQPDGAAGPPAQNKKDKSAREQPRAVPATTAPRRVHNNRHKAREN

SEQ ID NO: 995481 - protein, 180 aa, Homo sapiens
MRHMECPGRGTRGGCQEQHDQAWYDEDDQGGHPGPAQWRCGLTLPLVGPKSHGDDAPKYNPLSLDEACLKASMSWSRIEGRGPAGTTGSGNSPSSEPTVVVAGAGVCEFTRVRNRIAQENGLEAGLDNKCTRFPRNDSIDGRLSIGESPILDRNEELLKNKRQKVEVMLNTRRITKGRHR

SEQ ID NO: 995482 - protein, 382 aa, Homo sapiens
MAGPCRRTMLLGPSTRWRPFACRGSGELDRPRCHAHVVKELRLMDGRAAPRGRSNGTYGLAGKYRCVCTLRYTFSGAYVFRTKVGDSEKSSKNDSDGWIAAWLMTHLVDENECRIGGYVGGTCCAREVKTMGQTGCQECMAQGRDLRLADNSHVMQWKKRGQLVENVGEYKSTLRNVGFVPEDTGKDNMRQGLEGIGQKQKLPLVGHSWRLPSTVKRREQVTLAEMFHELEARLWVATSPTDWAGRGNSGHVGPRTVTRASNPWSWWAEYQGVDKPREAIVDEEQTALPGDRWGHEFTGGDLVEGTPGERPAGNTNDSWAFTRTHAGGWDRLNTSAGELPKGKQQGDTAMVGVNRGGRVGARKIREKEWGPSYRNQGAGPSE

SEQ ID NO: 995483 - protein, 130 aa, Homo sapiens
  misc_feature (130)..(130): Xaa can be any naturally occurring amino acid
MPTNRRVTRQVKKSAAHKKQQQKEERRTTQRTTEQRGGPTHIRTTNTRERHRPNKDAKKTTDTSRERPDDTTAATSKLKTRGQSESNTKQREQPNSEEARQNTEQTGRAKEQSKREAEEDWRRTRTSAPX

SEQ ID NO: 995484 - protein, 104 aa, Homo sapiens
AVVGWHYLQGDCEARLLVPLECQVDPAVQQLKKQEKEEMKAVNENGLPNGEGDALEQRNLACWRHRWSFLEGQDSAIFDLGHLYEEYQGRLRRNCAKLSQERGQ

SEQ ID NO: 995485 - protein, 266 aa, Homo sapiens
EHTKWRMTPVRTRRARGPCVGLVMGNRGGFREKCRQWHSGPGSLAVDGAMAEAGSSGSACRGYEWSAQSPKLCRLVKDMKIKSRGGDLSSFSLPIKESEIIDCFLWCPRLKDEVLNDYAMCRRQSLCRAGAPRFKACCLHIGDYNVRTVESVVLQCSRGRLAAGSCGAIILVKLSIVPVRRGYWGNKIGQAPTVPCKVTGRCGSVLVRLILNQGHWDRLPSPVPKKVLMMAGIDECYTSDRGACHPGKFARHRLMAILRLSYLTRL

SEQ ID NO: 995486 - protein, 516 aa, Homo sapiens
MAPSRNGMVLNAPLPQWTVHAVLLWPLWFNHACALKILQTVMALCNANGCCLHLPLLPLLSWSQSCAHLCCLPRRVRVATLNVVAAACACLCFQPLDATLMGVARALHHTNGCALRPLAHLPVRIPMRRAAHTNAPPVHSPPRHVATTVATPRFDSAVTRPPRTYIPSFPPMRQRPFAAPPNAHREHQPLVPCTRNPAQTVCPNPQGVNPAQPCALPFAPRSPGQPATFTPQPTTWPRPTRRSGKPPLPHVGSSQHAQGNPQTSPHTTPLFPPSGSFPAHWPRRLAHNGPSAPFPSPPPPFTAPPPHTHAHPPQLAHTPRPTHTQRAPASPTSRSHPRHTSPRPPFTLPLTTLFAHTSPPHPHPPSTSPLPLHAAPLHNSHPPPTPQQRPHHSHTTGARLAPSPRTSHLTPPPLLLPHPRPPPSPPHPPHTTPPPSQHTSRHTPAFTVTHPPTPTQQHPHSSPHSTPPPPPHPPPPHPLPPPPSPPSPPPPPPPTTSTPPTIHPTPTSTHTSHHTQ

SEQ ID NO: 995487 - protein, 565 aa, Homo sapiens
AWLRCSVLDASDLAPKDRNGTSDPFCPECCYNGAWTLCETSICDMNVMLPTAGMMTVLNFDACSEVWPWMCCLCCWTCLGDLVTIVMPETDFLGANMCVDLIVHADLRGLVASTVMLMCACVLRACMTPETHVPNPALCCAIAPKCATPSVASLSPSLCAVAAVPCRRTARTRLHMHTSQASLTAMAPTLSHRHPFALLAPPDRGSNCLLEPTCHSGARKDGHGLAFPPLSISHVKDQDTNGQPRNVWSVHPADSACAPTGKHPVAFHTALPSLLVSATGSASGAQTADLSLFVHPIGLLITQWPSGNSPGRYRAPHKSAINPQPSTSPFILSSPTTPTPLLSLSRLSPPSVISLLCHIHLHHPDSFHKRQSCHSPCTISAHIHHSLSHTSRLCSPSFPSPHILTSPPPTSRTSITSTTTPPTRFPPPSHPPQTTTLIPHLSVHLLIRFSLHSPLLLLSLTLTPLDHLTRYSHLTHTHTSLAYMLHDPLTTLSPFTLSTHTPHTLTRHFTLSHHHSPLHPPPHSIHHTPLRPPDHRSLSSLLHPPPLHSSPPYSLLTLYPPPLPP

SEQ ID NO: 995488 - protein, 261 aa, Homo sapiens
MRVCEEIAIIRQQKAPARSIAGYVTHLMNANSEEALLKEGNLRSRLHGGRRRDKEQTNYCSMTVSRSWNQGKLHGTVESLYHLRHNCLNSLVRDLRDQLMLQHAFKGSTLSPYEQWGNANVSNKPPPRARNPCLVAHSHCPAQLALTNVTCPNLQTHGRNQTHTNPEQNPRRQSPQRELPLDTHTGLRLPDTQNTTPRSPATHTGVNPSGGPPTHPGDSHPEEDPPKNTNLELRTPAPTSLPQHHTSHHTLNSSAPHIFPH

SEQ ID NO: 995489 - protein, 349 aa, Homo sapiens
PRCRSLPRERSAWSASDLGLFLSLFRPHFLRLLFIMSMHLIIIDLLHTIDMQLLRRENVTRGKVDGEEAQLGPRMSRCRLLAIHHSPRSGSLSYALTDDSKPSDYFYRTQPLAMSDVVRTRWQGRLYTPMTLHSPSVRINGTWCADHSPGRRLHPFSVLPSTATTGLLCLLFTQLCGNHASSACQTAGLMQLPCMHPLPFTHMPRTGGTQHRLPANNPGATPGSHPLRTSNFPHGLRRATPQGRYTRKPSNSTRLRCPQAHSPRAQDITRTLPNHAQQTGNPKTETHGSVYQQEAVARHTLHNELVTPGAKALTQHTTDRNHPRHHHTKPCAAPPKEMELPLLASGHTC

SEQ ID NO: 995490 - protein, 296 aa, Homo sapiens
MSGPSVGSGGPVRLRGAECGLDLCELALKMPGSKPGAKVMDFPTISRSPSGPPAMGLGVGPGDILVAFGRDLIAMTRQLGPYARRAPEAQVGMELDRCQAFMELGCSKFEGSAQADLGCARSPQVGAPCPSTTFARQAGVAIGGLLEGDWLSAARGSVSCRRRGLGMTLRGPLATVRRNASPFSRRGSVNEPLEPVPRLVASPLMDPNEDSWTPRGMGWRRAPADAGRAARELKQVPRNLAGDGVSESTLNKPPAGAQSPETWLLPGPPRGCLVPVTLKTLDGLNFWARTLRFTTL

SEQ ID NO: 995491 - protein, 114 aa, Homo sapiens
  misc_feature (95)..(95): Xaa can be any naturally occurring amino acid
GSLEIDVSKTWHLEEGHRKKKEEQDHQPSAASGAAEGENVVWLVCAIVFLHRVQVTLVVHVTDRCSGKEDRSASVISVGIEGRTAEREDEILTIXLAMLVLVPVIVCPSRCNGD

SEQ ID NO: 995492 - protein, 300 aa, Homo sapiens
MEPTKQKTKGAARFPGGPVAWGGQDPGLQHPPSGSAGGPREGVGRLWDQEAHGGGQYSLQHKECYGRPTPSSQGPPGKGSAGVMRKSKKPCATCRRTQRGAMVLAPRCPLVWSSFARALEGGRPGRVSWGAFVSGHTTGLGGPSFPGKGGAGDPAREHRRLLCGGPLGGRLLGDTALAGAGQRHQFVWFRKATESTGSNLGLGWEREKSTLRDKGWGGPASRPWMGWSDRPGLGAKKINKGLGRPRAVHIRKWPPLVGTGRRRGSRCVIGTSKEEESRHTGRGGPNRTTCGPSLDCHNAY

SEQ ID NO: 995493 - protein, 336 aa, Homo sapiens
  misc_feature (113)..(113): Xaa can be any naturally occurring amino acid
ERVRWRTKEKLDYSLPHDSTRSPIGHHIYDARMEWMSSRWIKATELTLESPVNETYDTGEQPVRRTGTGSVEVRPSAGAISWIRNVSKVSWTHVGRELVELQYRACDVAEEQXANRPGIHVTDYSVGMNSTANAPEKACRQHMVTWTRRCHTIAVILHSKPVPSLPATMEHIHSVAWTGTESRKTGREQRLSDNAGSCGKEHREPAEREGEHRAWKTYQHCHPGESRTCARTTSGPGSLTEGDFIRFRFFQPLRLERIFFRSGNIEHRRKLFNTSVEVLAFENLSQTRRPEERRTATSGTPEPEGTPIGPLKGVERQGDQLAWKQDLEQEPGGNED

SEQ ID NO: 995494 - protein, 373 aa, Homo sapiens
PGTMSPRAPQPQPPPAPHCMQIAAYWMDAGRWGGGMGRASPDRGTPVEDVVIEEVTTSTRSLIPGAVQMAGFLCATTTHGTFEDGKKFDSSYDRNTLVAIVVGVGRLITGMDRGLMGMCVNETADAYIVPPPTGHMGDIEHWPGLIPPDATLYFDVDFMLDVWNKEDTVQVEHIAADPTPVDPDMVQGPGEHKNSVAATNAQPDWHGHLHSEHQRTDKGRALYLKTYVEHLYWADSRGMEPGDDGTLCTWRETERLLIFKYWDIWRLKGNGTGESRHNRAQDERIRRSSIDDGEQHEERDTAKAQSRPPGVSEQRAPGKKGKHKKRVYDAQIDKERRARQQWAAKRDEGKDQHERKPPSEQSSSPTLTVEQTA

SEQ ID NO: 995495 - protein, 107 aa, Homo sapiens
MSLIERQPKANNSSICLLQLLLGRLILSSYKPPEDFESPLQQFARGIYGSTFYVATGFHGLHVMDGLNLPHYLLHPQLIFHFYIQTSGLASKPRLILAFVDVVDYIC

SEQ ID NO: 995496 - protein, 239 aa, Homo sapiens
MRELRVGLEESELWLRFKELTNEMIVTKNGRRMFPVLKVNVSGLDPNAMYSFLLDFVAADKHRWKYVNGEWVPGGKPEPQAPSSVYIQPDSPNFGAHWMKAPVSFSKVKHHNKLNGGGQIMLNSLHKYEPRIHIVRVGDPQRMITRHWIPWDQFIAVTGYQNEEITALNIKYNPFAKAYLDAREEVIQEMMENRSSQELGLPRGVDHRNKTRDHCNPRQRGVPSAASKWTRQPRSKAHN

SEQ ID NO: 995497 - protein, 139 aa, Homo sapiens
  misc_feature (90)..(90): Xaa can be any naturally occurring amino acid
VLRIFFSVASRADIAEDTYGGTCESVRDGPTEEYLGQELALPGLAHGTRVSVNLLGNPWIYVAINDPFIDLNSRWFDYVPNMDSYPMGRXLPMCDQLKGIENRRKPGRSQCVESQSTESFRGADDPLANIERWRRCLGA

SEQ ID NO: 995498 - protein, 128 aa, Homo sapiens
GHICQSLESAKAGTRFPGHSGGVQDPRELGSAVQKRYLTDCLMSICPQSLQTVYDLVDRNCQSAAREFLLLTPSLRLRTLHAEMREDGVATRLQEFVEESASCRQLSIGSQEPAMRCENRVLLLRAGS

SEQ ID NO: 995499 - protein, 288 aa, Homo sapiens
MRTILSNQTVDIPCKMSRITLQGTHSFIVKGPREMPCGRDFKYHIISVELSLLGKKKHSTGPGRLNGGGNSRKWYWLPFRDYDVSPLSQNHWIQRVVDTGASRLTHVLRSCRYAPLSLYQTVVSSRARNGCSSALITFREELSMRVENIVILPAQGCGIGRPESVEPLVTGYFYKGPMKYDEILNSPFEKVTIMEQYRSWVGSRLSRAALWDCAWQSHKNLLRASPSGISTRRSWARWVTLSGLLREEPDLVSMPGVGSSEDLESPPGFDFARNEFAHGWTTLKKLTV

SEQ ID NO: 995500 - protein, 108 aa, Homo sapiens
MTPEQLLHHREPRENLATIYQFNLVLHRAVPELVARAINRIFYYEPSASPNDRKSPRGCIDSTLRHSLFYSNTNSEAQPVLRRSLVRECRVERSNIKTTACVSGGLAM

SEQ ID NO: 995501 - protein, 125 aa, Homo sapiens
MVCELFRTAVSRVAERAWAVGDELESVPPLGMEVDCPTSGNLAWVRAPVFRDCSYTPTCGSGVGRHQSGSVGSPLTSLPSFLSMVGLPLGNRTRGPWPKVVDIGSMEAIKRELEKLLSKFYWLIR

SEQ ID NO: 995502 - protein, 451 aa, Homo sapiens
DSSVVCADAIDLGIAGCGVYPGEPSRAPHTILVTQALLAVRYNSSQVDSSYVRGASYRYDRTLGHNELGYSERRIRASVATEGPSAEARGKMLQGERTLHLGAREVEDWYFLSRNQPYRFQPRTDPGGVGSVESLAARLRWVARSFVVTSVSRTTRERRCESRSSRGSASPSWRQALYHKAQGPCFLLYRLVRRTRGMRVRSRRLNAGDSNETIVLHLYPELSHSTGQQAINESATLVGTMDERHTPISRRPILSLVMKEPQNASAAKRELCGSLKQPCGKAKHMVGWLIATRRGYFSVVGALLLRHPKSGIVERLRGGGTSVWASSVGGFGNAVHPTETVALGGHLCPFVRGLWHFINGGHFQERMSPRTVFLGEGSAIRQIYEPPEDQPRLIGLFAKLGAWFYATPSPPVNTGTLRIHGSTRKTQQNQAHRGEDTAFLCEIVGPRYGWE

SEQ ID NO: 995503 - protein, 70 aa, Homo sapiens
MWSLFSKLFFSTQKNRAYWWGDKYKGEGECFRPILSHAISGQRDEIEQHDDVKEGESSNRGKEASRKIRG

SEQ ID NO: 995504 - protein, 229 aa, Homo sapiens
MLCKHVPKYDLAIRSIPQNVGPGYTLGSDAWLPHMTISTKLGRGEHTNVCTCQLDSASIKSNGRAYRMKNYVRRIAITKMGIKRLTRVTVRLPEAGKLLTAFTKPSFARWPGGFTRPETTVWPGRHSTICLERENQRKGMVPNLQSYWDSPVPATCVEMQNVRCSSAVNRDVNNRVYWFVFGPPSLKGTQTYGSGAIFGPDSKTSQQGHVLPSACTVFRLTEFCVIMVA

SEQ ID NO: 995505 - protein, 184 aa, Homo sapiens
MQDMRRVLTERGTTLMSDERKRLFSLKINLKEQTGRRMMIRDNAIVEHSNTTEPIDTDVPVQGPSSCSLLTTILDAPCVPSVDGTHGTRRWYYDNSRGGPHCYDACCADYTLRASVLAVIGTLEAGTVTLVADHESSMERIPQIESEGYSLSCNPGARRLANRFAEIPRNNPVDYRPPLDFQKG

SEQ ID NO: 995506 - protein, 181 aa, Homo sapiens
GGASFSKPSRAILVGGARDALAGGMTEQMTLRGNRQGRRTAGINPESRTYPAVFPDIESSPTCSRISSQSITGGKLTRDESQTYGKYPLACLCEGHFPTYVKVTVVYSSEWTTFAPPQVVPGSGSRCCRRGSLTDVAATERGGFVGHTKDVLSVAFSSDEPARLSLDLEIKRSSYGIPWVC

SEQ ID NO: 995507 - protein, 256 aa, Homo sapiens
  misc_feature (91)..(91): Xaa can be any naturally occurring amino acid
AHWLMNRSHDSNTKDTTSAVSDDGNREQVCPIASSDTSYGPVERQGEEQQPAAAAGPGEPSRPKIVKPQEEPEWHMHHVLSWESQNARSLXSECCRPVSRYGRHKWRGLEIKTRGSVRVRGTIGIISTFHVFELNGVPFCKQVGSAGKPSETTLFEASSSVKWVGKDADAGLAKQGLETGAQEGCQGPSLAPKDVACVGDSPLKRHNGNSKNACGKTPTWVIGTLCELLGKGPRMGPRNGGPLFETVSGHGSAWGK

SEQ ID NO: 995508 - protein, 110 aa, Homo sapiens
  misc_feature (83)..(83): Xaa can be any naturally occurring amino acid
MELGILPQSTAGHDRMTPTASRVSDIAESIRETKSQQNRVTLLHQVLEEAEKSHPELLQLPRELEQTSQAAGIKLEIIRSEAXSKLKKRLETERKVSGSVGRGPGAVQRS

SEQ ID NO: 995509 - protein, 457 aa, Homo sapiens
  misc_feature (77)..(77): Xaa can be any naturally occurring amino acid
  misc_feature (122)..(122): Xaa can be any naturally occurring amino acid
  misc_feature (142)..(142): Xaa can be any naturally occurring amino acid
GGRALALGYRLASRMESGQSTDVQAGGMAPVIARAAGGPFRRPGSTPWSRASESVLVEAGPVAQHGVMQTSPSMQMXGRQSGMRAAWASQWWPSVVTLVTAESSYLILGGGNIQCRLQGLLXSLVGSAFNERSDIVTWERPXRHIDRATDGTYAITVGGYDGRPDRLASRLVGFARTRTRELGVDSRRGCARESQFMRLGGRNTHDKTITGRWVPKPQFHEVREGWERVKGQVCLEVPYPESRTSKRLGSILHVEPKWDTRLSMATVMGQLQRKTDGLGRVALLWRKQEFHTVSLDKQLSGPGGNTPHKIWGGKRQPKGGLTGVVPLWRANRTDKGPHRFRSRTGIALGGYCDTKMERPRPFLRPLGELGRPRGPIMRQGGGGKATGANHTRGPNEGPIMNGSPGPQGPFGKGASPNTWHRTHWMGHPLLVKPQRLPENNTGPATDTGRRNNTGAWV

SEQ ID NO: 995510 - protein, 295 aa, Homo sapiens
CYKPSDQSVVALSPPGACPDKRIGVGVIDGQIYAVGGFARCIHHNSVERYEPERDEWDLVWPNADTKDRGGRGCPQSSALCRGGLDGINTALYSDLTMLATHERNAVANDHKQSDTPSEAGTGGYEWSHVPGRVWSVTNQYTDTWSEVSRMTSGRRWGGRGVTLWSPVRKSMIETRQKLYPVEGILVSWAMIQSKWGSIIVWYKNRGKTEYDEDWENNSHLSVRREARMSSVLELAISRKKCRRRESCGPQRSPRGVSKECLAGRGGGTRRVPGRRAALWPGKAGPFTMQGRPGH

SEQ ID NO: 995511 - protein, 164 aa, Homo sapiens
MALGPLPREDENLMLHLQRLETTLSVCAQEPDHGQLFTHLGRMALRVQPKLASNVARELSSATPFCRPFCDRFGHGARRSWRPRCHTALHTPARPAQRSPHGQLWGYEAASYPRHPNARLCRPAPHFRASPHAVLPTPSSLPQQVPRFPFPLHSLSLSPPPSPP

SEQ ID NO: 995512 - protein, 111 aa, Homo sapiens
QISDAAKSSASVKSTVITKKRAGPIDDMEKLLEAVEERYTHGTKKVHNVKILVRQHVLVMKVPIAFKEQLHRIIQWLKDLCNKELIALERKKRGKRVEAVDRSYTLEEMDV

SEQ ID NO: 995513 - protein, 396 aa, Homo sapiens
PESQDSTTKTSVGIKECENNEVNIPPRKGVPSIQSVEAGEQGDIATPHRNGDDTLHESPTLHWQSWPHEVDKSELKDFISKLWKRGGVAALTVVGNYPILVEECSDDAEPVQKVLSNRPNHVQEVTVRLICRTMNASTRAARDRRCDEIITFGDLVGPRRWAALVELRGPSPWRLVLQKARFAVGRGARATGRESPWISVHPYETWVPDRMVNCPTVLRHLESMSPGPVVTVDRVRINLTRNVGNGVGASHLALLPFPELYPFTLPIRLDDHLAINDFQIAHHTRDSGNGISPGGILIGTRNLPTKEGFCYHSTKGGSLTMQNSYLYPEGKRANKTSLWTYYRPTQVLLAVNNPWRKRRQRQYTYYYYLCNTSRGCATYRLHLTDYLTATVSSKTI

SEQ ID NO: 995514 - protein, 178 aa, Homo sapiens
MPRLLGFCTREPLTSVLLPCLSIIRDGPPCATLDLLSSSVVEVLSPEEISAFLGLHGLSLHLRGPCLSVTPRTYCFPEALRQHLVVADGRWALRYTFSLGSTGACGVVRRYPLDLNGMLPAMGFGVPLPGLKGGCPAAPKLSPEDSNCDGPRPLGPARAAVFGPGRPPDVAPPPFLRL

SEQ ID NO: 995515 - protein, 139 aa, Homo sapiens
  misc_feature (63)..(63): Xaa can be any naturally occurring amino acid
MSGFPPKRGSTTLCGGAPCVGARPLWRLVCLCVGPPADIGGRVKKYPSGHRVGSPSLNHYQSXAHKALISKTRRHYTLQHLTQQENRLFYHEDIVGFLGRDPPGGGAAHKGSLTFPKPPIRNNPVGWSHLLWVEAKAHA

SEQ ID NO: 995516 - protein, 122 aa, Homo sapiens
MGGTHPTQNSKRGDPNTSITPTSDTPQQRAQATTEGSTKQRVEDKSIKQKKTPCQVVNQPTPTGHTVRLNPQRHRAPPAQRQRRHKSGRPNKITHHWTCKRSRQRIGNKSPAHHDQTTDEKP

SEQ ID NO: 995517 - protein, 199 aa, Homo sapiens
MGGRRRQVQGACWGPRVSPIPVPAGSCTVKVLSPGGRYWRLLSFQQLGRKYLGGGKGLSGPGALLVFAPAHLPVVRGERAGWSKGLTPGIGVREALCSRVPSVKFTASPATCRVGEFALGTLSRNKLLFPLDHVFPGSLRRMSFFGVPLLHIFLGYPGSQAASRPATHSGWVPTPSERAGSGVPWRLWVGRAPLSRLPT

SEQ ID NO: 995518 - protein, 286 aa, Homo sapiens
MTCAPHARVPQRPVLDSLVALAGGQHDSMAKTVPGPSHSAISCTSVTHQMDMVTCLQRLGPMSDQQDWQRVVQTTMTWVNTTKQWQDATTYVKTTQSDEGAQGTSNTRVGTCEHTTWAHSSHCIPQLAVTLWLNNETTEPRTLHESQAFHLDLVRHKSLSKATPLPHPLSNLRAFTVSEGRSAVNQPSADGDIGGPSHWHHEFVRHTLDSTHIFWDHMSNSTIGEDGKPNTRTRYTHGAPSAIWNDYAVAIIQERKAFRKRTLSGAGTISSNTGDGMDYTKKKTLP

SEQ ID NO: 995519 - protein, 230 aa, Homo sapiens
  misc_feature (94)..(94): Xaa can be any naturally occurring amino acid
  misc_feature (96)..(96): Xaa can be any naturally occurring amino acid
  misc_feature (98)..(98): Xaa can be any naturally occurring amino acid
  misc_feature (120)..(120): Xaa can be any naturally occurring amino acid
  misc_feature (127)..(127): Xaa can be any naturally occurring amino acid
  misc_feature (148)..(148): Xaa can be any naturally occurring amino acid
  misc_feature (202)..(202): Xaa can be any naturally occurring amino acid
MAVAHSPDESLAEAVGVFVERGVERLSEMRAESWPSSATSRIASAERLDSPDEFNYTILIFGLMCMRTAHLSAHLLSIEVVALRCDRVERGRTXSXRXRWIDASAVPFAHAELGLYQLSXLQQTTNXHGTSRLALLTMRTPSGLRVSXTELSPGALQSSAGGLCVRAVSPSERAGFWDRHPPVDCGRLLIQRVISRHVTTHXVISEMRLLSSLRARQMSKLIAWASVTVR

SEQ ID NO: 995520 - protein, 407 aa, Homo sapiens
  misc_feature (27)..(27): Xaa can be any naturally occurring amino acid
  misc_feature (66)..(66): Xaa can be any naturally occurring amino acid
  misc_feature (86)..(86): Xaa can be any naturally occurring amino acid
MGQRQVWRGAVGEAETAAQEKEAQAHXPVCARVFVKNTCGVLVSKCARVVVWVPPPREKCKHNTRXSATDTGEPPLRPPPKRMLGXSPEKNVADQRTGGSVGPEAVLVDTPEGIRHTRGRVVQHVGAHGTCGGSPTRTSEQTQGGGIPYQKTLLKCIRGRGPQQTPHCWAGNHSESIITTGFAGATHAGGCGTHRMWGGDNLTPEGGSPSMFTHKLPFYRGPHGSPTRRRRLSIEARDDKYTGKALRAGVTKALVWAVMFAPPSGEQQHHQHAGGRTPRQWVLRTKIRGSRVLCDDPPAQPTRGGPGAQRNNERGPRGSARDTLVGGPQWGGTRTPRTRGPRALHEPHGGERRRPRRKDKRRSFSQNEQEERASHNTRRERTEHETKDAAERSSDTASGEPPSEAER

SEQ ID NO: 995521 - protein, 220 aa, Homo sapiens
MVRSASPAKLINGGIAGLTPVSPACLPSILGKTRLQNQQNGRACTRDMSDCLIKTVRVRGLLRHVPRELLLNLTLVHPARRPLQSWAANDFLRHQLSKDGPEADPALKEMLAGCGCWHLPSDRDHRHGDAERSSCHDAGRNRRPEEDPWLARDSSSPQEGCQNISGGLKLALGPRTHNWTETCCEHRELLVSKGTRGKLLGCPNYRMNTAFDTYNRAPGR

SEQ ID NO: 995522 - protein, 557 aa, Homo sapiens
RDWSAKLGRGRKIPRQTPMCLGIAGNPFAPEAPQVIYIGVATYISHLPPLAENHADLLNSHESLMRQPYPRVRGQRASSNGAKGRAPLMGVTRDSAGLLARPANEALVHFIERDGYSKTQQLYYSARNLVMDAQGTANRTSRARARRYSTPRHKDQGAYETSGLGNKGDPPHWTEPRNNHRNDPSTRPLKNAYFAPRDHGAPSSPVGAPFRPNTSCDCANARACPNHPAHPRIGGTRTATAPYWLRPYNPITRGPPWREPAPGQDPRGRNFGPPPSFHEEHNTPTLLRGPHWLTLATNPYKHTYAAPPAILNLGKVTTELNAHKNGKRRQMDLPGPLDLPWPCFHTVLALIDHRAGPPRRRRRHPYRPHPPPRPPPSLASRPPSPPLPFAPLRGSSSAAPSTHPSPHNRPHTPHTPVPHPTTTTDPHHSLHTPPHSPPPRHLPPHPSSTPLLSHPPPYHQHHTTPTTCHPPTTPLTSPTTTHPHLQPPTTTPSNPLPSSHTRPSSTHHTIPTPTTHHSLPHTPPLPPILSSSSSRPSSPRSSSLHSSSPTLTHTHPP

SEQ ID NO: 995523 - protein, 311 aa, Homo sapiens
AGWPQTPGLKAILSFPSRTRWFTPVIPEFWEAEACKSQGQEFETSLDNMSAECLRLQARAATPDWFWWRRGFAVLAGPVSSPLTAGVICQPRPPEVPGLQTESRSLSAQMVPRLECSGVISAHYNLHLPAACLGLPKCRDCSLCPAPPRLGSEERLCLAVHRLGCEEPLCWLPVWKVRSVSARRIPSRKCGAPRRQRPPGGEGRSAGALLGSEEPSAGTPSGSEERSRPGSPPGPERNGGGQPRRQPHPREKREQHHADTDKNIGDTPHQKPDHQHETAPPTINAPLTHRHTHTPTAHRHRSTSPPHTADT

SEQ ID NO: 995524 - protein, 198 aa, Homo sapiens
  misc_feature (71)..(71): Xaa can be any naturally occurring amino acid
  misc_feature (74)..(74): Xaa can be any naturally occurring amino acid
EAGSTRRESCSMRRVCGSGSGTGREGTRRWIFNAWRLSVLTEPGVAVVPLAVTRTKCPMVDFILLLGPTKXSLXRPLDALDRSTVMRQVRIIDMVSRRRGMRDITRLLRSTRHRHDLEALLRKQQELGKLSTADGKAFADPEVTPETDILSQLCTGMKLSAVTDYGMTMQREQPQCRTSGHSQSSSKLDSDGDVNAVR

SEQ ID NO: 995525 - protein, 114 aa, Homo sapiens
AELTLGGVRAQSTWIRRLLRMESESESGAAADTPPTEEYPKFFHGDEEIIEVVERCIPGSSTSPRMTMAPLRWTDVDVLQEQEERMRACEEWRVLLKSPMKGSGRAAMDRTQTE

SEQ ID NO: 995526 - protein, 421 aa, Homo sapiens
CVLQCGRAGTGWVVLVLLVRGACWWLVLCAVPMVDMLLWCVPDVIALLCGCVCFLAARSLCDLLLPVASHMPDGWALAAHVCCSCCSAALVCSSSVAEQLEDELLALQEARAKCIDRDCPTSGVAYKGQTTLDEALHSDERSISYRQQASTFSAAGQALNAMTHRFQFYTSIAWRTTERCTAGNMIETCKFGVEDETSNAFDSKRQVHHETNWYRAGIRALDGRPSRRRSAALRPIGRNLDRRNCFAGQTPRKQRATSQHSGSGPTGAPAPTPPRSPQEQQRLTRRGITPSAHRDPMRPRAARREQHSTHMEHTNRTDSADAGPRTREHRHPGRENHTHAEAEAAHSLRPGNEATTPGGQNERHNTNADSHTDQNYVPTRPTDARHHTPHTTKTTDPHSSRRPQTAKRQTPRPSYTRDHEA

SEQ ID NO: 995527 - protein, 139 aa, Homo sapiens
ALDDLEYSTSAGYRMQVVRAAGDPASLEGRVETACRHMMVQLALCRLLVNPSPFQTSAVSRSSGSRHQFPVWSQMHAATNLCARIGSLISSLLAGLALVHGASCTSRASGWGPRARQDGRLGDDRFVRAPPFLRSRRHV

SEQ ID NO: 995528 - protein, 325 aa, Homo sapiens
MACEYGAEGMQQRTEGALCLVAAWVSVITPYLPVGVGRACGEMDTPPLSDSRVGNPMNTLVTDRAVWQDAFSRGVFCKPGLTVSCCKGANKGVNDVNGLNLRLAEFKRDLEVGLQGSHVTLGPVPDIGGSEAPGTSEQGPEICVIHDDDFLTREMSFYRQGEAVVLCEFLHPSPSAQSPYEASRVIDSGANGKSDLQMRRIRQKLQSKQAGMDEVCKRLSNAEALRTYGQKVQRRFCRRGSMRKPVLMRGIREYQKGPLISGFLRENRTLEAKKEDKAAIGGPVNTGKPSGGGAKAPDPRQGTPAIGGRGQVPQRRNTSRETLVT

SEQ ID NO: 995529 - protein, 256 aa, Homo sapiens
MATCSSEKFYRCPRSNDRQQLPTAGLVVQQIAMRAVLRCLVSTLHDLEDKGVASERSIFRDFVFLEAEVYNQGFIRKQCVDHYNEVKSVTICINLPPPLADYIDVPVPEVQKADSARKEIHMNEDHSGYLQDIGNWLLRKPFFSADAVNTVPRFPKILPGETHDSQNGGKAHVTPESPNRGHSNRGATAVVNTGKQSRETTGGDNQEQESARDHEPQHNTATTNTQQNTVTTEKTAKTTLGLKSTAQMSYERTKTR

SEQ ID NO: 995530 - protein, 72 aa, Homo sapiens
ERYQIQSYDDCHKGNLLEREAKHHDLALERITPRYCDKCRLCYDQDYTYCKLLNPTALKQEEEEEKEQQLTV

SEQ ID NO: 995531 - protein, 460 aa, Homo sapiens
GYKIIYYRIAYNLLVTRALINNSNTSKEVLGSVGSRVRASTSGDKVELLRKLQEACIQRKLQKPVFTIFFKQSSGESSIVTSSEHRLGPVNPPEERWWEGPHIHSKPWYQEGHPEDTEASLLMSGWQYIPTGGNTAKMNPARVREQGERRTQSGLQNLISAEQSAERRSVSQTRGPRGDPPENCKPAATLTIQTRGVFPPTHYNTGALRGTTRGRPPDQSKAHITSRREFHNPNTQEPPSPAISTTLGQNKTELLVNTVAQDKALTIYPPCLQTENVCRRVSNTSPEAKGRAPPEGPPWRDPTQGKKQSITHGGLLDTHPALAPGDVLTTFQTANNRRGQKPGLTTTSTKSPQNRQQVEDDSTTRADEPSENPHSTNLKGKTTPEETGPLTPTTGNHHPPAKPHPHRPRTTTTGDKTHPLHRPTTQRQHSSKTSNNMLTNHPRQTPERDQKRHTETHNSH

SEQ ID NO: 995532 - protein, 185 aa, Homo sapiens
APCPVPRIACRLGPGLWMLGFAESAPAWRLRSEQFPSNGGAVAVPGMAWAAGRVLPGGPSALALLSLCWSALLSFLLQVYAPLPGRPDAFHLLHLPLLLPASILCLCRAAKYFQESTTQEKRFLLYEPPSENPPPETGESVCLQLKSGAHLCRVCGCLGPKTCSRMPQSILLQQGASDPRLEIGT

SEQ ID NO: 995533 - protein, 141 aa, Homo sapiens
MKQTRRQRQQPTSSDTPNIRWSEGPYTRAERYTRLDCGSNHIEEPHPQGGDHPHLECGTTTPPIHKTERQKQRAELQEQRRRPHKRRTTPTVSECANAHTEVDMIEERGADKHKSWKERHHRRYRHQRKRRLATNKQQHSH

SEQ ID NO: 995534 - protein, 293 aa, Homo sapiens
GRAARSIRKLPVMQMGRQFPGQVPNVVLASLKPTANRGSGYIPVTRGESSSRSRSLADREVANAKLPLLEDAPGPTACGSVTRGKDPISALRTFYYNADRKYDNCLTPALSPPLSYDPVRFWDIASQSGSGGQTFREWAPPLEFPCPNPQKPDKYDYLSYEVVTASMVERVCAEIHFGLLISLILAIGYDSGLCGLGPQAIITGSLYAHEGGRWKKLEVRQNAVPEALKVERSTEKTMRTRTRLPWCTNLSKRLDQQRAPDQISWPGGVAHACNSHDLTKAGGVIRQGNRGTP

SEQ ID NO: 995535 - protein, 314 aa, Homo sapiens
SLNPDAKQRPGRAKHGCLASWIPSRASAGGASTLGTSGLQRRATDFKCAPHPFPWLTPGGKAAQAGAGLCGDCGLAEASRMRETCADSRSDTIAHAQNKIRACGERLSLGRQQWPKPVQSKRGIMAVRPTHCGSPSACTTFCTQAVSLNQDRAGPSWGAHRPVDRGPTGRDGQSHPMRVDPRCQASRRTEWQNQHEDLGETAAGRQVQCRSYTFLTSIGPSITVHLKFSAQTRIDGSNLERNINAMGAPGAGKPPGTKTQFERATRKPWGLAHNRAERPNQDAHGPWGPGDTRGNNARGTERIPGEKKRSNKVE

SEQ ID NO: 995536 - protein, 262 aa, Homo sapiens
GGCSGTTRTRGHGPGLPPAPREVIPRGAEGPSTTCCVGCRERWRGGALHSLAGEGPGCRPGRPRERPSGCVAPHGVRGVCRVWSRSPGPVPQPGDPVQSPSPALLAFSGCAWWHLLPSLASCGPRVHSAADTGGDLRGGLQFPPSPSRPQLRAGPADASGLGKTLSPPGVRPWKCFKPPSDLPCEQRGQSAAGRTPHTSVRVTLTRLIQAEQSPGPLALIEPSVGSAGPLLLTKRRAEYRSQWSPMKQNCIQQFGRHRRRIS

SEQ ID NO: 995537 - protein, 138 aa, Homo sapiens
MDGETMWTRDGPQAYRHICLVPHEIKCPGTYKCLFVWTCPQDEADIAAPRHGMLCERTNACRVTRTFEWSIPAKDWALAQKARRVLCLLPGGWLPSPQGVVPHQGSDTILAVGKMGAQLSMLLEGSGAEVNRLRSLCG

SEQ ID NO: 995538 - protein, 151 aa, Homo sapiens
MEPGPTARRLRPRAIREGWFRRLQLWPGRPVAECACPPPGSRYQDILVLPGDKTYGNVLVLDGVIQCTERDEILNTSEMIANRGVSARSSPNPAKSVLNHRGPENGRVSCADGGEGDPSVESRYSCEIEQGCHSKISGKFPVHGMAIGITL

SEQ ID NO: 995539 - protein, 152 aa, Homo sapiens
  misc_feature (11)..(11): Xaa can be any naturally occurring amino acid
MDVSEIGECLXWRGSELAWEATGIQAADGPRSPKVTKDPCGGGRRDDLPFERHFAVQIDGRCAWHKATLPPGGLYVSRKILRKPQQIIECIRFRTLDDLILSQVYCANPLRQASIHKAKAKELLGTKLELIGARRDGIVTSPTMGREGRLEY

SEQ ID NO: 995540 - protein, 118 aa, Homo sapiens
MCFGEVGSGGTRIQGWFIFHTFTSPLKTEKKWLSGVTPITFQAGSLRSEGLKNLRKAVEKAFCWSPGTFPAELTGPGSRGNSGAGLDWEACRCYFLATGRCVQKRGDPHFYGGSTPGG

SEQ ID NO: 995541 - protein, 227 aa, Homo sapiens
MGLGKGGRGKLGLNILNGVDEESGKEYGGGNYGGAGLARSAQEAKTFDLAEVFLNCQKKHQVFPEARSTGGFRQQNLCANKGLVRAPARGSMGYSAVWAGFGKLDRWSGVVTYGQTRGKPQGGGAARTGSYKRHRLVAQVYNRKRGLSNLGKCTQNSNGNGAAPTGEKRRHAHVTGAPRRGARDTKCLGDHGETPWEPQGAVWAQRRDEQDGPLQYGPLHQRAPPWG

SEQ ID NO: 995542 - protein, 105 aa, Homo sapiens
MDWGALWKGPWTICLGTDSGARMVNLWDISPRFFPLPQRDTLFAPRAGERRPIGGGEHESEMWPHVDLVVWPSGGFGSANLVGLRVKGALGDSRNIKYSPPKNLL

SEQ ID NO: 995543 - protein, 282 aa, Homo sapiens
HLGFFNLKKNSFLQGRQINLKVKRNLVAGSPESSVPQNLELRKGPPGASCGKVGAPRGSRGCGGKEPPAHTRFTWMGVSVVPTATCHVLSPRDLFDFNTLGGPTIYGTDTGAKRGGYIRLGLLIPTREIVFILVHPSSSHFPWERFRRSGETVRGVDVPPGAPCLQDDARSMRLATGGGGWVAQGRLLEMHFCGVHHRSEFPPAHPLCGLVEDRSQRVTTTHSWPYSSKKRIAPQLAKTLGSRVPYLALQIVCCPETFTSEKPKARGKPPVNASPIPSLTPP

SEQ ID NO: 995544 - protein, 115 aa, Homo sapiens
MNELLPVMGYPGVAFVDFMSVLPGIVACGMASTGGHAVLGAVRSPLGMRRVCLWIGYGRCMPESGAGVPRGGTFWSLVWRGAEGQEPPRGLRVCGGVWGPSRMACTSPPLSFRGV

SEQ ID NO: 995545 - protein, 155 aa, Homo sapiens
MSWGANGGGGLVFTAPEAPAFGRVLAARRLPVTMVAPPAVCAPGPRGAPRIGPASPQIAACHAAGSRGPGQISLQASRHSCPRIAATHGQVCPGWRIPKFERRHSDMTLYVHKRPLLSDRAFQEMKNNFATVFDRLGCAKELREHAGLRLGRGDN

SEQ ID NO: 995546 - protein, 100 aa, Homo sapiens
MAWVYPCIVLFRWDPMISWSGRERLLLELWAGKELIVRVALAFLCLVLNCRGAVSGQPLVLSCAHGGGWFGGSLMFGLPPGQLLGALVPGTAFRKGPCGR

SEQ ID NO: 995547 - protein, 80 aa, Homo sapiens
VCEVVAVSRKPTFSRPDASEGPKSEFPGQPKSKPCVLRAQHCPEQILANTCDQIRVPLDATMPKIRSVCCVTRSDVDARA

SEQ ID NO: 995548 - protein, 251 aa, Homo sapiens
DPVPFEPPDKIAVLDEEVADAVDVCLEQGLMYCRMRFLVTEESHEIFMIILALLFRMVLQVHYMLTHIAIVATRSIGKDRGILTRDRSCIPRQDSVEDPLCGMRPKEALGRRNLFQELTRAVSSRVYLMHRGKPPCLIIVTKRSTTGNASPKLLSRGALGWLRVACPVASERRYYAVAHCDGVAAIVPGQSLIVLCAGVRPLAKALLDDLGILCVGHCFGVPLFVFGMLSRYQSLLLRKREYKEPKGATER

SEQ ID NO: 995549 - protein, 399 aa, Homo sapiens
  misc_feature (17)..(17): Xaa can be any naturally occurring amino acid
MCVRRPRSSISYTNFTXEYIYICGSQAGGRTQKSPAQYLSPLNFPVCVYPLSLLGDNISGGPLVAAVVYPPLLGGFIPLYVSPTVVCPFGALYSRGGGAHRARGLIYPRAEHFQRGPAGEYLRPRVHPARSCAGDLEPPSAPTSFVGIAKTYPPPEEHPARSLKPGREKILCAPIVGAAHLSTCWRGSLHLVRGGRLYKTAKKSPLHTYLYLGPQQRAGTGGTPPLYTGGRKTPHFSHLEKGPLCIGPNNLTHDGECRGAPPPPKRTLMAPPQLRYQTAPACWYHHTHHHAGRGGPRVAARPPVGAPHNKRSGSQAIGSRPADRTAGAARTPANYQPPRRAPHCTNTPSRNARMERRRHHTHQRAVSSYPNPSKLALNHAHRSTSQLAGRHSPPPQHHS

SEQ ID NO: 995550 - protein, 84 aa, Homo sapiens
GDPATLNLFLSNMERMLHDKVHGVRVIGSSTLDTLPPGPQRPRMPINRFGLHCCGSGGATVIIREAGGIVIDTFWVDPVDLMAC

SEQ ID NO: 995551 - protein, 233 aa, Homo sapiens
MAAPRGPGTTPQPSPQGHPLRKDHRQTHTVAQTVQHLPPIHAAHRAHPSPREPHPTHPPAAPHTRPTPRPHTTPRPPAHTSPRARQQTTHAAPTHRPHTPRAHHPQPPSTPPPQHLRPLSLPPSPPPLTTPTRPPPTHPPLLIPTHPHPPRRPNPLPPPPHGVQAPRHPPRTPPAWLTTAANPPRSATHPPTGRPHSQPHAHPTHPPTHAPPHRTPITPGPAPRTRGSNTSIH

SEQ ID NO: 995552 - protein, 291 aa, Homo sapiens
VLSKITHASIPIPVSSSSKSAQIKRDKTSSTAAMQLIKRLSLVGIIPTGNSSDYAFSNNTKVITKTILTPGIGQFPCRMPPQVHRDCKPHVQYECRQYTSVLRSTPSPINAKTHLSCRKAPVDTKIDYEKWLVSISEALAIAKDPDLGIRYPDYALSPRYQSIRVKLEPNMCSPGTLRGHRLKLKGPGGASYPSRGACSVIDKPRSTHHSCSAIYRIFRKTPVWRLPSKRKVPTVKTFRFRVLAHEVARKWVQFYPRKKYEYAFEIIGSKWIYPQPGIDAFFNRGLKLYTA

SEQ ID NO: 995553 - protein, 333 aa, Homo sapiens
MKHWPIYGVWMMLAVPNGSKLEYKGETKSFYPDGRCPSTGSAHNDARQHCQHSLTMAKTSSPMPCGHRCPAFTSHTDLSSVQATHNDCLDTYSDWLLNCYHLRHSLTLTAKTCMPRYSGLYRALRTNTHGFAHAPTRGHTAAYQIPLATPAATTTEANISPDLLASPPPIPPSIGKRHWPNSLCTRAPKRLLNKRHCASNTTTHHSGASGRNKANPRQPHPPSHTVAYTPPPPSNSCALTQTLLTTPAHTSTSQSTHVNHFPHTPLQTHQHDRLVIHIKRDPPAYHTRHSCTGDHRSRQYTTHVTTPTHIPPPPNNNSPQRHHRHTSPQAKSS

SEQ ID NO: 995554 - protein, 349 aa, Homo sapiens
GSNMETFDVAELDHELPPNGAPRPCEHATHAAVPMWLGSALCRGQWTLRLDLQATMAMALPTDLTTWLWMPKPMCDRHDDLLGPTGAPTLHLTMTSTSQIAYTSLSLPHIWLSLPLHTPDPSIDYSDHQPSGPYYGHVGPGLWTSTRAFSYMGHHRTRPLYTAISDTHRPLTGPYNTHRPHTTGEDSSMKYYRTPDPRCPYTSVAVLANQAHRHLPPTYIPPYNTHCILLPPHHPLTTTYLTHTTNTHIPHTLPKPTITPPHYHPSPIYSHPRSPTPPPPPPFIHSPSLTTLLPPPLTPNITPLTPTLLLPDPPSYTFYTLLPPLIPSLHFHPPSPLHPSSPPSYHLPP

SEQ ID NO: 995555 - protein, 105 aa, Homo sapiens
MKYWQHGELAKNGDMNVVGCLWARNVVRGQSMRKPTGLKMRCWLDGQDFSCSGSHYLSSNLGTTQAPGHIPAMPYYYLVERHNSTVLPVDFTLERGPPVHVKPCQ

SEQ ID NO: 995556 - protein, 298 aa, Homo sapiens
RCWLLVLNLEPYQTWDWRTTQNDAYRIRQILRRRNEEEEELVDPLINSERALRAVGEMCTGPGAAKLCDERVSSRSHTVRGCTEESLDFLSCEVSIAWATNSLDNLYTITCVELNSPQIFIIWAVRIFPYGVWMYHLFFLSSVSCKIHMNLMGLGEAGSFYVISQVIPSRLKKFYDLPMEEGHVASGDYVLCSGAGSNRLGPPVASCKDTPLVGEPRAGARKECESRAWVTCFRPLREEARKSALDTGEADNLERGRVLGVVDRILGLNSCHPCFRRKCGSVREVWRKRGWLSRRFGR

SEQ ID NO: 995557 - protein, 167 aa, Homo sapiens
WVLKKSETCEAKQSKAGAVGGCGVWGPGGPGSVPTLSSPLCACKSGVCCVGGHSSCGNVASVESLWDAKRGEEGLWGGVSPKRARGVVWVAAPSWRGPLSQCGPEGEFPVDQGTPVWGYCAPVRIVGRGPCEGETPQEHKGERETCGCVWREGISQGGHCGSGRPGV

SEQ ID NO: 995558 - protein, 231 aa, Homo sapiens
MAMGVACRVSVHFNEWSVRGSLVDRYVRCGTLEKTLSSREGRRVQCLRCQNIVPMESGGLDSRLCGLSHVSPYLGVADAMVGSVIYDRTSDGSVGNVCRGRSILCWHGYPHMVRSLALGRGPCVERFSICCLLLMEFDQPYLYKKRIVELPETACMAIGYPITSYVRPWTRERESGGWAPRTLSEEFGTRKEKKETNKTPGLERGQRDKKITILCYTEYDQTNYFNKEYRS

SEQ ID NO: 995559 - protein, 125 aa, Homo sapiens
GLKGSLRTEDKRLQGVCPEEGWDGVFSLTVPFSEGSFIGPSFKAITVGACSRQVQELEKTRRQGRRDRTRAVGAVIRRLVGSYGETSSTVADAVGGYGGSRCRLVPLGPSQRDRIEGGLVPSGRT

SEQ ID NO: 995560 - protein, 511 aa, Homo sapiens
LYVANSEDLPRFCSEALLWSSTAMYPVGFDISIQPMQTWHHVIGPAALCSRAHLQRMSSHLISMPTVILGSSFIRNGHDYTDDHYRHMPDTTAAPYTPDDHVFADRNYSSHTTDTSTRSQHVEDKIMNRASGRPHACNVISTGNTRQRSAIARRSKKARRTEHSDTVTNRRAQPTTHCLAAPHHRPSPDGCQLTPSRPHSASPPADKERDTHLPPEPRTHTYKLPNPNYDSPMAKNKLPHRDKNACKQHMTHSPPCTTNDETPSHTERTTTKHTTPLEHAPTTTPTQHHNQRRPPRQTNTHTQHNTTHTERAEHTPTHVSASEEPTRRKHTRRHRGTTQQGKQPQPTHRTQARQPHGTDLTYPSTQVTPTRLRSLRPRKPTHHMYNNHTARPIVERTNDKRRATASDSRTGHKQQRTLRSKPSTTPTGISTTTRDLRDRDKPTKQNQADKPKEANSPNEAQQDKQTKRQDDTDEHKRTRRDNLRTTLSDYHEENVRQNQQQQMTQYRERRN

SEQ ID NO: 995561 - protein, 300 aa, Homo sapiens
EPGSLCQVVRNLQRAAVTGAAEPAACPAPGPATLDPDSLWLSPRAPVPALGLALTAEDERLERGKEEPAISSASLAKPGPSKVSVWTLRVLRSCRGPGQATRTDTLLGHVDLPRFPHANHLAMERPCGHCHLPRAVQPRVTRTGAPPQRTLRPRGSPGPTGVRKPGKATLRTAAPHRVPGAKFTPKRAAGMTAHRHTYWQRRRRARPPAPQPTQRRTRTTTLTAPNAPQTAPNSEHQLTARRRPRPPATSTGVGKDQKPRKEATTQHPGATRHTTSRKARGTEPPRPPKRRTRTHRPRTS

SEQ ID NO: 995562 - protein, 247 aa, Homo sapiens
RSDESPDGRCLVSKKGAVKRHAWLVFRGSMKHAVEDEVYHGRPRPDGLALVVRQYAGGPVSSQGTGRRLREPSSPNHKKPGRPEREGRRRDSARRAEQHAHAHPWTVGAHDFPHTQGSQGTVHHTMKARHAEMIQAKSSRPSTDSGLVPTIRKRIPCGIATQIGLANGQHKDLTVARFVMGGRQIPYVGKERNYMTKARTGNHQGTYWNAYVDSPCAQYAGDTKCTKEQPYPTGQRTTQNAEHVATE

SEQ ID NO: 995563 - protein, 274 aa, Homo sapiens
  misc_feature (72)..(72): Xaa can be any naturally occurring amino acid
  misc_feature (191)..(191): Xaa can be any naturally occurring amino acid
PARVRDPGSRKNVDAYKKNRDGPFMRTPFKGRGGHGGPKKGCPHGSKHPGAGQDKDMWPNSYSGRMRRDMDXFFSQVSPEGLTCEKENQVGLGRELFLSGILLTQWRGLSHVISPRDIYTLHILGPAEKLVALATTPKRRVRRVPRKSGAEGPRGPKRGFWEGGGGGPLGREISPQERGGKPLRNKKRYLXNREGGWAGGPPRVCAQTREKGPEGCGGAVGFQEKPEFSQWLKRGGGDYRGPVGKLCASQGTPSTCYKILGEKGNHFFRAIWDI

SEQ ID NO: 995564 - protein, 112 aa, Homo sapiens
  misc_feature (59)..(59): Xaa can be any naturally occurring amino acid
  misc_feature (63)..(63): Xaa can be any naturally occurring amino acid
MPTFMGKQKEMEQGRELRNCSHRSGSSRTELVLSNPGKSFKRALVTSVTCLREVKRPEXVHGXIRQLWNLLLIGTRMEPTYDTYLKRNPSSNYRFTEKRLVLCGLGRHDFVH

SEQ ID NO: 995565 - protein, 428 aa, Homo sapiens
APALVARVVRAVRVAADPHVVAFSLLALFGPPGLSLWPVWPAFLPEIAEWSMSGGAIWPACLRVLCSDACCLVMLKSCWSDSLFNTVGIWASDDFCTTILLIHSTCHYLINGSPSDHTDVSAWKLDLVNCATRIDLVTTFVSTHTRGNTTVFVSHCRTLAPKRPQSARNFPQHRRSIWHALCASTTFKATWHGVHAARQTAILPVSLHTFVLARILPLIRISLHPSLSFTRLCSGVASHPFSPRLVAILHCLNTTHILALRLALHNNLGSITVILGRTPHTHIHQRSSAQRSLDPSSLAPLGPRHSSSKTTRPQACHSHAARSHWFSSAMESTSPAIPALRALWAVVSVRRLTPVARDSSTRNAPCAALTAPVAAYRPFARPAMQLRLSATLIAGPHGISCAHVYPERAAAPITAEAFHQQGEQGGSA

SEQ ID NO: 995566 - protein, 249 aa, Homo sapiens
MPPTHTTSKHTQTIHTLPNPNHSTLLTPYSTLYPPHPYPPFTLLLDLPPTLSKLTFCTTQSITTPTPIPPIPLYPTPLTHTHHTTIYPTTTSSLLQHYLYTLCSLPLHLSPHLLLSLPTYATTSNFVTILQTPHTPSPTQTYHKHLPYPSSSSPLPTTPPNHTPPPPPPSRPSSPPTPPHPYPHLPPLTLHHPNLHHTTHTHHTTPPHSPTHPTPPTTITHPTLPYTPLTTTYTIHPISSSHSFLTPIT

SEQ ID NO: 995567 - protein, 428 aa, Homo sapiens
PRLADTQLMLGVGLICDHLSTVAKGHKWRSFCWAVVLSFHDSHITGTLLLRKLLPLHDDNNTLSSPSLLLLAHVPEPTLAFLPTHQPTCTLYPRLLPPLSLNNTLHPHFFPYSRSPDPAPTRTILNPTERHAMPCPFHPKRTYLLLRRSSAIFGLTPKALERLPRLRAPNSSEAIHRAQTTSMSTSPWWLSKQSQFYLRTAPPPKQPSPRKVNYPCNGKSHPHEDLVLSPLQTIRTGRAQPSQGSVQTESWTLSHGKHIHVPIWAPRLHPFQPQHEAVQLVCATKVLAHPTTSRCTHPSLPPFHTKPRTTTLGICPPRTTEGGPISPIEAPLSSNVPNETQTDNPLGSNSPSHDYICRNNAGTNTASGTKLTHLNEKQTSAPPPYSNYDRHITASKTHIAYTSLAVAATVDHIRRRPPHTRTLPYASA

SEQ ID NO: 995568 - protein, 152 aa, Homo sapiens
KLSKLHGFSFFQEWPSVLWFFLRKLRCFTLASLNERVRVGGCAACVRVWQDFSSGGWCFSTPLTSHPHLSSLISHTKNILKHLLCATTLLYTFTGVFSKKMWREIFSRVEGSLRGCYSYPPGVVSHEILQALWVSFQSFSSQDPFVVCAHIV

SEQ ID NO: 995569 - protein, 347 aa, Homo sapiens
  misc_feature (38)..(38): Xaa can be any naturally occurring amino acid
QTGGDGPEEVVLLDSLRWTPGRAWPWGSAGLRLCVLSXCCDLCEVLTMCWSDAVTYLEVDAEAPVGSGVSPCLAMIPLCESCSPLCIGCPDVRRRRIGPASQHRGPGELGKVKKEQQDVLRRTMTSSPMCIREGRQTGDSVDTNWTLVTLPDDAINGRQQKQAERQAAHERLHGVGLSAARRKLADQYPNLHNDLKLSKTLGKLWKDADTKVTRAPSSKRLSGPYAAQRKTPDYQYRPRRAETQGRQQWKMRSAPGVEARQVDRRHPGHYTRTPWTPDHEKGPMEMGPQRPHAKPRPETDETRDEAQRHEHSDKTIGRSDHKAEKETRTRQRQREKEETEGQRDPDT

SEQ ID NO: 995570 - protein, 263 aa, Homo sapiens
DAGPVVSGRERGRSAVICPWYLRPPQRMDPLRSGNATMCARGPEPEYLCTMPQDSSPRDEPSKAVLLTWSSRSTGQVAKTWTVPLRAGTGKPGEVATSQRASSFVSTWSRRVQWCYEELARMLMWGWNCVVFAHRHVGHGQIEGDEDCVAVFDITDVVPSTGIVVRHAIADTSDATIRTYALAVYCRSILEHEFSLARAAIRQFLNGPGIESRESNLAGSWYYHVVHLSCYDHILNLREQIFLGPLREKNDDQFVEIDKVGSF

SEQ ID NO: 995571 - protein, 383 aa, Homo sapiens
MPILAAQHTMQVYGTIGDFFPESLSQKDCGLCDVQSQTCSGIKCIQSTIMHDDHQNTIFGWMTAQITHHGDLGMSAVPMMTGGWIEQDDCMRADWKEDEEIDYREGVDCKDDMRGAWPRNKDEQINMRKKKAGHNMTHTNTSNKIEIDPYKKYKDRYSTTLQKHRSTSDHAKRRCDQKSLTHRAQEMGPMRQPHRDRAHNRRHDQHTHRDIGEHAKQKQARRQPQNRSHGPWHNDKRRPMRNKPHKTPRNTQGGTTHDTTKNKPKQTDTKPRNAAEERDNMERHHKQDTTHTTSQATNRGQKEHLGNTRQQGRAERTQTKTTRKQTNGPHRPATQQQQSTKTQRNNPTQTDRRTHVANKTRKKPKSTTKERENKDNNMGGPTT

SEQ ID NO: 995572 - protein, 120 aa, Homo sapiens
MQRMDPILRCERRSVVSIPEQQFSLQLESEARLGQHDSAARAHVIIVINVGQTRSEYQSAMECLAVTWTDMERGRTVRMPKHLHALLRVDTWRRERMSGQSKLNGTQERGGTLKTLNLVT

SEQ ID NO: 995573 - protein, 141 aa, Homo sapiens
ARGASRQSSDSSYLLESSELTPAGLRCPRLPARKQCPADRRGNGDRDVPQAEVGRGGGRRPRHRPEEAGEGAIGGGQERARLPEATKDLGVTARVAQHSRNGRQSAPKETRGNENHRTRQENKKNRNDNEKDHKIRKRVNQ

SEQ ID NO: 995574 - protein, 366 aa, Homo sapiens
YNGPFGSEAMGGAGPPAPALGRGSQSAEEAWKSTRIPGDGASALRGSWRGSPPTARGATDHDRPPMTSTARDAHGPGAVTEETQADEEAGGVDHSSELSSLLRVILSQVFDEVTVKMNLIASADYIHLELSEETCSSEHHTLTKLHMYGLSTHYTASDVFLDADTSGACSNGRLKHDLTEGEDTWRPPVNHENVRIWIKYGEEEGITNHSIHTKGNKNRAMMKNMVKREAILNGGRTKGLMKYNSRTMIDHRNKQEPYRQAYKRESETNRHVKPGPQPKGPGKGDPKRQHETMDTSKTHTTQEEQDTTTDETERNTQMWGEIHNRCSEIQCKGARRLVALADLGTMNTVSSADIHVDVNGLKTNGQ

SEQ ID NO: 995575 - protein, 362 aa, Homo sapiens
APHVPLAVPRLLRWYQPGWRSVNVDRGSRVYGLACQCCCPDAQLRLGLYTLFECVRLAGHDLAGQLDYSNDRVQSNVLTMRLSWPREIRQRFTLGYSLACHETLHRKRSGMNCLLLMLRGKRVVDHAGSQWDTKCDTLCKRRVVSRDYSKRADAVDCGQITLSEAHYYAPLSYDFLNEHRAFGTTAIEVSEAHALIERAFDSIGAPTSGTVTTAARDERDIGSYDGLSKARSWRFNRWNIAARILSSDREDLPTQKVWGHIVAQTYSRDISHLAHWTTHPTIGKGSAHRREEPKAERKRRTLSLKWLAQSATYQHVGAATQTTYTGEPNVTETVLFNIAREFHYHNGGLDTTNRTFASTLTM

SEQ ID NO: 995576 - protein, 306 aa, Homo sapiens
MRHQIGPRCGADNSMRPWYMNKLSGGGVAAWTRCGRWASLGATGCVTRRIGMLVLISPRGAGCIPMDNSHGEPGISVRWFGTLVLCGGPPGHMRALDLQHTRTQSHTGRSSVLVCEGLCTECLRGVGQRQGRKSACQPARWQGILIPGAYGSKIPRKTACLVKLRRMLLLQLIVPLIDTLNQSVDCMNCQGQSHGCTTKCNSNLHLPSRRDDTVTEDREMSLSVTNRHCVQVHRACTILECPEGVWPGMSPTPLGQASQLALKQTFRNQPKWGHLMTGWMAGRQLGETERKPPSNDQQSTAHDMLV

SEQ ID NO: 995577 - protein, 481 aa, Homo sapiens
NFQLPYFMGHKGGRMQTITTGPPDQRVLQALEHLVQHESSHFYQYRQLGRDGVGQIFHQRKGNIRRSYLRLGALEAMSLLLGHKCPLYGIENKAGLRSLPVVAKVAGGRGQHISPYNIRTRHTRGKRRFHRGSGTIPLCETNIWGTETDAKFVPPLYNTGASDLIRERATTTLQQQDFKYYKPISLDHTNTQDTVCQTSKHTSYISCHKLREEQTGENTERDERQDKHNVGANKHHEVFTKEYRTQVKQRKKPTRYSQGKQRRIPQEIFKKTNQGEEKKNPPQKRENTKQRHTTMHAKSPDTNKGQRTRQKAKDNHKCGRRKTKKSMQADDPPHTDTGNRLQQVRRREYERTSREYNKRDTQTTGPTEMSKTHQRHKKRLKQAHEEERKRQTEHTHAINEDNKHTQQNEDTRQKGPRDTKGHNNNRSGDPPDKRKGFQHKRAKRNTIRAQELPATSTENQAPCDGKTTWPRQRRNRSTNQR

SEQ ID NO: 995578 - protein, 342 aa, Homo sapiens
MAGQVPGLLQTSAMSLPRVLRLSLALASLGLHAWDRGSGPTDASVWRHMINACSVPRDQDRRTPLDPDPKVTLGHHGPESITFISGSAEPALECPTCCLLWRAWVWEWCRAAFCFRRCRDCLQSLLEPVCGDAALSCLLRTPMRGLLKPTGPRSTMECAPSAMIVQPARSGGCACGSSQSLGNEVTVTTDSSGSKWQSLCIPLPERPRISLQGTWKWRTSMLEKGRHLSRIPPMPSRQHIVVPERTRYCSQDRHRMATQKEGAKPRFWPWQGCERMYTVTGGLGQRHPHGEGATNGVADRLKEIWTKLHAEPRKSTFAVAGEVIHTVVLQDDRRESCNVQQR

SEQ ID NO: 995579 - protein, 76 aa, Homo sapiens
QGPANMGRVRTKNREEGGPELIIAEVLHAPGAMSVSRRSKRVCEEIAIIPMLDSLRQTRIAGYVTHLYEANSDQAQ

SEQ ID NO: 995580 - protein, 112 aa, Homo sapiens
MDGSRMTDREPREVVELKGYDKTANWRAFEKPGRDCVRSGMGGKRLASYDDMRHQTSATEKDAKGTYRKRESVGKIQALVALARQGLAWEHNRRTCQSIGQGLPGDQKQTEQ

SEQ ID NO: 995581 - protein, 631 aa, Homo sapiens
  misc_feature (51)..(51): Xaa can be any naturally occurring amino acid
  misc_feature (455)..(455): Xaa can be any naturally occurring amino acid
  misc_feature (571)..(571): Xaa can be any naturally occurring amino acid
HAPTVNVSVVITVQLDSASTGCSRYTIGRLGDPPIPHCIHNRVVAKVIWAXERGDHARCTIVHFRTISPRVRWWPSHRETAIGPASEIGYSKPLQHASKYFGRCLCALSITEQRRKAQCDARMPRATPPIGIACYERWRNSRRLRHWSLQQVVDRLIYSKGGRSVVETSNRFQHSMTFGRTTELHFAMLTKWGVGGVIILGGTGHARGNFYVDKFFTPLTLDALEFELEGTTVLSRTKLLYGRRVRGSDSPAERHLELFRHAVRLCGITTHFALSNQKNRIRRWGIAVPLPPFIPVDLIMVAFGNTVWRRLNIGHTRTTHAVRIPFMGFPGGKTQIVRIHLEREEGSVWHLRGTEHTMGPDWGGFHTLRVCEPGKKGITQDRRDVLRNAYGPQFPNSRGLHIATLEVPKGCPNRRPKKQVPLTRGQTQDNKWVRQHTNLYSRISKNRFGLGAIKXLYSRQERNSSYRGRRPSPDVIDHISRNEEAMFDLKHPRGITQRDNTRRTRKQKVFEHHSRLMITPCYNHGSREEIIRTDEIIGELRSLKTDVDTTDDEHLKKEATITYWLEKRIWXNDETTHTICVRTPYEKEDKLLCIGSTTPLNVNRVTPAEGERKQYEETGCIINQETVADAD

SEQ ID NO: 995582 - protein, 59 aa, Homo sapiens
MESLIALGLPSLSTLRTTPIEFPDMQSHAKDLEESPLPSPLLKLELTPLNSHLPKAIGF

SEQ ID NO: 995583 - protein, 88 aa, Homo sapiens
EMESVLLCAQAVELQVALTRWLTCNLLTFPGFKQFFRASAFPKYSVGHTGTLPPTPGIIFLWSIFIDKARGFPPIVVAECPTLVEKLM

SEQ ID NO: 995584 - protein, 206 aa, Homo sapiens
APLLGSRLTTAKRLARTPVSPASWDDQAPRNGGPLVRSAQRSSVWEDQSTLMVSSVNDVLVIGVYGYEGTGDACCIHYMYLLTWKDIGERRGRLTEPRDDDTVLDAMKELLVAELLGLPRMDSVNRLKSVRQIGLHREQPYVEQLDKIGKKPVAELAGCYFPYGTESPLRGIRPKTQLPCCLTFLARTEIAPAMAFTKQESSSGIG

SEQ ID NO: 995585 - protein, 60 aa, Homo sapiens
APLVFVPCQLPAMAELDRFGAPAGAPGVSRAWCDTAVASGTGRPKIPGHDEPFIGALDTE

SEQ ID NO: 995586 - protein, 208 aa, Homo sapiens
AGERRCVTPESPEQPHLPPACAKITITPLWSEPACCRKPVPQVTITCNHEHAMAWDPSMPDQTETHTTNSTHLKHLDDAQYQTNQTSPETTYRTHTEAAKEGTAEAETHCIPETIQTNQAKKNQEKGQRDRTTTNDGGHHKSPESTTGLPSANTNPNPPSAHPHAGYRGSHRRTNSGRTTTNHSTPEQQRTKHKEQSKPTHPQSPPSN

SEQ ID NO: 995587 - protein, 131 aa, Homo sapiens
NLVDSNLQKKRASKWSQLCKQNMHDEVKGEGPPSGKKTAGPTGEESLNQLLPRRDGVVALQRTPLQDPVRKTMKEQARTTPEKTDGWLAVPAKHLRAPRKKRARGRSSLLKSEDGDLRSRMEVNSEDSMRE

SEQ ID NO: 995588 - protein, 78 aa, Homo sapiens
MGHNHRRPRCTKTGGRCRMAPRGNQDSRLHPRGGHREEHKEHTTQGRTQQTYYTLRDSGQQPSRHERKPPKRAPQGTG

SEQ ID NO: 995589 - protein, 151 aa, Homo sapiens
MSRHPWTLTEAKTPGRGPPPLKQEKEGAAKTHLSETQYHAGGPKGVNQMHPRNTRGCSHRTDIPCTNHRDTQQHKEAPPTCGMRKSTQRSCKDPRHRQRSKEHNPPETHDKEYPHERGAQQGHKHRGQNHTPQHQQREEPTIDKHSNTYRS

SEQ ID NO: 995590 - protein, 158 aa, Homo sapiens
MKLLTANPKEFAKTQPDETVPILQDGSALKSGARNSGDTSQSTIRQGQASKQRDRQKSNSSPQTAARRLHTLNSKTGAKRGMTKRDRKRETTGRAGKKQKRRQETGEREDKHTRRAQKTTRERPPTKTQKNNEERKAKERQRHTKEHEASTQQTARKE

SEQ ID NO: 995591 - protein, 33 aa, Homo sapiens
MVNAPRRQKGAHKTEHVGYPKKCPIVQNEQSFD

SEQ ID NO: 995592 - protein, 175 aa, Homo sapiens
MREARVGAARDSRRPAVGTQSGPSGREGGHKILAKGGSKPNKAQRRKTKSPTWREPSGPRRVVSGGTSGRPRLGRGTRGPSWPRHEGKVRAGGTPSTAGTQQKSGQQRPDGPRRKQPRTRKWIREEPESEDGDQHSSDNLREGKTGKQRDRTRRRGAKIGPQKSTEQLRQGGAAH

SEQ ID NO: 995593 - protein, 351 aa, Homo sapiens
  misc_feature (256)..(256): Xaa can be any naturally occurring amino acid
  misc_feature (328)..(328): Xaa can be any naturally occurring amino acid
MSTWGTDSKAAGQAPSQDWEAHLSGTAYSASQSRSIAIRAALLLGNDLCLRALEGTWKACGGLDNICFHLRALEEPVEGERQGQSGELLATLGTCRVAVFLDDNRKSHHQALGSTTCALWDDGDRGQQTGGLLAGHMWGCDVHCPLSPRMAARRCQAPVMPLSSCGTCGDSMCRQTFIGHESDINAVAFFPKGYAFTTALTTPRAALRLRADQELLMYSLDNIIWWHQLCCLSRSGRVLVAGYEDFKWDIWGCHEXATVAEISGHENRVSCLGVSRRWDGWCPRVPGSLPQNRRERCHPPRCRDERGVAWPQEDRGGRGTTPLREDEXAAPTECRARERERDTERQTQPQN

SEQ ID NO: 995594 - protein, 199 aa, Homo sapiens
MPAGSSSAWNHGMQPGWPTCSKWTSNDGGQSRCIAFMTSSVLSRGRVGSSRAPGPGGPRQDVRKPRTIAIDVSSAYWLPDRQVLPTRVAGSSRGLGRDAAQGGVMAEEGYTMGEEIIDLVLDRIRKMAVTSCDLVFRASWFAHSLGGGTRFWVRLALVMERLLSDVMAGNCKLTFSIYRSPGYHRLVGEPVTASMLSKQ

SEQ ID NO: 995595 - protein, 290 aa, Homo sapiens
MGRVRGKFVKKAARVIIRSTICDLGKDFHEGTSAAVRSAIAVIRTGTKAPAEEIAGSCHAICMNEFRERTSERYLASELHERGSRATERPSYASVDAVEAWSQGRLMEMWICDEEGKCWKLADFVQLCPGFRLTQHQSWDEISGRLRGPGRKLVSLYVAEVTASINSGDHRNESPKQHEGAVQGGAEAGLVVPSLKPSLGTELDRVMDEPVMGLVEATRKGVRRREGEAEVTAGPAAGNPRALGLAEWDVSSRDGGEGGNETQEGTEGAKDESGERREIKRGGTNQKKGK

SEQ ID NO: 995596 - protein, 378 aa, Homo sapiens
  misc_feature (378)..(378): Xaa can be any naturally occurring amino acid
QQDVTRSAKRARACGPRDIAACIGGWQGLGLRGCRSHEALRPSGLGAVMQGPSVGLVEIRLVLPSPAHASMGLGYGMTGSSIQGDVKGAMEAETKTQSDGRAGAVKEVRLVRDVDGMVHGKGADGCSSRDGRAGMAREPLSSPVAQGRASLVRRPDAGTREPSAVTVAEMTQATVFQAWEWTVRHQAGRQAKDARVRVERDKAGHDMDPDVTSEDMRRRVLAFLNTLGWWGCGQKRVCSFTSSTESATLWLPSGIQNHKMNSNGATRSSLGFESGPNPLAWNAYAALYKPWTTDSGNRVRNVNVDEPPDSIRPKIIDPFWKKKRERHQPANTESKLIEKTVVGEDTHDNIVFTEKLLQESSLRTADHIQTGKSNNNQX

SEQ ID NO: 995597 - protein, 493 aa, Homo sapiens
MGWVVVWFFWKRVFSRAFPQAWSVQVAQFFAFPCSPPPSVSFKRFLRAISPPQSNSRGNVTRAARQQPRPTDIIQVGTSYSIETAGVLHSVLCTRGRGLSTKSRVDFSRGESPPRPLQTSPQSVGVGKYTTPGEHAAGAPWGHKTCGGVLHNNQRVIHARPGSARGSYTNCNIRVPSAQVTPQVALSVRALLIQSVDKPCACIPLTREHFVEKTDKTTPRVGEGPAEGPVKKMGSMGGMCAHRNNVIPTVRAILRPPVVSAPRTKQHPPKNDSQVAHASWRRRVWTPRTTIRSQRDPPVGNKTIWRYTNTQRPLPNNSRGGTHITRGDNPLCGTPNPKSDLRHKEGQKRHTAVNIDKGAPHWRPQEIIQRATTGTYTTSETIAPPPSKKRAPQPYYKSFLLKTEGGEQHKPETTHARQPTTEDRNEARHSTQLERTDHNPSGEHEGQHNFCSRDVPPHTEAGSTTTIRLVTPTTPKDTMRETTPNNKRHVRAQ

SEQ ID NO: 995598 - protein, 70 aa, Homo sapiens
PNLFIISVKEVSDCYGTLPLVLRHVDHLVLQVGLVEEFAGDRGERHVESPVEGKGEVGRASAKRPTAQGP

SEQ ID NO: 995599 - protein, 491 aa, Homo sapiens
WFFQNPGNFVLHLVQTRVLHNPQCGRTPKTKKEVGDTGRGRRGARCVRGEHGRGRNGRQRGETGTISPAGHTITTEAQRGWREARVWRNRGEVCAREEARVWAAVKKPAGRSPPRAPRDPRERAAERHICEALVGPPDTQRIIVECGDTKSAVWVWAPPAVSQQERERERNNRGSPEKSVSAKGEKGENKVWGGAEYTRHGHSHSGSLEGPRPPDTHTVPGPSQHPPGAINPMGEEPPNNLHQRVSHQSNPTGGQLYNSLFSPGRKRTEGIKPLEHTSEPLTRDGPPVPAHTRQKNPTRGKSDRENPSRHSTAKGTHKRIKRPPKGKNPEKEEAQEPHTHGPTTRRQDRRNTQQDPPPHNSSTHTRPHTEKGGQFTHPPRKKTAEHSMYPPQSKSPGEQHRENSHGDKTDTENSSREKPPSEATQKPHTQNKTTRRHQNNKQQSIDKTPTKRPHRRKTTTPPPKKKRLAKHTTATQCRRHTTPHQTTSSPT

SEQ ID NO: 995600 - protein, 390 aa, Homo sapiens
  misc_feature (198)..(198): Xaa can be any naturally occurring amino acid
MKQRLTNPWPRGLYCVVQISTGGPQPQCRCVSPGAGVWGARTSPSWSSVLGRKILYLCETLCDEGPWVYVVERSRNLWNCETVGLCSLWALGLDSLGAWGLVAFGARATDACGAPCVGKITGAHESHRFSQELVGGWRTWIGARLRLERLVRRCDNPFGGDLCGGVIDLSCVGALLRKGRLVKYASRGPCVATFYVGXLVGICGWGPCDDSLSFKGPPLFVGGGASPLGAKRRPMLFSLSKGETLGGGSQHSPFIRERISGNIILGREIEGGHSRCGISQFFSVGGPIFSGRENHGGIRKKRGESGGRTPLGRALLGRPQGSLVGKPQIKKPGGGIPAKRGRPPYSLRRKSNPIGGGPSTHERKLTHGKSEAGEREKQNTGSRKNKTRRE

SEQ ID NO: 995601 - protein, 296 aa, Homo sapiens
MCGACGKKCPGVCCCPDKLVALLYPNPREKTMWDEIPPWGPWGPNKNKWGCFSRGAHYVRLHNGQIYCGGNIKGFIQNTCGISLSKEFFLLQRGETFTILLFKKGQPFFWRRCGELSSPIVDEKRGCSSNKRGGPPYDGGETSSHVGGAYLHNRRKSSCRHIKDHLPVVIYNKSELPDRGCHCCDANRCRGNRITTHPLCKRGATTTRRKYKPSATKSVGTGRNQSVTHTVRSEQSDPEKRNATNTCNTTGRHKQEARTRNNKRVAPHNKLAPPSPQRERPKQRFDKQNCAYQPTR

SEQ ID NO: 995602 - protein, 407 aa, Homo sapiens
MGVDWGQQPWSIFGLTINYFYLFIFSVFSSPAHIGARGESPLIGGEVASLGTRSQYRFSIVFSLRAVSGTKKEAFQACVKGCEVSPLYLHSMPVYSELFSLFLEPNLSELVTSLEDTYSVCLHSGGRLFSPQHRVSITHRGSYNILCGETIFTRGTPAESTPSCSPPQNSSTGRGGDTKNNPRVGELPPPRGALGAWYQYSLLHQLRSLYYPISADKIFSKKLHNKRAARSSVGLGRNQKLAATATYEHIKRAAIFSPPLLRRFPPPVGKRHQHFFPKRDKRTFHGCYLTRGPMAKTYSQCVRTLAISRGVLKKKHPSFQKPSLWFLGGGDAFNHFCVDLSPPPKGFSPPYEKGAETRSGCAPYTKNYDTARGRYTIVRRDNFVINDVNTFWGEPPTCCLPCEQHFV

SEQ ID NO: 995603 - protein, 121 aa, Homo sapiens
MRPELWELDVYVQKSLGAAVIDMVCCLARSTDSNGAFAGGAESGSYRNVESSRALAVGIARLAFGNFRRDPQNVLHPREVEGKHEIAMHCLGLMFLGSSWEDVGDRKRADMRPGPGCLSWR

SEQ ID NO: 995604 - protein, 320 aa, Homo sapiens
EKHPEYAEQNIRKSTTKKRRHPRQAPGLSMQQQQGTDLNGHMRRMVRCTEQVALGAIAITRSSQDLSQVPPGTGQDTQQTEVAPLNEEKTGGLARTGRTNGNGGCRHTSGQEEARRRRAYADPMTARTKDRAQTTRSEEDLTPRTIEVRNTVTGGWNQGSSRATACTPQGKTHGNSHSTPQQRRNQSTTAEHHRTPRTHTAHRGHSTAHEAHSTKLRSKTAKVRTNRHKHRTRTHAARSQQDHHKANKKPKTKKEKNKDNRREKQPTGTTGSMKTKKNRRKETKETTIRKQHKESTPYHHGNLTSDNIDRNKEQTRHKKQ

SEQ ID NO: 995605 - protein, 60 aa, Homo sapiens
MGHREWPHKSTRTQGGRGTGAAQRAQDNTTPGEGSRRCIRMNTTTGGLHRGNPPGETHEN

SEQ ID NO: 995606 - protein, 103 aa, Homo sapiens
MEGRLRSLISGCSVHAGSWTLGSHNGAGESADRLWPTRQELLQRMTGQVVSVQAVKGKPGGSLDQLPSRIASPCAMDSPIMARLEHRVSRLTNLRMQRERANM

SEQ ID NO: 995607 - protein, 76 aa, Homo sapiens
MYPCDAQAGTSTRTCSIESEEVIDKECNTSGSSLSNGREATYGVRGAMHPHDILGSLLACEATGRLGILRHWTIGR

SEQ ID NO: 995608 - protein, 258 aa, Homo sapiens
MHNDGEYRGPPDDPWYTTCEEPKLLMPEGREARRIADGNEDRVRDTPTNRDKPPHRHQNALNQGADCHRDRSDTAHHRGDHSARIGQRRDKATRSKHQEGAHSRAWRKRYHALTPLIALVATTTPRERSNARKRHTQWPKGYTQPAAEALDDRTNIEPAGTTTTAGKRGQKPSGKGPPHTPRRDIEQSKHQQMAQHGTRNGTQHPEKDYGDNTETRQNHAVTLYKRYEGYVRNSMETGRTTRHTERNQERDKRAHPSE

SEQ ID NO: 995609 - protein, 91 aa, Homo sapiens
MPGQCQGRPRTGRNSGGGSEWVTEDQGHPRRGAFKARTEPTRPGETQANRSVSGEKRPTTGGHTRGGTSGQQVPGRPPGETQHRHKRKPET

SEQ ID NO: 995610 - protein, 231 aa, Homo sapiens
GLCPKFYKRVLKSNIQTPKYSCQGKPCNAVGTGWGMAGGSWSSHPSGSGNGGGGAVSHLRGPTMLTWSGRGFYEGQSNQWVVPGQNRIFTLMPSNTLSEQTLWRTDSVNVVVNQGLRCGSSGHPQTFMGLSPLSSEFPRDHNLDSLGPQLSMMNRAHHKQALRNEALLGVCNSKDSAWGNGTQTLYGATFSDIKLYSALVKSQPLLNYRKSVPESGGLFTKNILRIWGARK

SEQ ID NO: 995611 - protein, 381 aa, Homo sapiens
TTSEPHLHQPQPASLPGVGDVFTPRCGVPSRLVAEEEGGPLLKFIAQLLEPSSTMSLAPKKPPTGPYATKYMEPLNEKFDPSGLCPLVRCGGSNGGSNVGLDRWVSDPQGGDHGQGSAACDNTPRFPGGCTARNGSNASKGVMTGKALAYPFQHSASLDLEGGPHKHVTDGHPSTVDRADCQVLHDLSTPATQTKPMRHGQLHQKAVTSPSAAPEGTKEAAPTKYCCTTKACGTLLSEGGSVDGRSQRNTSQCTEENQSRDATNMHHTGRHEQSTEDRGLATGSNTEPQAHRETTGCPSGPQAHVKKAEEGRQRVQEGGQGGGDRRRERRRERTQGLPRRERTGETRREPTTTERENREDRKTRRGENTRGTEAPRERSRG

SEQ ID NO: 995612 - protein, 354 aa, Homo sapiens
MGPKNFIGRVRKKPGGRGTLLLSHSLSTPKRHPSQRDTKKPTKPGGHQRDLGEAKKLVEEDSYAWNPLEKPRAWTEQRAHTTASHTDAENMRECSQRSTRKGKHSRETSSSAPPQNYKPIAKKIVRPPQQQRRIKSHNKQREKISQRALGEYNSGAHTSERGTTTKNSAAPTYAKKKAGHTTKRVDTTIHTKEAADDEASYETKRTPNQARRKEQPVGTAEFTKNYSSTKKKTPLLAKEEGEYRQPPTAHEKIHEGNKHSIATDTPLRRDLQPTLCERQKNTWKDTTQDRESGGTKQGTATSSTHRRGQHNNKKIPNTQAHQQGIAAGEHHTPKKGTNSQNDTRHLDNNETVDI

SEQ ID NO: 995613 - protein, 289 aa, Homo sapiens
GKRQPGAAARKNPGEVSGFRTPGGRLVKSSLEGFLNSHCFAKKKEGDKPRDTHPPQARNQWPAPKALAQPGRKTEERCPRGAPSHWVGRNPGPGASRRSYLDGPINTTREDPQGGRREYAQKGIHKSFHGINVHTYTPKRTAGVKCKPRRKHKAVHQDQRTEVFYKEPRHQRTHKNPQNGNYNAGKPAALKRGGTAPLKRRKLPGEERHAMNRQGEAEAQHTQDTPGNSVEERQHCRSTTKSSSNWLPTDTVRTESPLLHRTLQIRGMRMARRGTTVSQEDPTMAKGNG

SEQ ID NO: 995614 - protein, 339 aa, Homo sapiens
MPQSSRDKKHGGFIPKPQRVTESPPMTRTPSAVCHFTMGSGPPDEASEIDRRCASDISIHCSVFPGQVIHPWWPAAATKLDLGSTGAASQKLLLQLSKAKLNIGKGGSTQFVWTRLEETDQALTEPEAEHLLTDRPSLHLRGKQHTLHRMQLNQTRRGAGNHTQTTATEPGLDPGIEWTRLDTVDRACTLEGITELGGDANSAGNDQMELKHLHCMRNHAEQEEGHDGRSQAKICYGGKAIPTKALTAAQSTGSEVTIQYKDNLITSTNGTGTHRQDEVPLTRDQTGQEAQRQNKRTTEKQRKAQGQREKMDEKDKVKRKQNKKNKKTKTKLHKRTERN

SEQ ID NO: 995615 - protein, 324 aa, Homo sapiens
AQIENIEQEFRIGLKLMLLLEVISGERLAQPKRGKMRVHKISNVNKALDFIASKGVNLVSIVSRNIVDGNVKMTLGGSGPSSCAQAIQDISDGRDFSHGRADPVLSEKDSPYKTCQTIQNFHIRWPDGLGFCCYDPTTPGTSCIDYGDARGRNDPTPPTSDYRHQARAQKKFLDKPPTCWIADRPTRRKCPNDLKTSIHELHVSQPIPSHQLDAHERGKQQPLDICTGGRQHGTRQHTDRIREAAVNGARSPTNRARNRGNTQNAMTTEERKRTDQDRREAAKKARQWKREDKERDHKGTTDKRETGEKKDERTEKRPTKRPQG

SEQ ID NO: 995616 - protein, 359 aa, Homo sapiens
MWGYDSYACPAGEYVLSDQWLLLQYPVTWERQVWAKSTTHGHPVTTPNSQGSQTHHKQHGMYSIQINTYDLQESKVRLTLTIVQTQYGISEDQITQAGQLQAYTWNSSMHNSRTYLQEELTIRRVLHTYHESRIHDLLVFHGPTGHSLKSLDSAHEDAGPAQETNIPNIATEDRHNGPVNYQSPTPHSTQTLDRPTDASKTQTRPPPTARLDGPTHTGHRETTTPPKRTTRPDKHTPKTDTTHTHADADPRATHCPQHGTAHDHHAKPCTTRKSKAKIAGTTADTQSAKHHKRAQSRALNKQKQHNRNRGTEHTKQNYETQVAHTTQERSNENASHKATGRHAKTTRRGEQRTQEHDIP

SEQ ID NO: 995617 - protein, 440 aa, Homo sapiens
DPPLCGRQRWRRGWGHMRKSIRAAGDAAAAADASAAEEDSADRDTASRPRPQRSHRHRPRSQTARSMFSQGEERIKTRQEERKKKRQRKENIKNKQNKQYQNDRYHKTGEINNTTTKYNKNTDIKKHNNNKDTINNQTAETRQDAETKERDTQQEKRARTRQKTQTQTKAGGKQRQKENTRRRSGTSKRPKREPEAGRRAKRGKEQRRAWRAKRSPPTPAKKQKESKTNEPEQTKQEGEDDKKTATRTHTRRTPTEEQTQHERKADRQQTQRHRKERATANKQQRPAHPQTQRAHRDRHRETPQARDDKSAADKTDIRTRNRANHRQTTKNNKRRKTKANKSRQNKKQQNEEKRKEQTEKNNHTKTTTKRTQRPKTKKTRTTGKKRKETRPTRRRRTHNTRHIASHKQKEKPRRAKTQKKKTEKSTNEKREEKDIQETKQ

SEQ ID NO: 995618 - protein, 487 aa, Homo sapiens
LSETSPTPQREAALCAHPSGRHGAGAESAPKSPTNNTQHTYDQAQNTLRGPSDGRRRRGIGPRTSREPTDPGTKQKAPHGSLRTWRPRNQSCDGLIYGTAEGTTVQTSGPSQPGDTLTRATTWQTQEDTRPAIGDDSPPWTKLGSKVASNTPTLNKHTKPHGHQRETQIEAATIGRPPDTITTAQGPTGRAIQHMADIHTNTQTPHKRKRNPRGITQDNTHTPQAAAGNPPTNQRDNEQRRHNKRRQTGDQNRTAAKHRRPRDSTQPQTKRHKKKRTRNKTNEKPNQQTRENNDKTDPDRGEPPRPKTRQPNTGERQTPKQQQRHQENRTRTKTRPRRKASRKEGKRKTQRNAPQRGAKHKHTPNTNEGSDTEGGPTRQETREKRRTPRRKAKRATKEKKPKNDTRREARKQDKQSETKRKSRHKMETERRDTTGGTQERQENKRGRPQREKNKTCEERREEKQQKENERSEEEKTKERRDKGTEKE

SEQ ID NO: 995619 - protein, 208 aa, Homo sapiens
MGTLEKGAKTWGPYREHLGRARRKRERTDTEDPKPGIENNTERTNLGDKKEIREQVTYTHTQGRADIYIKDNPDSRTKEDKREQTIKRRRQVKPPDKKKHNGHQTGLTQETKGYACTPARHPGNHTPGEDKRFQQECDQKGNKIDGHHERARQRHLLTRRQKRRRKINRAQEQENDNKPGQLIQAPEETGAQHQRGDNRGGEKSSKEH

SEQ ID NO: 995620 - protein, 433 aa, Homo sapiens
PQPGPGAASVVAVSGSAVRANGTRERSLLLSAAVSCSPTADCPAPPPRVWSPQRIQLNLELRRPTVFDAGGAISCLSAVQGQQRVFLEGRSTVHERTSRNQDYTWLNYSGSQAIYERMNQDLTDGTLETDDYLAQPRKLCLLAHGEDTRSRSASRPIDTAKLSLQARNSSSTQPRAITKESRTPLINKVINQPEEECTKTTYQTTRAHRHCAPHNHRGHAGRCIRARTGYNYVFRRMREGIGHCSYYGRRKHARWTHSDQIVGHGRRAAYRQYHANPYATRHAPTGRPQLHTTRQAQYTEHNTGTGDRPARTTPAKTREHTRTNNRHRPHHTQTTSTNRTPGQPASQHENKPQHGAARTTRATRRNTHNTQAAERQTGGRNASRPEARTQNSTEHRRRAAKHGGPDRTPTRHTRAKPMTKDATPRQGSHTATR

SEQ ID NO: 995621 - protein, 349 aa, Homo sapiens
MRFESRGRSLCGPMLNDAINAILAHQAAGGSDPIDQLQAVPVINVGGTQSVLRMTLQVRSSSRLLRVALVADGRQDASPSMMVLVRLRPRASIRMQSRPGQSVGGWTGQGGSILWDNNAVLPGEVLGRDRRHRCARTGSHALLIIGGFEAYLGLLELSAAREKHEEFLCPHGHGSALLCATNVPGSDCSIGADHALNSILETATHQAVLQRNKRRVSIIRDMGGYCGYLANHWGRSGRKMVRIPFDEPSTSGILAPHVADPVRGYTAGGPIPKGLCPRRNLPGHNRQRVYNSVLTQAPAYAHPEQLSKRGGTSRDTGTSPQGQQEAREKLIGSRTGGSLQIRRCSQESQ

SEQ ID NO: 995622 - protein, 180 aa, Homo sapiens
MANEMRTPAQATAPGNYRRYYTTRDMDLRHTDTRTRTSTGRTSTPPITIGTDSLATHLHTHYQHPSHIGQETHTAHHARLTPNNHNNRRTHTQNSRTTHHAHKARTTKTGTTTQKEPDNKRQHTQQTPTKTSTATEAKTRIHRHTHSRQRRYNTETHTNSNRENTYIHERRRAKKRRNNE

SEQ ID NO: 995623 - protein, 198 aa, Homo sapiens
AALPCSPQWFGRGDPLRRRVPELGTAQPVSPEARRPRPAPQSVEPAAPLVAAESPPLGFARMVRPAVPPVTSSQRTRRSTPIRESPRKTITTDHYWMRSQYMIRTHETRQTPPYGTEDLTATNSEEPDRTPYQMKKVIEYLKSNESQLDPPNKHQGYNIGESGPLSRHNGITLTSLLSSSDGAQPSVKRITQQKPLTH

SEQ ID NO: 995624 - protein, 318 aa, Homo sapiens
MSENLDNEGPKPMDELLARRCSSALSCPIRLQVPPADPGQPWTEVEKAGRCGARYTRPAASAPRLYQLPSADDLFTSEIFKLELPNVASTTPTVQRIVRALTWAGWVWQTHKTKHLSGPSTLAPYCRHFPRRIAAEGQRALRQYCMVHLLERADHSSVSLAWSKRRNPWHQEGRRTTRKACRSEANKVIPNGPNVCAPLLLDSGPMPDPLYRQSHRRANQVLAQLAPRTPAGQPAAAGPAGRTRRQTDNTGRIALKRPKRTPEEPLTQSHRTIDVHRQLGAPQDDNTQTAHKEPTDTALKDSTAHATKRTTTHTNTRN

SEQ ID NO: 995625 - protein, 548 aa, Homo sapiens
AVANGLFRALNGGGVDMQHHCGAHSRRVDAAAPKPAGRNNHSQETALWPPRGPRVQGPNEDTARRVPAGPRPRLGSQGVYTTIAVGHIEVEDGGDTPQILRGVYPQVCATGRPTRGGHMWGHHKSWHASGHSTRSVHTKAISTQDYVCSSTSHGASCVECVAPRVYEASGHSEMWTPTLLPQKRGANHTCGDLKSEPRFSTTKHSTIQHRTTAQGNRNEATHREKSPGRTDTATPPSQDGGGNTRRGEATFTKEGDKTAQETINTAHPTHRPHTSGGTRRRTEPARVTEQEKPGAVAKKRATQPRQSHKHRIAAHYSEKDDHADSKRRQSPTSLEERHAYGQHSSNYQETDRTWAAARLDPTWHDPERKTPKHKTNLSEQTTVRRITQQQRTTKQENVYDETHTNYPRREVNTRHTPVGAKKTATCTEQQSRPGTHQNNRVEDRRRAGHQTSDHRGEDTHHTNDRRSRSTKMSNGRRTRDQPNTQPTPANHANERDIITTRGRSQAFPQQQNNRTRPRGPMRPRRDHTKNGDQATKQNEPRHYRLHIT

SEQ ID NO: 995626 - protein, 253 aa, Homo sapiens
WVLVGLVVYFSFFFLGFLKNQETRVRAKTKDKGRGGGRCGACGHQGRRPGSAQPQTPSVGDKTRGSLVWGAILPGDTRAHERSLWDDKQGEKGALAVGVTTSPVKEEEEESHPLKSDERPPQQTMWAPKEKHSHRAANRAHKVRGPLSAKAELARESAHQKESAPLEETTKETTTPHRGARSDKREKTPHGDHIRAKEKHTGARNDTLRENKPPSVEHPPHNVSTKHNGTHHPTYKPNISTKPEKSETRPERA

SEQ ID NO: 995627 - protein, 330 aa, Homo sapiens
SSAPSTSAALSCPGPSPAAAAHLEGGSKGRGAEGEPDRRTQTEAGEWVVVTPAATTDTTRAAGLPPTPTRKQPREGNAGATTRTQERHEQQQAERQQHQSGTHPHWRRTTGHQHDTARHNHTTATSDTREHAKQATGSDHAAGNTGDRSEREEETPRQPPHTAGRDTSDREPWGAAPRHADQNKRLSYRRRATRREATGANASPNRARHAQQTHGLAPRCTTQSIQTHTDHRKAENDETQNRKRSKTKHKRSKTKLNKQIRASNKTHREEDRTGDAPRDTDHHRHGEACTAQNTRQTKRQNSRTATSGRHDKTDTAAAACTANAANTTER

SEQ ID NO: 995628 - protein, 184 aa, Homo sapiens
MEMATRAQKKRQKQKHQDNNRQTQKSKQTSSNKQVATRDKCTPVAHKHNNTPTHKREEAQQEKRPQRREKKTKEEEKKPKERKKRHRTRKDTRKRTTHNNNAKKENQNEDGEAARKREEEEARNGTSNNEDATQHNNKADTTPHEANTTREKTSRKRRRKTKKDQTATHENRNHDTKKSKKHAA

SEQ ID NO: 995629 - protein, 497 aa, Homo sapiens
LVCETKKVFIRAPTMCQALNKQVFIRAPTMCQALTQTKYLLQRLTMCQALFIEPPPRRKNDKNQDRGSKHQHLRERQTGAVGSKTRIKGQLEQALQVHRRASRPYRPTLLTSLLHRTIPYLLLSRRDAPSHGKNMAEYSRQTRTRQTPIDRLHHGTSGEKPSQITDHQMHQTEHREITTEGERTGPHGTGAGTTTRSTESNLAYRTDLDSHRTTTDLPEDKRLEAHKRPTMRPGSHIAQYSEGHPPQKDEGTRPADTGPWTSGNKSRSGRRYPQRYTTKTKAKSKTTSATNDTRYNDLEDPDRTPTKTKEPNSRTDRNKNHDDPTTESTIRNPCARQEQPRGTHEPDLPSGQSQQPGTPAPTRPPRKQTRNTSTDNTDRGVKTEHTQQNSDTHTSRPRPPTASHTTQRQQDKSQTNRTRRCNTTRVRNNVHHTSRAKNKQKRQEKRSTTQQNDTTQNSVANNETEKKPTQTAQEQTENTTKQQTHATCPRDPNTPTT

SEQ ID NO: 995630 - protein, 655 aa, Homo sapiens
MEMCTTDSFMSCGTGRPLTAEQELVLDNSSARTEGNTRRPSQMNSRTQPGNFSNATTQPLRALTVNSAQTLRKALHTTHSNAKPLTLTPHYTTQLLHRQALRKRYFAPANSLLTDTHTPPLIQHFHTLAPPDTHSHTHPSSRTHLADPPWHTDQAVYTHTKPRPYSHARSQQQRSLCKTSRAESASTPYTPLYSPERLTAASEHAHVAWILQTDAAPTRRPNTLPTNLRRSARPTPNFEPPARETDPTPGTAAPTLEPSRRNTHQDTRALPPLHKRATLRRNSELRTADRRPPTCDTHDNRIHATKHTPPRSHTTTHHPQRALHSPHTHTAKRNTHPPAHPHHRTHIPHQHANNTGHGTHLTTTGTPTATRPPTHQHTHNKPDHTAPRPTPNPPTRTPTTHAHTPLRQPEQPRSPEPHQHSTHTYQTPQTHAHSHTHAPPGTTHVTPAHSTHHTTQAKKEANQHATRNPHAHTPTPTSSTDQADQPDNPSTPTTTPNTTDTTHPSTTAEERHESAGGTKNQQANTHPDASDQADQQQRQAPHTSTETTSKQTDGEHDSDPPRMPTKTPVRAISDHNAHTTTPPTITQHRYLVPRPHDRNRSTEQTPTPGYSRRREAAQRQRPQSQGTTARNRLSTTHEHTAKPHRTHPRRTHSAA

SEQ ID NO: 995631 - protein, 264 aa, Homo sapiens
MREGKQRDPQQKRQGETPNPPRGTEQKSPREESNAQNQGEQHKTYKRHNRDTQPLTKNNHKAKSQDKQNKKTRHPDKKQNKTKNPPTRDHNREQDKTENTATNNTRNTPKQEMNKTPSDGTITPRETPANTGHQPHQHRRETEHPRGATKRTTGHQPPRGQRRAKGRPRHTGPLQTASPQTTKQTGRNTQEESQKTITTKSAKRQTEKLYSRRRAEKNKRKQEAAQRKYEKQSQNAHTKGHKETGEGPMHKRTEHTGRPAPSMP

SEQ ID NO: 995632 - protein, 419 aa, Homo sapiens
MVPAPHIGPRTMSSISWTDKDPGGGEGEGRDLKRGWHSSTRRPGPDGGRPSPSPPGPSRRHTGDTGAPGRWSAAGRHGAQHRRAEHTTRAGRIRTRRSRRAAPPRILAQNRRGATAVATKTAATSVQTGEAGSERAHRNLELPGAPRVSTPKEEVPRGGGIARGEDLKRQIWQGDRSSGEKGKPRYRSSEKAARGAHDAGGNTPRETLRHLKQGEETDPKGGTPPVSKGHKHEPHATREERVDDTQGSPRKHPRTTLRHTKKVQETHRNTTEITQPPQEGGIRGPEKPHRRRSRKHDKGAREDTLRRAKHQLETPGSPSERTITKTTTDEDRQHNVGGPGQRPIRKAWDIQRSKRCSDTETRSTETPEEQTSTEYTTNVQNTPRGNTEQQEETDDAHNEKRATHDEAHTSRGSATQGKE

SEQ ID NO: 995633 - protein, 450 aa, Homo sapiens
GSKGASILVGLVRTRRGVGVRGGGEGELQREQHQEGSIGPSHRPSSGRGPVALNGGSVCAALNAPWKCGSQKCWVPREPPEMVSRKRGRPIFSPTGDHPSGTVPPRRKQGHLTQRDRCGQGVGTKYETRAVHHSLTSRVADSTTSAFPTGHTTLRGGPNAHRTGPSRPPRRRRAISGAAQRGLTLSNIAAARNTHPPLVHRSELTHPPRDQRPVAPHTTQQRRRGINHPTLGALHHSRGTPPREPPPHTGPPWRGPPPPTNPKRSPGPAQRTPLEACTTTNKEVAPNTRAQHFGRAHYHPPPRPHPPPHTIDTESSPRAKPNPNTAATLSHESTTQHPPTTHPNRDPLPTQGRNPPDTAHNRETSDNTPPPSEDHQPGATAATQPPHQHRPPKRTQQHEKVSGAPFENAPRRHSGNPTIHHADEPPPALPTSSHAPSHQPTPAAHTRGHL

SEQ ID NO: 995634 - protein, 329 aa, Homo sapiens
GYYGSLTQAGTVSLGLDAEGQEVFVALQRGAAHGGAQRARVRWLGHLVAERWSEVMTAAPRGCWKLGAAYGATVSLHRWKALSGPGLLFDIPEFIAVNQRRARGVSSSPGSRAQQLEQIRRGHPRLPVKRGAGPKSYVLWTGEHRTLLAVESEISMGLMDHMAEKLGAYTLETRVREVSALQLFAGGHDTPWMGLWLPQVGSPQNTLVPGALEPRVTAPGFLLGGDDFNVRARTRVHDRASGLPHGSGRTEAMSIGEYTTTGTPALGKNLLDHNAGPLKEGPTTTAGWRNMFAEHPKPNKHGKSCTPGGHSLARRVVKTPERTSRIRGH

SEQ ID NO: 995635 - protein, 416 aa, Homo sapiens
VCSWAFYFKIGEQKTEKKKKSREAPGGLGLEEREEDPENRGPRVVILGPAQTRDVLGGDLRHPGEQRGVLGGTKIAWVSGPIRVSRGDVCAETQHWGGAQEDHKTPPVWASLYYARISARSLRGESVTLGRGRGRRCALALCDTDRWLTRVYSGERILGERTTRSGPVLYTQRGEKTNCTTCGGGTPGKFHPKQRGNFFPLSKTSSYLWEKARERGIQLSKGPPIFTQRLGESRWENDVTTGEHIGEPSETSRRIANLGRQKNTMEPKSREVCHGEFPQKEFITRDTRRATTLPFTTGGAAPQPPKNWELHTTRERIHAGRSNHNHTPARETFTTPHKRSLCRRQSQIAITPSATQTYRGVMEHHTHIPRGDKGEITNPKQVARRGGKEHNQREYPEDTPQPFYGEGTHDRTNKTS

SEQ ID NO: 995636 - protein, 256 aa, Homo sapiens
GERTSLEYIFLIFGGLQQNFITKTREAGTLGPQTVNLPITTLKDNSDDREANEGAGGPVRDLVVRSGNHLKGSPGSRRGINTPGRNTGTCAGTVRDQQVADTQRRKHAEGVLREIRREPSLISNTNGFNSRSGPTPSASESNTVAPVGGTDPYGAPRRSLRYEGHDPPDPSHGWVAQWIASIRESKAIFHPVPFQGNPHRVIDSINTIYLATLARTSPLLGVERQGLAPLRALAGLLTRFAVCYLAPDTSCLSLDN

SEQ ID NO: 995637 - protein, 522 aa, Homo sapiens
SKWSLTLSYSGLGCGRGVWIWVFIGEPLVFLGVQGEIPPGLKASQMYAGVLQGSVATKAQANFCVFFKDEEDGGFHHILGQGLGSSNSPVTCVVDSHPPLSTVERARGPGKITLRGYREFRENHISVAQPIVCEKSPISSNLKIYPKYVAAGAMRWRRWRLCNIPQKKKHNNTKHSPRGGYLSMWRGGARRDNRAGVYGDKVGAHMWGTQNRVVSLVRAHRFFLLCVHPNRGAQRNLSRARGYLPPNNIREGRRARKIIKSLREKINRPRRVEPHRAHFNDCRLVSVRDEDNTTPTNEQNNSTKAATGYNKQRPQRHNTQHEQNEQEGHNKHKHTQPKTHTKTKQQTKHETNNDRKRQTTTAQHTLQKPEYNYSHTTHTTTTHQKQHNNHEYSNQTYNSPIKTTKKQKQKKRRTSEADAYQRQRVTIKDALDNEEQRSCGSGGSERNRVQARYQYTWKKRREQQSGEERRDKAEKPELKTQEEVDEDGAGGESDRKQHDGSIWMRREHTDKDGREQGVKKGS

SEQ ID NO: 995638 - protein, 208 aa, Homo sapiens
MSKAASPQKGDLVSSTSAFPINKRVQNRGFTISRGGGITSPVSLYKGARRLPGVLCSPKTINVFCRPMVGVDHKYPLCVVDDGSTTHMYISAGISPLLPHCCGHPHICFTTVCAPATKEKLLLNRYCGQKVETRLAYLVVAPPSERVTEGVQHRTLDIGKKGARLRRRHKPRGTPWEEPVVRAPDKCAPGATGSASRGRDTETVAWRS

SEQ ID NO: 995639 - protein, 348 aa, Homo sapiens
  misc_feature (214)..(214): Xaa can be any naturally occurring amino acid
VLVQNFIKGVFEKSNIPKPPEIYSCAKENPVKCVVGDVAVGHVDRAASWLSHPFVSVRSGGWVGRNPHSCGGLSTQCASRVVHAQGASYSGQLYYQLGLPGAESDSFTLVVPRNNRGVCEPQQRVGPQKSVLTAIDSYNQVVSDVVEIQSRAIQQISRGNLRPSVVLRKFFPRKTNETSRKAFAVPPNFSPCGLKPEDNNHMARGPLRTTEHAXSYGRGLVNAQRGLLGLGGQWRTKEDSHHVAHHSFFPALSKGFLNTVPLLGKRAKHFFSWDLNRTSIKFPGNPGGTFLPPEDNHSSRWQRRGGATESNENYRGPRDTGVVTLRQPSNFPERIKRTFFKPRGSPKV

SEQ ID NO: 995640 - protein, 125 aa, Homo sapiens
MGRLVCSGTVAGAVILGGVTRLTRVCASRWKMGFNKGDEASYKPGGMGSRIRQIYQQVSKKFINLELMIWHCTEFTFIVVHGVLNTECGVRLVGLVYILLLTTLGEMGWLRPWHEQDVCLPLWLV

SEQ ID NO: 995641 - protein, 228 aa, Homo sapiens
AAEKQVPGGGGGRLAVCWWAVAVAVVVAAVDVVPEGKTNKENERLLAERIEGITTEFGDSLQFGRFFMIELRMSSAAKHGLLAWRFVRGYRGYVFPYDKDVFERTSLTSRWVTDHKIQREEEVTEELLTDNRYLVLVLMDAEGAWSYAMQLKQWTAKLNPENGFILLSRLRKAVKHAEEWNACVRATRVDGKTRLEAQAYTAYLSGLLRFETSRMESCIEVQTSAKYL

SEQ ID NO: 995642 - protein, 193 aa, Homo sapiens
MTVQTDRPTEKDEGRTKEASRTHQGATTTNNNTTRHSHIHKIPHEKEEERTRRTRQDERITTKQGKNNTNTTRRKRGELKHKHDETHTKSTQQDRTRDGEEKRTQYDARTTIRAQRRATQRTTRKTNELTNKTPTTKSSTEEIADKEQHKREDDNHSRKKRRINNKRTQEEKTFSRTHHKVVEITEREERMKG

SEQ ID NO: 995643 - protein, 457 aa, Homo sapiens
  misc_feature (215)..(215): Xaa can be any naturally occurring amino acid
MAGGVHHALPMDHPKQETLQTRGTLHPLFQAQAMPRLIHWYTSYNDVIPFLPARVQKTFPSTYHMHLAHTQAGGALNPLLRTGIDDSPLRQIITRKRRGPSHWTGPKAHARTQLDRTKLTADIPRGHNQFNLTPSTDAYTLVGPKGPRHTIENTELTSPLTISSRTQLQRRLSEPDATGDTKARASQPAASLVSTHNDYWAFDCIITGTTAHGTXPHRLLTAVAHTARPRGRRDRHNCTRLGRHTQSRRDNNNMNKADRPALTSNTQGMTRKRRHTTKRKQGATLDTHHMHRRNAHTPRTRPQENETEHHNTTKATGAKYAHTQAHTKSGRHTGHYTVAAHNTAKQPGRIRYDKSPTEDPTEPTIRAAPTAHDAQPPPRTTPTTKGGTNRHTQLRKQNKARNEIDHTNPIVRSAPGSTQHSTKQLTKLLAQRPSKRQATGNTWHTARGRPTTEADST

SEQ ID NO: 995644 - protein, 223 aa, Homo sapiens
MSIHPVTKGLYSVLHHTQQIPYILALRPGHIQPYRKGKHNHKITTDNTEGGTHQPHTPATHTAPSALTANIHPHELASTLLAQTSFSLRPTRQDQKQQTWRYTNHTHTRYHTENIDTTATNNLKPPGNTIQIQQQTQRTHTAPLTRTSPGPTGAEHHHPGTRAPHNNHDTDEHTGRTLHAEHHHAPLEIQQRYMTRKHHNHTTPTNQPTTHRPMTPPKNRAPT

SEQ ID NO: 995645 - protein, 199 aa, Homo sapiens
MSRQSSWQRLPLLPHSNHPQPLAPHRSDYYHSTYSAPHLQPLPTAPPRANPDLPHTRRTTPRLEHTRTRLTRTQRYPRPARPATPPSHPTHTPPTPRTHNHPRPPTKLNPQPPPPPPPHPPGNPIPTKQTRHPTPATPPATPPPSPPPPPPTPQPTPPTLKHTATQHPAADTPTPPTLAPTPPLPPHHAQHPPRPAPTT

SEQ ID NO: 995646 - protein, 366 aa, Homo sapiens
  misc_feature (180)..(180): Xaa can be any naturally occurring amino acid
MRCRWLVMSVAAREQAAAARKWYRVDQFGRRIRIEDGVDELNGGCAWSRKPKMCSFLAVVGTSEVVYKRYARPANLLLRPSRVKTMSSSDWSCSTDNVELCSTEYCGQMLCELDVIFNFEKAYFILAMSPGWGGDVQDTSTFPILPLKVGEARRQEDVNQMRGCYKAVIVRCAMGELMFXHQMSLRSLITVNIQTCQVTRETVSGGFLSALSITSSKLTPKAARVSLLPGKGGRLEPHYTPWAALGPYPVHGRNNIVISHQPGNFDGRQAGRTSTTYGTRGLARAHKPALRTKTSRARTAPRTVRKRPHSTRETLESTTNPDTPAGQEHTHNRQPNKYTATGINRTTPRTQRTATTRPTPPPYHNC

SEQ ID NO: 995647 - protein, 434 aa, Homo sapiens
GIQDTAIYSSLGLPLHLLENKQEQRTTSNSTAPPPLLHSWTAVMSLTTSSYLTLFYPCVWSDSCTDPAPATSPEQMLQPARKILETSSRKTHCSNEVPLSLFLCSLARRQGSNPQPTIPNAGPSLLNKTPHTPLRNLPRKELPHLTPDTPTLLLAALACRLTHNPTPAPGTTAALEHSLVLQHPTCSPPPPHRAEHQNTPHPYPTTSPRRRSHQGSQSGTNTQPSPNATAPCPHHARTPNAAPSHDTTPHLTTRYLPYTQPPPPLRLAQTNPPPNTTHPQRTRTARCTHAPTTTPPRQATNPPDTTQHQHPDPPPQPHSPHNNAHTNPNHTPTPHPPATRRTAPTTAPPKGPSIPHPATTRPPTRQKDPHQTTRPHRTPTPARTADTDKPPHRTNAPHPTATHTGRRPAPHAPPTQPCRTHARLGSTRPPAPTP

SEQ ID NO: 995648 - protein, 322 aa, Homo sapiens
KPLFCQEFLGNRFQQFRLLPMGSQKGGLFGVEQVGALFDPKGTYSTIEFLFTIMSGSISPIHTFQEKLISGSKDGLNCWLNTHINPLAKRILALKLVWCQTTFGQQRWCGNIGQHSSSLAIGTHWGGQSPFGTRTPSPLRVVQKYTLSKRSAIILWPRETPHVSKRAKNQYYGGRLPSFPLGCYDNGRTYLGQMAERLRALAQMVKRGNQHFAGIQQRAVKHNHSVEEACPTHCVAYWAHVLVPRWFSPVSEFLYTLRTLGTKDSLVKVRCSIADDMGAPVVWESDNKLTADTSSRNAAELWCAPDELFPKKKAAIRTNVSL

SEQ ID NO: 995649 - protein, 206 aa, Homo sapiens
MESVWDKSAQFSRVVSIFVIYSLYTIYQVCDKGVRQLAALYVTRRHTKIQQGPHTKSATWCYTRGQNEAASTTNTAQLKTTHNKHNMRTREPCEPSGQHNPHGKVHTTRTKRSRQKSAQHLNPAPRTQTWGRQNTQEGEPTTSINSNTRSGHQQNNSEGSTTASPHTGCTTRNKRKVRPHTLHNTGGETIHTNIAQHPSNTQHPPG

SEQ ID NO: 995650 - protein, 68 aa, Homo sapiens
MPYANKRTTVSTTTTARQTSYRVTTERTTDNGYRRTQPNRADHRPIHTKEKTDTAHDNTLTPQTHANK

SEQ ID NO: 995651 - protein, 243 aa, Homo sapiens
MGFGATLAVGLSHLLCLSGQSLLIILLHLLLLLPFNDCAADHVRFVTTQQIQPLMVHCPVILSAPSVPDQATLDQSYQVLTSTNAAVSAGIAMHAPKPMQIPNTALRQLQAHGPNRPYARRTWVDGRTPQPLPPSSHDILTNPALHWIAPKGRALLTQFPLGLLWACQRWETVGGGVAVRLVGATGSRDTLTDPIVACWCRVPGTTGFHSTSPIVDAVDDGPGHETYWGGIPRRVTALATPVG

SEQ ID NO: 995652 - protein, 204 aa, Homo sapiens
MGSQARCHESMLAILRAHCELGTQSSRCARIYEEWQASFPGRRICAGHIFVFQRPAMAESALRGTEAVAGQAASPYLATSFRLAPLRGGHVNANNQSLYTLTNKIGDPHNRSLQALAILMTLPQCTPLSPCVWQQIAVWGRSPTPNEAHEIPGKRLPGTPPWHRATQPRNLRYALPLGTLPTRHPRNSTRSNDTPGGTGLQQTQ

SEQ ID NO: 995653 - protein, 80 aa, Homo sapiens
MPLSYITPHRRTIYHGGSKKGHQQKKGGAPNKGRISEKQFLKVPFGTEAQGKVINGPTHFKNWGKHTDSYLAITKNYKRM

SEQ ID NO: 995654 - protein, 485 aa, Homo sapiens
ERTSLEFFCWFFFLANPTAEENRCYYLAMWFNPTGVSSTLPLDGNALWAAFSFVSRVVQTGVLKDAPRNNFPVPREPRGRRTEVLGSHRGVSVLLSRDNLSPRVLVCVSGVGDFHNAHITWPCGVARSPLSMWEKKFVNNREHTFISYKAIYGAPVASLVLHVATMCVAPKPTKVWVSPPPSLHPSCPPVPHRNRGSVPLRPCVPTRPVFAACLAAPHRLATRRGASAPYLRVADPPMLAPAALCAGLPTDNCRAHNTRTPTTPHPSSPQAAPGASWRRAPHPPQQKRFREPCGGTTNSHKPHPHDLAFPLSCSSPSSGSNDTRRCSRPPQLYRTLATALLPSRTLLCGGPPYAPVRGFPPFGGIPRGMYPFAAPLPPSAHQPADLAHTSTFHTNFISTSPHPYPLSPTTPDPPTQSNNNTTRDTSFKRHHAQPTGSHHNAPSAPNPSPHPPPLCVPPALNFRAAPTRDHQHISHPRSRIYTPPR

SEQ ID NO: 995655 - protein, 332 aa, Homo sapiens
EEEEDEEGLGPPGPASLGTTALFLPYKAQPCPMAFLRCCGSQGCLGGQERAGAWPCPSREGGATLGPAAAAVLYHGDWTYEEQFKQLYELDGDPKRKEFLDDLFSFMQKLRDSLEAASPSWANQVLDLFMLYVLVTEKGGLVEVINKKLWLEITKGLKLPTSITSAAFTLWTQYMKYLYPYECEKRGLSNPNELQAAIDSNRREGPAPELWWLLFAYSPGGAHGMLSSAKLPCLPGPGRSTKRVHHAALDQKEETQHPIKVLALAVSLAGHLLLGSPGAIVQAACGQQCGLQAVAWTTARTLSWKLSRKKAVAEHTLEHITQIGGPSPNRQH

SEQ ID NO: 995656 - protein, 171 aa, Homo sapiens
PKKQTCIFLNLKNIYGRTPKRNLGDIGYPHIGGFFWAMSENAPPLSLVRSMATSALHASPIFLYGGVLRKRPYWVLGGVHRELYHAAGVVWRKKFAWHVAPSLLRRNINGLAIMGEQPPSRGLCAGNAARVSENQISETHSLSKQWINIPLTITMRLLPLFIIVSLTISLQ

SEQ ID NO: 995657 - protein, 194 aa, Homo sapiens
GETFSFFFLGGLVFVQNFIKGSLEKQLFQNLQKLPAVPRNTRVYAGGDVAWGMWQAASVAFPPFRVRECGVVGRYLILVGFHKCLTCGSGRGLSIGPIFTRWGLPGPACDSFTCKCPENPCVVKQPGVCRNSSCLKAIQIVNTQGLFRRGGSHFRGPFQKTFSGFYSPLISPRRFFPKKPTNLLQPFWAPQFFH

SEQ ID NO: 995658 - protein, 564 aa, Homo sapiens
SEAWVEQAPVPPPTSLRRVRDSLVAVRVAPRYAMSGRAQQQVPRREGVRLAQSPARQQAGWPQINRELLLCTSTVTVMHRRTFQTTAHQPSKEQVHGVRTCNNARRSIAPACSFNSRHAWRKLACTPSTQPGSMTASMHLQQVHQRRAVQPQQSINPHPAALTAATHESPEPSNNRDRAWPLPRYRSHRNVSTAHHRPNAATKTRDTEKRPRNGEHTTLHDGMHRQADQLDSHTEATDANENTTRRPIKRTHTSPNTTLHTRKQQPPPPTYHIRQTDHRQETHHSTRTNRPQESKTTHNNTHLTTTTTAPKTDNDKTQADQEQIDRTTTHTRHTHATSTHARPTPTHATPTHTQERAHQDSTKPNNTRHTQLNVITRTPTATSSQQHESDNHTRRKTPHATARQHNLTMLANISQRTRTAKRARTVLNRATWTCHPISTTNSYTTYVDTQKHQTNKSKLHNGNKLHTYTNNEKDMTLTYYNIPQTTINKTTLIHAQTNYKQSHTEQQHHRPNQNNINNSHAHSTTNLHQYTEHQQTYRPEHTADERNYKQRSDPTLTSTTHTSR

SEQ ID NO: 995659 - protein, 122 aa, Homo sapiens
GFPDLGLRLTVFGGCTPCHHVFRSCDRRCACVGGFDRASARGLPSVPPRQDLHFVCRRREKLGTHVELGRWGLYLSVLSCEPFLPVPGGRESVFTTWEEPYEGGPEVERGSVLAPFNSVVDL

SEQ ID NO: 995660 - protein, 253 aa, Homo sapiens
HRNSARVPSASRRLPVSMEEEIAALVMTMAPACANARFEWGADAPPSRVSFPIRSGRPRDTRRHGGHGPEGLHTWATEAQSKRGILTLKYPIEHGIVSNWDDMEKIWITPSTTELRVALEELSQMLLTEEPPEPQGQQREDDSGLCLRPSKPGNVRGSSRPVLSLYASGRTTGIVMDSGDWGHPSTVPIYEGLLPSPTPSCVWTWLAGTDLNLMKILTERRVQFTTTCEREIVRDIKEESCATSPGLRAGDGN

SEQ ID NO: 995661 - protein, 248 aa, Homo sapiens
  misc_feature (25)..(25): Xaa can be any naturally occurring amino acid
  misc_feature (75)..(75): Xaa can be any naturally occurring amino acid
  misc_feature (121)..(121): Xaa can be any naturally occurring amino acid
AENVDITAEGTRMVICEWAPRREAXAGRGTSESAVNAEEPQASVVWEETEKTQQAPGCDKMRLGVHSTRNLAYSXRELLLIGRVVAWSTRVNGVVNHVARVTGLIKDLMCLAWYSTQRVPXTDRFGLSNADGKWGASFLLVWNIVRGKMDTNCEFGTKIVNEYADEGRFSGQLHDNAKELDWVSRWAKFSAFEMIPKRNVIELVTLPVLAEGDESWDPYGRRSLDMCQRECATERGSFALCEGDNGPN

SEQ ID NO: 995662 - protein, 329 aa, Homo sapiens
GEARSRCGGWCDPGPEGIRRRLISSGLHHPDRGISSGLHHPDRGISSGLHHPDRGISSGLHHPDRGISSGLHHPDRGPGAHRDSQRKWRRLRRVAARTRAGLELGWDPELGSSRSGPAHLLVPWRLLSPGAPGPTRNDGARCEPPLMAAPAGSLSRKKRLELDDNLDTERPVQKRARSGPSPEGPPAVALSPPMLQIVQLLWHCSRLGPMSPGAEGGRVGYQAWTALKGTGVYLCKVYPVQGSLTRLEAYWRGGPDKHVGRPIEVWWDQSSKAYHRPWGIGSLWERPIPEQRWRAREPLTAKTVRLEHTMFTQSGHRLQRRRGRNTKEE

SEQ ID NO: 995663 - protein, 173 aa, Homo sapiens
ESEHRELAGSPSASEGADVGLSTGCSRALSRPLQSRMPRGRGARCAATRASPSAVMAGDGVAAVADATRMGAVRKNTTGRRPRECMCESFDQQQGRHGSDCELIADGHSLDCVAEILPLHFEICAEDQHSRISGTGILAIFDKLHMPNTDVHRIIAQGTAAVSEDFPRIRSSF

SEQ ID NO: 995664 - protein, 395 aa, Homo sapiens
HRFPPVFWGGLVSGKNPKRGGRGALFPSWKIGCSPPLKSEKGVGAGRPCGVWGARFPPSLSFWRGSPFLFFSSQQKFPNKTPTKNTKQTNKSKYQPLPQGGPLAHKLLSPHSPQRLGHRGLAEEGAGGGHSPLRKKPPHRGPTRGKRSGQGPQKRGGRCPTIFHIKIHTYNNTRAGGERKRATLRASETRGAPFLFSQNRRGKKWRARGRKCGGAQIPPKRRPPQREGRSKTNRGGRATKKHPPLSAPTRSIMPQTRGGQHNIRRGMGSHTKSPPQRRERKPPSKPTANTATAPKTRTASQSTPPTFPQKHCQPGDQREIGTRRNTQTRGEHSTHVCGKPQIISVPPPAKTNDGRANNTRITTSHLAHTVPRAPSWYKREKPPHPISGKIESRRT

SEQ ID NO: 995665 - protein, 316 aa, Homo sapiens
  misc_feature (144)..(144): Xaa can be any naturally occurring amino acid
MWARGPLGEWATPASRGGAPSDGTSPWRKDPKFLTSLPLENTHLFERVSVLTENSSVAPHLENSQSEGRPSWWERATRVVSRELWRACHTQHRDRGRPRESGALVLAPTKTPTLPKEQRRDETSYTGGQWPLRGPHCVGRKTPXGAQGPLGGGSEGTNRERGRTQWVLRHCAPELLHPRGPTARGGLRASRRQEGKNPQETPVKNVGPQQERTERPPTQGKASPRRHHQHGGTGVANTGQKKEPTLPTGCPPRQLNGANKPRERSQLLYPQRLWRGGAEGKKTQGAGDNRIIDMAPMAPQVVPETRVFSRHRETTS

SEQ ID NO: 995666 - protein, 113 aa, Homo sapiens
  misc_feature (113)..(113): Xaa can be any naturally occurring amino acid
MGVRKELTVVVRDWWPMECMLLPGDKLVWPVCVCAGFQWARCMRRGALKVNSRRGHVDPTGSSGSSEETGTTLVHPCGNLREPKLGKQGGTQAYNEKETSLLGFSFGVCVVCX

SEQ ID NO: 995667 - protein, 248 aa, Homo sapiens
MSVRQVDRLVRIPACGSTLYIRHDRAVPSNNWNWFLVGANKPRMGGHMAMCTNFCTLLNPNILYPMRGPFNLKFAQGAKVLKKDANALFRLSIPGSSPEEWHTGALCAIPHLRLELLRSPKDFFHSSKEEDPSNCESVCNSNFTFRYGHWGHICSSYGARRNFRDGCGPIYPPNLFPKGVMGFHNDVWPLTTLSFLWEIPRIPFGISLPTVGTTFRQFSSSELVPTPRPTQCSKRATDKGITKVITPV

SEQ ID NO: 995668 - protein, 168 aa, Homo sapiens
ESGDDVQKWHLAKGKEEEGRTGHQRSDRRWLKERMELWCLHNIFASFNDTFVHTVTDLAGKESICRVTGGMKVKETDDESSTICVHMWACPRMWPRGARELGYAPTYTSNSGPQEEIGARPAEPGDPVGPSEALARSGYEESGRTEEVHPHAPLTVLAGRGVAVVAVW

SEQ ID NO: 995669 - protein, 72 aa, Homo sapiens
LNVLPQRRVDEEEKEAVAAINEVVTREYYRSTIQQDASMEVGFKKRAPRALIDEIRNIWPTEVRWELQHVRI

SEQ ID NO: 995670 - protein, 97 aa, Homo sapiens
YDFSAVQELSERCESLSDFTLHEAYCLRVLVLCPECDWSPVPRETMEEHCMLEHLGGQLSARSAHLSECHMLLRNLEDARVMLSWSSNVVLHVGEPD

SEQ ID NO: 995671 - protein, 329 aa, Homo sapiens
  misc_feature (329)..(329): Xaa can be any naturally occurring amino acid
FFGWSPSALLVPTQFLASLPHLRRSPQPPPSAMAPRKGSSRVAKTNSLRRRKLASFLKDFDREVEIRIKQIESDRQNLLKEVDNLYNIEILRLPKALREMNWLDYFALGGNKQALEEAATADLDITEINKLTAEAIQTPLKSAKTRKVIQVDRNDSGRGTQTDDHCTSRIFKPASTSDRCPPSQEENSVHHKAHAPPDDRVRRGLPLFTPGVGPIGGCHGQRNSRPDTQVGPQGLKTLAWYSGSRRADYSISGNGSLCCSKSSSSCAMAGENLRIGQIEGSCPVQAGHSRHGALGWPWTMRGWAGESPLGRTLWAGRCALGPASPSLRX

SEQ ID NO: 995672 - protein, 114 aa, Homo sapiens
GLSGLRCLDVRGSLCPSSVVLRRAGAARCRRARAAREAGARGSCGGGAGRGVVVLTRSRMEKLREESAARVVLTSLTRLTTRRPRVYFLKGGYETFYSEYPECCVDVKPFHKRR

SEQ ID NO: 995673 - protein, 312 aa, Homo sapiens
MDAQRRQRPYVVTFCGVNGVGKSTNLAKISFWLLENGFSVLIAACDTFRARGRGAYCVHTPGVLVPYTLQKKAWWPTNGAVRPVTKGVWQGMLLALPCKPSAFCTSPMALTVVLGETRQADARTNAPLMTVPGPNSLLSIHSDVGADVGEAFKYAMKPWTSGPVQQSLGDISMAQTPRLIDGIVLTRFDTIDDKYNVRLEGGWGLQDLKLTAAGKPGSIDYLVREVDLNSWALWKTATYPKSGTHSMRNIQQANHMGDRRTLYCPKQVWATRAYSSTQWSQPRRNSQGTLNKGEAHQPREKPHRQQATHPHL

SEQ ID NO: 995674 - protein, 49 aa, Homo sapiens
VNHSFSSSYDVLCASSCRIFISYARDSYLSDETCSVGGYAYRSPGVRGH

SEQ ID NO: 995675 - protein, 119 aa, Homo sapiens
MLLALSSYTRLQPAENRIEDEPACVGGMNAYGYHGYQGPITDDRYDEIRRHWGGNVLGPRDLWLVVANALRKAHMAEKKLATNTGLNVHVLSFLYIKIIETKLGKTFSPVNMNNTKEKT

SEQ ID NO: 995676 - protein, 226 aa, Homo sapiens
  misc_feature (196)..(196): Xaa can be any naturally occurring amino acid
MAPRRVGMVLEPHFHRDWQRLRGHVGSTQCGPVRVRQTVRPGQSHRSRRIRPWATGRCSTAVQSCVCPTVRVITLKSAALGAAGSALEELRVAGIHKKVARDHRQFLWIRGGGNKSTESLQANVQRLKEYRSKLILFPRKPSVPKKGDSSAEELIDWPPSLTGPVMPVRNVYKKEKARVITEEEKNFKAFGSLRMXRANARLFGIRAKRAKEAAEQDVDQEKIKSL

SEQ ID NO: 995677 - protein, 555 aa, Homo sapiens
TAGMAGVATAAAGRVDTADSIRPDGDIHHRRHAPRSGTETPRSCGTEGSRNAGRTYSPISVTLSRPPLGRREHRPHGLPMSHQDCQRHTTQNGLSIGKGIINRSSAHGSLDRTRVGNTPREDTGYGRSQSRTIFPVPLNTYYICNPKDLYTPGTDDAEHPNGHARQYQEEPHTQKIITLTIQDPMRPLGRHKTLTQTEGRQQNLFDRLHPIWLQVSPRLPDTQNDHYNPRKQQPGANLTHQPTHPDLTLISPEPHPTHHYHLDYPHIHWDSPSQHTRSMAYYLNQHNKQISQTPIARPYHLKPHNTTNNTATKQITTDTAPHPPRQNTSRDRPSDATQPNGHTHLQTTHTEDNNNMWQPNSAQQAQPRHDHPATQQPYHTVGNTPPTDGGTNNTLSYHRNNTTKKHTQHKDSDNLTNILSHANITTPKVENINTTHHTHNYKVHPHPRATTIDYSTSRAAARDRHRPPSTSNGQHTRHHTERTDRPRSTSTRTPRHGPALKEQDKKQTPTRQNHEDPKAEAPSCPQLRTRQSIITAHDWTSTHDLRERGSTSARR

SEQ ID NO: 995678 - protein, 117 aa, Homo sapiens
EEKLSPETYLVDTASPRPNGNIWHVPLQHRQTCVRLSLHVNSCQSNACGMQQAWQLASHNPLSVQSCAHSIISCSNLQHNTSQASSTASPDPTITSHRVRAQSLGKHHRSSPSVNSD

SEQ ID NO: 995679 - protein, 458 aa, Homo sapiens
KYTILKGSMLYLYQPLICIKRIGTFIQCEFHATSRHSKQCAHGTHQHASKHAAFRQSNCNSTTGHSIDSMSTTRHASTTQKHPKQAHYLQYIGSNYIFTAMLALASSCNMRFQSNTHEHHHIIAQPHCNSHPSQQVAKLSSQHCRSAQGPHAAPTVTSAIFPPNSNTHMPIIFITAHHCTHSMPLAHNHISQQYRNAHMNENTTAKPDKHRTYSLANTHLHTHSHSTYETPQAHTSNLEAHSNTQETGTATANKGNIYGRHTHIQQRHNTRNTLGCTDNQTETKNNLNLQQHQHGHTDTREKQQTNNGSDTRDEPKTQATPHNNPRTSHTHTHTSPPARHQSGQTPNKPTLTHQPVTSIRERPPYHIGQHEHYHTWTRPAMQHRNTPGHNLDTRQCAIDDHKPNIHIAPICTATSLDNSTPHADHTMQENRARPATPEIKHSPQRNSTSRKSYNSNYQ

SEQ ID NO: 995680 - protein, 234 aa, Homo sapiens
GTRDLRTGFPYRHDISHTHLSNLNSSLHVPPAIALLSPWLSAMLTMQKQIKHMMAFIAQEANEKASTATQMPTGSKQEFQHSSKGRIRANPQRTQSISWHTYIAASTRSKQDLTPGQHTTKYKEEIPTSSTENPTRTHTHADRLHDSNGRMDRYSNKNPSPPTRQAKPKARTTTHKARNNTRTKQHHENTHKLTANGRRDTWKHTNDNKGNTTEPRTDPQTQKRYGKAQNQTQH

SEQ ID NO: 995681 - protein, 418 aa, Homo sapiens
AHTHVFYLTQSFRFGVEIAYVGATILACFKQSPGNTSTLVGGNHLELAIRGDAKGQVALSVPDQQPNVFAMRPYGVTERGIPIQELHYDLGGTLNHSLDHGNRHHMILRESIFISGQERKQQEGKAKNLRSITKTTKYIYSKTEVAPKEHGLEHGISNESGYMTEPRHAPKGNQAGIEKTQRTQTAGPNQTLTNQELPRARGAKATPPNMPNTATLREPKHTRYKSDGDNCSQQNSTTTNPKGTRTKRQHEEQRAPRGKPHKEHQKIRAATEIPTEKEKDINTNGGMNRPVTCRDSKKHETNNSATHKKQKPSKHPQNARAGEMTAATKKRPRNDQYKQRKATNEGRQRAQKAAKGKATGREEDNDRAGGNRRTPPHATPDGAAGRESRTERRSRQKRVESGARHAPSKTQSAKSRRT

SEQ ID NO: 995682 - protein, 424 aa, Homo sapiens
APSLLGWQHQGAQTHPPGEQPQTMIPGHHTGPGPCWREAAPPREPRAYSQAMSLDGGGWPGMATGAQGAELVIHPEKPGHPKRTPHRTFLLGMVSSTLVVKPLTFCRGFCRGLTTRDLGCQSPFDVTLHSTWGYNIETPHILLTGTEPKRTWETMGQAHGNRHEQPKDTNNPHPEQSHSGIEAITIGGKHKISSSMRYIDKTHNGRVDHCAQEDKLEMRSKTPLGNIRYKSMHRHTMKSNRSQNHNRAHYETPGLSIPSQADTISPTGFDVPMNQNTKCSKRTRETGEHARTQQRQPRWESPHSTRKRNKAVGDRGPTIPKAKKKTKDVAKHHSVKHGQLRGTAPALVGAQKEHTKDSATGTSDNAREGEHTDKPKYTIATINDQQTGQGPNHIPHRESTTANKNQTDRHHDATARRAEQNSEQ

SEQ ID NO: 995683 - protein, 448 aa, Homo sapiens
MGKAKTHINIVVIRTRRFERKIHTLLAILIYNTADGIDNNDTIEKFETGRLLDWRNGLLQDMPGLLDKPDQLSDERRSSPISIITIDRHNIRNTEQVTYVDSSIACHQAPPASTFIQNNHAYTEGPSPGLDLCQYLDLVSIDWDVRDELSKTRIISHKHEETDHAGDMTLYWGLTQRLGVLKTNTTGWSGSSNHRTGHSQMAGQPITGQDHEHTAGTLADHDSPQTHHHQIQRNKTEANTTPRKNKKTRKDRPKTPGQNTGRKHKGRAAPKQSTQKHGQTKGTGTETKQKKEYDKKKKETKTTSNERDKKQATHKRAQKRNKKRRRTHKNTGNTAKDRHNKKEKQHRDKNQKDNRNKRDDQHRERKENTSRRGTHTRRKRSRTSTKAQRTHRRNRDIRRKRLKKVDTGGGTGHHKRAANRVNPPTARTVRAAERQTDEEKHSKRKIKR

SEQ ID NO: 995684 - protein, 54 aa, Homo sapiens
MACLSAREDKNPPNEAVLKEKVTAGKRGKKLNMPERARVQPNAQVRPRGAPRGW

SEQ ID NO: 995685 - protein, 103 aa, Homo sapiens
  misc_feature (75)..(75): Xaa can be any naturally occurring amino acid
MWMPGLHVGGGHGCESSALVVATLAVASVELRERGPDDADAHCRSRWVEDGVCCGRIVCLRTEVCCLEDINYTRXYLGKTKSQEKPLHAILQKSSIMFLESVG

SEQ ID NO: 995686 - protein, 176 aa, Homo sapiens
MGAARYAGKLMRRTAKDTTRRIAHNADARKHIWTAPPCLTNDPDGLITNTKNKPDGSEGRITQQEAPARRIGQSHHPSQHVAHRFSGGDTRRKTEPTEAGTTRPRKRPQRHYYNTLDTATATCTAMTDHTHHPEQTQLKPHNAARGQTKRSTKTTRERAAKQPKGEIEGEHKNSNT

SEQ ID NO: 995687 - protein, 66 aa, Homo sapiens
EKILRETAVTRPGLSGEQAPVLLSGRRSGGPLRPSESRSVAQAWSAAGVISASRAMRLPCHDVSSP

SEQ ID NO: 995688 - protein, 143 aa, Homo sapiens
  misc_feature (54)..(54): Xaa can be any naturally occurring amino acid
  misc_feature (139)..(139): Xaa can be any naturally occurring amino acid
MSGVASSTTESILVTRLAVEQCWHSHVGLKPRFHRAKGLPGIPCIDDVFTRQSXHFRWHGRPSQGYKYPGREQIRHTHEKRAMKERGVASPVWLGKEKDMDLHGAESGDRTLSVEKEPRLSRVDVERSFNRPRSYPTSXELCT

SEQ ID NO: 995689 - protein, 308 aa, Homo sapiens
MSAGPADTLMPSSAARGPERPEQPVVPDPRIRLPLAGSDGRAGERVRGPGRGDVSGEGGCEDLDEAARTEDYMIRECAGARGIGKCRGQMDHSEDWSEHAGGPVGDGKLGAGMDWTVPGPVQHYPKPTDQTNASDRWLETFRIQTYVKAAMDQRGRPRKVIELVKKSGTKQLDTDLPRHLTGRLGDSSAVNGWHKQLNPEVKKSCWTEEEDRIICEAHKVLGKRWAEIAKMLPRRTDNAAKNQWNFYHEKGTVDTGGLLDAKSKNWQAPKGLVVGPPRQRAASKVARPRKGQERPDKLASSHYQKGEK

SEQ ID NO: 995690 - protein, 108 aa, Homo sapiens
LISTMAVGKELGAFTEMACKKWDAKKKVVDPIVLKKDRYDVKATCYVRNYKKYWKDGIVLPKDAKEPKTVATLEWSLTVSSSLFDMVQVLPASLQQCIESCIYEQFNA

SEQ ID NO: 995691 - protein, 279 aa, Homo sapiens
VRLVGTVLGGCCAGRQCPHERAAAQSGGALGALNGRASAGETGVICAPPSGLYRDRAGVQLSTGKIWCRLDRELPTRVTNRRASTLRVMITPLDECIQKEHAAQRTLAWRCRACVTSTDEKTVTAISAGGPRNSKHGTMALGTIAGAQVLSLAMDGRTSGEVKSAIAIRAAASVCTSNTGNDGFTNGWNRTWAEPVEKGPSDNMKRSNAYLTGKTATNSDAAYRTRSPLGDQVRDSLCAHYLVKVWHQIKEASMRRVIQKHGLTVRIAHEQDPKQYILD

SEQ ID NO: 995692 - protein, 135 aa, Homo sapiens
MALVGPLRVAQAVLGMQCYGGVSRKWGNRPKDDLTTEQFPNIRDLCSQTLGTSQKPTFNGPSTRNRGITGGDKFRRKVWESYLGKVYTTQGFMENVRVTKLSEKLRTRASGTREGQYHLHESGSIWEWQGARERG

SEQ ID NO: 995693 - protein, 119 aa, Homo sapiens
MGLLQYLLSLHRSPSQATDVLAYRAVQPHTPRCCSFRGSSLNRRLRRGQARADGGAAEPLSGEPRLRRRKNPPDATGCASARTPSRLTGPSLACPCRGGSGGSGSLFHSRRCATRFGLS

SEQ ID NO: 995694 - protein, 103 aa, Homo sapiens
MCTEMWRMHLCYLGRTCSGGKHEWCSRRVWIVNWICVHSGGYVSLWSLYVENESIEMHLWLHQRHTTHSDMYPCGHYWLACDANASVRKSRVQGEFFIQAPEN

SEQ ID NO: 995695 - protein, 198 aa, Homo sapiens
  misc_feature (118)..(118): Xaa can be any naturally occurring amino acid
MALARLCMERPLAVNQRGFIGLGGRADLAGSSVQGKSRVMADAVVRAGHGVSRERSQDVGRDALAWNRTSPWCLSKGVPSLRSSSKVCRCVDITRGLPRRVCITIALTRGAVKKGDTXIKAQTLARRAWLGGAGGLHASGQRVVGLGQSPNRTEAVETRGTRDRLVGEHALRKTCVARNHWWVIGQPQGAVGGHVRMG

SEQ ID NO: 995696 - protein, 467 aa, Homo sapiens
  misc_feature (80)..(80): Xaa can be any naturally occurring amino acid
AWRLTGTLQQVDDFWSTALQAWSVAVKTTRIWPQFPVSYQWVTPESEKVQHSAYRHGLRQDNVDCWSTRTHATRMLRPSXASLDGAQGLAGPGRKEEAVRRSIGRRAPMVSYRDSSARDGTSLVYIVVPHGHDRKTSLAGIPHRTCSSHHRCTIGAPLRWDRNRSQSDPSWVGRLAEFPFTCVIRPCAANTSGSYLTNRGKTSWWAEGHVRCNVAGPMVYTHGAVIPEELFGRNRSYLVTALDSEMGGRGASNKRQQKHARKPLTSLDGPCGVDPADKSSPVGCLSVPPGEPKVTLLAKGRLGRGTSRKAIVRDVTGKRRALVGNLGSRLTVCATSGTGNLVNLLGKACAIGHHPFPREGVALASKNFDDETSPNYSLERYPLCGTQYVGTLKESPGELGSLWEKNGNHSPSFVGPFQYTGAHDLGGDPPYNQTVCLGVYQNSGLGPKASYMHKQERGAQMRGVYIY

SEQ ID NO: 995697 - protein, 95 aa, Homo sapiens
LKRQRRRTSRGCEATGAAGSRGGSGGSRRGRRQTPWVTARERSLLASWQPGRDSMPSSPGRHRSDAGIYRRTFYKRILECARVRDIRDSGICRLG

SEQ ID NO: 995698 - protein, 196 aa, Homo sapiens
GVMRVLCWQVCLGLSPCIGNILASCSYDPETSLSVREDITAPWDEETNEHAGDMTPLDRDSGCACGPPSELTVHDTWSCVEHRDGAHLSMLTLTTRGKANGEVTDMIQRTLAPIRPCHIACHASEPPAWCVTLAHRPRLGPRRVGGRKHLNYDQKERCSIDGRACDETLIQTLVDSAERGKGAGQRGKRDGIARKR

SEQ ID NO: 995699 - protein, 335 aa, Homo sapiens
VDRNPADGQSGSGREGRDTGWLQVLRQGCSEVVALIDLEVATSFLAVLLRSEGPSGDLWKSVPRPDRTSPPLRFPCVLLARHFSERTGSHFQPLRPQVTCCHGLTHIRPDAPELTDFSMLKRLASRPASSICWSSFLETKDFHFIEADLHEPLWHRIANVSILHTPHTKVEQRYYTGGQNKPALRSNEPLLPSWSDHRITDYAIHWPDLVNLLTHFGLAAPSPPYHTAASFSPSHRFYCSVQTGALADTPASMHPLRPTTTMSPRSCSTSNSVHHGIAVHATPQIRHDVLSPTDRNTLECRRPHLGQSIAPPPPHSALTTCEASTPRAHNLRHPA

SEQ ID NO: 995700 - protein, 211 aa, Homo sapiens
MATLGDQGAREFPWAREIGCSNQMAVGGPQGAETPPHKGGHTRELEKTVETRASGIGQGSMRIPAGRTQLERLLGSFGILNQTKFGAHLNQSALGALGLLPGVVSTQTLGGGNGEQWPPGLGPKWGQRGGPQNPGIVAGHPLWLQGNGSNGEDKTRANAPDERDERLSGAKGARQSARTKLPERWGDSKTPAEVLKDTHQTDERRVDHKRE

SEQ ID NO: 995701 - protein, 433 aa, Homo sapiens
FPPDFPAVVVDDDHEGNSCTCRPGSAVTKSGPSFREVISDEHGIDASTEGPTTEVHDDAASVERIKRVTITLRLNVRPMYVSPVADARGSRMPERLIGIRCLSRGAVRGDESSRARTNFGVRAREVRRLGTKVRAKGGTIHSKGSVRMSVTSECLGLFVDEHGTGVARMAWLTLAHRHVRCCRARIRDHSPLSGERAWSMERCWVRLAGKGAWPSHFYPEEGVLQRGPYAPPPGPHNCAFPTFMGNALVTLVLRWAHFGPRKFNRFQSSKRKFAVRKHWHPWTRIDPGPSSIPSLNQGHGSRVRKKLPMTDRERNPEGVGQIAVRLDLEQVLASLEGNFILEAMPEELPLNNGSGQLYPSPTSYIRGGRHWKTLTHVPLGLLGLVPSGSYVQRLHLGRRCAVRGAFPRDGVPGDVGTAVVCPQLSVSPFSVRG

SEQ ID NO: 995702 - protein, 388 aa, Homo sapiens
CALAHSNAMTQCGLPYGLRAVLGTQQVTFGMCCLVLQSLAPRGGPLANPPGLLFSPSGSPLALAHPQSRTLLAEVNQPGAVCSLNGRTLPNAIRLRIVELAHLGIRPCDISRQLRVSHGLRCSTHSWRATTQTGIHTARGHPGRQQAPTSTTPTAGQATSEDYTSQADPGPSLACGDPAERHAGTTAYCDKLQCDIRAEHHSGQHPDAPKTRQPGEGTDQYRGKDSSQPGAAYRCPQATSTQNPHDDQDQANGPTDSNEKEHEHPTRLRGNGENTTSNPALMALGPLGHHKQAIRTLLGAYPGLPRIANLTGHTTHTTEQGHSGAGEKPNRTQRNPPQEVLTNLNHRGSNNHSKTHPKSTLTANTTEQPPDHKGHTTHDNNEHHKRKK

SEQ ID NO: 995703 - protein, 266 aa, Homo sapiens
GFLSRPKFFISFKNFDFPPGPLLPPVAVFVLRPAQSLVISSLLSASWGRGGIPFPCGKEETFTVVVVALCGNKNKMCWRKRPECGNTVCVRQCGMIFLPVCEPPRLKEIRGGALSPVCGGDLPPQFSSPVGVGPLSGSPYASGCPRGARQLVKRTIEEKSVGAQALLYNLHLRERGDYIPPLERGGDSGGKREKWGRGTYSERLPQDERGDTPCVVRPQKEKSLSHNLCGRHNIVVTVGGPPYEGVINTQMCLQEKTGHPVVGVSQ

SEQ ID NO: 995704 - protein, 180 aa, Homo sapiens
MGFHHVAQAGLELLTSSDLPAAASESAGMIGVALLPASLDFEGTARLVRERWGKPEGAAVPMVPPPRRQSTGYSNTKPSQVRGDQAAAPLMDDGLISAVGWQALGSGVKQGKPGRRDEVAWSGRHVGEQMKGTVGQIPWWVQLATYTAEPAAERQESKQHTPDGTGRPHAEDTADLEGKT

SEQ ID NO: 995705 - protein, 304 aa, Homo sapiens
EENWTAMCDGLQQIQLLLRLAVAGSDRLCVWLTDERATMHDGAAMAWTASGCQIRKLAMMLGENVHCCGRLKAGSLWMKHWYKHVGRHTVQGGDQDSSTYPGCINNATLFQDEINCAPQGGDWLEGERLCDCSQQAALDLSMDPTEYGSRDTGQTPHSTCNGHETLTNIQNSSTLTQLPPAALIRHTCICLNSQQLAFKTYTPQYGITYYGPRYLSDTSYPDAVISRALDTAANRKSVLCLPKAQINNRPSISPYAFRTDHHPSPVILLTCPSTIPTCGQSDTSHFQINRGHKPEATWAQSHQT

SEQ ID NO: 995706 - protein, 207 aa, Homo sapiens
CGLLEGIVESVIGMSRVLSHLPSLFLHNSLGLSPLGSRVLWELKATLEEDASALPLSESLRHLQMCQTNRSECMCVCVCVHTVCMSAHNLVPGIVHPRGQGQAWCAEGDGPAWRLMNASPFLGSALPILSLSIVPGDSPSQILKRALCGLSLLSGFREAREECPGSGTEIMEDGTPDYSLQPWVVSESLIWLLWNICERALIHYAKL

SEQ ID NO: 995707 - protein, 79 aa, Homo sapiens
AKGAYAVINDVDLHAGTLLFHQQIGEFQAHFVLVENVGLEIDMVFCIGDGGHHGLDGGRAIEEQRGLVAGNEWTAGGGF

SEQ ID NO: 995708 - protein, 269 aa, Homo sapiens
GVGSQAGGAARAGRKRILGTGRRAGRLAERSGGIPPKASRGAAVEGRGGGYPLVAVEERRRPGGHWAGPLRLQPCLVALRAACQCCYNELAPGQGAALRTRFQRTLSAGASGSRTVSEVRPASRGGCFSSHLTRSRPQGPPSLQGVALSRAGLQRPITVRSPQHLPAGCGGSMMRQKYAQDAGGGREHEPRPAEGQDSEATAMQQAGNAAGNEAAAASNQGGRMEQPAQSHHPLASRWPRLPSCKANLALVPEAGLRNRRALETGVGPG

SEQ ID NO: 995709 - protein, 101 aa, Homo sapiens
LVHALPGTPKGWWQPRCHLACYADTAVIMGSMGSHNTEDVLSYYEKLSMSDGPLNESDLGMNGGVVLSETMEGCVAVLRCQGRGYETQPSVATIGVGMQGA

SEQ ID NO: 995710 - protein, 199 aa, Homo sapiens
MNRIGLQCPFLGYTAGVSLGLPSNRSGHFALEAFRGNCGKLNPYVRNTERGFELGPLGVSEESITLGGANYCGHPSVKNRRSWVDYLDVGKPTFNPSYGTYYGPWISHPGASTVSLWKQQLEDLWQPIESLTRPYRSARRIFVIHPSGLSCWGVVKWGDIVRHRASLDAQEVSLQPGYRVSHTVRRNNRAPFGRNSPLG

SEQ ID NO: 995711 - protein, 88 aa, Homo sapiens
MTSALMYVILCLRTASIPLYRQREERGNPASAPVDLKSLLNEWVGNSIELDKALARGMLLTPCCTSARPHFDSIVNARLLTAISGRGG

SEQ ID NO: 995712 - protein, 360 aa, Homo sapiens
MHVVWTRYWIVGEALALEAPRRHGTGLAVPQRMDDTPTATIRPDKAPTHKRTDEAHNVRTRHSMEGRHTGDINPRRFTGVGKQKKVNTKRKDDGPEDSGYAAQTKYRGRRNHQMSRISPQQETQRCVTRLDNTKTSRGKPQYRDVNTPGECHGFNADRRPSVNTPGEENRERSNHIHKEMSTNGGTGYATTILGVARKAAIPAPIARSKHTKSDRDVEHREQKPWGDTHKQRAKRCSPRRESIQNQGGNNSRRKSRQVVQTKRGKVENTDAGTETQGKTPTATLRGKTNDQKVKDDQSKGSSNRAHPEAETIRAEYNYTSGSRETVAPTHRKEAYDGGTHTEEEDTNQEPQDTNPRTQKG

SEQ ID NO: 995713 - protein, 258 aa, Homo sapiens
IVQQLGGPTEVRVEVNKKFRLSVWHENLAVVQVSGYLLVPLEQKFSQWLTFSSDCSCWYAGELCYWRSRRVDGLLYSLSIKQNRSCSDLEHCSLDTCVGERDLFRPTTGVRYGRAFGRLAFPVHTVPLEYDNVGRDGVVHMQSIGQGLIADETDYDGLGALKSTELLAAELHVVSCCIFPPIGGPRRIAKTLNASGTWAYSIGARKIRSPTIERESFRRRKVGTRRATMASGNATVVTPRNFIPCQGIRGGQREGIGP

SEQ ID NO: 995714 - protein, 628 aa, Homo sapiens
  misc_feature (69)..(69): Xaa can be any naturally occurring amino acid
FTTRRVSECSVHAPKYLEYSEDTYLTVVPETRTSHVTIQDIFSKVDWKQLSDNAYQIDLSIKSLPWGDXESNIWHVAIRQELSMPGALHCFLTTTHKDRPHIHDARDYVIIPTYSKSPQVHEECALVIVPSDAALAAVIDFLCNSSDDQFANTTTTVVTIIMDKCTQCDARVRTPFTAKTRIGQQAGGNSKNHVGSYEFQLMKARFGLAVLITNGAPQYEYFYNQALLPTHNGSLSLRGAPNFVLLYEPIWRLSPEPGRLSSHPNFYPQERSKGHLWEIVAAISSELSGRTGGLNPNRSPYPQGWATPTFSDTSVTTHSRTSGTAQQQADTAANFRHPYLITLPFQTRTYSRRQLNNILEAEDNETRAAAHRDYPLWPGHWKVPTSTPRRIPRRRINHITTTQPSGQHDGKENTNTVLNDSIIRYDHSADQQAYTTDTATHNKRYEHAQHIDADHNKLKRDPYNHATALRLHEPNHKYVHPGATHRNTRGDDTHTHSRRGTLSPPNYKQRVPPDDNAPHRQHHTRSHASVRQRRAQSTMTHDQHPTHMHRHMTPRHTKGTAHHLPPPPHTCPLSPITRGYLHHPLLTREQNITLPLSQTQPPPNLKNNPPPHTQHSTSHHTITTLTKS

SEQ ID NO: 995715 - protein, 474 aa, Homo sapiens
  misc_feature (69)..(69): Xaa can be any naturally occurring amino acid
MGVSLCGPAGMWQGVGSRAHHNLWPPRFNADSPTFSLPRAGDYRAIVANTAQANSCGYFEEIKDGGFHXRVGAKAVAHVEPFCRPSTCDSTHPSQAPTNTVPWLNMCTVRASPVPTCWRSWRSPASTPLLSPLNTHLCDHSLNLRTPRLPRARSHIPPSLWRDANKQRARATQSATHPRRTPPRRPLTPPSHPHGDPPTPHPTPTRPHPTTHPPTAPHTAPTHHPDPATTTRRQSEHRNPGHNTANSTPSHTPTTHHTNQAHNNNTHPHTTRDRTTTPSETATTTGTPPKTPTPHDPPRGKTHHRRHPPAAPNPTTHTPPEQHTHPPTPPNTHQHKHTRPPYPPPTPLAHNLPAPTTTPPHQHRHHSHPPRGPPRAPPPTPHANPPPRYTQPRPPAPSHPSTQPTPPTGGPTNPPAPPPRPPDPHPPPPPPTHRPPPPPRHTPPPTQHHHPPPRQPPTPHPPLPPPREHAPRHQ

SEQ ID NO: 995716 - protein, 303 aa, Homo sapiens
MRIDPPTAPPYHRPRTRRPLPPCAPPTLLLLPSQPDTPPGCAPSCSPSPATPCASRTPTTPPADPTRHLCSPLHAPLPRPPPPLYHPPPNPPLLPALTPPGRTRLTKPSAPPTPRPTLPPTTAARPAPPRAPPLSLALFCALAAPPRAPPHRAHPPPPSASHPSAPCPRRPPLPRPSHPAPLPPAAARAPATHAPSLRQLARPPSLPPPFPPPPLPPPPAPPPLALRPSPRTPPPPPPPAPPPPPPPPASAPPAGPPPPSPRPPPLPPPPPPPPPPPRPRPPPPPRPPNPPPPPLLPPPPPPP

SEQ ID NO: 995717 - protein, 465 aa, Homo sapiens
MWAGVSSIIRLLHARKVKLTVASTIDFSITADMGTAEGSSADDRTTALTRTRTDSARRPQGPPSEKQHDVTLQALDVQKPRDLPRGYHTDAETVPMGLGTHPHNLTPSGTPNHGQTHGPHPNKPPTPHSTDGDHTTAHAAPRLDPPTRTRPPHRPRITPPAIDAPNTGPSPHQPVTRPPPKEHGPPETPAHHAHPEHHTPPSPAPPTPGAPHHPRWRPTTSNTQRADLQTCAPSPTCPQHPAPPTRPPTPATPAHPNIPTHTPPNNHHPPQPPRRPPTAPPSRPTSPHPPPRPQHLRKHTRAPPPKQQKTPHTSHTPNPHPDKHTPHTTPHKHHPPEHTTQPPTTHQPTPPPHHPHTTRQPKTNTPNAQTTTPSHHGPRATTTQHTTPHPPTPPAPGPTHRERTQQHRPHQQHPQHYHHKQHPAPHDLPSQPATNRRAQTTTDRHNNNTTQRHRDDQPKTPQTIP

SEQ ID NO: 995718 - protein, 110 aa, Homo sapiens
EDRGQPGSVKDPKMVGETCLKTIDWVALQRSYPRTKGIVVPWKSWNETSLQVGCLPENPPAIDWAYYKANVGKGWLGWMTLRRSLIALKVSRAEDNILAQVEMPEDNTKM

SEQ ID NO: 995719 - protein, 131 aa, Homo sapiens
MWIFSDVESLHHCEKKTNPFKTYFSERHLCVAMCTEEKCVVLCFSKRVSSGWNMRLRTSFTTREDTKCFSTRLSRVLKSPNQGCYWIQNAFERIHKCAIFFVVDHPYLYFIKPRFKSFVGRGKPYFHSSLF

SEQ ID NO: 995720 - protein, 142 aa, Homo sapiens
  misc_feature (110)..(110): Xaa can be any naturally occurring amino acid
PPQTRASESRRNEQTIRRKYELVGIGRGISPLSSASRRVSASHGREIARCHDMARHVQAVAGDEAPEPVSSIVGRQTQASGGMGEGLYVGDEARASVAPDPEVPQFEHWXFRSPNWDDMEKIWHHTFYNELRVARRSTSGGD

SEQ ID NO: 995721 - protein, 38 aa, Homo sapiens
MRTSVLTISLRMPTRVKVMVSESSDCELSELGRLESTT

SEQ ID NO: 995722 - protein, 470 aa, Homo sapiens
MDSTIEGERLRAAGGTEENKNKKTDDRGKRSTGTHETHTKTEKRHHNHTRAETRQTHDTHKRDTRHTRERRRQRQQQAKTTQQRTAMPGTQERTPDEPDTKREDAKKQNEKKQHKHDNETNQTTHHTQQKQKEKTERGNTRTQRNTTPRSNRQSPKDSHTPRAETDNTAAEPRRPTDTINNTGEQKRDKPATEEDSRHTTSHNQSTTQHQTTTHKPGTHEEKPPRKRALTQATPTQTESTNANHQTAKTSRHAHDTRQRRGKSNNSEPPSMKRTRDGGSAASSAWTRARSTNSREKTGNQKTRATQPQRHQKEETAHEQSAQRENDRAEMTDRGARRRHAVRGEHPHKQPTHHRESDNDKTRASIAQAQQSHPEDDRTTRQQTQQPRATRSNTQHQQQKQNDEQKNTNNEPKEERIHTASNEDSTNAQQDRNTQQTENDKRSRPQRRSNTRDHTRNSNTHERQNSQTNRQ

SEQ ID NO: 995723 - protein, 157 aa, Homo sapiens
MQIFVKKPVAVRASSLECRETQLITIWINVKVQGSEDKEGISSRTQQSRLIFAGKELEEGHSTSFHDVQTSPEGMVDPAPGPVVLRGGMSVVFGGKILKQEVDPVTAWTVEAQMNNQSKNCEWPKIPGVTRRHPVPEPAGRAHLCAGKQVEDGRTSF

SEQ ID NO: 995724 - protein, 136 aa, Homo sapiens
MVGRLRTSAVTKRRQEGRPREKRGSIATVLERDREFVLVSREDVSTLLVLTTSRAALFAHRERVGTTGSHGNHESGVREWLSRGSGVVFERSRSLLELCHELNERFDQFQHKVTKREYSMTECFRRGLKTQVRVRR

SEQ ID NO: 995725 - protein, 70 aa, Homo sapiens
LQFSSALAWWPAAGHRCFQSAEGEAGVDMRPGTQRPAARKPRARPPAPPSPPLPISAPCRRLTVDQRGVS

SEQ ID NO: 995726 - protein, 142 aa, Homo sapiens
MGDTYTRFHKSGRDRTPLWTMEGKRSRPTRVEEEGPKEALFATNRPEGKDSRTQEQRPRKQLKPTRGRILRTTHHNIGEQEMCSTPKNNDAAEGPSSFTRGGGIILTKHSTGERATIWREETGGSNSLYEDAHFVRCQQLGR

SEQ ID NO: 995727 - protein, 232 aa, Homo sapiens
VRTEAQVPALQPPEPGLEGAMGHRTLVLPWVLLTLCVTAGTPEVWVQVRMEATELSSFTIRCGFLGSGSISLVTVSWGGPDGAGGTTLAVLHPERGAQISPRGPKIGGPPCPRPGPGWETQSQPFSLILEGSGASSPCANTTFCCKFASFPGCSSRPLCHYQHQLPPSYFGHSSPPWGAVLVGVTPHHAAHRPQALPLGSNQSLHVAALSLLRMDSTLRQGRGLLTLVPASL

SEQ ID NO: 995728 - protein, 369 aa, Homo sapiens
MHESKYLSPDRVASREHYARMDESQQGTDYSQARPSYACGVRKIVLVTNLAETSITINDIVHVVDGGLLLRDRTYDTRQTYMVSCLRVPVAWRINAATCSIPRAAGPGGACCPSPGLWPITHIWYPPYEDPGHEEEKKWHPPLSESSADAGIHVAGHRLVLCTGNDLVSRVRNRQETNSLTICLRESPEGTVSGGCRESNPMCSSEKGAMDDSNRKISHTTNVRDWVLGFVLTRKAAIGWKYLFAISRKGHEKFRSGVLPLGATSERPLGIRFYPHEENFEPPPLWPRVLKGLGPHFVGLFQPRLSIYHRGAGKATPSAGRNSVCALPGDVRPNPIFGTSGYPRGALGPPMSCASRGTHWFHVGAKRPV

SEQ ID NO: 995729 - protein, 295 aa, Homo sapiens
KSPRKGLFFFFTNFRSGGSLWSSLWPLCAQKPRAVGPGPKAEKNNKRFVKFFLFLQGSNPRSSFPLFIYKEFSRRGHMITAAPRTQRWVWPSFTDFFTEQQGVSLLLWGATRVSAWRKREDIELWEARYTSSERRVVEKVWAPRERESPRENSVSTRLLSGESSTQIYGPTSGPGAPHPLLCEKNMRARTTSRTLFPSQRAIDTPDGSPRSGRHPLLRGCPPENTGGARTNHTTTWAPEYVAHTPKNTWTTHTRENKNRGAATPFEAHEPRSDPKPRRRERTPNTRATQGVLQTP

SEQ ID NO: 995730 - protein, 318 aa, Homo sapiens
GLHVKNTNGERAKLNLCCSDVWCLLACPEMLRWSLQMCCSCDYNCMCIIVEANSDCDLVLRCDMSVCSDCVLALNCARWNYCAVECAGDQDQGIHDNCSTETSTSVVYRRHGEDREQRDKAEEKDKKEATTRNHPGETQQKPEHQPEMKPRRTAHNTIQMAHEQGKKRRKGTTDRDEKRNVTPRKRHAGDIGEHAAPLTDKTNKEREKTGARNTGTHRKPQRNRRKGTSRTQETKRTTQQRNTRNNARRKESRNNRRETDAKIRKTKNERTETTRGTKEQRGGQQRTEEERRQRQKKTEGRERKTKENKARKRRNEDR

SEQ ID NO: 995731 - protein, 148 aa, Homo sapiens
CTSVPGSCPVLHAGVSDRTREAPDGRSDSDTDGADASPLLFGWATPDNVYLVAGYHMSVIFFTCEPEAVCGSVVQNLRIDHMEESLRFDSDVGAEYPGGDRGVGLAQRPSYWNRQNGPPCEQIPPARLETVLRELTYGRCGDAFPVKR

SEQ ID NO: 995732 - protein, 334 aa, Homo sapiens
ALSPPKRGRTGSGERWQHERTTRLVARKQVKKFLQEFYQDDEARGKSSRFKVWVTELCSSVALIEGTTVASCDAGSVDGGSRGMTPELVDVNLGECQGGYAKLLADAVQELLPRVQGRGKWKIKMSWTVDSGASGLMMEQQESGTRGMVRRPLEAVSCLNSCADFELYMQGPSRNKARVIREVAGKTHVGEVVTVRGIVTRVSEVKAEMVVAVNTCEQCGAENYQPIQSPHVHASDHGAQPGVQTNVRRAVNLQTRGSGFIKFPGMKMKNYGISAWGKYPCSTHGLDKERTQDCSLKQRSVTEYTGQPEQGQKGTGDPNARSTGEKYGRKHWGT

SEQ ID NO: 995733 - protein, 610 aa, Homo sapiens
  misc_feature (337)..(337): Xaa can be any naturally occurring amino acid
RVLMTGAMGVQVVDPGTYYTRVWTSGTVHHDVLERPCIAHTEVSNSLADSERTVSYKRDHIRTLTTVAALCVLQYRAPTCYEPSDGSSWNLTRIWSTIVIRASIRGGNTTIGAHGSMPQVASKCSEPCVAMGALNEWVLTIPRRGHFERITCAGQASDESNPSEIAPRSPSTPVRNTPRHPHTVDKPGGLRMPQRTPPGERGLTHPRTDGASPPGGLGSNLRPTKKLAPTEDLPAPTSSQRPADRANCPHTTQPGHITYGAPPKYDAKKRRRSAGWEPHSNSAPPVTNGANPSFRHTCPPPAHTPPTDTASNTHLDTLGHPLRRNTERPPSRTPKHXRGDHTDPLRTRAAPHPARSAPPTATLPQRLPPPPHATTPPGHSTAHPHTTAATQPLRPPTTAAPLPHDIITTNPLTQPPPTNADDQRQPAPDRSTTTQRPTPPPPHPAPHHTAAHNSAPAPPARPSLAQLPHPRATHHHTAPPRLTPPAPRPTRSALPAHHHPQRSRPPPSSLSSMFTSLPSDPRPPNALTRRPPPTRHRRTPYPSTPPPATQHTSTRLTDDRHRDTTTTATPPPTDDHAAPTAPTTDNPRYAHSSHSTNRQPALHHRPDCPP

SEQ ID NO: 995734 - protein, 168 aa, Homo sapiens
MVEDARTCADSMRSSYCVQQVTYKPNVGEPRGNGLPRSGNSGTALVQGELLMLRVLRIPGLLPAIHTSTCSTTVVSPAELAESHSWQRTPVAVTAWALLRDSYHGGAVPRVQASTSPWGALPGPAGSTELSARESSEKPWCKVVNDDLSKPSLIYGLSSFRFSMDKNS

SEQ ID NO: 995735 - protein, 65 aa, Homo sapiens
MRDATAQCAVSETSETPREAWHISSYTRDHRWAQHDIADYRSTRIQKKGQAWEEKTLTDNDVEAT

SEQ ID NO: 995736 - protein, 43 aa, Homo sapiens
MPRRLPNFRQPMGRRAHLSLGRRVAEGGSASQTRVVKNIWQDG

SEQ ID NO: 995737 - protein, 240 aa, Homo sapiens
GECCCYERDNKKQPQETILPSKVGLPPEAATAQGCKEETAAPSLEVLTPEARSAHGHEGAAWEGTMARAHPWVGLCVLGTLVGLSDTPGPKSCPESHYWAQGKAVLPDVGEPGTFLVKDCDQIERLTQCDPWHTGGLHSLLTTTPGPICESCRTVTLVFSYEIVTIIGIAELCLSEWLAVPGTKEVPRVVILFQTLRLNRIGVVSGPMSHDPSSDPFTYNFSDEAWRARHKWEHARLVVN

SEQ ID NO: 995738 - protein, 475 aa, Homo sapiens
MDNGSGMWLTRGFRVADDDSPRAVGFACIVRSAPGRRRAVVVGSGPAEDSVTVGTDRMDPSTTNAVRDSHGPPAPVTPRVGMQCDTSLHHRTPCDLSIGRTMTLGPIQAAPCQRSDGVLPWAPWNGTSTHVVWRDTLRVRPACQSSPYGPNEEGLNDLSIRNYCFVRTRFNPPPWAMGNRCAYPWAVAMYPYITALIGGSQPTLRHFVNGNLLRSTGGQPQQQGAHLTRRGLVASFAPQTRNSFVGPGDLGTGSGNLTPDVRFIDSIPSTWKTTGLPGFHPHNGAEPGTIRAAEPSTGQESLGDLRTGAWELCGRHGKHWATTVRDIPSLPYVPGRKKLNASLARKGHRSRHPMGARAADPGRHATGAGTQRRYHPPGRPWERCGGEPQNETQFEHFNACEVVRGDTPEENRVRHTRELTAAHHSAYEMAESNERTHTLDLTRENTTRPTRKSMSERTTAHDPRRLNRDRRPLVS

SEQ ID NO: 995739 - protein, 145 aa, Homo sapiens
MSRREERTERITERDAHALPAGRRGSDVRSVRQDSATDSRSERRGVPWRNETLGPASAYSLQRFALNHRDSAIEGKDTERRSQSSSLCWLHFARLVTRPIQRLLYEFQDNGRSGTGKGWVIVPISKLLVSLYRIESIARGISELV

SEQ ID NO: 995740 - protein, 470 aa, Homo sapiens
RHAGRGDERLTDCDPGSPRQVLTLTHHSLAGHTKSVRLPRQRSGGIGFLSPLERYEVPFDLHRLRSIGADNGTAGDSAQHCTGTDSSLSADTIQLIPRTLEPASSDTHSPTTAPIAMATHSRAHVGPTALGILPWRAAAGKRRLNEGHRKAWGGHPGALANADGSLHTPLQAWLHPGKGPPANSYSKFSQMELSLGGKAQGRAAQRKPFKPTKEVPGYGDPPPPPACKTNISQELLPPLAPTRGAGSGRKNPERAPREGQARTPALDPNLQPDGCLPGTHQAKPQPGTGRGPKAGTRPIPNLAAKLGLARIENPLAYATQLQLYPATPQRLPRPVSDPTRIDFKPAAQHNSTLGSGPPAGTTTPHIPPQPPRRATGKPPRDSHPLPGHSPHNEAGEPPQETHPTMAAHLRAPRRHPNAPLGAGDAHRHPQEPDILDREDTTAQIQTVAWDHTKGPAQRTNTRRDARDRST

SEQ ID NO: 995741 - protein, 316 aa, Homo sapiens
MRRRKLAARVLRAGRAKAKAGKAKKAVWNRCPLGTKKEEDPDVTQRFLADEDTADSGDSPNILVKSASQEKHSLTTYAIIKFVRLTTESGMQEVSDRRSKHTGCLMVDVEEPSKHQIKTGCGRSLYDIDVAKVNTLIRPDGEKNGTMFDWLLITDALWMLANENVGSIYTEIQLANSEYIYIYLSQPYMTDMDPRNRKKNRERLSRGEYNKVGEELAAWATNGRSRAHTRGVDPQGRKAGPTVPNRTSRDRMMDTAGDTPAIKDRRKTELARWARQSPLAKNSSGVRGPGPHPTTGEGHMSASRNHPLTNTNGSTG

SEQ ID NO: 995742 - protein, 428 aa, Homo sapiens
  misc_feature (33)..(33): Xaa can be any naturally occurring amino acid
MLIAGLYASARQARSLNQSVSICHQLSGCIQDXRSGRHRTRAMGGTVEVTFVTVCEPLKVRGATWIVRCTWQRWRVTRALRCGCVVPCAKLERSGTVVERTRIIGDPQPGFLLANQQAMPPVGPSRAVQAMRWLAVTRIRSKKRSTLAQRCEMPQATSNKDLKGRVSVVISEERVWTCTRVAMRDVWKPLLGPSAWERVLTPIVGGCGPSWGALVPMGPSWRTTERVSCPTNWLGSGRTPHGWHSRGLLAPTGLRVPLAGAGEPLGVLGPGGPRKRKINPTNGKEFLLNFVGTKGFKPDVIRQAIGFRDTREKFPFRRKHSYMEANDSVSSPLSARVHVCSPVRMGAPGRQVPRDLRPREKECQRSLAQSGAKEFCPTGDYNRNSRGTREEGGHERHQTPAADGAPAGHPPKKHFNTPQRRDADSPQN

SEQ ID NO: 995743 - protein, 508 aa, Homo sapiens
WRGVLFMGNLKYGPKRIFLQSRALGAANTEKSEAFVGFRAQGRRRTRYRRNKEPLQRVKVPLQPSLYSALWPQLSSSGFPPLLTRPCPWESGSYLHRAKIRAWNSLEGISFQGLPSFPQICDLLVKDLSDNLWNVAVTDKRKRCDIFPGCHGETTGSNCGVLPLKNRFPLHEPRGVAKVKYSVEGEQRHIALRRDTHSDSRGAGRNSRAEVKQGPPRGPNKTWSTREAPKAYSVCTHMWGYRTHERGYTPHNSDRRCRYYNIFPEINCPKGINPWPLNRTFAGRQKERDYRQTNQKTAQQPQTTRPKTQKTRRRQREQHHNHTHIGDTNTHIKARPHTTTQRNTYHRTTIQRQHATTHHPHQTPHQHISNNTKPLTLHTHTTPTTTISTHTHRCEDSGTREKNNAHRTKETTQREQGNEQEKDRDAHKETPHETTTRTDRHQKRHSRKTTTTRHTKDSKQTRTNNEDTDRATKTTRPPNEIERKNQTSKLGTKRKTSSDAEDTRKQNR

SEQ ID NO: 995744 - protein, 253 aa, Homo sapiens
MKISPNRQKTSTLLIAKAREAAEMRAQVERNTGSERKGKRMHRETSQNPAQEKPGRARPGDHTPPRWHPPSDTGTPHGRTALQTRPWNAADQTRPPAPANPTSSNTPTTTSTHPTKRKTAQPKLEHTRNPARHNPKDVQRHTHRHPHANTTHTRDTSTRLKRATDQTTTHKTQDTSKGRDTTPRDQQREKAEDEGSPTRRQEDRHGQHTEAKDRYKTEDAIQERDNKSRQNIARSPQRADKHEDTTMRESNHN

SEQ ID NO: 995745 - protein, 294 aa, Homo sapiens
LRVTPTSAEPLMGGVPDSRLEVERERELPLQHHTAVITPLQVHGSELKLLEKIPENAEATVVLVWLRGVASPVPPWSCVRLREAVELDAVLEVPVPVRFLFLLRGPEYVPDMELRNEIGALRLHPPVSDRVDSYEASATVVMTKLGGPAEAGRSKAFLDCERGACRLQQVLGRGAACASVAHFQSPDARDARGAGRWYLQGLGWSPNLPAIGRSCGWKTAAGGPLNDGFALRRTGRPLGGLIRDVRMPYPRYTWSDFREALGLSAGRVILLGFRPAVLGALCGRPRFGGGRGGR

SEQ ID NO: 995746 - protein, 39 aa, Homo sapiens
MPAALTIDQEDISTLPTLTNVDVLRNRWIRYTEIFIFLR

SEQ ID NO: 995747 - protein, 349 aa, Homo sapiens
LEQMSNMFQSSGVQTASSRSNKPKSDGNEDSEGKEQRWEMVMDKKHFKLWRRPMYRHPALGSSEFLECYNRCDTSAVLQVFSWTQSIEEIMGCPWIIKLEVELRGMWISGSHGLLQLGYTQCSLSRCTHLGLCAATEVIDVAIQEKRPDEVVGGLGGCASSGSVGTKFTENGRKHMILSMSPRGMASPKSDPDRTEEVYDSSSPSMTVDSCTKSGAGLVDDSVRMIPSELPSKAWTPTHEGDNSAPRTRKIWHTTPVASEHRDGDQRGSALGRRRGEERGHGGQPDERTRPETTQAGQTACDTSCEGHTDGARAYQQWGAVGRHHTHAGANNPRQRGSGKTEKNHKEWK

SEQ ID NO: 995748 - protein, 210 aa, Homo sapiens
  misc_feature (26)..(26): Xaa can be any naturally occurring amino acid
MHNLTESVKPIAEYSPVRGIRAMLLXNMDGTVVSPISLDIATTPSASECSIRESIIPQRRHLNPWNLWLITSRSGSPWTKVTFGAVVISDVLEDNVKYSFCEGDTYAWDKAFPSGCSAVSGALRLSLWLELPSLESIRFDFMEKRHHMAGISGFRRVLLTLAVTHDKSDQSLANAQQTSLGRKPGDVCNGPSLYRNPKQAWILQIIDTGF

SEQ ID NO: 995749 - protein, 85 aa, Homo sapiens
AAVAWEAGKPLSIEGDRGGTRPKAHEVRIKIIADCGLATPYAYTAVVELILRVVFHVILGHEWCMELWKRVGEGMLLMLTVRVST

SEQ ID NO: 995750 - protein, 320 aa, Homo sapiens
RESSVGLYNGGESVHHTSECVHRDPPGAHTPAWSVHHQQCPGKEYQLIPDRLPRRRVTESFLKVSHFLMDRARVLKRRHDLHAARPTRHLLPARWLYNRVPWTMQPHLRCPLPGHWLTGLVAPTKVSRAVRPPVCNIIEESAVSSQIVDSLGDMNLLLRHPSWGLLQCVLYISGVVQGVPWCNCQAVQELWGLPPRPGPLLCLERSSCKHVSLYQSQLATRSWIQDHRGSQRHKDFAARLSVVSPLFCTDRGERHVSKFRSQPNTVDNFGLPGPLQPGTDSGFARGPGNASAPGTCFHLGTVLGGPTAGESTLSTGGSPC

SEQ ID NO: 995751 - protein, 74 aa, Homo sapiens
PCTAYPENWRAFTGLIAAQYSGTQVRVFSATLASSIIGAKATAPLNCSENLPDQRRECRPDYVMGDDGFMCCLE

SEQ ID NO: 995752 - protein, 80 aa, Homo sapiens
MALFNGFLNEVGIGVSQHSGKNSRDRPSHIRIHNLLYPAQSLRTWGRGWEPNLTAFLELGLAENLGCAPPWDGMKLAKIS

SEQ ID NO: 995753 - protein, 71 aa, Homo sapiens
VRRTSIVKQIHSAASRRIPFGDYSTRYQGLPGTSNIDLRNTAMGIWHQVARQDGWTSMTASTRGSRGIAVR

SEQ ID NO: 995754 - protein, 67 aa, Homo sapiens
PQGRYRFYCHLFQLHRTATVGKGKRQEAARSRFMSVKARMQDKTGSCGIIRKSNIINDMNGAMEHER

SEQ ID NO: 995755 - protein, 279 aa, Homo sapiens
ARAAAGELLLTGPGLEERVPGGLGGHCCLPRLFTLPLLHYLEVSRLRGACCAPGAWPGCRACLQLHSLVLLAQRAGALACCPDGSGPGCLPFGCSTLSGNAAGELLPAGPMAWAPREPAGFLQLQSLNLSGNLAARAASRLAGRCAPACRDSDSPGNCLDSFPARALSPRRAALLSELAVLTTASENSDPNRPTGSLKTLDLIEQPVSEILQSLWNAPSSREIQFPWGNKLRDKRLRKMVRAADQIIVEYCALEDVWREAGAGEGRKGESGKEGNEQRK

SEQ ID NO: 995756 - protein, 351 aa, Homo sapiens
  misc_feature (141)..(141): Xaa can be any naturally occurring amino acid
EPARPLHSLSAPVLRAVLPFRHVRPCTAMTGTGHLHSPKTSLGGGIAGGISKTAGAPIERVKAACCRIQSSPDKSDSAVRTKHVSQGSRWSVHLILQSHKDAGDCACPFVDGRNACGQRCSLAYITTSHRPFKLLTIQGYXVARADSFLARAWNEELRRKIRGRIRLTGIPWTSRAVAGPVDERPLVRSVYPSLGVSARIPRWRARRWRKVMAHEREFLRALGRLALVNESPRSRTASGALVPGLQVVSVQGIIINGPATFGVYDTGKGPCSPNPKETRTIGEEAGMDRAKPGERAVRPVRWLFLNPVSTTGSRTGALMIPAARQKKVNLHVHRAPDIAGATNFQNKARQA

SEQ ID NO: 995757 - protein, 71 aa, Homo sapiens
LSRPPRIQQPRAGVRLACRAYRTHRVSPIARQLRAPRFRIPFAARKRNRIVCHVIHNLHSFEPFCMSASNG

SEQ ID NO: 995758 - protein, 117 aa, Homo sapiens
PTSCLYPPCPFLSAHLTRPAGPTSTLNPGREEDPAASRCSGLLCASWMGTLSPLLLSGRYIDDVEPVLGLWSLRSRLSRAHGADAAIPNLPLKPLVPGDGAPKACQWRLCHTDAWQH

SEQ ID NO: 995759 - protein, 331 aa, Homo sapiens
GWKTKGCQAHGNCRAACCQVTLREWLCFFRVWEDGWSEPGVWRSETVSREKSQVLTLQPFLTPPPHSERGVGTLCACWERRGSIISPRARARGHSFPFRARSLSQFPFTDVVYTEAECWDGQRHTGKRGIPLGASWGKESVDASLEDRQGAVEWVAVMWSPGESHFKLDPEWPGAPFTFRGPVFLGQACVALPTLRHEYRRVKRFMQSRPKPALSPDTLGGPILGAWAPKQSLLSRKANSRVRSPKSPFQSKPLRDFLIGGKYALKLQPCEAEQVPFKTALRQLLGPRKSGKTPWHPRTKGLSVWVPTGKRNTGKRDAWEIGSSQVDDTLH

SEQ ID NO: 995760 - protein, 91 aa, Homo sapiens
MNWCLRVFLCPVVKVTELVHVIGIGKELAHNKRLMEGSLFEVQKEIFRGEIRFFLWVGFPTTVIPSWWLDNVLIHHFPCLARSCMRGSFLK

SEQ ID NO: 995761 - protein, 140 aa, Homo sapiens
MLAPRSVVVTLSRALRVVAAPTCLHLSICALYSGAASCGIQACFPASFASVPTAHEQPPLMNYNTTPLYSPELTIKYHHCTRQLFQAPPILRNTLNSEPTSSPPKNRHTHLPVVHDHLRVSLSLVHNNQTIRLRYHLPQP

SEQ ID NO: 995762 - protein, 311 aa, Homo sapiens
INLNQELEKLLLAARCNGGIENPADVSVISSRNTGQRAVLKVAADHVEPLPIAGRVSPGTLQLTQIHAVLSGEPTVFLWLLTPGTDQQALTEASYVNLSTIATVKARDSPLRYVGTLPSHATIQGSSLSGLDVVDAGLRDRFCSTAVRHDIPCEHHIGEVMPDLYFYRDPERDRNGQSTAGAEKGNDQRMRIPRLNGMIPPPDSLYLVSCGLQTASAWCTRALCAYVSSSLLCELERSAASWDWSVSPNAHGAAWGGARLLCDCVRAKAVGCCAMVWALSVFTWKGRVVDGGEGEGLGFGAVSEAALGMTA

SEQ ID NO: 995763 - protein, 296 aa, Homo sapiens
GPLLQHMPKLFLTDCEDKSILDVGQWNELDALLEELERSTLQDSDEYSNPARSSPGLSSFQKGSVTLIETSEILSSSGETQVPWPASARVILTNIQELNVYSEEPKSPTVNHHASLLKRQQLLSCDELMAHLIVRCMAKVAVRADAGNDSTYQYNAGSPKASLDSSAWRVWRQELQDLGVATVPKGHCASCQKPIAGKVIHGSRAIMDPVAFRLYSCAKKKIWLPVPSLSGVALVYWRKSTTNFFLPAGLLRLALLGKGCRHGPDWPQSTSSAPLGEGWGPGSSNGRALAKVSPLP

SEQ ID NO: 995764 - protein, 60 aa, Homo sapiens
GSRGAAGAAGGGVRGAQDPNVGVPGARVANSCPPQQHGIVLLNPLSRSCPTARRGPSRVE

SEQ ID NO: 995765 - protein, 390 aa, Homo sapiens
GEARVSRCEQRLRVGAFRALQSGPGGECRDGAPAEWTGRLQGAELDRLLQPSPAGSMTTSWWTAVRTGLVCAGCWHMASPSWGFAHTTHIYDVDPMTDALTTNDVEPAICANGATILARVYYQRCIRVDHDNSDGWWPVNDSVTLRGLCRRTDDRVTITDMCASPGPSVHVPTQPPSIHARLHLALTTVTDAPTLMDSIHGSTLARRAHARGPSLNIRIPWQRDHTMPRILQRTILHGPRIILTPKRPIHRDIDAANVAHSSGPRATMTLRGTYGRHHGTVTHTQNTQETIRGHPHPGIAPEDTNALGPRTHGATLETLRAPRGTDVCTGGRRPSPDAHHKEGTGRGVAGAARNKWDRQEGDTETRRPRQNPPRPSKAAEDDTAGTTTHE

SEQ ID NO: 995766 - protein, 71 aa, Homo sapiens
VKPLADLRPSLPSRLRTGGLRVVWIRYPPVKCPGSGLRSFIGMNDKRYSSSLKDRLSIMNDSPRIRWSAYK

SEQ ID NO: 995767 - protein, 90 aa, Homo sapiens
GGALAPRLSHDRPWGALAPSGYRVRAWAGSHQKGADYTGLPETRQRALHHPHYLARHKHLCECRCHVRIFCWPNENKQFELSNIANNYKS

SEQ ID NO: 995768 - protein, 131 aa, Homo sapiens
  misc_feature (69)..(69): Xaa can be any naturally occurring amino acid
  misc_feature (80)..(80): Xaa can be any naturally occurring amino acid
MHAKSLARPCSEAVAGESVRAGNPSAIGRRNVSIGDRMSQLHDPSLHRKRTESPMKAPRRIRREHSSRXYEAPTSPRHTXSSLMLLIVSWSASLCPAAAELRSEGAMEVSAAQLEHRRDGFERRASESKHT

SEQ ID NO: 995769 - protein, 78 aa, Homo sapiens
VHPIPSPPLPRFLAPALGVDVPGLPWARVLCLDAVMLLPCAPDGACICAQCIDSSNQQNGCEVHLSETPACMCVAKLC

SEQ ID NO: 995770 - protein, 147 aa, Homo sapiens
FPVDVVPGLPGPSQSSASASLMADGGAPGDLACRTAVVVRVRGARVGDGRGVSQEPMSDSGLYWRDLISSRHEGICVECRLSLSKEEEAGNELDACTGDVETLVRGAEYTWPELREFMEVRICNDGCRTRGFDVGGRGPVIEGDTDP

SEQ ID NO: 995771 - protein, 130 aa, Homo sapiens
MATGVLGLETGADVVSVFSETGHVVSREFRLLMNRTAMRARQKDFENSVNQVILLKKDPEKEVKHKELYALYKQVQLKDLVTCPNPGVFDLINKANGGMEMPLRRLPKEAATAELMWIWCPEYESFIGIL

SEQ ID NO: 995772 - protein, 208 aa, Homo sapiens
  misc_feature (161)..(161): Xaa can be any naturally occurring amino acid
SGQAGAAPRRWQRVPDLPSTALTTSRSSLSCRYQAPPSISVHRSANLACAFSSELLASLLDRPAARLAVGPGFVEVVDGRSSVQRPSYLLILDSGNEPLLVAIIPTSLCSGFLEQTAHGTQQTLRSEEITRENIDMGRRRHDRTRVASADGCGPHFTNNSXVPRLRFMGGEDCRVSGAQRLRNDEVDRSSRQSQARIGLRTGMALRQG

SEQ ID NO: 995773 - protein, 291 aa, Homo sapiens
ERSGLGPHGIGASRLRRGRSQHHRQPLCLARLTYAHVKAAKPTQTSPQGQVLTKAPSQDRPPCMLEDGADGHMYRYAVDTHQWKSHGATHVKGGTLTPSVEGSDKPKQDNNMGTLHEAVLATYKVGIRKTTLKHIDHNSMRHTEYMHNGRCAQGMAHISTSENTSHGVTKHKREHRIVEHKTTFHLALHMSPYEIPTEKSNAIRLLADHIRDHNTRVLGRTKVPTTAQPRAHTNEELESRHEYTEAKRTPSMNMGHTRGHGGVNSTPGPGRQRHTWHPSQWTTTQGTPHDT

SEQ ID NO: 995774 - protein, 444 aa, Homo sapiens
RSQSSGSSCACVGLPVSGTKSMLLELHAAAAAPTLTSGRSLRREDSPAGAPWPSLKPKDPGSRPAYRARYKPSAAYSQCHATYHDADGYPGDGYLDTNIHTTDILLQIQALTPSYRGRGLSWLWLLGRDGAAGKRILERRSYFLTGDINDIPGRIRVEGLMNPHWHHKYPTWNYSHEKPYRTNDMKPNIHQEHRCNRAYYEQKKKQSHHRKSPRNKRQTKKFGRNTEKHNHKEKPQEGTISNENMEQEEMGRLEARAVDTIPKQEREQRVTRTKRAQKEEKTTGKNNNKSEHTPQKGKTQRNAGQNTGKGKRDTTARNAKTTGIEEGKNRRRHMTREGWTEKNNHRRARQQRKQSEKERTDDEGRERGPRQDEDQHAGQDDAADSGEAKSRQKNRRKPGHNKEHEAGRREKRDKRKAAGHPMPATRQRPSRKRARSRRGTRERR

SEQ ID NO: 995775 - protein, 382 aa, Homo sapiens
  misc_feature (104)..(104): Xaa can be any naturally occurring amino acid
GVEESVRDRVREGIQETYDDTEDVRIREPTDLCTKARAIAPLSWDYRDDLQPSRGLLRCTVQGTGDKDVMISGELDIPVARGGRVVEQDASSSYSKRGCRPGKXVFSCTRNVYIQQPRGRISGSVSARALRGLLSQPMADGGADGKLEYYTDIDARAASSWSSWSSYGGGQEPQDWCMRRSETCWWRRMMCNVRCPSALCTVLSRHEEPREPTDRSSSKVIKTSGGNRAGGCGDRRRRSTTLKEPGQPGDEGVGTGTTMKAERCTWQDEGNESNNPRNEHQSGNTGPEKAHKNRDVNTETTKGARARAQDREEDSQTGNGNEKRENHKSREYHNERRKSETRKKGDAQKTKQRRKHRKRLSQEKKKEKNSRKQTVDPPTGVS

SEQ ID NO: 995776 - protein, 330 aa, Homo sapiens
HYPRHKALTHCSCHLQHILCHSWKGAWPLTFVQMGGNADDTDPPCVPCHGSSIVNWLVFAVPRGMGSSQAHSWRLDDRAIESGRGARGRVSHIGRPTQTYTGKCWALVATHRHHKRKASLTGVCAQGPVLLHLYSPFLHHENIPFFTYKAEEDVLGTARNQHHLNDRRAEGARCVSNPSHNLQQNLRVVVRRQCSVFCAPRWARVNKNPLASGTIHRWRCRVTAISLFNMTSRDKTLPHGHAGVFTQTEIIGYGQYNQKSMYANGPCEHHYIRAPPGDAQQSNHARPPRTYSAFHRIHVYTRAEETQSTRYPRYQRKQQHSPPPPPLQRH

SEQ ID NO: 995777 - protein, 293 aa, Homo sapiens
TKWRMTPCAAVGGPGGPCVALGLGNLLVCFLLDVFLCMLCDPVWPGGLLACVTVCACVCLMARVSLCGSAMCRWHNGSVIAAVHRKFGACIWIKWTVKAINVPMLSEESIILYSPCTDITDNRGESVDLSYPCGAPSFIERDYGLMLDKTFIAQDGKKGRHPQIDLRGQPKDAAEPEEGLRQWDQFNGIIGLKLQREANFKPKVGCAKGYEGIHWGGWVPQSGIGHFARHAGQGGLGEPEPLGHQIYPGMEVGPPKLHSFRFVSPKKGRFPFPQGFPAFNTRGLALATEARHN

SEQ ID NO: 995778 - protein, 309 aa, Homo sapiens
MAVSLGPGPVALQRRGDLLSWPVAVRLVQGRPMRGGPVDLGGELSCCVAPDEATGMDLRRQPFAGPAGLLLVWDGACLLRAGAALCEPADGGKGPPWCSGTAPGVWRAGEKLERDPGRRLCAISCRLPPDSDSGGADMVPATPSGPDVRRLPLPNELEAGDAPGADSGVPREPGPVTDRRGEVPPGGVTGRLKPTCAASRGGTRARRVTSNRPPEACIPWSYLPRRGKGLLNVQKKRAGEGMANIHGLRQTDNRQKDERDNHTKQERDRETEKREYKTEETGERRENRREETEANREKDTKGSKNKTDT

SEQ ID NO: 995779 - protein, 313 aa, Homo sapiens
SHNERGPFLGAPGPGARGGGCPSGKNPLFWPFFCGPRVVGGAPLFFVGLAHTERLREIIPAAEILPCPQCVISADQAAGEKEEVPIIWPPSARAQHRGAEGRHSSSWKWLETTGQKLTSHPSQLGVRAKKYTKPCGETTGRNLPPLDLEKLRDYRNFPSKRLLHVASPHPQEEVFMAPRKGSFTKKIGIVCAYHNHKPPPTTPSTIHSCSHNLPGHTTLCGTGCRSVPTQKSTPRAPKNMSGPPENDRPPEQDAQHTELRGETAEKGALKGETPIPAGAHYQSFAGEHTGRARHPLSGGKTTGPDPGTHKTWG

SEQ ID NO: 995780 - protein, 308 aa, Homo sapiens
MDRVSVRRKDERRKEKREEYSRSERRGEKATRSRTQLKQLMNLIRMEILVQRLEKSAESIHVRTRCWCLDERVTLEKRLLYPCPGTTYGSCQEVALEGTSTNRGRWHGWRSHPMFDGTTTGALIDGLGRLGLSCFTGTWSKDAGLESRASEHGFSRGSRKIQLVGRPIYEVPQEQALKGMNRMREGPFSGARRSARSPFAADVGQEKPVYEPGDKTLRGVPGLSITRVDYEDIIDELPVAFKVNRTGGDPVTLASALSEILSLLNDEEMNRWVSLKKTLSVRSEQEELGQAGVSQKAKLLEHAAFSVL

SEQ ID NO: 995781 - protein, 258 aa, Homo sapiens
PSDGVLFADTCQLLDAPQVHPVSSPPPTRHLLVSPGLRIRHGKLKKYIIRIPPVPLYPCAGTRTVNVSRVRQVGPRDLHPSRTMRGVLYCPPCALVSRFAPRLATVAVVNPVSRDAHGLWCCMMSQGQVRAYDHRCNLVDPGLAQVPLPPVIPGGVVLEKDINIPWQVVLSNHLPPSKGAVLIFRANRLRDKVFGPAACSRVSRRDLGRTSPGRRSSGVVVRSYGVTHLQARSPVLSALGTRSSVVTRDFCAACALGD

SEQ ID NO: 995782 - protein, 156 aa, Homo sapiens
MTHLDRTGKRASKGTFSNVVIHHTKDHELDEFERHSNWGKDPWMGSNPNKNKVKPGLRRQQPMGKVGPQNQQELWTMDYRRNDRPDVCEDKAKIIKREEMTRGKSQDMTTQAELPGHKLGENRTQGKGSMEASKSSTRISKGGPEIPIDEVPAGGK

SEQ ID NO: 995783 - protein, 380 aa, Homo sapiens
LGNVLGRPDQRGPWGGGRRAAAACWLVEECGWWLVELAMRILVRSHQLPSARLAAQYKTGAPAPHAHITPTLSANESAGGPAVPGDIFAQLAGDDMEVSATELMNILNKGFDTDSLDLTTDWFGIDTCRSHWWPVLDSTPQDTAGALQDFKLLVEQQSKGGRPYTNSSTLTDQGPFAVVNSSVPLRQPGFHLNEAISYNLIIRLLLRLTVGTMDLDNLHQLVGPAARHAPLPPDLLTKLAWTNSRFPSRNLLQAGSCSLTGVQNQPITACNEEYPALSTIPGAPSQQHLLRGRVNSRLDPDLIPALDITGKSTSAAPGVSLNTVQGPQHELKTHSLPYAQLRPPANRANTAPQPGRAAVSRMRQPSFFPLTSDEYTTPSA

SEQ ID NO: 995784 - protein, 413 aa, Homo sapiens
  misc_feature (392)..(392): Xaa can be any naturally occurring amino acid
MAGHVGGVALRGAVRFVTQKELSDLSCGSMVAGQKPNFMSECTEQQFAMAELGASHTVTLSDGTTAYVQHSMSKESTLLATGRCSSYEDGTTAYIHQVRYRQEALSFEDGQPVQTGQMAAMAYIHRDTQRLAMTPGNLASRPNWQMAPLDYIHHPVASAIGGAPSWATDRGGLGGHGQERGCCGAPEADAEVARQRNASKGADNEQARKPGNGQHTDKRVGSTDAISDVSGINWDSRGRVHTRPSVSSRFNVCLLNDAIHHGGTRQQTECDLIPHQCATRPPGPTGRRPWSALASHNESKSTDRAQRNSATTGKPDEGDDETDRNAHGNDTHTAPQDTASNTRHHQPSDPPQLHNTRHHGAIRSQKEARETDGGGHTRIHRRKKTDAWAVLXAAQADTQNTDTRTRPERPHAG

SEQ ID NO: 995785 - protein, 549 aa, Homo sapiens
MGGWSRRERQGEVAERSSDGSPLSVVCPVELRPMCARGEQRAGDKNYWAPGDITTPLRRKRVQGSDSPAGNTIATEGDYTDAVDQCVTRERNSSAKKKRSQEGVNNGTHNYTYTREQLESDRTPPGRENHPIRPERGPENTKARGGNPPQKERHQQGPATKRGQRTIATRQRAIMKALGKQQREYQHPTRNEQSAIYGTTIIQRNHRTGTYHPSSIATRHEQHRTQKHEEYPRRKNHITLKQNHTTYKTHTSRQKPHRSETKHKPIRKREHKQTIQNIKQEPRRTQQNDEVTSKQPKGRESNNIERHTKRTNRTTNANTNKRTIQHPEPQQPQHKDNSPATHTTRQTNTHENTTDYHRGHTQDINTAKYTEASRTTRDKAEQTQHTPQGPEKTQQNQQHRQARHNKNKKINTGEQRSRNTTQDNYTGTHTDHTQQSGRETTQQQDTAHQARSADHNEREQHNQTPRSNSEHRQRKWRPKKRRQTTGQHTEEHTQLNAGHKTRAKNQQTSTRDNAPPEHENATTGQAHRTIAANARDHKYHRAQHTSTYT

SEQ ID NO: 995786 - protein, 474 aa, Homo sapiens
MQYTIYTFRSKGEYSGDIEVTTRAIYSDFAVRQEKYTYETAPPWEHKDVEKAGKGAPYGTKGKKQMKPHINGKRTQEIAGETTLFNPPDVTVMRKPHSKVRHMAHRATKEGGIYQNNAHTRKLTVQAGKTNTGARQEDWGTTFSENMGYSTFAHDNHNGGHQAVWTHTKRAEAGIVVDDSTPHQQRKTPLNIASKHGLHPKGEEYSETKHGTTRQRRSTANMDTTNSDKESTHYTSMHSGHQQQLGRTSIGHQITHRMKPRETEETPWGKDRTHRPENKTPSRTAQTNTRQKPQSWHTGQPQNAAHQHNTRNTPTRPQTRGVTTRTPSSTTRMRLRTQTTETQTHQEKRKQTIPQENTQSAQDTNSPENSTTHRPQHNTCEPRQRRAGKDNHAEQQRRQVNARDQTRKPKDDEKKGETHGENDRKQGSYQRREATQEEQTQRRRKRSGNKQQTGDKTERHTQETERETTRHNKT

SEQ ID NO: 995787 - protein, 227 aa, Homo sapiens
MASKGPSASASPENSSAGGPSVCSSTGAGAERRAGQDLSSATSAWTQHKDADHQPVWPPLLLADVYISGWRPDLTDRCVLLAKLAISRDKVITTIYGRGSTGATGPQRERTHPSILKDRGQRQENRGGSPTALELRRRDAKTTKDDVGATERQLIPLQGNNYRAKTYQNKHMNKKQDTHNQNEPTQTTPDIERTKDTTNPRRNRDSGAPHWPTNPTPRRPTDGNKAK

SEQ ID NO: 995788 - protein, 561 aa, Homo sapiens
RHFFVTPLRHESQRGVKKRMRRLKRNNDETMSADGPMYNPLRLICTVDVPHGRTTHMDTARPHGDCLVHTLMGPVNCYLVVDDLISNWNRDTSLDPSDSTESHILRTPHIDVIREECPMYESYWPMEPDDHTWTYLLDDINTDRARRVNTPIINYNSHIISGHDTSSLHTHISRQTHNKANARTHRGQTKGQNDTPQTGQRKRQQAEETKPKETEKKTKHKGEHNHRQQKNPEETKTSTKRREKYKKQHYTQKETETKNKETQNKEKERRKNKEQSTQRRDAEKDSSKQRVSETNTKTLRENNHAQNPDSKENTTQKQPRPNKKETNKQTKTSKQDRQTRPETTEQGKDAKKERENRHERSEGAKRQGRRQDNRRPVAGEQRTGRRRRERETENEHPEQRDEEERETEEMRRRAEVKREGSREEEQEEAERRDREAERHRKKTVEQAQEEARRSKARRRREKKDEPAERKQGVEKERDKAREDGRARESRQGYEEKKENKQTEERRKEEEDAKDAEDDGNAHEGGRETEESRTQERRKTTETNTSRSQHREREGRSSEGTD

SEQ ID NO: 995789 - protein, 160 aa, Homo sapiens
PFRVLKGELELARNDMIIVSRTCIMNRQGEDLEYVSKTEDGLAGRDARRKGMYTDPAQRMKGARKRATHDRWRYGLMQRKETPGHGMRLVTPAESEAMLSAYLDSMNGIDDAGGPAEVTRGSPLGLRHAHHTQQRPALSPEYTGCDTNLTGRHAATARIA

SEQ ID NO: 995790 - protein, 199 aa, Homo sapiens
RQQPFRQFLCWAYVKMAASVLNTVLRRLPMLSLFLRFSQSSGSPHRLFAPKLPLREDSLFLSFPFLLISDEPWKYLESEEYQERYGSRPVWADYRRNHKGGVPPQRTRKTCIRRGHKVAWESHDPICQRSHGCIVDFRNRDSSLRATLVCRPQRVSSSMLHTRGSLCEGSTTRLTQCHPVKPGIMVSSFTTSPRLNHGT

SEQ ID NO: 995791 - protein, 94 aa, Homo sapiens
MTAETENDAEKKDESEEKKTEEKQAEQKPRRREPKQSESREQRRDEGSNHSGIGARENKEKGEAKSKQHARRSDDAKKDQHEDRARRQRTADTR

SEQ ID NO: 995792 - protein, 69 aa, Homo sapiens
RVLIRNLILPPNLNRLANNAPDSDTDCRVREPVTVSKESGLIVYIQAEVVRATIARNTKETHASEKVTN

SEQ ID NO: 995793 - protein, 372 aa, Homo sapiens
GLLPPVGSLLVPWAAGHGRGLRCGWLGCAAWRTMVPWGEAATSPAEETVVWSPEVEVCLFHAMLGHKPVGVNRHFHMICIRDNVHATNTRGAHGPIQRLTLALNHLTHQCTDTARPPALSLDHSSIPESTRGTPSLPATRLISGRSARQAPRSTALPRRTTHTRRDPRTRPTRHPPTSAPPATPFTTSITHTHATTPPHHPLHPHHHHTTHPHTPTTPHTHDPTNTRNTATPNPNAPPPRTHTTTHTPTPQTTHTPPRRRHTHRQATTRNKPAHEPRTNNANAHPRAPPQPTHPPPPHTTPATPTDSVHPRAGNHPPDATHTPTTPPPTPNQPTPAPHPHTPPPPHPPTNRTPTPPHPPHLPTHRLPPPHPQ

SEQ ID NO: 995794 - protein, 80 aa, Homo sapiens
TKSCDRNPIADGAGFAIKEEERCGGRLETGYGMHGSSSKATGVCRSIRTADSVHYCIRPENDHTSMLTHDCGSMSDAELA

SEQ ID NO: 995795 - protein, 467 aa, Homo sapiens
GAAAPPSLADLPWRLGLAMWRREWDPSDAPASPGLRQCARSVPPSPWRRRRLLRGAPRTGEALVAWIPMPRTMGHTCGAASLQSASRTPHTRVRRPRLAACEPAPPARRADHGRRAPPSPAKHTHTRAGRSSSHYPPQHAPQPPLTETSLDQPLPDQPDSSKHHVPPPTLLHITNPWHLPQAHTADNALNSRDCPHTDNPIPQATSTPTEAGMRTHPTPPPCTGTPTPPRTQQLTHARVRTNPVQPPPLLVAFWHPGYSPPLAITPPCEQATVFLTGRRSPGHRQHAPILCALYDVGWQEAPRVKADSDHVAHPLMPLCPVHTDNLAATPQGPIAVSPRAKPHPTATGQHERRSPSLTRPRGTRPTHDKATPLLPTIGHSHTYHDVPHHPTHDLHHSPPTPKEYLPHTPAPQSPYNHRTLPLTPPLVPTVKQPTKPTNHPPPHTPTTQHLNPNSSITPTPPTLPPPT

SEQ ID NO: 995796 - protein, 58 aa, Homo sapiens
MGWGAWERAERRSEEKRLSSQLGPFTLGLHGIELQYNFGLKWKAGIYRRIETNRDKNA

SEQ ID NO: 995797 - protein, 77 aa, Homo sapiens
MRLWNRVHTEQSVPLVRYHDGPAAQHGFGPTAIPHELERDLPSPGKPTGDTEVAHSILGDCLEHHFFHEQHTSSHKE

SEQ ID NO: 995798 - protein, 377 aa, Homo sapiens
ENLPDIAVMDIRVMDDAAIDNGKRCMIRVEDDDADNLQESLSAELDAASRGGPRTSFRSSFRNMQPHTDHSTHHYTQHTLTTTIRPTPTTTGHTARDNTQNPTNNEQHTRTVTDRATQATVSTPVTRHDTVTRSTQPTTPSHHGTTPHAQRGPTNNTTPSPQEHSKDPNITEQAGTQNTTNEVRQQHNKYKRHTQTPNTHHDEPHSTDHTKATNKPPDTRHAARPTRARTRQDKPQHTGTTKQRHNTGTTHPRSHAATPSNDQSSQPPKDTEPAQTPNTTTAQNPHTPHTQHATQTTHTNTTGNRPTDRSRERDRHTTPQRASEQTNENEARRERNTTSPRDRRKRKTHTEQEQGGASNDNRSQEGIGTKKEHKEEK

SEQ ID NO: 995799 - protein, 193 aa, Homo sapiens
VTGEGRLCAVRVQSSGPAVMESHLSPALVCGYPLCPSCERICPKSVAGFGHWLMMMQGGPWRGKGTAQAAEGYWGVATYTPARSSLLGHCAQPCRALPQVERRSAPLWDESMKRMYVHHLISAFSASSHQCLLCVRSGDVERPGTASVGMGCGSMRMAGVEHGLPLARDGLSAVIRLSQGSPMFHHEEVQFCL

SEQ ID NO: 995800 - protein, 291 aa, Homo sapiens
  misc_feature (97)..(97): Xaa can be any naturally occurring amino acid
PSPGGQMSGRSPTRGALQVAVNGKARKEAVLDCWLRNFLKFSGNSESLSLSSAVAECTGTALLQAGVQLNFRGYLQEHGTIKPESRYFMTRNSSTTXSAYSRVGGQVRFLASGIQLVTQGATSTEHVACSPGETVGSRRQAYGGAVRVKVGVEDLMVGGIWSTWCDRDLSLAETASVVYVPIPQVGVEQLACVHVERTILRIRELAIHLQRNINENFGPNTEMHLVPILCHSIQEELEKGTPEPGALNAVGERHNSVLMSCSVPIWGLSPGTRGIGALPGETQACGVGWGQ

SEQ ID NO: 995801 - protein, 62 aa, Homo sapiens
MHDKRARGVLGSIEGEHTRSGGRTCLGDFVRTTVIRRRDKRKGTAPFHMTCRTRKEDHQKKR

SEQ ID NO: 995802 - protein, 186 aa, Homo sapiens
ILVSPWAAPRPLLPVCKNKPYPKSRFCRGVPDAKIRILDWRRKKAKVDEFPLCGHSGVRLNMTQLVLLKPWRLTEFVPSNYMVQSCGKDGFHIRVRFQPRSTVIRINKMFPVLRLTGSKEACKVPLEKPQGDCGQGSHWQVIMCIRTKTAVTRSTVIEALRRASSSFWRQKIQISENGGASPHVQC

SEQ ID NO: 995803 - protein, 320 aa, Homo sapiens
  misc_feature (49)..(49): Xaa can be any naturally occurring amino acid
MAFKTQEVHTFMYLGVATSYRGEGCVGSIAAHKALGRIGSAAGPHHVFXTAPSPPGENNKDLKRDVSPCTEPKIPQIGGAGGVCMTLAWGGLLQMISGPRGCWGVFPRYEASGAPLGALELPVRDSGVTPQDVCWARGGLSIVSHETWWGRPPVGRGGPFLVLWGEAHPLNSKDTWWRKRSGPQRGTFDYPTAGKYFSHREKTDIVRRPPSGIVNQPGRGETITTSFGAVVRRTTNSRAVNKGEKLFAKEGGQNYMRRPQKQGFMKNNQRDKPALIAVLLYTHKETGHSVKSNLFLGGHHSMNVVVFDTTYALFFVPTEL

SEQ ID NO: 995804 - protein, 63 aa, Homo sapiens
RAQSLRLCRFDDPSTPGRQVTSGMMISPGSSSTEGSGLVARAGFVGLTMLLPGSGFHLHSWGA

SEQ ID NO: 995805 - protein, 130 aa, Homo sapiens
  misc_feature (1)..(1): Xaa can be any naturally occurring amino acid
XSLSSANQGVVVRLELAVMLGLVRIFDTVPTLARDLLLAFTEGSPGGEATLVSHRVTGVVVAQISCASIPMGDVALHQVYGDAPSSIPIDPLAVLSNDGDLGVRRMDVSRHLFGAEKQPSWVRATKVGYG

SEQ ID NO: 995806 - protein, 97 aa, Homo sapiens
MVLSSHPSSSEVREALDLMPCRHVPQWKEQFPSGTCTRRWSRPRAVLEKQTQVYSKLSTGGGYPVGLMSDLELTSESPWGKFSGVVRDWLTAENTRG

SEQ ID NO: 995807 - protein, 367 aa, Homo sapiens
GLDAADVGEWRGRKMMRGRGVPGAWWGSPCAVLPTAPKKCLARVPSCGARWVAGRGCRRPRWCPVTLQLAWSVRPSPSAAVPWWARLELPPVGHFLNRRCALSSVVHRTCCSYLASRVRAYSSRGAGLLLLHGARWTVRACCTPLVGYGGLTAPASCLCPHTARRKGLATLCRRPVIAVPAVHSPSSSGPVPGLVGASTARVGLALLLSLLGRSSVIFQVMAGPPAQILPLQASFRGDSEPKDQWSKVELHRDSTVLRYTRMVGQESTGVRAPPGFLVHAEKGSGSKELEAQPRRAFKAATVDKGLRAALGEVPPVVPRKTCIRSHRKKVATEPAVRTWVYTPLWEPQGKVAPETRICGGRHGATHT

SEQ ID NO: 995808 - protein, 68 aa, Homo sapiens
GKMADDKDSLPESLRTWHFSRSQLEQPCSGDVRKHEVEQVEVGHGMASTVVPPRCSQWDSWLVYVGGP

SEQ ID NO: 995809 - protein, 284 aa, Homo sapiens
GRVEKFDLVPAAHQPLWRLLHGGDAYVILNDSAAVTERNSADMTSTTGLGNECTPEMRAGRRVQSLYAVSGWYDVTMNWSGSCSTGVGPRAFESGLPFPRLTSRSGPEDDKKGGVCIKDSTHVDTLDEVGGAETLFQVIRAAVLVRCHPYGTVLVLRKKPSKQVADLLLIPGLWANNDPTRLDVGFRTGNRYENDWKGHHRCPQGQSGTVGAVVARGPDVHVSEEGSESRGRMLLVLVPQAGSAAGSVDIRKEDAATGAGKLYKVSMVAGTMSVSLVVMRNLPR

SEQ ID NO: 995810 - protein, 102 aa, Homo sapiens
  misc_feature (91)..(91): Xaa can be any naturally occurring amino acid
VDYLLTANKRLVQTQLVVPLGRVGPYNAEVKGGNPAWEAEEERRRKRRDGTAETEWSEKDGTTCAAEGKDHLHIIETHEDCGRLDCKQFTXAPKTSDYALCY

SEQ ID NO: 995811 - protein, 434 aa, Homo sapiens
CEELTVFMGLKPGVRGSGGPRCYLVNFLLQRSSRPVSGSLMSWFLLPGKGIYGYISIPLSPPGWAGHWPGNYHRHNLLETPGRPQDRANLILWWSLQDGKRPWRGTQRTTHTRLYYLGSARGPGGIRRTTRLCERRGSQKGVPGALRPGIYGEGARTYTYGNGFPGQEKEVAGWGGGPLENGALWGALRGRQGVGRVYPHRRFERRNEKGPTCEHDRQLGMNLGKQNMRHTENMAYDAPSNNREVIKETTKQHYSRRHPTRETTDGSKKPHNAGPAQGRGHQGKEWALKKTKQKSNPGTPVRHHRAQNHTLRGTRSIRADDRKEQQHRVRKEYSRARQTENEEILRQRIQEETHIYMHKHKTEADKERRPTQTGKRRETDRRRKRNRDQEHNHEPKGSDEHTGGGPAKKTKRGMEKGDGPRRDNPRRRERETRE

SEQ ID NO: 995812 - protein, 174 aa, Homo sapiens
MCVTASFLLLKHSVAILTREKRFLTSHGYLNTRYYSAWIQGSMRIVRSGRRLQRETALEGSTDTRNWVVHSKSEGGSQYGGYSPSHTRYAGPWVHFTPIGIGASSWCGRRRTLLLVDRLPPLKEAIPFLGRNTSAGMHSTRTPRPRQLSHRNWRANRNEGDGDAYKLSPVTQRN

SEQ ID NO: 995813 - protein, 363 aa, Homo sapiens
LEEFVLQSGAVWDDSPEDLTAAYGSILEAIKPMGLFPCDSTTEDLRIRFSDLEIGRWSVRTKHIRKIADPGPPVSSIRVLESRWPTRARLDSHGLCLDLGSLTLRDGLKDSRRRRASREKNTQARHHWRGLPVRTDPHEGQAPPSHRNPGTQEARQTWASENGETEAEGKPDDPMQEDRAPRTQIWTTAYGARLLKNGAGSHRTHLTEPRLSEDNRLQREPAKGTTKKGCQEKFKIPQGPRSTSCSRTKAADIPRGGSLKNPQKVTHEEDHAKLDNHLPRAAKGTRGPVKVDRITTRPDTEANEAVKHWDIILGLRRGMKEGTRGYQNMNHTSVQHVGNTIKEQKRRVENNTTYGTTKDAIYQ

SEQ ID NO: 995814 - protein, 276 aa, Homo sapiens
CCAPGSLDGKKGWAVPVPVPIWNPNVCAADPSQVEMSAGRSVPGGCPMTTRHLLHWMTGSERHTGFHLHVLRSGKLGQYIRLVEPWLAVPRQAGHAGEGTGLVEVNGENVEQENHQQVVRPPPRPPLNAVHACWRSNTEHGREQLQTSSASRIREELSETPRKRTGQADSRRPSTDPRGANGGLATDHTEPIADGPHNAAHTNHSAKLPDHGTRTHDTKGPTRRDSIGALQAGTHRDKHHQGHGTRAKPEAKMGAKNTPQHRLAYRGVRAPHGITN

SEQ ID NO: 995815 - protein, 155 aa, Homo sapiens
MQLQFLKLEKQEQKGKWPVHKFHFQPQDINSPRTRKNQEEKPQIHLTDIDLNVDVFRESSYYVGRCSHSADETPRSEGYVAQDTKCKQSDPRQLQPKRIRQVLRFRQMDPTANTQTGKEKGTRHKSTREEQTREKEARHPMAEKGQREKGEAHDR

SEQ ID NO: 995816 - protein, 271 aa, Homo sapiens
MIDENIRPTFKELANEFTRMARDPPRYLVIKRESGPGIAPGPEPHGLTNQEAQQDSQQLAASTLRPRPQPWHSQRRHNLAKPPHLGSARQPTSMEHYNRPRGSQSLIQVHHLEYMPMNHRVIYGELYARRSADSLETQMNGAPPIQSHLHTNATGMPGIRVIRGAMYTGSAAELQEQQCPCVEAGSQEPEPTDNAEISAIHIPSATVWMTPDNPNLPKPGIRGQEDVKRNIVNGHESTSLEGYIPFLRRDRHPLSIDGVSVLVLSNEERGS

SEQ ID NO: 995817 - protein, 250 aa, Homo sapiens
MHDIQQCVVPRTVARYSPCGQVRAHIVPSGPGGSTHNCTSAGRMVDSRDWATSLRWIHRTTKMERLHWSSALAFHHAIYTTRADDDPTTRYTDHTCTGYPDLEVSTPKHKTLGTVPVTQIPAMGKRAPKRGSRDQRHLEHTGPKIEEPRTPKSPTMGINTYRTAEARPSPRRAQEPHLGNTFTFPEEDSSEEGKRAKLKQPFAVPRDITSSRWSPKSLGQVRAWSKDPTTGPMCEYTQRKTGGVLHKVEK

SEQ ID NO: 995818 - protein, 416 aa, Homo sapiens
MERPQENRKDDTESTHVWYNSRREEQHKNESQITYPRPRGYTARGLNERENGAHTKSSTQSDSRREDTTSRNPRHRETHDGETQSTTKKNTERRDNTIQTYTTQEVDDDRKKARAEDTMQKRRRRNGDHKEWTKQSYNTEDDEHNKSGGEQHTPKREIAGRSEAHTQNEKREAVVTNKKQKNKPVGAGACDGQPNTGGGHTSDKCPHPQRKKKEQTTKNHTDTERYQSDTNTPYHNPTHDRTDNNHTNHTQHKKKHKSTADKKDEQQHQKKPDNRTRRQEGSKTGNQNTKQTTERTTTTTEHKRAGQHIQVRDTATTTTRERGAARQNHAPTREEELDGVSITQPRGGGEKQTTHIRDRQEDRPHTINETEQETKQRDERKSKRYEGEDKRTHRKEENHRPEDTTSRSTDTNRKTK

SEQ ID NO: 995819 - protein, 206 aa, Homo sapiens
GDKHHLDCEGQDPVFCSEQADDAEERAERLQASKLKGERRAREQAEAEVASLNREIQLVDRRAGPTLRRRLGHRPCKSWKKLKKLLMRVQRGSEGSYEIPSLEEMKKRWNSREIQGRKQRYRQQSPERRQTQERIERQGGQSGRTCGEESNTETGTQLQSTTPRKERKPQAEHARRSTIPRQREATQGMKPDMKNVHETQKARKSA

SEQ ID NO: 995820 - protein, 144 aa, Homo sapiens
  misc_feature (39)..(39): Xaa can be any naturally occurring amino acid
MFARCLLPDAWCSTEDMRFGVTLLGELHWDAGATVTRHXSVKTRSALSSGQHWKVATGHHGGEIAGNKGTERCPQPVRLTITARSQGPAEHAGNPDGPLRETATHRAWSAEGKIRRKKQGGHGIVARGLTAKPTTGEEPKGPLG

SEQ ID NO: 995821 - protein, 44 aa, Homo sapiens
  misc_feature (2)..(2): Xaa can be any naturally occurring amino acid
MXRWREELCSLLTIWHRELPPAFRELEPTVNSPGRLLVNIPKQD

SEQ ID NO: 995822 - protein, 163 aa, Homo sapiens
AEVGCRAQVGWEREDGELLSEEPKRQKSEGGGAVKLLRYSRENQMTNILAEDKRARNCVMNLVKKFKSRSIMLVAHTHRIAIKRWRQWMSSTRPRQMQTTFFGCIGIDKFGEILKETKLLEGHVDAHYYETEDEQPDRNLCCGCITGWTDRSLIAISRLLPNC

SEQ ID NO: 995823 - protein, 485 aa, Homo sapiens
GAFPCRTEPQGPPSARHCAPSPRTLALRLLAHPPTFHTRHLATPRALAPHCCASTHAPAPAHSTPAQHRYTRPANAQRRRPHFAFRRPPPPRGSPLPAPIAAACPPTALSATQHPTLLAPAPAPLRLSSPCPRDASTGLAPRALSTTPTRLAPPDPLRAILLAAQSRRARAATPKPPNRHASPLPTGPNRLATPAPCHAEATPSLPQPFTSLPFPPTANGPSRPPPKQTGHDQASLPLHTNLENLGPTPSLDPAPRAHLTRLPRHRSLLNPHGPTHASEAHPPRKRNEHTRKLSQQAPSRPELLPLIAPPGCPTRPRASSRAPTRPKTQKPNGQPRHTPPALLDPRTPIHSPLPGGNCRTPPPHPPPPPPPPPPPTPPTPPPPPLPPRPHTHPPPPRPPPHPPPPPPPPPTTPATPARPPPPRPLSPPHEAVPPPPPPTHHPPPHPNPPPPTPTPTTPPHNPPTPPTRPPTTPPSPTATTPPPTT

SEQ ID NO: 995824 - protein, 147 aa, Homo sapiens
MDRIYSMFRERNVNLPCSFEHPSSVIDLLVRPNERSIQDVSLSTTEECPSPTRSALRLISLRRYRRLRMREYRVRQSVGDLARAEVGLGPRPLASHQDPFVSCVVARPGPRDIRMSGPSIDSSVCLSNKPLVKARLVGQDEFAWNRE

SEQ ID NO: 995825 - protein, 85 aa, Homo sapiens
  misc_feature (62)..(62): Xaa can be any naturally occurring amino acid
FNSYILSLRLTYYAYVIVRAVTVAAYVRTVLAAYRPPCSTDARMLRGQAPSLTISERSYVSXTCTEAHLLRSPSHAWRLRIREFL

SEQ ID NO: 995826 - protein, 71 aa, Homo sapiens
LTSTIGGRQEQGAVYEEGGIEHGSQEESGVISIFLQKDWYDVNSVLLMFKYKTILDMGLLVTRDPGNQNWI

SEQ ID NO: 995827 - protein, 166 aa, Homo sapiens
MCERWPAVLGCIICRSHSHVQLPLNFRVERPRSQSSPLREVLKLVSSLAERPGHCEWHVFPGGLQGRTSRACLDRASMESMLGAVILVSWTMVRLEWVLRAQEADAWGHLTALHLRQFPCCSTVGVQVLIPDLQLRSKYTESPSLDAMNETLSSYCVIVSGDCDLW

SEQ ID NO: 995828 - protein, 246 aa, Homo sapiens
  misc_feature (138)..(138): Xaa can be any naturally occurring amino acid
MTVGHDWSDIVTVRIPPLKSTLAHSPDPRPSIRYFSRPDLPSHLHSDREQGELIAQIGDAWVAKVVVFDASPKGILQCCLRYLHLAHAMATRISDIGYLSAKAPWHLSTIRLSYHGARLLAVGEPFNFAQTNCCPKSXNTWMPSVKSVVAVQLRGRVSPNIRTLEFARAEMSSMSPNLAPLMECKEFLNAAQTKSPIFSTVLPVCPSEAVTNPRAFYVSPSENYLFRSVPLVPGQIVPRKGDASGN

SEQ ID NO: 995829 - protein, 131 aa, Homo sapiens
TGRGCRFRGQRPGAIKCPGNDPGPPARAPAPVARRAIARKPLRPDSLIIYRQKCEFVRGSGADGPRASLVKKLFQGRVKDKAPVPRTGDEGKAGNPETVPTTPGRAVDPGKPGEPKAQAAVREASSVRPGP

SEQ ID NO: 995830 - protein, 388 aa, Homo sapiens
KKPTQILIPTLDSGFIVMKHMTDARWHTYLELTHGRTATRSFDEQLLELFEFGGPEVLKLRSDIAVPIPKDHQVLIKVHACGVNPVETYIRIWYLYRKPLLPYTPGLRCGWGDRSCRTINAICLQDKVTETKLAARSLRGIMQSMLYAARTHCNKLAEKLDILHTELDNRHTIYILHNEASDTTVPDVKAGASDRDKGRSAQTHGNTTMTQQHTHTGTTRLKATQDSSTPDENGTQQRPDRPTTRTQERRKTRSKRKTIEYTKQRQEGEERKQSERNGKGTAKRKHTTRGTGRQQAKEEDQENGRAAAKRPGRKKEKETARHRKRAQQGRQQHKRTEERNRNRDERQEKRDTRKKSGNTPTKEMRGKETDGEQKTAAEGRNEKEREEE

SEQ ID NO: 995831 - protein, 42 aa, Homo sapiens
MRIGVVNLKPQEKDVAKNLQRLTRIAKEHKKEETKEAKKKRQ

SEQ ID NO: 995832 - protein, 407 aa, Homo sapiens
QNEIKNLCFYLTHGGQLGKSQSHGFPGGSGGGVSWGALYSLSQSRRHWRNFIALNCAAHVRTRGVPEKTTHVGGGSTKTTTIDYTLLIECVTEETPYSCRETPLDRQARFDKKRDSSFDDLERYLSHKSTEGERDSLQSAYAKAGYKARVIVSPREEEELANEGALAVTQHTGVAKQRQTREETLTPWGKNTLVEGTHHQSAPGRKCGGHTQDEKERGAKLSTAVGEEQLEKKHLHYKQRNPQEGTTPGEQTNRKSRREGKNIAQPTTEHNRNETDNNNTHHDEEKKTNNNPHREEPPTPTERTTPPLQARRDQQQNDEQAQHGGTHPNDDESNTTSRAETHHTEPHPPNVRDKLEKQTEEHTQEEPTHKQNQRRETHPLKGRHTRSHTNLEKRNAEKNNSHNTTRG

SEQ ID NO: 995833 - protein, 332 aa, Homo sapiens
GGALYGRMTPRPTVWLPGPDIRRRPPYSISGPATIRMSGKVQGYSWLPGERPARVHASRSHVEGAGAPRLRRSRHLASRELRISRGESSGGLAQGRSRWVRQCSLGGTNGPATGRASTLRLGSADLSRTPPTRKVQHPHAGTRGPSERTTSKTFCALARPWQDYFRIINPTPTKGKVLLQTEIATGHKTAGVIEPDTDGEIYHLCSFETLIIFELDTIVRDPKGHRCQIPIKPKNRAARKLRCKQATWNLKQSKLERGKTTAFGEDSPRGSRDAFCDARIKQEPGGTTGPHLNPKSGRLTISHWDDANHSKTEKGKRFPQLVGNKKRRSTQK

SEQ ID NO: 995834 - protein, 138 aa, Homo sapiens
MSDINHAGSDLIFELEDRPPFHQALVGAITHLLAIFVPMVTPALIVGAALQLSAETTAYLVSMAMIASGIGTWLQVNRYGIVGSGLLSIQSVNFSFVTVMIALGSSMKSDGFHEELIMSSLLGVSFVGAFLVVGSSFI

SEQ ID NO: 995835 - protein, 32 aa, Homo sapiens
MPQRHPHLTKDDVNKNIPDTKTNTHNTTHRPH

SEQ ID NO: 995836 - protein, 207 aa, Homo sapiens
MSKTSWAFRTYNGGIHCSRTLGDNRGISRRLGHYFTKTTFDLNRPTRKGHIVNSYVNPNSNQLWCQGVLDPHCSETMLTVLPRLARRKPGCEAASHPVPKNWLRPTQTTEQRPRADHEQWHTKKGQTLERKRPRTQSTPASLQRLSTTHGGGHWSAEPDMRGDRPALKHNLTIDEQTRAITRLTRTPATLRHEPSHSLTRHKHYTNR

SEQ ID NO: 995837 - protein, 175 aa, Homo sapiens
MADMCEGYSCVLRFGRTAQSTLRVHLREFSSGYQAWPLYSLCVYCLSRSSVFGDSCSTMRAYYSIDLWPQGPWILTDATWIVHLYTWRGPLYSSEVLKAQFRAPVFPDLFHNTCILGEYPTHGPLATEKSSVMMSCEYEMRLEEYTRAVVNISTRLEPLVGLAITPKGSVWNASA

SEQ ID NO: 995838 - protein, 303 aa, Homo sapiens
AAPARRWPDGGEPDRCLSGLLRPAVGAASSPWLRHQPGASVWWCPGVPLVCMAHPVSAAWADWPHHPCHWDGVRGEGREEPTADEQGLPTSVAGRPGGHCGGSLLACQRNSEKGSRKKLLDIILLILERKPQLHYYQGYHDIVVTLSAGGRREAGNIPGRNLIYPPPPGITSDPTMANTKHICAYLMPIIDQVTPELHDFMQSAAVLDHLRPYSWVINLVTGHVLSEYQHVERINDYILDLATPCVLRAISTSAGAVRVGGRTSGARRRRSTVEHCGRCRNGGTSASRPNLGWSQGIPIRRSI

SEQ ID NO: 995839 - protein, 134 aa, Homo sapiens
MVETQTITVRDRRLKGMNTEGINPPIMEDNWANLGSWMKNSEDELKSQCTEAAGPGGQGTQGPRDAPGTPAVEHNEDRQDERICDRERISDELAEIERATQVEDVQKEEPAQRYTTTLEERFTQNQETVRRGYG

SEQ ID NO: 995840 - protein, 106 aa, Homo sapiens
MTRPRTHKTTKTAPQPQTPPKHPPGTPARARTPRAGTRPKPPRHHRAENNPADPNPGDRGEAAQGGTRKTRCGRHKPTAPRTSDKQNATDATAHKHTNTHGEQTRR

SEQ ID NO: 995841 - protein, 76 aa, Homo sapiens
SQNTACCENYPLRAKRGTGKALISTLSSIGQHRCEQVHPGTGHSESIESAVASSKMNPFAHDIVKHRRGLTEYCGR

SEQ ID NO: 995842 - protein, 433 aa, Homo sapiens
ALPTSLLRGNETGEWGSCCGANSSPLHRERSLRHICDLSSSWRQADLAAGERAPEEAQLEVRFYALSLSFRGLELPERTGNQRSSRIRQSHIPLRAQPHKFIQGTALRLLCLGWYSPWCPRSSTAQVVTVKDRIRSLQCITASRTTEESERSRLGTSSCLLKYAQCGKKWSARSTFPCNLPASHHVTNLANEWHLERLTAKVQRGDPTYTRHRRTPWRLGRTASAAMLNDPGYVLVYDDAIRGCEDVSNGENKRTQGQKMKAQKDRRNETCRRREERKAREAGQNKDTGPKPLDPCEPPASHPQPSQGETHNAKRARNKNTPWEHSTNVRWTQPDPNQPHINPGSTPKATQRMTIHHAPKSSRRTEPTSAQVEADKHTTQPKVEPAGNNTHTHTRQTQTDDATNTAQERHNKQENKNNKDNKHQEKATREDTP

SEQ ID NO: 995843 - protein, 120 aa, Homo sapiens
MGSTGKITRGYVSGSQDINGSYKPRSQSEQAVLNFPGDRLHGEWALYLCVTVPEGENVRLQGQYRDIDDVSVIGVVTTPLIVEISEPIEVMSQQYLRLVGDVIIAPSEGGALKSSVNEAL

SEQ ID NO: 995844 - protein, 185 aa, Homo sapiens
MRENTREGEKKEEVTRTLMWGERGTQRDLGPREAYNHHPHTHPTRETQESHRGRGDTKDTRAPHKQIWGYPPHATGQPPRWGPTMTHKKKRKDRGSNTRRERHKRREQEKTIRGDQQESTDTKERDHPPQSRGEHQGATIHEERKKQQERERETRRTRRRKKHTASHDHPEPQERGKTKEGETAR

SEQ ID NO: 995845 - protein, 154 aa, Homo sapiens
MLALAAVPMVGLLSVPGSVPVASPRPRLQQGLLDDPSSSSSSGNPLVYLDVDANGKPLRRVVLELKADVVPKTAENYRALCTGDEGLTATKGSTFHRVIPSFMCQAGDFTKHNGTRREVPYYGSRFPDEKLYTEAREGQVSCPWLIAGPKNKGH

SEQ ID NO: 995846 - protein, 207 aa, Homo sapiens
PSLAEMIQKGEQLFLEPELVIPARDSTRCLHGPHYSLGSFLITHGRTMLLTDASFKVKSQRRQLLEGQDCKYTTDVWARGPLRLSPDASLSVITAGANDSSQVPSPSSVRRARLDHSFLSWLGFSSMDTNGSYTAKDLDEMGQDSVRKTDEYLEKALEYLRQIFRAQRSAASGSSHSPWAPGQDENGKERIPDCIVGEDGLILTPLG

SEQ ID NO: 995847 - protein, 94 aa, Homo sapiens
FILYYHREDMEEDQEHTYRVVRFEVIPQSIRLEDLKADEKSSCALPEGANSSPQINGHPNEGESSHVLRATLSTGRKVISRSGPLAWDTYLTHE

SEQ ID NO: 995848 - protein, 363 aa, Homo sapiens
ASSHQEYESIEAWAAVHVGELKPGGEQAHEPVCECHRLRPLSSHCLTLYRWRPRRSDYDPTAKLASDGYRKQNALHRAWQVPLPRRPWDDVLGGWCGNSCNWATVCHDDTSWRRSPWVPNVIQSLARPWVPEDLWTYAEVTPVGQGWNWQIHVGSQASCTFRQRSWLPSEKTASCVYVHQVIGLAKNLGVSVKVGYGPYLACPNDRVKGLEPPKKHGPLGVVTLQPRGAGAAPGLVLRGLMAMSERTTHTKKEEELLRHGTCNAAHEDLVGGTAGPGGDPQKALAEVTRQGDTGTAARRANPKGPGHTGEVAPAETAGNQRQVGKAPPTRHRGLATSRGAPGRAQTEEAGNTETGGAHTRTQA

SEQ ID NO: 995849 - protein, 192 aa, Homo sapiens
QVHVCSCRQPPVLAVDYRGMKECRALLVYADFLDGRGYTGVGPAGLELTGSLVIWPAMEASPRVLGLAGDAGPLRHLRALMCILTLTCFVDSFQRSCTLPLRFRPDRKALYPYFPSCACLESLCEFLNGDLAFSCMSISGETEVNHSMLDLVLSDITGTLEGDQGSLFCISLGKECGLISACESLAVPYRKD

SEQ ID NO: 995850 - protein, 539 aa, Homo sapiens
MTSIIDAYNIDRRMNYTRQNDETHRDDQVTQGDNTNNPCEAPGVCTETDAIKDNETTLTRLNNTQTREEQTTQRQKKRAANKQNQRNQMDKANTETQPSTEQPNNEEIETEYTQLRPHKHTTTNNKRQPNNYRTPKQQKEKDTKRKNIDKEDRRQTRKRQQQIERNITHRSTGTEQDSRRPQPAAKANHTEETQHTKHTERKHNTIEHNNIVDAYTNSATNEGSQSNAQTAPPQTTRKRSSATDRPQTDKRDKDTTMRSRQTYTTTATDQQKEEPHNTSEANTYEGDNTTRSTGNTTRTKQKTNTPRTTQQTTNKQQQRPKQRQTRQEDKIQRTHNTLTGKRKDKRTEETRKNQNEQTEPQHDNRDQNKQHHEREGDTMNRAPVSNATEQHERSRNHQNAERPETQTSLQAEGNNRTRRREPTRTRHATRDRLARSRRTQRTRQRGERNTHRRNASGGEQNKPKRTTKQRTRRREKDDEERTDEQREEDNDTGRQTHSRRRGEKTTSSTGRANEERRRRRRTAKHPIDTPVQRHSDSER

SEQ ID NO: 995851 - protein, 268 aa, Homo sapiens
MYYTIFSVAWYRRHQCKWSPIARTCNAAVSSQMVAWYVPLARLHQSRGRLTRPARSTNRAGDMSARADTQRCERAGTTNNTRLQHNYTTPPPRETATYYRREMNEVATTNVRAKTHDRRAQPYRRTSWRRTLKPGRDGAYPPPARPNNYTHTARADNHHSTDPGTTPRQTRAPQHHATLRHDHDSASTAPHHSQQAGPHAHTHTNTRATDKGRTNTPYRAGSNHQRVSTRTASTPTDAARQGPTHAAEHSRRTSHQPDNAARPTAPPP

SEQ ID NO: 995852 - protein, 295 aa, Homo sapiens
MIIADHTSWEIMITSSHHEIQIYECHLAMHIENDDYHATDAMLTTEPYPCRTHSVGRRNPTYKPTDNRVSIRGTLETHITGEQIKYSTDCTTLVLSTYYYELTRLTHFPTRLNTYFADYATHTLEHELASRTPHDPWPNVPQTRASLTKDELRGDRRSHTLSLDLKPQYRTGHKRDKNKDEDDRGTRAMSRRSRKPADWGPQRATRGMADRKRKKATDTQTKATPHRGHGPQERSNDIGAHERHTNHTDRHGHWRNNGRLEAISNNPNPGETRTSIEHHHGQAKHRHDRKHTLTM

SEQ ID NO: 995853 - protein, 180 aa, Homo sapiens
PHICARVPLGDFSRAHFIIPNTSRATVSPDLAWSRAMVLSDADVRKLMQHVMAFIEQEAIEKAEENRMRRQIERVQSERKGRVVEEPDRLEDEWNVMMRTEKRKVVELRNENSECPSVTECKRRVKGPQEQEMSFIDRPTKLRQSRDSAKVVQDEQAGTKVLLDGAGFSRGSGSVVERPK

SEQ ID NO: 995854 - protein, 122 aa, Homo sapiens
MHCSVDLPGPGGRRCLLMTNVGCNNGSVSSVFVLSPSPSAFLFVHHAGVLATALRCGESVCWWRAGDSLVYQRVRLHQFCLLCITIARVPGPSITRPQTLCRMPSASGSGLDFFLSPVLAIP

SEQ ID NO: 995855 - protein, 528 aa, Homo sapiens
IACPRPELVAGPPATSEIAMLYFSFVFGAGSEPLQRCGQLVRMAIRCSAQQRSPDSDWGSKQWLDRPGEPVGQMILRCGSLHAEGEGQDRCRWPGAHCLRATSASRSCSLECPGGSMYWQQPRYYERGYPGQKDHYGSEQQQSGRHRNMRLHCAKTARSHEDKDMMDTLEYLKQKREDQTVPDTLTTGDNTKTKPGSRHTNRTITCKPHPTKPGNPMRRHDTTMEPRKESRTNQTKNNRDTTHGSWTGQKKRESTQEHTYDKPNDSNETKMNRLNNKPTSPPDKQGETAAMGRQAKHDMGHTRNRGATNVSTGSTNENPVHVRRWTAQEAAAKDDSEATWTPLRPQHSDENKESRQETGRKGETTSYVHKQKMRRPEHSNVDDRDTRRTHENKSTTTDRKSKRQTRTTDEEKVRGAYSAEAPAHRATANRQTRDKKISHKQEAQQTKIPRTIGRTEKEESNKKNEHKHTHKNTRTQLQKRTTSEARTKKSREDKKREIQTQQEKTEKKTREENRQNTEDTRRREKAAT

SEQ ID NO: 995856 - protein, 149 aa, Homo sapiens
MTGAVGEHSLEKSPRRPFASGREGPNKVCKNLSFWGAHGGTKEPVKLNLRVEIITEILGRDSDLHQECRITTQGSTPRHQRSNGWKASNTTELHGRPTATQNREQEIEQTESIQHYREQQSHPANKEKEERIVRLSSSCSARTCGWGGG

SEQ ID NO: 995857 - protein, 340 aa, Homo sapiens
LACSLAHAFLPSLGLPSHAVGDVALANRQGGGGRGHLSWPPLNLWRQRVVAAAVPSSGSGVGGGRDCWHRARGGCRDGRLALAVGAPLLLGAGAIYLWRRQQRRREARGRGDARRTERRQQERKNPEGRAKSGPGQQDTLKVPVLTVDTDTLLIETKADKNKGTYISLKQEIMTKLFRCYTEVLSIVPTEKNVTYLHGLKTPEQHALGTRCTQLERTGAQTGAERDELNRNYGERLTLEPGQRPKEKADQTRGQGAADDNGREIDEGYKPHQAGDKAAKTSRTETKDTKERQRPMKTHGRAKRITQSRERNSQGDGGNREAKSREQRRRNRQEEAGRTRQ

SEQ ID NO: 995858 - protein, 96 aa, Homo sapiens
GASNTGVVKTTPKSQDMGKENDSYQHCRHWTGVFEGTCIIDWAICIYKWRWHLRNKNALRIDLRRRLLEMGEGLRVKVMPGFVGNNTEQLEAMNDG

SEQ ID NO: 995859 - protein, 155 aa, Homo sapiens
MAEHDSKLKRAVGAVAGEELALDIVGKGRKPTDISGLAQTIEEEEEYMLQWGLLELYGEDRWCSDEISWRDRIVMMLCWPSWDVLGLYCRSGGNRREAPAVNSIEKYNPRDQQVGGASACSPGSSVGCGGLEAAQISRRILPEAGRCLQQALTTT

SEQ ID NO: 995860 - protein, 474 aa, Homo sapiens
VAGICSPSYWERCGMENGVNPGGGACSDPRSRHCTPAWRDRARLRLTTNTRKRNEQENKTLSHVPMNQCKRTNTDKLALHTGPHCNRANAATQHHEHEHIILWLGQQQDIGTHSCLRGTQRSSRHSTASENRNVGISPEPLHLRNLDQTRRGTGAQPGGETLQQPSASNDETADAPRPGSHPRRNATPLCSNATRPPKSKLVTTHPRATTTCQNQQRTTHTQAPPPSWTAPGQKPKGPKPYKRQKRATSTKIATSNRARTPTDRAATRHPHQTRADAHAGRKTRQYRQTLQCRATAHHNDKSKPTARETTYNEPPTQPTQTNTTPRKVDTEQTRTDTPGHRQHHTLKEISARQPDEFKPRTSLSTPTITHIREPARKRRPDEQSEKAAKQAGGRRVESNQAVKLTLATNEQPHSALMQLIQAAKQEQLERVEPPKPRRDRENSKTRAGREIQMAADKHVDENSRDKDTARADTT

SEQ ID NO: 995861 - protein, 236 aa, Homo sapiens
GIDDQDEQNSVTHTDPGCHCRWGSLCVVDIPGYIRASVIASDPSAGSVWRRVPSTTYGPGLVIRTVSSEDVWEMRNHLNRNSTQFDELVGVSGQQRRFCPSDYLVQCSPPRDPWYGCVRERYTVLCIAHVHTVLKHNRGSTSASARVMILNVGVYSRYAEIRSDAENGITVPESPCANCSLDLLTFRSELRGSTWRAVGRSRRHESMAECHEPQPGIVPSLAEVVRVKSHGSTPWV

SEQ ID NO: 995862 - protein, 369 aa, Homo sapiens
PTGRGYCGDHEEQLWLLWRSPGLPRQPYLGLLLEELRRVVAALPEGEDVGFSVGREKKLALMLSGLIEEKSKLLEKLSLVQEESMNGYEVESSLKDASFEKEATEAQEFGGRTSNGKLCKAEQVQILNVEDEILCLEKELKEEKSKHSEQDELMADISTKGYSRLEDESIIPQITSSCSQNDLQDLSHDLTERLDDSTNKMLLNDTFSSSGKAETALQKLSMDRTVSGLNKTRQRSPLDELQRYHGTNSVLICSRKAHQDSGWTLVHVTGGAATLWNTITEGITDSKRHGTSGQVDRPRITPRMPRERASAEQVIPAATRETHNESVHQYANERKENNTGELRQTNDEHNNEEIKVTTRTIHSTVPNSV

SEQ ID NO: 995863 - protein, 97 aa, Homo sapiens
TPWSDWPTALGKDFVTLLGAGWRRGRAPEVPTPRGITLKELTVENTCTEPDWDPGRDAGDLGSPWLIEWAVWGSFFYIYSLYYYSVILEDSLASVTP

SEQ ID NO: 995864 - protein, 201 aa, Homo sapiens
EVLVSELGAVQCAMGPLEAPEGTLVAWCQCAWLLVCLPACRCLRLWVLGLFMATMPPQRAGCLGMLLDVMFSRTQYRAKDGSGTGGSKVERIEKRCLGAVLAETTVSAMIPKQRNGDYLVGTYTPRHSRDLAGITDELLREKKPSTRQKHTRNKEVKTKYGKKHKITTGQPDIGPQVDKPDTEYDHDHKKNPVTQGEQHQH

SEQ ID NO: 995865 - protein, 460 aa, Homo sapiens
  misc_feature (343)..(343): Xaa can be any naturally occurring amino acid
AASTAKMKTFLSQLRTCVDILQKMCSTFTSEGTPSYLGEGPQRNPGGGTFNSHSSVELSSPFFGKRKQKREALRVCAPQVGWGYTRTEATRGFTGAGHLILFSLCVPQEHCCTPRAGSFYPLWGLLSGLPSRSGELLGALCSQLFPSFQSVCVFYSPSERHSGRSLSVAVRKSAGESNSLRGGRVENHNNNHIPREKGGVLRRVLTRTPPRRFACAVVSLPDATILSKEGPPTKEEVVVHSSKLPPVGKHAPQHVGTPFLGNSFVAFSPTTTFLHTAAAAHYESHISPDGHKSVPPLHNTPTVCSPPTTPNGGATIFPAGDNQLSSSSGGQWGAQHSIEMVFXLPSAQTTHRRRQTSVWSLPTPHGRPVSTMNTIKRRPLLNKKRYYPRKGWLIPQTRSIQSILLPEDRCTPPFKGTPPSRLAHDILSPQLCRLAPQLKDDTPLFLTLWRDHTKHPSIHI

SEQ ID NO: 995866 - protein, 508 aa, Homo sapiens
  misc_feature (85)..(85): Xaa can be any naturally occurring amino acid
MADYLIRCGARSTVPDDVTHMHQHVLFELARGSALYATIDYSSFSLRIRSDFSLPGPHGCAPHVGYHDLVYPNATESPSLMTAPXWHCPYLRHLATHSVHHARGIGHLDPIGPTCVRLSRARLFWPIHFPAHNLGIHPLKSYPMDPNLPTVSLRLARPKTHTLIPTAHRALFSNAKLNATNVPLEFPLSYAATNKRNSLPVSAGGTSVFYLWNVGPQPWGTPLLPHFRGVVSIWPVGSIPFQHFSNPREPKRMEGTPREIPEAHEEAPGPFLSVPVLAHAFKSFSYPPFPKGVGGKTHKLSPYSHSMSLLIPKYHTDQGTDPLGNNPYVENTRLGCLRDPSLVEHSGTVERFKTLSETIKLLHTCAQKQRVKPPSRASIVQRLNTATPPPVCLAAAPQFFHSATCSAINASDHDRSPATRLVTHRGLPLVPDRARRRVVPPALSTSPVWPTHKLLVCGPPLSRLRALPLSLVESFGPLFTSVITAHLSAHCGVCHHPPPVLARVSPAV

SEQ ID NO: 995867 - protein, 69 aa, Homo sapiens
SVLCGLHQTVGDWHQTLEVLVDGPTSVWPHSDFMPHDSASLLGNSSLKFPRLFANSSDRKRTETNSLAL

SEQ ID NO: 995868 - protein, 129 aa, Homo sapiens
MKFKYPSLPRTAVKTVNVISDAPSHVLQEDHVDLPLSKELREKYNVRSMPIRNDERGPSITGHYIRSVTIGNGSPGCPDIDILSVYSRRGCMRVAQAKRHRLSTWAFTQARWLSPRANHLDIGSDNNNS

SEQ ID NO: 995869 - protein, 146 aa, Homo sapiens
MCTLPSYIGFLQTDRRGIDSLLMVLTYRVTTNDVPSINQWEMLGGPHLEWLTISDVVTSCGLGYVHLKLQIVNKSRFNREERPLSCLLETWTHAITVGHSRKTRSCRIGPRCNVLTEQVATITSDLTETVGYIYWYICDLNWCWNQ

SEQ ID NO: 995870 - protein, 139 aa, Homo sapiens
MALTCALTLDSIRLTPAPSALHCTQHSQSNTSAKRPRTSIPLQITHSTAARNSYVHEPSSKRTHNSKPQHLHYTQNTGPSLAQKPTNPPLTRTHQQSTVIRTRQFYYRITITLARGIPINATIQEPTQDFDPRHRKMTN

SEQ ID NO: 995871 - protein, 127 aa, Homo sapiens
SFRPHTSQLKQESYTVENIKQDQMKSQKEIERPTRQQNRTPFLLSLPPSSLSPQQSRPDTLPLKSLHYYSKEPPFKEDWIIKNQKPVLPQEQSKEILTPLHQPFHISACPHTYSFALVSPPPIYSSH

SEQ ID NO: 995872 - protein, 256 aa, Homo sapiens
ATERVTFREAGASEEARERRSVAAAAAMNYTRAPDEIGKLFVGGLDWQHDPRDSAQLLFLNMENARTIVLSLHDKHHQPVSMALGVSSPSSQTHTLSWATVLASRPHMHEMADNHQTPQPMPHTLRWHASRAAERQCLTGPGMARTGPMAANKELPLHASRLILSACDLSLTKSGRAEHSSTQEHTPFTAKLRALRHRQRHRQWHPYCIRPRPATITSGHQTDYEWATLQSNLYRKRTDQQTPAGDPSDLDLTPSN

SEQ ID NO: 995873 - protein, 154 aa, Homo sapiens
VIEDVLKSVFDAKNIEKIEKLERTELAYEIKKHKQGIFVLANLKSEESLIEEFVRRVNILKKQVLRFLVINLDSERGMHKTFRPRKNDKHKFFSSKKPTTSTEEGKSFQKPFVKKPFVKKSEETDSSKQNEQDKVLRKPKTVKPAKDSKVAHTA

SEQ ID NO: 995874 - protein, 60 aa, Homo sapiens
FKLLTMYGDMGGARLWPQQLRKLRWEDHWSPGGVEVELSCDPATVLQPGLQSETCFKKDK

SEQ ID NO: 995875 - protein, 240 aa, Homo sapiens
MCLWCCGDVCSGSQLIGRDSMLCASTTPTPRLTATSQPSARNQPPPPHPETHPHTLMPLPPSNTELTRQRTHHKHQGPPPQALPPTAPPHSTTGNKRPPATAVPTPALTHGTHTTDHQGPQPHPCQPPTQHTRRPASPQDAPAPHSTPPHRDTPPPPPRHTHPPPDTTPQPHPALPHHAHPPRPAHNAAPPPPDSQPQKRTHKQPRNHRHRTPPTPPHTTTPRRTTTNRHTTPPHPHRTP

SEQ ID NO: 995876 - protein, 301 aa, Homo sapiens
MTATDDTLQVEPLASTAGAWNHRRLAYLSVLTQLDAELAGIAPQGPLLLDPDQTEHDRWECNVAMPWLCCDLGCTCGTYLPTHIDYVTKIFSYGIIRDTHEPMGTTRQGQTRGDDLNLGLERYSGIPIHYSLRQPYTQHRGLDTQQAADNPTTKTTSLDRRSYTINPQGGRHGTHGNSKPNRTAPLHTDTGHTNDQWMTTRLARRDQTHNKYAKLEDGNRQPESPSRRHEYKIHPQITHNNHLETQLMRSPWGHTNTQVEPDPKPTPQDETLIAITTHTYHHPLTNPTIIGNTIKLSIREE

SEQ ID NO: 995877 - protein, 225 aa, Homo sapiens
LVSYLMSGTDAYLPCWQYPHDTNRLRCGHVSPRELCRLQDENIPGVSPVSHRLENGPECTRFQIHMRSLLSHLVSALIGPLRGFFWLSWISIRSLYTDQRLCRVPFLAIGMASRIALTAMYHDGHLCQCIQLATYSVTEARIIPRARYLDSVMFLTLRRQINAASYYRSTHSVLVSSDRLRDADVHHKRNEVRGPPRSGITGTELNMGQVVQGESSWCDLDDDEA

SEQ ID NO: 995878 - protein, 128 aa, Homo sapiens
MCEVFSPNFFFTTSSSAQQNNTLLHFVGCKKNPAIFHTHQGEELITPPHDNNNTKDASEVSYSSACGGVSARALGGRNSPGGRARGGHPKKAPASLTGRGKTQASHKSERPAGAKVGRGARAKHSPQE

SEQ ID NO: 995879 - protein, 574 aa, Homo sapiens
PEHRMSMNNYPKKPKWERKRLTINTLLAHWTRSIRGKSTTYWHIMIYKLRLALDNKNHLQTTSEQGGCCAWEQGLPSSYCLALIGTNYMNSLSAERWILTHSDYSPLHENTLDDQPKILMDYSLECHQAHQTHHLLKKTLKSTRGNLITDMHHRCNASLKIGLALALRLICAGKSMKRPELILFPKNTGGKAHSSSEASCPPSFMRPYNHQHEKMLAQNNHQNLIRLAYTPNHSGTLHTIEAPNPLNQGTTQREALPSSAKTSDLTATRIQGHPSHHMTNDTTLLRPNQQLTRNRSQPRTNNWMTQHNLPSGLRAHHADETQTALPIAHEPKTLALHKVEHIATTPKGRIGDNRLNTHLVTEEMRQNRPQKENTTKPAMREHSVGKVAIIVTDTQQSRHQTCEARDHLIQPSDTHTHKEVVLINKTCEETNRRTRDTPCLAPNSTTHRGITSHTPGNMEEHTPSSTRPDDAKRDNKNQRHETTTDRRNEDTTPTSRNKKARRPQRMQNTNTQQTTTHKPPQERQTHAQVTIKQSSNRRRKDKSQDKAKIVPKLDYMTQHRTHQTAKNTRPKHEP

SEQ ID NO: 995880 - protein, 124 aa, Homo sapiens
MKRRREVERKHVEEETEKAREQKGRRKGRTRKEEQREGEEMRERRERRDEGQEREKGREKTRKRVHQIRMQRGGRRERREEKGERKSRETKRDERRRERRGRMRDREEESEERRDREEAAKSRG

SEQ ID NO: 995881 - protein, 70 aa, Homo sapiens
AEEPSSGFIFGYQQYSKSSCLLLTDFAKLPLLRRVTDFLLFWDVYYLDTCNCLNRHVNWDKRLTRTSLTY

SEQ ID NO: 995882 - protein, 192 aa, Homo sapiens
MANKRSTPTQPGGMGNKVSHSENNTAPDHVQGTEESMDKPRTHTERNTRHNTWNKRPHIGSTVHDLPRGRVIHSTTARRQTRRHRHTEIGPDKRANTGEIVNNPRRHRRETTHQTHRTRSKKRDTNNIATRAHEITSRQYTPYGAKRGKQTKSIENDTTSHMTSTNKQHRYNEEQNKKHTHEATTEARTSSS

SEQ ID NO: 995883 - protein, 385 aa, Homo sapiens
STELPVTGYSVEVIESGDGNKSLKRLGRKVKINYIPQDIPDVASCSTTHLVQRSSSTRSIDTQTPEWGRQGEATTAAVRQIRDPQHRTSPYTNEGSEESPCSADDQPCRIPEIKSNGNNISPFATNMQQIKQNLTTDYMFKREPPEGCRTGSQDLCRNARQKQGFMKSQNYKYVLTNKTKEEKQNTKKWQYSINKHSDKAITSKAQSHITKTTGINHIKENQEDHREGAEQTNMSTLEQNHYQQDRHKRKEETSPVKPKHKRHRPQNTQNKTRTRTQPNRQHKHTQTQPEAQRKESSRHKENKDNGDRGQGKKENTTKKTDKNRRKRETPTTKEPHKPARKTREKKGKKETQKNERRKKNTQKNEKKPEEKKKGRQNTTKKKRNK

SEQ ID NO: 995884 - protein, 139 aa, Homo sapiens
MMGHDQWTTDYRQSLTRPIVSRPPDASDLWAFVRTWHTHERGLGDRRSWGPVAALLRVGRDSRLWCLSLRTLANLVPPDRRQGNGLRKRVLFSTYHWRAQSSGFVRPGSILRYSVYRIVQEFQIRMWELLRRQTEVSLL

SEQ ID NO: 995885 - protein, 253 aa, Homo sapiens
MRLKPRVNTKGDKLFHATGQSTVRFRRKRRRHRPNTRLRHRRCRFQTHKGDRPDKLTKAHGTGSDEVFSRDDGVTLITRKIPRRQDSTGTDDQGHLCVKRDPNTGPPKKRKPDETVSQRMHSPGQATTQDTGDAANIDTNHTGTNGRKHKERRHNANREHWVTTNRHTRCDTGEHREASPTEQRTHLVGDEHKRPPVESSMANVPPQTDHRQKAEISNGSCKIKEANSKNHPNRNHERLDGERTKRPHAITRH

SEQ ID NO: 995886 - protein, 113 aa, Homo sapiens
  misc_feature (45)..(45): Xaa can be any naturally occurring amino acid
MVKLGSVSSNDPCNPCSSVTKSRGVTRLPMTSYRIIAQGRQPDGXRIPREAQRIPRLRGRIVPSVIEEPRSDPGEWLFFFESISFHSSVRGRVSDRHKKFTWMGVYHTDLEEM

SEQ ID NO: 995887 - protein, 149 aa, Homo sapiens
MPRKTGGPGSPTTSLMIIQLLDDYTEMIIVGADNVGSEARMHADPNVPSREGVWLHYGAMISPMIASKAITVAAAWKSEAPGSWYEELLPPYSLGGMEAFDGITNGEIIIVKSQRTLFAGHIRVTTSCEPCAGAICPDVKVRHGVRALE

SEQ ID NO: 995888 - protein, 105 aa, Homo sapiens
MPTFSPKESSGAFHPSTGRSFLNNSKRFPLAPQGEQFRFPPGLPRIMLSPVSGRGSSIPWAASARGPRPGHGRPWRRLSRGPMAPPSAPLPCSRDQERPDPVGKG

SEQ ID NO: 995889 - protein, 57 aa, Homo sapiens
MRTDRTEGGTRTEAITGMERATELCLPSTATYALPSSQNPKARDPEPPGSTEPGDSG

SEQ ID NO: 995890 - protein, 129 aa, Homo sapiens
MAITTDGLEMDTLCEIATEPSSRDELEEGTWMNSTKMLTSTLAWEDNPRYSPFLRRGNVMTRTEERTFAISRTLVRPLEYHKKMVMWGLPLNELYLERIGQFVLNPIIPGFPKVYWGFTSLERSGVDYR

SEQ ID NO: 995891 - protein, 163 aa, Homo sapiens
TLAIIQAKTLNITLFRGENGQYEIADFENITRNQDLTTIALQKVKRPSETCNAPLANVILRQVRVKLGNLELYVEQESVPSTWYLLIVLPVLLVISHLCGRGGDQAQIEGAESQTESTTRIAGKRAPEQRYVTAWLSCRWIQLDVVDTVIGTVPYPYDYKHKL

SEQ ID NO: 995892 - protein, 85 aa, Homo sapiens
  misc_feature (66)..(66): Xaa can be any naturally occurring amino acid
MCPPVKAVAADVSGAWFSFGPRENVRVFDEAASGFGVNVKRVRAFNRVGACASRAVCSCASCVRGXEAALFQQRGAPCVRRKEKQ

SEQ ID NO: 995893 - protein, 121 aa, Homo sapiens
HIDSVWGLMWPWVVQSHIKRHIDSVWAFEKVADAMRNRCRRRTNVGKVLLVPGPENGELWASGCDDPTRPAKGEVGNATFCWTPDLHFSLCHNALPSLHPKCSVVMTRYYAATPCSVLKKT

SEQ ID NO: 995894 - protein, 424 aa, Homo sapiens
VPEPRVPRCHGATREPRVPRVHGSTRRHPGAHAQPIRGCVPGGRQWHMTVRTARVSWGQRHHPGKQGCCCTPVCQCGRVGALTPPLWSRMEANQKAKNDSGEAGDARGLTDCSSPESEVTITRRTVQAQGGHHPGAGPRAKAHQVRWAQRHAKGKATGRHAGTAKRNNPKKQGTSPRTTPYSGDTRARGHDAATRQDHSIGQESGLQKGPHAKRKGGLPATGGMEREHRNGRPPDCQPTALGHDGQLPTEPSMGERGPDTPQHRATATETGAPAQPEQAHPTGGKGHDLRRHRTKQQTRTSDNSQATPKSRQRRTKARGPPARGGKSQPQAPEGAPPTEGAEKPTPGAPPRYTQQTQETNQDNAKLRQQKTSRTAEKNRTLGGNNEKGSQNRSTDRKNRAKNRRTTRKAGRGKTPKAKNEQETQ

SEQ ID NO: 995895 - protein, 171 aa, Homo sapiens
RTRGLGSHVSSASRVHAILLPQRPEYAGIHRCPPPRLLQLRYAKLFGYFLTARLTRRTELPRNQLVYPGETTGVEGLNINNTFSIRVGYKHDLHSRPLTHRQYPNFNRTIVAERTIVYLAEYDITWDYPNHYDTHSSHATRQHYRATPNAQPNIDPAARNQHTQTRTHEHS

SEQ ID NO: 995896 - protein, 165 aa, Homo sapiens
MCQIVVGCVLLHKGIALRWQSMLDEEKWPGVLEQERMAGMIAGQVLILTGGAEPKVNRGKAGVKRSVSWRCYGVLICDFGQYDCNNWDYYGYDSGRYTQERVPPPPAYGSGLYGAHRKRQRVSGNTFTKGEKWFNSKSGPEGILSKSGKVKKEMTFQGIKKDGQI

SEQ ID NO: 995897 - protein, 186 aa, Homo sapiens
MHYITPNIRRQEGHDNPPTPSAPMLRGRSQPHPYKSGVGAHHNLRARSRTPHPNDKRHAAPDGQPNTHDLLEQTMTPTHTPTSTHYARGRTAQTTRRRVGSTSNENNNYTNQGGATVKRTARAAPYASAQTARRAEEPDLRDDTSQREDNTTRSRSATPHSPPAAQPRQQNDKPRTRNERAPSTYA

SEQ ID NO: 995898 - protein, 174 aa, Homo sapiens
GPGVCFLLPSPPNSYTTMRECISIHAGQGVGCLRVAGCLLASSTVLVTLGIQSAMRQNAKVSNDHWVEEHDLPSYYLSSWRRRAWPQPRAPGAVFVRLGGPTSSLDAKFHWHLIASFFHPELGPSQAQEDAVNIYARGQHNDSDWQGDRLTLVLGPELLERLVEHVHRSSSGFR

SEQ ID NO: 995899 - protein, 101 aa, Homo sapiens
TLSILNTVHKKCAYHCAPQENQYQTFLLWRHSDKLDAWVRDAWVQDVDQEFPRSVTGTGLCADKKMWHMSDCCYEEAAVHRCGRENTTEGNDDEQLGATEH

SEQ ID NO: 995900 - protein, 378 aa, Homo sapiens
MAWPWIQLSELQDDLDLDMTPARHLNQLKLDIHRMHKNWALAMQHDMTFPKVKMTSKTQNPTELCHNTLNVGMTTYICTSEPGHHDRWHGGTADAQRYADEQDPSDVITCTDQKLTHSKTHTRYEQHDTDSMRGYLDTHNTPQSEQAPDENTRLHHTTPTQEHQAHHTDTEPQRNNHRPQPPTDRTTQTTLPYNETNKSTRTKIHKESKQYKRDTQATNPEANHQHTVGTNNNNNTATHPHNNHNTPINHKNYTNRNTRDIKTKKHIHMTETSTKKTQRQNTHRHTITTKGTQTKREQNNQRDQHRDTTHTPQHDTTSTAEQTIITHTKKTNQPPHQQTQTNNQPNQITILCKHEQHNHTKQPHHHTNTKPTTPTTQL

SEQ ID NO: 995901 - protein, 116 aa, Homo sapiens
MASPWEALAISLEGEQETIARNSWASEILCRASFFPSGNSRFPDGSTLKYRMTLEDAGGTFPSGSGPGIYSCKTAFPENPKSPFLTPEGNLNSQSRVDKQTLMTEDTCQSLPEGEN

SEQ ID NO: 995902 - protein, 89 aa, Homo sapiens
EPRVPRRAAAACVRRMNAEGAEESAVSDELATAEYGLETVCESGGGSPSRRTLNDAIRDLTPANYYEIDVSNPHDGGGQERACTASPAY

SEQ ID NO: 995903 - protein, 113 aa, Homo sapiens
MTRILCLKLKDLAFSRTRWKACSGVFEDEVNSGVGQDGLAVSSPILKGYLAGYVVGQTEGISSILALLRDLHLGIYAAQAYAVPNVEKTLRDYYAVAYQGARIALGAMEREQE

SEQ ID NO: 995904 - protein, 149 aa, Homo sapiens
AAPTLYRTLDSWTPFMSQTDDERLVSAYDGGYTELLSLIHLCCLPHIVPYNVDSWIPLTSLSFLYLQGRRQDSCTGIQRGQPGNLSVHPLQVMRGVDKESPLWVCVNKGHVSLTVACLTPRDMGVSARSSFTDHLLRRESPFGGQGMVT

SEQ ID NO: 995905 - protein, 74 aa, Homo sapiens
  misc_feature (47)..(47): Xaa can be any naturally occurring amino acid
GGMHARIGEGGRLAVWETAITDRARACGVAVSVAAEARIGNRYGAGXSTLLLCRRVPQLEWIGNAGQWRVVRLR

SEQ ID NO: 995906 - protein, 244 aa, Homo sapiens
  misc_feature (28)..(28): Xaa can be any naturally occurring amino acid
  misc_feature (64)..(64): Xaa can be any naturally occurring amino acid
  misc_feature (104)..(104): Xaa can be any naturally occurring amino acid
  misc_feature (115)..(115): Xaa can be any naturally occurring amino acid
  misc_feature (131)..(132): Xaa can be any naturally occurring amino acid
  misc_feature (138)..(139): Xaa can be any naturally occurring amino acid
  misc_feature (175)..(175): Xaa can be any naturally occurring amino acid
  misc_feature (181)..(181): Xaa can be any naturally occurring amino acid
  misc_feature (184)..(184): Xaa can be any naturally occurring amino acid
  misc_feature (227)..(227): Xaa can be any naturally occurring amino acid
MLARKSESSLDVWLGPSITGRRRTHLGXAHPIKALNAGSMNCIETYRMNLCIRYHCSNALYIGXNSKWHIGISRDWGHRLSPKEGNQKGVGVLSLPLNLPALHXSSCNRKPYVAXSVASGSYTCTGDPPFXXPNSPPXXPLVGKQLRSHANGSLAERVLIAPPPRRALVPIAALXKHRSVXCAXSMYPIGTPGKKSSLEMVRAYLSVDNNSVCPRNWGLALPICETXRIGRYFAGGLERRGLEP

SEQ ID NO: 995907 - protein, 36 aa, Homo sapiens
MSLSSHDVVKTAVPRYYTTHIGTIRKVVGSWALEGI

SEQ ID NO: 995908 - protein, 81 aa, Homo sapiens
TGVVKTTPKSQIWEMEKTLYQLLSYIGSRRFGQAPPIYLGQYLIYNMRWHLIRQEPIAINCEKEAADDGERVSFKYAWVLD

SEQ ID NO: 995909 - protein, 66 aa, Homo sapiens
PAKLLTEAHPLTTFLVHSQTPSLGEAFSTLCRTVKGVWLCTSRKLLTEGSALCTTLPAYAEVLFMN

SEQ ID NO: 995910 - protein, 112 aa, Homo sapiens
VRGGYGGGGPGYGDHDGGATGGWLLTNYGRRKSLSGSGKVTNGLWEIDYTRKLLIVRSQVERVETLGCVSTVISGGVIRYCDVTCTIMAPGASARAEQDGGVSWRWSVVRTI

SEQ ID NO: 995911 - protein, 149 aa, Homo sapiens
MWKRLWNWVIGRGWNSFEGSEKDRKMWKSLELSRDLLNGFAKNADNDMDNKTQADVVSDGAEELTGNWSKGDSCYVLAKRLAAFCPCPRDVWNFELERDDLGYLAEEISKQQSIQEVTWVLLKAFSFKRKTEDRSSKNLQLECDRKWHF

SEQ ID NO: 995912 - protein, 201 aa, Homo sapiens
LGKGNIIISSFRSVLVSPVRSTTCLVDDQHRPEAAWAEGNIIIEAPHGEVGSYLPGAWKGSVEERARIVEPPIAGGTESRTVYSRGRRDAAGIVLYQVDRGSPKCALSSFLPSSMYQVPVSARCAVASSCSYVLRAQMTQGECSEHIHEAWAVATLTEAPTLSNTSTRITLMMAISRPPLGTVCHSSMGCSEHSDAITQNL

SEQ ID NO: 995913 - protein, 252 aa, Homo sapiens
MGRVRGDLFIGAMKWSARTVGYKAVTFSLYSPCPDLPPSYPCSPTLQEDLSLRGADPKLAKHYYSYGSGQVDSPGLESHSHDTRALMEPWSSQGKDAVIFLNHKTKQVYDGETSNLNTQVTTLCIPLVDPISSDFVDLGTEASQRTQPVWGKGGGKRKTVPGECGWVTPISPKRPDSHGVPGAYQSIALTSTALGRPKDNKCEDNEHSGPKKTRISKRGPEHNPNIKITQQPDQENTSKHTHTKTTHPNLQL

SEQ ID NO: 995914 - protein, 69 aa, Homo sapiens
SVFFVNPLTIGLPVVRHRVRRCRRLQHPDGPLLNAYFNGEESNGNVDETQMAKKFGKKRTARLHNWEMA

SEQ ID NO: 995915 - protein, 213 aa, Homo sapiens
MAFLSQGNTPLVESLNRQSLREIASILKDTRCALAKERCARSRAKCHHKRPNDSIKGRETGTRRILGQKALAKSQGSGRLAPPVEGGAEGDTWSARSAVQDTSCKSKGAQRPWVRQEDAARKLVRIFIVNLWSHQEQDPMRIRSRLGLSHGELKVLCPGKRKLNEGTVHVQRGSKLTVLERNLRQVLQEHARAVDQDGRPGREALRKHFATLL

SEQ ID NO: 995916 - protein, 216 aa, Homo sapiens
VTRGSTHAFGGVDEVNVLVCVEVDDVRRTTTDLSGSQPPKTPIREVSRLTLRAKPSRTRGFFMAASDRETGPGLLSFADGLASNDAQLIRREVLAGHHDAGCRAIHRETNIQTAKGTNGPLDTNSIKGLCDGIHADYSTLDKRTALWPLTWHTPRDSNGNRQHDRCEYRRSARQTDTLLADNGYTYRNTIASGYGHTSVDTQVPRDRSSDPFSRSR

SEQ ID NO: 995917 - protein, 175 aa, Homo sapiens
MQEKKLSDQQPAQTTDNRSTKQRTTNTTHHTTEHTTINRGAQTKHRPARQASRNTKEHSDQPKQRRRDDDEEDQQQQENQQQKTQTKPNTKTQHTARQERTNHHTQHEQGKQAQQAKAKTQQKDKEKQSTQTSEEKRRNPQRNARQQEHEAGNEENTTHDTPLATENRGPTAQHG

SEQ ID NO: 995918 - protein, 172 aa, Homo sapiens
IPNAIQICTESEKHFFTYLLGPVTAASSSSSAYWQNALLEKTLMSPELWHLVHQCYGSELGLTSEDEDYVSPLRAETGLGTPKEVGRCDQHLSDNHTPSGAADRSQEPSHSGFAPRHIVHSPKLIPEPASDRRPWGTGGPTEEQVESQTSASSSTDSEPGWTEDPEPQSPTQ

SEQ ID NO: 995919 - protein, 305 aa, Homo sapiens
LGTRVGHRCRGSGEWGVAASNPAVWLVTLHGVSAPPFDSSCTAHGARLASGAKADPRQKGGRGPQVGACFWTWRSAHCEDGRMELVCRFQNEWGPVVTGEGGQPGLKKHPLLSNSCTARSPGNTCHVDWRRHIALGLEVVDRRPPEMGLWEGTAAGPPASAALSILQCHRVLSGQMPTEQAFLKKGGGLQGPESRHGRGGFGSLCTHLRMEVLVSKCIEHFWLDQLLLGQAGLYPQFPIPRASLPLVTLMLEQQAFSKAQKSEGHRPLVPLGRPESLGLLGALGKSQWPHTSLAVGPAKEFPEGP

SEQ ID NO: 995920 - protein, 70 aa, Homo sapiens
VQQLGGVMEEAEVVDDVVVEDVHIPVTSRPRPAMGGVMEDAEVVAPIFSCMIKIQSCFRLTQNISPVCHL

SEQ ID NO: 995921 - protein, 361 aa, Homo sapiens
  misc_feature (43)..(43): Xaa can be any naturally occurring amino acid
MTEELVEAGAKGTGYDTRFYHSPYDRATSSRPLGDLSVRTVNXILLTCNYRTARVVFRHESCKGGRIEIVRSTQTNLIANDQTTTPCATNTRKENTNNATPRIGYVTSRVAINSSKLGSHDLCMRVVIHTSGYREGLAMGPVHYVAYRESNEIRNNTSTSTPDPFHIGKPAEREGAVEENPIYIVEQNNHKCLEIIIRADTPDKVYTTELDSVAQEGTDRGQLTIVHPRIMPVRHLQQNVPGENNTNEQPQIIGRTHTTKGHTWGRMQAPNCNDSKKGAEYTHRGYEHTNELTETRPKTNHDPTTEPYTESLTTTQTATHETTPRDVNTQENTQHYYHTRGTTPSYAITADTTHRTGHELT

SEQ ID NO: 995922 - protein, 60 aa, Homo sapiens
MLSPGLAPLAPWDYSTKTLSQGPALDPPTTCGGGHEDEDCQGRLPTMGGPPREPRGQPEH

SEQ ID NO: 995923 - protein, 90 aa, Homo sapiens
  misc_feature (59)..(59): Xaa can be any naturally occurring amino acid
VDSRDRRILNDVQDASPSMIMFTKLITIFYNLNVYKIQVPYVTRNESIGTSRTMYSRWXYIPQNGMRLLDLVNCDKLITVHREIRYLKKK

SEQ ID NO: 995924 - protein, 75 aa, Homo sapiens
GRIDMIDVIGVTKGKRLPRGHQSLAHHRSMPRQRPTGRPAQCGRYWGYGILARVSLSLVDNAAWGHERAYLVSRH

SEQ ID NO: 995925 - protein, 219 aa, Homo sapiens
DSYLVGDGKRDPVSAPVAFCLLTPYTTMSLSASRITRRAALVSRLTLPAGSSTALCNTVIPSPMATYAECEQRRICGRARMTCPFIAPFLQCDDGATGRIHGAPGAVLCKLGAQSQLMKFARGSLPVSIIRTREAASITGEEECLSDNYARGYYTDLSKEDSLTCVYGPEISQWLAEPRSNQGTSVAYPMSSAELRVGVNLGVVGVSPSLTRGKRSSHV

SEQ ID NO: 995926 - protein, 130 aa, Homo sapiens
PSCCLSSPWFLGGLLFFFYTSMGLLNFIWGEKYTFEQEYTMGKKRSHTPFRVQRVLYFYSLLRVSVNTKTAVCVWTHLNTPHARGPLCVGKKKRKTHAVALPFLPPLVAVRNAVRERGRYKRAPCVWSRY

SEQ ID NO: 995927 - protein, 235 aa, Homo sapiens
MKEETKRGEAQAEQESTRRAKGDKKETEDIAKRKQDREEQAGNAGQERAEQQKEAENTTRTTTHTPHEEQTTEEESNRRNPEEEDKPDHEPEARNHREQETHKDGDSAPANRRKTEEEDERKQEEHRTTKNQRENGDVTQQEQQKKTQNQNKTQHRKDDTKRRPRNKKRRAQERKENNSQAKSDKKEAQTKQHKGQDSKESAEPTDGTRMSETEDKRKQSQSKQRTQETHKAHRT

SEQ ID NO: 995928 - protein, 152 aa, Homo sapiens
MAAIAASEVLVAQRADGGVPRLRRRSWPLEKLRYRDCAYSGSCTCCGMNARKFNHQEVVEDDTQTMITCQMCAKPKTARLEWALVGRGHEHGNVLAEENDYETVNSMHDQCMNDAEQDGRAKKKRKNPDLGFSDYAAAQLRQYHRLTKQIKL

SEQ ID NO: 995929 - protein, 270 aa, Homo sapiens
MAALRAYVLASGVVAVQVLRPGAGVRLPIQPSSRCSVQWPASMWEWAQQLGGASYVPRAKETVHCEASDLGMYVDRSEEDTIVKNITRDFGPQRPQLEHGVLRTSGWEWSCGKNAANSVDPHYQECSVPPERHCSNLILNKEPNLQAAYSTLDRLDYVSMMCHELGAYIIACGESLLNHPDSVLGAQLDPRVLYWTTLHTVGRTHIQWPVTHTTALDHLGPHDTRFTSGLLVTETGRPMVRRFYEPEMSGAQHMLPRYIRPGGNAPGTNP

SEQ ID NO: 995930 - protein, 474 aa, Homo sapiens
KDRRRDYEARLARPHPDLDPTVPTPDTAGTDMYQGDAIIFNNHGKPRLSKILPALQMKIHNSKSSGRIYHLVSNARLKTVLELYHTNAPHSLTLCDATLTNTTCTPPTTHLHDNRITTSRYIYCDENSFKDNHDPSRATTLSNHKLYNDNPCSRQHKSNHTQSSLDKNVMSALRLPDYIHTANHPTRYQHTYSLRQTTPADPPSAKQRNYGNHPTLMTPCTTPTTPPPNRTRPHTTKRPRNNNPATRHGTITTKHTSKDTDDRTLQPDTHHTLPTPTRRNTHNKNNKHPARTHQEYKRSTKQEHHQEHNYPHQTPHEPKQQDKKTKTPTQINHKNKPTPKTNQNTAEPQPLPKRPSPITTTPNKHKLSQKTNKNDRHRSRTNKSHHPTTPPSTKPTLHALTHPPPHQLNAHTTTNDTKHHLNNPRHTKAPTPHNTTIPPNTTRHHKNTHAHDTTHRKHTHIQSHTNKHTTTPTP

SEQ ID NO: 995931 - protein, 313 aa, Homo sapiens
CADTEGCRELLKRVDLATVPRRHRYKKKWAATEPKFPAVRLALQNFDMTYSVQFGDLLAINPCQSPLRAEVWCTGVNNLASPWDHVDVLGWSELQCQGFVNEAISHGDTCSREGWPLVQPISCASGACSPEPSMLHFWTRGGISRRFPPVPDLAAWVSWSTTLMDAASLLPVLAPRLQPGDIVLDLCAAPGGQKLAVVQTGCCCNLAAMISPRSRNRPRPNRKDSFHTANGGLEEDSARGESPKLRVTLHRGLAGTVGEERGGGNLMKRGAGDLAWIQKRDLSYEGGTHSIGTGRRRTISVAKIWKATVTKRR

SEQ ID NO: 995932 - protein, 153 aa, Homo sapiens
MNRRTGAEHPTHRQHRQQNTRPKTPQRRRGTEGRAQHQKCEPTNGCAAKDGKHHAEQNQRKMTSGGRRARPTEGSIRARRAQKDEKRHNSTTKKERRKKATKTGRKRRADDKKEARDQDSHTHKRRPNNRRNDNESHNNSTAKHRIQTKKQQD

SEQ ID NO: 995933 - protein, 124 aa, Homo sapiens
MMDTPAKPPADDHAHQAHQPMDMDTRTPHARHVRHSTPQRNENNAPPPHGTHQALEPPQAAHQNGASKHQHPKQERPSHNPTQPPHTHEHHMKKKPRNTRKAQKQDKPRKEQKHNNTQHTIQQA

SEQ ID NO: 995934 - protein, 464 aa, Homo sapiens
QSCLISCSTLEDFTLREKPYECKECGKASQLLAHTLFSTQSASILEEKPYELEGMWQSLLLARHQLYRTSTRASYCARRNPYEPCPATLPRQALHATARNILHHSHSDNTSLPDRYQPLMHLAHRTRSAPDLHTLPQPSAHPSSPHTSAPQLPITSRKTKPPPALSSTAQPPAHKRPLQAHTLRPPLTPLTTTPTSNRTLPAHLRATQTPPPLQLPTPTTLPPTRPHTHAPHPDPTPNSGTLTHLLPPPAPHHTLCAPRYHAHARHRPPPAPLTPTPSTCPTSATNPPAQAHPTTPAPHPRQKTPRQPRTPPTPRAFRAPHPDPTPPPRRPEAPPPPPTRPTPTHRTPPPDHSTPRHHPRAAPRPRQPPPTPPTTLPPSHTTGHHTAPRHHPPGAHPTRSAPHRAHHRQNHQPHPHAAPRSPHPPHQPRHTPRRTTRSDAADESAPTPPAPHMPPPHSPANAAR

SEQ ID NO: 995935 - protein, 132 aa, Homo sapiens
MASTNYSQAGTEIGLRESRQWDTTVTPPGQRRVPRRRNSSQGARIPPSAWGIVMGTYVAAQVNMPVKPPRKSETALNLASRGSGDTPEASATGQWTQTKRRGVNQHVRSEVPHEGRRDIGRSTGVERQTRMQ

SEQ ID NO: 995936 - protein, 132 aa, Homo sapiens
GKGRRVEQELCASSSAVQNRPLDLLHKMEIIELQADYAGSHVSMDAALGSAGLLYFRIQRTRGALDDRPASSMQGVWTSETLRQSIPKVHAIPGGLQTTISGLHVISILAQGYCPSLLHTGSADHKRTNCDE

SEQ ID NO: 995937 - protein, 103 aa, Homo sapiens
MIQKSGPSLLQAQDVGDTVGKRLCNHPVIRAFLCGSISGSLLYPRFSNLWISLKHAMESSSPQIMGLEVSRCGCTLEGGSRGGVFGPLERDVPFDVEMCPWRL

SEQ ID NO: 995938 - protein, 357 aa, Homo sapiens
CWPRRLVSSSRVWSRDWSCMARSTPSDLMSLAPGPSAPPASLSQRCPLLSGRAPLAPYLALCPPQTRSPPIMEPGSGGGGGGGGSSSGSSSSDSAPDCWDQADMEAPGPGPSGGGGFPGGGGEAQREKLSAAYSRQTQRQRQALYVPNGPTPPEYVHDTFPAGARQAPAPPRTRGRRQITHGKPRQPGRGGRAANLRELLHKEGPAMRRRGHNTGSSDGNLGSNPIDDWERPEVSPEEVMRAQEELQWRPNQGGMLLGQKEGRQSTVPSDMRREEARQQSTLVNASKGPKDRTWMLHAGRKSTHMWAKTRPTAANTYDEGEVRSGKAADEGPQTRKQESKHSHSNVHQSTEETRIRV

SEQ ID NO: 995939 - protein, 36 aa, Homo sapiens
FIHFDERDGAVKAMEEMNGKDLEGENIEIVFAKPPD

SEQ ID NO: 995940 - protein, 328 aa, Homo sapiens
MHCARAFLSASYSTATLQWLSGTLHYTSAKLLYPKLYCTDCAEQTQQAPGLRLSASCPQQPSTQHNTLLPAYSLTASCLNTNSGLGSLYTLTDNSATAASPQHYNYAPTHEELICACNFPKLSTFCPRHLSHNAYFHRKPHALQCHRLHLNFLQHCAHQRQNLHTHTLSASSGSHYYFVSLPPNSLHTVVNKTRFKLPTTHTRNNQPFRSTTHGLLSKPLRKAKVNHHNTHWPVHTLSPPAAHTLQQPPPATTHTRKRLASLPSKGKRKHGKNDTFHYQRQFPNRANFNPWPPTKSHFSPGISSLRARLSPRHLGDTAQLAEILRDRA

SEQ ID NO: 995941 - protein, 236 aa, Homo sapiens
SHVHSEDHSGVLAASNIIKKVTSVGDDERPVVFWHGYGDSYNSTAMQHVIGIVRETKPDSYTYSIKLDDDDSKDQRLSMFSDVNMDIDYVCKQLREVDSLANGFDMIGFSQGGLFARAAVERCALPVHTLITFGSPHSGISDLPKCSPNDWLCKKKNDALTKPGNIWRDWVQNTIVPAQYFRRRDDYYEYLEKSAFLADVNNERENKQQLYKDQFGFLERLVLIQFEQDQTVCAQM

SEQ ID NO: 995942 - protein, 170 aa, Homo sapiens
MGTNQTELHREHIDSDERGNHIIELRYGPRRTTRDLEHDPAFTPRGKITSNTYHTIKLGTHQLSATRRGKTTRIHDWQCHEKPKKGTIINTEGYNISRKTVEPMEKGTSNPIRIRANNIPTSPIEEIKGGRPNRYTQKGAPKGEHPEVNNLQQTQNESSTEQGTKTTDNL

SEQ ID NO: 995943 - protein, 89 aa, Homo sapiens
MNGAGSDKQTSRRGPPHHISTHHNRRTPTANPDKRTTKDKKGRREWQTRQPTTKERHKKHRQEDRKEEQPTTHNTVEQNNSNTRKKNTK

SEQ ID NO: 995944 - protein, 135 aa, Homo sapiens
MSHCGPGLYSVYSSRYNLWQFTPQMCLGHDIEKKCVACAIEIHLCVSRAPNMWAYKSTINYPLLETVWAGISTVALPFHPSVRESARERGFTPRKLPKDDGGPLVKTGYNGGPDIPRGNRGISNKGGTHRPGGEK

SEQ ID NO: 995945 - protein, 106 aa, Homo sapiens
GGSESWREVKGTSYMAARENEEEAKVETPDKPSDLVKLIHYHKNSMGKTGPHDSITSPWVSPTTRGNSGRYNFKLRFGWGHSQTISFYPWPLQISCPHYSEPIMPS

SEQ ID NO: 995946 - protein, 70 aa, Homo sapiens
HDISMNVGVDSDERSCLLCLHAHDGPYHGVSGVTVDMLRVTRWSVPHVTSRVASYEESASTVASVDDCGP

SEQ ID NO: 995947 - protein, 84 aa, Homo sapiens
HWNWMVSIMDSTEAQLRYGSRISQSAGGSCDIQDHPLHASQNSARRERMTAREEASLRTLWKADDGADLAERPSRNDVCDEETS

SEQ ID NO: 995948 - protein, 135 aa, Homo sapiens
MSNVGLSLRKCGALSKLLITTVIVRTFIDFRNVTQEEPGGRMKREQECNIRCTWRARSDTGETSGPPEQDFPSDRLGGDLVQIVQVTGMFGGDIRSAGLLSRVQKNLVTFASHLITSQYGVSMLDKDIVTVQDAL

SEQ ID NO: 995949 - protein, 93 aa, Homo sapiens
GLTLNSGCRETYPVKKSTTGKAKDLSSPMVVIATRRYGGTYSMTGRLIYLMLRPRRLTHRKLRERDGCCNMGLGLHSKLLPHVRLYVPYCAKH

SEQ ID NO: 995950 - protein, 155 aa, Homo sapiens
  misc_feature (154)..(154): Xaa can be any naturally occurring amino acid
AEIKMILQARICSEGTKKSVWFHLFGRYAIHVGPQGILCELDFMYGSLYTATYLVAKTQARLQESSLSGLVSPLDGESDATISRYIYRLVGDKTKYEVRTGCKKVVEFSLDASKWGLESLWSMPRDGFVRLYQGRNEVSFASHIRQVNPMWMEXN

SEQ ID NO: 995951 - protein, 229 aa, Homo sapiens
  misc_feature (113)..(113): Xaa can be any naturally occurring amino acid
MVVGRLPEPLRGLAVLTPDLVGVDAGMDKQSIVQKLLRGSSATGLERSSASAPSDAQHLSKQKKNVKQEVRTDEKKWINLQDLLTRSGKEVEENHSDEFYKIHSPVRIIGCVXEDEVLLQKLREESNELAYRYEEIGSRTGYDELTELTELMVEAGANTQMTTYDREEATDSFSDTFLKVVRRLGAKVQRFSQRRSLAKTPSIQHSYWKTRHHAVLLCPDDKLGSSNKN

SEQ ID NO: 995952 - protein, 130 aa, Homo sapiens
MESAGHELEETVVRDKADESSYTGTRSSTQSNSPSDLEAHLCAASEASGGSGDVVAPPRTSAMRSLTPLQYPRVSRAVKAGTFDSYFRNLCSDDNPMVRRAAASKLGELAKVLELDNLKSEIIPMFSNWL

SEQ ID NO: 995953 - protein, 432 aa, Homo sapiens
MVTTGSPRSHRWKALEGISMCTGSYEAFWQSCSLRNSVGQTRSITVQELDVHRWPQVIWGQHNQTQHDRELTYLSNAPKDWAKDVLDETRSKEREDLEATPSAATHEQPQPETTTQHGAAPDDPTQPPPGPRYRRGTQSRPVKKKPSATQARKGTSKKKNKPKTRKKNNIRKTTRHRKKKDRKNTQTKTREKQHRTSTTKGSNPMKRTDTQTTHTPESKTTRKSHAAQTETRKKQTQRKKTKTKQTKNNNNQTAETDRSTRPRRREKQQKRDRQQPAAKTEPETENDRQPTQKEPQEQTRATDSNRERRRSDTEQSQSSKQKTETEGQGEQAEKDTDKNKERRKARHSEKKTTHRTTKRRITRKQQTNKKRKTETTDKTTTKDETRHKDKQNHKTTARSTERQKTDRHNATARNSTTTERKDRRLRGRYSYH

SEQ ID NO: 995954 - protein, 75 aa, Homo sapiens
QASGPGAVPAGVVEAPRGGAKVPTLVHASLHALMRHQLALRERVAHGPVILTLWEAEAVGLVELKSYEMSLGKHW

SEQ ID NO: 995955 - protein, 133 aa, Homo sapiens
MPKMGASALCDRYRLAYGMGGSYLIRSCDVGERLVRRTDSMSDAVSDVRTDHEVIMLMYCEATGKKSSAQFVDMHSYDSEREEWGELLSRSCGYEAGNSGMVLIVRKGQLVLEEIKGWWSVRLSLDMDKDVDN

SEQ ID NO: 995956 - protein, 171 aa, Homo sapiens
MHSVCCVVRHSTHAVYAAWRHTHDMLAHHSLRRDSIVAWYEPLLCVDSTMSVWYECTHVHICCPAYTRTHCMHDMLPGRHTFRTAHASHRCIYAAWIARRLTCFWEGVRVNACSTVLSLLRAHTLDEEDVIACLHPISSPPKSWPGPRVQHALQVTRDYNSSDVIVPHWGI

SEQ ID NO: 995957 - protein, 194 aa, Homo sapiens
MGWTLARAQGVGGGMWMGFCGAIVSQRKIPLIRSTHNSGLKIAVHQDENSPMYSKFIGRATVEYQLTAPRAQRNSSFDRQGVVNSSCRGEAVEKGLGFAFSSLLQVICGMERCEVGPHNVIASKVYQRVSTRYCTGWLYGRFQSLICVDLDGSPEKCGIIFANSTWSLGAIPPVDDGLSRWAGHTIEGLLVKYF

SEQ ID NO: 995958 - protein, 187 aa, Homo sapiens
MTRILPDSTATGTTAAMSSRKLSGPKGRRAQHTRRDLERGFGSAPSRSHVTMLQREATRNRQSLDIVCYMGLPMSVCRGSFVTGLCQVSGICPISRFVSTKSSAALDLVVGTGGNKGGVNHLPEALWLLCHVSSICHHAFPTFPTGYQRLEHFDRILEMQNCEGRDIPNILDIDLIIWFGDMNFRIE

SEQ ID NO: 995959 - protein, 177 aa, Homo sapiens
MRSTDLYPRPSHTPIGSLCPVEVPFAHSIPVIQASSQGWPRVLQVVQEKCSALLRHQSDMSPGESGRSVSCMLFSLSLWDVVSGSSMKTLEKAHGCRGGIRRAEPCPKDNWLAEARRDNSLIRDATNLSQLAIGKGGAKATAKVTKLLDVDDLGHRFSVNSVKQQSFATPPLDSYAL

SEQ ID NO: 995960 - protein, 317 aa, Homo sapiens
MHRDHPQILCGHKEGTTNKAGRENIKTAHEDRGHERYNKTKGRGNRATTTRVSKHARTHLRREEKPKTTSEARGDRHKRGRNQQQHPPTNKQNTKPPKSRKKKHHKPPQKEEKKGGKTHKKGKINNSRRQQKRTDNNSDETTPHNTTTSTPPRGNPRRKTHPDRQHGTEPLKTHQHRTNRQPHTQRQNEAKKARRPDTTATTTTSENAHNRKQATDKAKQREKARREKQKRSGERTRRQKEERGGERGRKTQTTGEETGEEERDERKERGEARDTGGSVERKSRGEGEESGKKRKKKQGEEEETQKKENEEREKRGE

SEQ ID NO: 995961 - protein, 57 aa, Homo sapiens
MTTVHATAEWLASRFPMAPYSAGATRNETTVRGGKGPEHPQTDNRDKKRAVLQVNMP

SEQ ID NO: 995962 - protein, 422 aa, Homo sapiens
IASRPGPRRGEEGRVDRWMDDVHWELTGYHEQLTIHGKDHESVFTVSHVGLRPRSSGVTIRGIDIPVAASEHQILTDISRGTHTSMGNKSFAKLENQPQTLTQRRCCGIVWLEFSIKITRLAHKGLYCTSSIYCGKAPALSSKDLCRVPPVTEIQRAQFSYYSIYVNLLLHQTNASLLRPVENYVPPQCGKIIHARTAADRPKARLHTRDKLTTRTLTKETEQQQQTHSPHQQDTHLHNRHRPRRTGLQTKTQEPAHGDREYRGTKLATPRIAQRQIGQTPSHTQEHHTATKQGNRHKHRTRQQPHNSPHAPNQPTRRTKRTRTAHSTRTQAPHQQTTNSATTYAQKYTTSTEHTDTPRPTPTPTTTHSATLVISHNRNITTTHTPIHDPSLPAETTKEVQYNLLHLDHNTDQHTQLTQQNP

SEQ ID NO: 995963 - protein, 261 aa, Homo sapiens
MTASSKQKGTKEKQQNNTTQQQQQPHAKQKRQNNNRDSSATKEHNNITDERKRQTSQNKNTTRSENKDDAPKKHMKKRQQATTDTHTNTERPRHSEEQTHTPRRTTGADTRKQRRAPPDTNRTKHERQSRRRTNNERKQADQHTQRPDKHTRSNTRDTGRTPDRTVGANTRLATRAAQQQKTQTQTHEQREHDQNTDQERDEAEQDNTQNRDSNAQTTSIENRQRGGEKLAAPEATRQARSRHAAEYSQTTRLEQHTPAEE

SEQ ID NO: 995964 - protein, 289 aa, Homo sapiens
GTEFNSVASSGVEWCGLVCGVRRSSRPVGAGVVSRVKTWRTDGHGKYVDPSICGDELECVYQRIECKLWTFVSKTISHQPGVFHNGGEVSVCQKVTVQEEVTLRSYNFWRYHGPGRQPTFGDLHQTELGPSGAGCHVGINQNGTGKSVQEASSSSSGPIRISLKRTDVKSQDVAYPRRQKPGSKSYVDRHHGILESSQKFRVRTQLHGVNTNVAGQPQNQGNPQQKVDTQTRPARQHSPDEEWPRASHRGNPQQLSHEESRPGQAPEEREDHTKGTNGPKKPRPRSGRK

SEQ ID NO: 995965 - protein, 75 aa, Homo sapiens
LKGKMGKEKNSYQQLSSMDTLDSGKSTDYWPSDHIICGGIDKRTIEKFEKEAAEDGKRAPSSMPGSWYKAEIADA

SEQ ID NO: 995966 - protein, 253 aa, Homo sapiens
MNACVDCTGPGSYARSRSRTQRLSYCVTSDGLLRYLASDFKVQSSTIHVGTLTNMTNSGSHEGEIAAQLLGWCRSFHNSVDSTDHHDVPLPSTLGQLLRQHVSRGYPDVLCKPINMSTNAQLLDTFHTIYNRRTGPAHRQHCQHNRVRKSRKSRSERQKRKVQNDNPRDTRSRGGHPERPMKHTAQHASRTPERYDNSQKEKSRQGQATQPRHKTKQRTRQRAEHAPTDTKGSRAHKTTKLSKQNKRKQPTHS

SEQ ID NO: 995967 - protein, 286 aa, Homo sapiens
EGPVPPSPVRHVSPSVRFAEACVQTGAGLDVIMEALRSYNQEHSQSFTFDDAHSEEDLEETWRMLLDLLSWNRACLASPSVIIWLRDVVPEIPVLRGDPDRMTLASPVASKLALRCLGRGDWLWLMTWSESSVLPRKCVPDPRGWSCQATNGECLVTWGRSPYDTMGPCRLEPSVSVKQGPIVLRYQDLRGDQARMRPRPVVGLHSAPPGCPMLRGTWLPGMKGRRAFALNGVFPCYGVGPLPGLPCIPWLTPGDFADNLQCCRPRQRLILKGTPWEMGRWAGHFA

SEQ ID NO: 995968 - protein, 67 aa, Homo sapiens
PMFCTGCIQLEDVPDSAGLRLNRDDQQSPRAPGLLLQHCKDTLSVPISRGITLNGAIYKTARSCFFF

SEQ ID NO: 995969 - protein, 177 aa, Homo sapiens
MYVAIQVCCCPSTPLGRTTGIVMDLDDGVTHTVPIYEGYALPRAYPASGPGWRDLTEYSMKILTELRLLLSITASGKIVRDIKEEAVRRLPGVRAGDGHRVISSLWRKYELPMAGLTMDARSGSEGVHSSVELGTRHLILYVWTETSTGLGPFGWRKDPGKKIATHGGRPYSIKTHR

SEQ ID NO: 995970 - protein, 136 aa, Homo sapiens
MGSGRKLKVALASWSWGPRKTAQPINYYGSYSKSETRRDHGAKQYHIVTGATGQPQETTNKNTQERTQKRETPTDTKDRHKKTPHEKQKTKEERSKEKKKDNKTTENKEKQSNAKKEKQQRRNTKSKQEKQQHVNK

SEQ ID NO: 995971 - protein, 85 aa, Homo sapiens
DATDNELLALLRGGNMAVMSTYNMSYKKIIYKLNDVVISIPLPSGVGAPVIGEIDGEYLHDSRRKYPGVVPAVIDAKNKSGRLEC

SEQ ID NO: 995972 - protein, 84 aa, Homo sapiens
LERMRRRAQLAGSAAGAEVQLVLPPCTPPLGARTSWSTRIRTNYRNLTYIMHNTYQRNNKKTQSNRHRHNTHNPSGFITQRHTS

SEQ ID NO: 995973 - protein, 225 aa, Homo sapiens
TRGGVDVGDVDATAAEKLIVGVDEKLNPEDIKKTPVVHAPEDKKEILASFISGLIQFLQRTCYFTRTIENLIPQLLVTEQIGDLCPYDKAAKEWTANMPEHTISAKVKMEDDTQRFPILTPFREPGQALVRAEKSPNQYDKKHIRNCPQKDGWAKACTTHWKPYGLAKHAPNRVEAKFLGKTQIGMSAPCMPHREPPIHLTHRTDLQAQVITTISMLGNPKRRAM

SEQ ID NO: 995974 - protein, 119 aa, Homo sapiens
  misc_feature (12)..(13): Xaa can be any naturally occurring amino acid
  misc_feature (36)..(36): Xaa can be any naturally occurring amino acid
  misc_feature (66)..(66): Xaa can be any naturally occurring amino acid
MSYPPRLTHRMXXLACTNVAVLNAHLLSVTLPHVEXSIQAMNGHMIVGGAERMTPVRAHQCDPHMXHHNSDSIRMNCGITRCGLACTMYVVLLYLVNPHFYDIIHFNIAKSVWVIASQC

SEQ ID NO: 995975 - protein, 60 aa, Homo sapiens
MFGIQIVGRLSSDDTKFREAEMPSSVLKIIWRMDAMRFYPLLAAAAGGLGCVGPVWVLGA

SEQ ID NO: 995976 - protein, 247 aa, Homo sapiens
MRHAGRLQGPPRNLMVCSNLYVFGGAHTAFCCPEKGNRVLITPDTMETLQASKIAYPTITSFKSSGMCHKVSSSPNLRWNESSTSPMGCPEHPEKWIPNGPYTIQPGIPRMSASHEWTYRPHRRRRERAHLAPPEGDPGSDSVGEQTSPQGKGDHRRMSPPLAGRQPVHSHRTETNDQESTAGTNKSGTLRTRIARTGRSEADKPHEKEGQNRPVGKRTTRHKARPVSTDTANDGTDDRSDAAATRT

SEQ ID NO: 995977 - protein, 122 aa, Homo sapiens
  misc_feature (84)..(84): Xaa can be any naturally occurring amino acid
MAVARGNTGATVDNQRKLNEDDLYPTSNDVLNEEGQHLGRTGASVQGHRALMRQDRALRSSRCLETSLAMIDGNAESRNKVLEXTDKSSFKNLKNSSTIIICGTKCVRCNTCDTLGLSPVGF

SEQ ID NO: 995978 - protein, 348 aa, Homo sapiens
NKLRREGSEEGMYVLRCDLYRFDNDPHDRRPCLEKSEQVQGAQEAVQELSDLRCRMGRYRSGIGSGTWRLPRAWENYMSHLKKQILRTDNISFMLKADCQPKPREISNLLVATKKAQEWQAVYPDEPAEIIDRILKKDLVQGEHLGERHENNIYSGTLMDYKDDEGTSEEKKITVIVKVLDPRPQAYFPGLTQRQPDDENRSPKNTSSTSYGVMESRRTEDNIMEGSSKVEQGGPNEIPNQCNQAKDEDQYPNTMRKHTERPKTGMATSDPRRHNSDRSNTSTAKDQRAEKWPENTHTKRPTHIGHQKTGDNKRNSNKQRAHMRRQERTEEPTREAPPIRRESQQRDD

SEQ ID NO: 995979 - protein, 253 aa, Homo sapiens
  misc_feature (170)..(170): Xaa can be any naturally occurring amino acid
THASVDPRRPELVRRQRNGAIAVARAVPPRGLSESRYDDASYDVHMNAFYHRVDYPALHKDGAAGEAIKPRERRGEGLSSLYRAYLGQQRKFGVVLGGDQAAPRAPELLGRAHVGLTTVVPREVGGTSVDGPRLEPEEMMQGRVDRDTRNMLPAQMVQLTSRYLSTIAVXARNCTDLMTVAACMEGVDKTMVDGIRPTDKLRGIPCLYRTGTVVRRSAREEVAVRECMERRTRDAYPYNPELDDCLGSRRGHG

SEQ ID NO: 995980 - protein, 173 aa, Homo sapiens
MEAQVNLERKEDVTQKRIAKRRSPPADAIPNSRNGEGPHAGPTGENPAGADTRAGPHVGQLGPGENVMERKEAGPVSKPEAVCRPEAGGMHTVCLKAKSGPRVYYHSGGNDEGCPGKGRHQWRASGRMVPGEKLELPTRRGVPTVVPPGRPFTAGSLTDEWAGLTLGLLPGTH

SEQ ID NO: 995981 - protein, 326 aa, Homo sapiens
ALELACSEPGTPGPPASRWDWGCVSRPGVGLLGHSDLKDGRARPVRTWLSSLETGQRPRSETPCLPAGPVLRSGSQENSLGCPRPERPRQHHALHSMELPQAFQTAMDQGSCNGKIMMERERKRQEDRRGGYAGWNRSMKDEQESKADRRQMAQSSNVISEETKAENSEVRKAASVQAHTRKGEATRLIRLRARSTRFTHGRHSTKPEAGEGTQEVEPDAPVDNRGMAITQTQKPDVDTNNRGKTSIYRTSNCKGEGPWKRNTHNLGTHSGNTTNQNEDKSRENDRQANDTPKKIAYWGTPPERRRTLNEKTHQRHDINQFEVHST

SEQ ID NO: 995982 - protein, 78 aa, Homo sapiens
MDVAPTVAARRKDQQQQVKTAYKTQQHTSSTTVASTPARTSKQPRQKTRRRDDRKQETTPTTNNKSNNKHNRDETNSR

SEQ ID NO: 995983 - protein, 178 aa, Homo sapiens
MLYEADETPTRGEGGRKEKTAGEEQHKTRTKNKKKKRNETRTTKKTKTKHRETQKEGATHNKTEPKKTGGGRTRKTEGAENEDKTDLGRKKKYIPPGDKRRKTTQNTKRKKKRNTQQHKDHNPNNQTHRSKGSGESGRRASEGGKKSRRARRGRGAGATGEKKKKKTATTPENTAKHK

SEQ ID NO: 995984 - protein, 107 aa, Homo sapiens
LKCWDYRHEPLHLAGYSLFTDNYEQPSQRMNNRTNGMHVWRVVATSVKREILRLRLEYAAVVPSSSGARAYCDTKERVRIRQLVEQEEHRRQATYGIQVLQDPTVKN

SEQ ID NO: 995985 - protein, 67 aa, Homo sapiens
NEKGGGRSRRLAIADCHYPLLLCLQPTSDVLPVIPLGSRHYGVLSSTGAVMLLVPSQNASVLLCKDI

SEQ ID NO: 995986 - protein, 105 aa, Homo sapiens
MKGTLGQGGSSQVISTVIQSTGSGGQWMTAPGRGFHYRQQLGRLDMEIRAADVIKQYTQQTATRGLTSKMKRVHPRVATDDIQHHRGLEPYEQKDSQPDKSKQPS

SEQ ID NO: 995987 - protein, 158 aa, Homo sapiens
MRKHGRTYVSPPPGDEKDQQITPGGEKHQGAKGPTAPPEGGQHSTAKPTKTLGGRTITHGAPIREAITQRSYTHRPHTFVVTKRGGANTPTELSETKNSGGPIDTRRTHKIERTGHTNNESETPQEEKANRHKYHSSTSKETKWSTPQKAVSTGDKRI

SEQ ID NO: 995988 - protein, 485 aa, Homo sapiens
  misc_feature (96)..(96): Xaa can be any naturally occurring amino acid
  misc_feature (339)..(339): Xaa can be any naturally occurring amino acid
  misc_feature (424)..(424): Xaa can be any naturally occurring amino acid
VQGVGQCWRSKKRVAGDLKACEVVVSEDSSVQARDGCVPMDRREMSCVADLSTRYEGVAALYLTCITSFCVPASSLCIYTIVSLCTIMSDVTGGEXSTGLMHVDHGSMRRTRTLEDLRYAVDIVRSAVPYRHSIGAKLPRGGPCRKLHIGNVGQFVIWRRWVGQPIKQTQGRDLPANAQGDYTHFDLGGPQGELSNSGSGHCRLRHGEALRIERRTPGWSDTVALWDVRPMHLVRGKGHAEKGPLIPRLSMVNPLARIGGKKNGETFQSIELGITQQFVGNFQEGKGVKEGKQTWGVGKGGEVPLSQTIGAMNLNRAVETFCISGGSPGVKEALARRNXALNLRGEGGRRKDWHPCGGSRHGRKSLTHRKGSNHIYIDDTLEKGVPQPTGEARFEAVHQNGTGLEKARGFNSCQQKVGGSTQSXKGGLNRAITAMQRTLGHAGTRTWHTLLAIVRTQSEGDNSSVRGERIGRLKPTRNPRSNRYL

SEQ ID NO: 995989 - protein, 149 aa, Homo sapiens
MREIVHIQAGQCGNQIGAKFWEVISDEHGSRLPGPVTYARWDMLDRSPTSWSRISDVLQMNANRCQEYCVLDATPWWNHKNTVDHRHSVRSGHFLARSLEPENSGIWSVWAQVNNVGQEASSTEGADLVDSVLVCGTGRRRDKPVYVPC

SEQ ID NO: 995990 - protein, 107 aa, Homo sapiens
PGLSEAHNPAGHCERYASVGRATRFQPCALAPERPLETPGFIHIHTSHTCCQHRANTNLTRFGVMGAAKVTLGPGAPWGPGLPLTGLAPPGPRISATVSLCDLSHGS

SEQ ID NO: 995991 - protein, 301 aa, Homo sapiens
GTELKDWDLKPHVPAAIPPSLCPPLGPKTLHPTILGSLSVKANGASARSRIRPERKRADSQETSPALNLCQSTPTHFDAAEQTVTCWVAASSGGDYTKKEVKLRGPCADEIAGFASKPFAVRQADPGPPRPHRIIPHTKGTNCGIADEGLRYPIGTEEDDSGDRDAKQDRAEKGREDDQTRARPTRNELTKDQRPAHEQRPRDSEATRTAQELRPGHDTRPAPKTRGHPLVAMGPTEGSNKDKTPYRKGEDNEKNPTLTQATQDSGEPSTQYGQHHKDKLHTTPGRPHEGNNELHTQHPLT

SEQ ID NO: 995992 - protein, 462 aa, Homo sapiens
LLSSIFFFSSSSSGSSRPSLVTREQALPKEGLELTEDEAEKQQDGSTSTAKPAQPTYVTSVTDRTRRQATATKRDHSHHSKTRSPHTRTPLPTQDNYRAPPATNGSAIQEQPQRNFSENTHHRSSLYECDEKDQHGRINTLDPSTNIEGRRIRRQKGLSRPETTDNTAQRDTEQHAHPRGRAAHSPATSKQPRAPRQDTNQRGEHKHTTMSHSRPHQHAHAGAQPSHDSSNIRHIETTKHYKTNQQAIRVKAQEHTGKSAHDSGPRHTATAKEPNKRRLQQHTHSTRASNDTTHTENRDDPTQTHRTISRDIRTPRAADNTHTAKGYTTTTNQTQTPTNPDAWNPKGHNQQTTKQESKPPHSTSHNNTRPTHIRVPHTIAKAAQDSQTTPHQRTTSHKQAQRQTELGQQHSQRKTTHTPNTTNKRLRQPNHHRQNRQRRMPHKTETPHTRTANTTPTDTRDN

SEQ ID NO: 995993 - protein, 352 aa, Homo sapiens
GGEEEEEEEEGDGEEEDGDEETPLLNGQCSMQAKWGSRRLDNAGQHDSKRQARWVQASRQAGKQARCMVQASRMEHEDEEAEIRLRSKTGRLTDDSVMHDVRYQASTTDRPRTELRQTQTRTNVNTKKKHKAADDHIQPIHIPDNQKSKPWITLRDSTRPDPNHQWANANRQMTTRIIQQTKAKNENWQQGAGNKRTNNIQRTHANTTTQATQQQGTLGEANNIINHHTTSTEKHMAHGPRPHKTQPENDKQQNLRKQTKEPNQRHKNEQTTQCPLTNPHNGENHQRWTKHKGQKMKHTETPNLSTKRQLQEKSNRTNAPETEPNKETETTNAERATGRHKHRDRTRNTREQ

SEQ ID NO: 995994 - protein, 167 aa, Homo sapiens
MSRQVVRSSKFRHVCGQPDKAEQCYEYVRVSQNMWDRGSVLSTLVCGPDLRGQRGEGPSWCCPWARVDVWTKMRTRSVDTAACCARYRAGARTVTMFIASGSEECTVMVWEIPDGGLMLPLGEPVVHPGGPPPSVWAIVVWHNRAQKCGCSVRVVTIVLVVWGRGHV

SEQ ID NO: 995995 - protein, 110 aa, Homo sapiens
MDLGHGTHVICGGTSMVEAPCSVPAYSEVQDRTNLTLIVVEPTYTQDQAITLDTYRRMDKQPSPIRYQCGEHKCDEGLHNISIIYTTIVMQAERYQASRPFTAAAQQETL

SEQ ID NO: 995996 - protein, 82 aa, Homo sapiens
MGQIQEILRCGYRKDDRTGTGTLVGIRHAGALQPEEMNSLLLTTKRVYWKGVSEELLWFIKGSTNAKELSSKGVHNLGCQWI

SEQ ID NO: 995997 - protein, 235 aa, Homo sapiens
MSCGGDSAGWDEPLMAECSVRCRLRGPSETPSNAACHLFWGFASEPEPCPREPPGPFVRPEAGAGNGMAGKCTWVGDYSIFENSSSNPYLVRRLAELNNDCKWHNVEAKVVCLFRRRDIPSSLNSLADSNASEFRRGTPSSQGCPEAAAPSTEAPANFAFSASLNHYQPPTYRGTMQCDRLNETDILSQVLEKEDCYVYQMVFDPVHEDSSRLIRAKIRVVLKIPRREIREIRTT

SEQ ID NO: 995998 - protein, 363 aa, Homo sapiens
  misc_feature (210)..(210): Xaa can be any naturally occurring amino acid
  misc_feature (246)..(246): Xaa can be any naturally occurring amino acid
EYLVCSDSSKWVCEHAESLYAWRGGLRLESPGIYRGAYDGDRGRELQSCFQPIAARINQRTTVARFAMGTTDVVWKNATRKDRRIRFACRRRQHKKGAKCALCGDHRSNDTDYDVMSSQLQDDTRASRLGWYSLEAWRHGSPKRLSKNGTGDGSNTTLDVLLRQGLFATLNMPSIHLRRNDSTRRSLDARASPVMKTVTCAMEISVCALXLVGASAVSPILAGCVSLSSEGCPIGRAEHGVVKLRXLTWSGSQSCRVIHGSDATELSPPIMVDVHQWVKHLVQLASLAGCHHGDSCLYNGPTDAELDTVKHTPRSWEESTGALPPVMAIVTGTGDHWCTIDTAKVEKAKQTRMYTEGNAGING

SEQ ID NO: 995999 - protein, 339 aa, Homo sapiens
QALHPQSTMFKGTCSWYDLGTTYVLCGCCIQHGKVEIIANDQESNHSKLCQAITDTERLDLVMPLKNQVAMKPTNTVLDAKRLIGTQFDDAVVQSDMKAIGRFMGGEDAGQAARCQVEYKGETKSLYPEEVSIYGSDKKMKEIAESHTLGERLLPSAVVTAARLYFKCTLTGVRVPKMLDRICWVSMYLEVYYMRQLLHAYCYRGVEQEKVGARDERWLIFDLGGGTEDVSVLTIEAWESFEVEVYKLGELTHLSVAERLWTNRHGPPSLIGRSSKGATAYRTRGISGQTREHAAGTALRNGSIDGAKPYPSYCQGQGRRTGDPEHPHLHTAPPTLPPK

SEQ ID NO: 996000 - protein, 69 aa, Homo sapiens
AFTISLLGILVYRAHLISSLLCLEGIILSLFIIATLHNPRTPDSLLAKYCAYGHTSLCRLRSSGGPSRY

SEQ ID NO: 996001 - protein, 294 aa, Homo sapiens
MACEKVEKPHTNREQTRKPSKVDAGEQRLRKECNLKSRNKAREGERPLELAARHIAWYTVSRGIGTDIPESVTATSRKGPLVHRGSYISARMNPQVDERQQNEYRFSQCVYKTQSWVVEKNRRLPVVGYTTSQKCLAYYSRSMRDVRSKSCCMPPWQKKSLPVQRPMKVDDIMLSPSSYPRDALSDSSLNVGTAQQGAQEGLGLSLKQTWRSGLLLVTWTVMVRAIEVPRTKNTPEICHCQFDQRVDISNGKNPQEILLSAYVQGSKKGGGKTQGWPKERGEKSFRPRKKRRKI

SEQ ID NO: 996002 - protein, 473 aa, Homo sapiens
MSTHAVALQLLFPSFAHAPRGNWCSRGKRTGRRKKRKGAAPDRGIPTLQAAAPPTRAPSDEAGAQQLGGQLQSHPGACAGAAMIGQRSASRAGRDSHASDSADRSARGCTTGGLDGIRELREKHISDWYDAISTIKPTDVNNQKSTPGPIQLDTRPYTAHDCTLIPNEERAQSGLEGTPPNGSLDNTHTDNKEHRETGPQTQQDRLSIPQEDTHELTKSGTTGTTLRSMPRTDKHDKQHIVTATLNKHNKHTKGTPEPRPGAHQTDQKATREEHNNEQLTPTTPTQTGMATQQRQQDTQQARSSRGTRRQPTPRHQRARRREGTPQQRPHRPGQTSRKAPEQTTRTGPRKAPTGTTKQHKTHRNTNNTKAQRTDETQNTQDQPPPQQPGAMTDTHTPRTHNESTADSKQPRTTNTSTDQHDRATDNRKRKANHEHHPGGASASENTHHTETRTPQDKEENAGTEKGESHSRRP

SEQ ID NO: 996003 - protein, 94 aa, Homo sapiens
ADRPGKLFIGGLNTETNEKAAVMQVFGKLWSDIVEVLLDEMILKATNQEDYALCLLFETLQSRQLKDCMTHEDMYVNKSIKNGKKPVNGWNNAT

SEQ ID NO: 996004 - protein, 156 aa, Homo sapiens
STPLWAALRRTARDRLCPTHLETRRDSVSRGDLPQWTRALEGDLDHVDPYAQGPLYTPNSGGSCGAVSRASLCVAASMLCVGGGSQDLTLRAALRLNSHLAEGIGLSVTLAERGVRRTPGRVYQRGCDLVHSPLRSQECVVEQDSPEAELLPQGNA

SEQ ID NO: 996005 - protein, 43 aa, Homo sapiens
MHKRGLQRREAQYKDRVIKQPNRGTGRSTSGRTHSEAKNNKTT

SEQ ID NO: 996006 - protein, 231 aa, Homo sapiens
MSSHCDTSREIGLINPYTGSIKCQLLGSDMVEQAMLVSPKCNMPEDQGMAQVTPVRDWHLASGNRQLGLRPGDLHSNIKDVHWTRPWGAGSSQEVTDSRGEGDRGPGGRSVNKGEPINHGKMLVAPIGATTQRLYTGRQNEGGKHGTRKHGENNTLGGQLNASSYYRLSLQDNSSDNRGCVAKHPTYRRPLDEINAATNTHDRLSRRSNKDETHTVAANGSYRVSLNGLEL

SEQ ID NO: 996007 - protein, 491 aa, Homo sapiens
YVSECYGYRRPTLYGLIEEVLPPLPPPLLPPPPAKPELEPHAGIRSEMPDCLAPKDGLGWSIRGTARPGLPSQIRLSVIVCLSLTSPQIHPAPVHRPPTPASMQDTEHGMNSPQTRSDGKEEIRKKTHQQITDRETNKPAPAKPKLHKSDSDKPEETRHNQHKTQKHKEHETGKRKTQTTKNAERTTKQKGQQQQRTHRENQTTKSDTMKHRTHTEDKTARHQKTQRQQESQHNQRTPTHPKDQATQKHMNITNTEEQQCTSQKKSPKTKKQTKHSPRKADQGQNRQRNDKQNKTQGTTPGQAKRGQYKHRNEHSHTGPRTTQNPPETTKDEYAKHRRPGDTKNTHNTVNRKQPKSNKKQNKTSLRKTQTQLKHPQLTTKHHHSTAISTTPNTQQRKPPYTSRKPEGPSQHAGKRPGDGGSNRECGQKKRTGGTKCRGTAQSSKTTHEGEQRVLRDHSRHSASTTKHEEREHAAEQGREEREKAHPHPTAD

SEQ ID NO: 996008 - protein, 139 aa, Homo sapiens
MGAAIGYILSGYVHQEDRQMVVGDISLTAPWSRSEISKCFKRFQIYVAPVSQSFLLPGYRYNRSDIMPSGRSRLLEDFRNNRFPNLQLRDLIGHIVELSQDQHGSRFIQQKLERATPAERQHGLPMKFCKQPINYMTEW

SEQ ID NO: 996009 - protein, 107 aa, Homo sapiens
MRDATGDILRDYTDRSPESYRECLQSRPPHKWIEEHPARVYPRETPPQGASESCLYKRPPTKGDLPSFLPTVLSMPREETARFPTRTLKSLRYFRTLRTHRSIQTMV

SEQ ID NO: 996010 - protein, 113 aa, Homo sapiens
MAVRVQGSKSLFYLAVRKVWCYFAPREFPLRCRRIFDTLPRPETPLKPPNFSEGTLGPRDILGLHLRPEQFHAKKVRAHTMEKQAKYACDVTSGRVRRKVKYTLQRVEELQRN

SEQ ID NO: 996011 - protein, 230 aa, Homo sapiens
MGATRVDRRARLARDSVPGEAPNIRAKGVRDRAQVVGTKDPPRGHTETEGHEGALGPKGGLKEEKGAMRDKKEEKRREHPSPGTLGNSGQQQGNKHVTTRNSREASKDQEKTRGNTHWGPAWQNMDPTHRVRQPNEPQKPEGEPHLPGQTGHQASNMYTYITAKGPHTEGTDDQHETKQRINSRPESGQKTNNEAGYTTTNKRKEEARSKKTTMKRRQKEQPDNQKRVRY

SEQ ID NO: 996012 - protein, 233 aa, Homo sapiens
MTGGGKHKYRPKNVRRGVGEKNMLCGTQWMFLSLLKNNIFIYNTAAPKFFTMRGRTTEQTEKDEAREKHKKDRGKGRETESDKTEKKEEHATDSRKAKPRTEKARRGRGRRKRESAQNAKGKEKTRKRAEQREKNREPTTGGAKNRRKHENKRRERRENLRSGPSDTEETENTPRRPNERDAAARRATRSAGDGDQATQHVQDRRQSTHEAKKGRAGESGTQNRTREATHRAR

SEQ ID NO: 996013 - protein, 299 aa, Homo sapiens
MVNDVKCPHSFHQVKTLPMNVLQATHSHDPQGCSYLCDQLLSHVTNEMPLGEFNEDEDPGMHEGRRKDTRYYAYMLRQQELEMRVESVAADVPGSCQGISTMMGVTPDYDRTELISDATRLYVVRVLQAPCALPRGTNSSLRAASSKTTLIHESSKTRRGGDSGTTPNFGEEVLAPKSGSLDGCEHGSIGPRQAHSSTRNVDGASRSHRKEETDEDSESNIEVYTTYGAAVTRLLLIVQASQRMRLSRRPTRPAGQPDTHWCQQIPTICTTGDDPGSPYSTRMLHSQNSPRARQVKIGE

SEQ ID NO: 996014 - protein, 81 aa, Homo sapiens
  misc_feature (61)..(61): Xaa can be any naturally occurring amino acid
GRYEALKKSLSKQKGDESYLSKFPNTRKTLNQNGCPYIRLNMYERSKSGVRSNVILGLACXLSILEHINGHTLGDVRSVWT

SEQ ID NO: 996015 - protein, 111 aa, Homo sapiens
MWLLFLRQEFIPDPGLIVKETGKPSWQVRLMRSFNDHVMLFTQTMKLVHRDAHPPGALWGLTRCNVASQWNLSTTTDYGVLRSVLSGPLFQGMTQHCRILVDPSGCWVMPV

SEQ ID NO: 996016 - protein, 212 aa, Homo sapiens
MGELGTPGEGGATQVPGVAQVSLRNLWRLSSESVTNMWRYPYATGPENTTQVALRSENTLRGLTEQEKTPLSWRKGREKGDMRRRAQNPQMNGASVALPIHSGATWREQHIPKWGETNRGANSRPQRGTRRTGGQQKKRPQDGGETQPPKAQPREDKKPNSPPIELYQKGRQQRNHKRGGHPNGTRDENIARGEGDNNKRVINTTEGSAAKA

SEQ ID NO: 996017 - protein, 140 aa, Homo sapiens
MNTIASAIRLSDIPEICRTLSLKGRHSYRERAPEEPCVQQDFNHINVELTLLGRIKKRLRVEQMVGKSERNRVLPYRDVCGYVSANKYIMIIGGVIIGHSISNDDESWCYAHYPQSNTVCVIRRQNVVIRILQQIRKISS

SEQ ID NO: 996018 - protein, 133 aa, Homo sapiens
MRDGRGHRGGRPELRLDERQNHYVGTNNIASKERTQERRERYRKRSHQKVAHTKPTRHMQRKTPNTTSTKKHKSNTDDANRYNQDSTQKRLSVKRTTATVETTQKSYIYSTIPHSTHSHRRRRSTKSKHNRQH

SEQ ID NO: 996019 - protein, 68 aa, Homo sapiens
CSFVRCRSSGSRDSSEVIRKATHEEAAMSQPGVGMSVRTHGVKRADAASSAQRTQSMCAANVIALMAG

SEQ ID NO: 996020 - protein, 30 aa, Homo sapiens
MKTENSSRLSLRPSVAAQLWTSHKYLHGRQ

SEQ ID NO: 996021 - protein, 74 aa, Homo sapiens
VDSYVCMVGYPDSVVLGMEEEKEEEEEEEGYEAEWEGVGEEGKEREEGGLWLSYINSESVEVTERMAVPVSARS

SEQ ID NO: 996022 - protein, 139 aa, Homo sapiens
KGIMDESAVHHHTDGSWVVVKEIIKSDCVAAATHGFDGEVRRVERGTTHFRTDSRRTRGSTAHVLIATELNATQPPPAQHHAEPPLNRTQPPPTKKTTQHTPRTNTTHSDAPQPKTHPDNNHTKHKRQHAPNDKAADDT

SEQ ID NO: 996023 - protein, 191 aa, Homo sapiens
MWQPAERRGGCAHAHHNDVDIFLLTTTQWWVFHKLTCCGSSPPGNTTSCAWQTPSTLLEQRGVVPQIPIFISPSSQDRKCSFRCDNTERFKTFCYDKKGTQVLRTLVGNGLNVRTYQWGEKRPRYLSVGSKAASVLAAQQRCVPDRVWTTTVCVGVIDIPAQSPKIVRALIGSAHLRTCGGANDKVVSSCW

SEQ ID NO: 996024 - protein, 408 aa, Homo sapiens
GNPPVPSPPPAREPPGHWGNRGVTAETGETVGDRGDKQQGMWHGVGGPHVERGARGGNLVTGTQRFKGGPCAGLLTPVCAFANGCRGQPDLPANIGSLDGTATLASGVHVALQTLYYSHSAGAICTWSCCRKFLWERGGYTGETERVFWVPYRGAAPGKGGAKGSEEEATLSCDNNACNSLHAVAPPLRPFTEFSGWRHKDSSSHNEDPGFQCGTTWAVNEHTEGGQHVVLPMRPHLPGTLESEETPAPIGTEKLSSPKNAQSPPVTSGRGKHPHGKPGRDPRGRQGAPPGGRNPQKRRAETEEGKLKGPAPPQGTWRHACTRDTGKNREVEGGTLRKTEKRAAAHQKADTSGAQQSNRRREKRHNKGDTRNTNTPCVTQKRHGEQYQPQRYREMNTHSVCVSATTDT

SEQ ID NO: 996025 - protein, 120 aa, Homo sapiens
MGLHTQCSQCQLHLDDRQSNVSEDTAPRPWRRHSQVQQHHRSEATHPPQDRTAVTAAPTTRSNPREHPCRTGKPAHGNAEHHNDHGSHRHGQPPTNDGPPPTKSTASTTHTSTQHEATPR

SEQ ID NO: 996026 - protein, 69 aa, Homo sapiens
ATGTGEYKRHKHWPLQRPWSIRVEDYVVMASVCSNEKMAGSIMGAMQLGRRNSSRALTAMHVSDALRRT

SEQ ID NO: 996027 - protein, 390 aa, Homo sapiens
  misc_feature (10)..(10): Xaa can be any naturally occurring amino acid
MDGSSTFGTXKEHPTSACATEPRRIKPFTGWGEDVPKDAARGRHGEGPCHRSLCGTLGMHLMRYTEWFLVQPEKRPCRGAAAAPESILEGQPKDTHGTQTYGVHTCSPEACTAGMDGLVMHPGVITAPEELKWSASVETRRARKGAIRLGSMLRRTVLQHWTRLILVPEAHRFPGEVNKEQSPPLNSQVGTVALGEVPHGHICPLFRRHGVLQATFLKESIDIDAKLYTWVKPENNRDWKAAFALKAPKRYLALEGGSHLLRNPPHNINKGPWDALKEQPKGEDFEKTRRQVQEADTQRDMGPYRINPWPRKQQTLHNISGEKNKQAKQRRKKPNEILNEETHQTDEQRNRQYPGRELDPRAQTAETSNQHKTKRPPSADQKHHAPTNTE

SEQ ID NO: 996028 - protein, 218 aa, Homo sapiens
  misc_feature (189)..(189): Xaa can be any naturally occurring amino acid
MEARLSLECHEIRTLSVHFLEQRCHKLTGSFFSAALEYVRSHPLDPIDTVDFERECGVGVIVSPEQIEEAVEAAMNQAAAQAPGWNVTSFNMGLLMGEARAVLKVGGWAEMIAKWLWTCGPTSVLGPRGRLIWRRSPTWQELGRRTDRRRQDVWRRRLCNPFGGPSGEPKSEAVKLRPGGGSQPVFVPXWGVPPAQGLLDAPYWAAEFGNHEIWRANS

SEQ ID NO: 996029 - protein, 443 aa, Homo sapiens
CPKKGIFFFFTRRGKRENQKEGPRGGAHLSGDHPLSYKKRRGEEGGAPTPLLLVVHIEGPRVLTTLLGGTLSMMRGGPPTSLAGERGGRGATHPRCRRPATSFFSTNKKIFVGAGRNRGATNTTRGRELGADTKHSVAARGDITHAPAMRSESVYHKREWALFGTHTKPQTQKRGLHKRSMSAGNNHEKEQVGAPHKTSGEGHAWRDHTRKGGGSVEEGAPEERTIEGEIGGGAPQYMEREGDTRGHTKRGENNTTWGGYSGKKHHPENQLHSMGWDGNNQGYEKDPPPGGTKCRTGASPEEHKQSRRTKHPREERQQDVSGYQMKNGRHGRPPPPGAPLVAKGGAATHYEATQRQRRDRHNEAPPGGETQSVGGDLGGAAPPQVTVMVQELYRGARAKGTPTEGRNPTAQRDRQEKEGPQKRRFQEGIEGTSISDCGGKAPL

SEQ ID NO: 996030 - protein, 237 aa, Homo sapiens
MTSRSYVASGTYQVTWAHHSLIENNQTNIIQALLITILLGLYFTLLQASEYFDVVPCTISDRHLRPQHFLEPQASTDFTSLIGSTFLTIWFIRQLIFHFYIQKSLWASKAAADTDILGDVVDYCRMSPSIDDGLNPKNKAQTLRPNKTSARSHRRATAISTTRPPRIPTTALAQENTPQREEINHGAHDTRRTNTTPDTTITPGTTGEPETRTTKSTHTTTQDTTPIEALHRADPDE

SEQ ID NO: 996031 - protein, 348 aa, Homo sapiens
MATAPDYRMSDIENKKQLNTALSTKKYVELQETEMMDPELEYTLSEGLHEQMINEVLSGSRFYTYHRRQVLEAVITNRGIDGSQMETDDRPSARSPQNTRLPLKPHVEEKPVIADIPKFCHGILTKARDDSDIREDKSSPCSEARRCCVIQSTMYFSTVNDLDPNHYPGVRPWTTGWILSSSCTVQTRSPSHMLLEGQSSQSRESETGQVEECLKVNLFQDPKQNCEAGSAKDAEEESKADIFVDPVTLITVDALDIHAHWSKHHPDGASMSGSWKPEVNGVGKPRHKRLRTDGMGVRPRGTTKSPGSDAKGSPPERPPEHGQRMSQAKGEPKGKTRDPSKKITTDPT

SEQ ID NO: 996032 - protein, 223 aa, Homo sapiens
  misc_feature (83)..(83): Xaa can be any naturally occurring amino acid
  misc_feature (115)..(115): Xaa can be any naturally occurring amino acid
  misc_feature (153)..(153): Xaa can be any naturally occurring amino acid
  misc_feature (209)..(209): Xaa can be any naturally occurring amino acid
AIASVGVMSVVVLGEHSLGYTGGDAWTRACSRAGLLGFRPGGSTLCRELSRAPSHGSQVSTSAYTVGTLSEGRWCHASPPCRXLRVHCGPVGCGSTRMGGSTWDERAALCRCVKXPDGVRTMDSPQRAWVRAPVGERRTVRIYNAVQALVGAXSQCITRWFGQYSTTSTSCRDVWEYVARLILDDFCANKCDQFKARADRHYPREPRYXETLRQGVLYAQSRR

SEQ ID NO: 996033 - protein, 75 aa, Homo sapiens
SDRQINLELYASYMYCPLSYYLDRDVMWLRRHFVLSTFFTDLMEEREHADKSDDSCDIPIEVDRMLPSGYQEAIL

SEQ ID NO: 996034 - protein, 434 aa, Homo sapiens
MEGVPLSYNIGHYFAIEHAKRRFLQTFECTTILYNLSHVAGETAKVHSAPFTSSVLSEVLYQCVRRVVHNARRIASQKYTENEGATYTRAIKTPRKKQREQPGGDKTNSYNAIIHSRRELTPRTDLQERKPEGIIQEQDQHDNQRTTHRALQSNDPERTTYSATKKPHRENKRHGTPEPATDSKKHNAHNKAQQGNNTPTETNQPTHAKKQTPVETTHAPPTRTAPQTAPNQRRGNKHNQRRPTQNNNPNQPGTKRVTQTSNNTTQGHQTSKNPTPQSQPQHKCSRKKGPRKTKATDKNTKKKHPRKREKETQQQRTNGAAKKNDTQKNTATPPHHDNQQKERETETKTSSKKHRRHRTQHTNTEDERRQPTPKQATPCDETKSESARNRDNHTRERKEHAEDTAQPRGRSNKAHPKTQRKHKKQQTASRPQKI

SEQ ID NO: 996035 - protein, 126 aa, Homo sapiens
LPLTIGKSQWMTGATMIPSEAAPCSTGRSNLWIVWTGNPTGDRVEIYVKQEERVRVYHTIREELSLKREFPSSLMASSLKRWIDGCPQDTSRWKIASRQKPMCPCLKRRLQEEVMEAMGIKGDPGS

SEQ ID NO: 996036 - protein, 485 aa, Homo sapiens
  misc_feature (14)..(14): Xaa can be any naturally occurring amino acid
  misc_feature (16)..(16): Xaa can be any naturally occurring amino acid
  misc_feature (26)..(27): Xaa can be any naturally occurring amino acid
  misc_feature (71)..(71): Xaa can be any naturally occurring amino acid
  misc_feature (138)..(138): Xaa can be any naturally occurring amino acid
  misc_feature (399)..(399): Xaa can be any naturally occurring amino acid
MHCRRGDKVLEPSXQXSGPSRRVPIXXTVCAGANLYHNQNTKYVRKSYRMRRVCAFASRTGSRTRAYTSPXRSVAPRALPLAYSQSVAHTTRKAQFVYLGGGESSRLEELIRPRSLGKNIPEDRRAQGYRNRVGALMXISGVGSLIMGAREPKLSQNLCEPSNYKETKCELYQKGGGTLGLVGMSALGNLLRRSYDSALGNCRFQAGKTGRRFGVLGAIAQPFFVAKWDFIVGVKFSSPMEATTWRGASRTNSAGYGRRPRFDRPKFVPMGLPLSLSTPKPLGWRWSVARQQDNGSKNLSVPRGCAKGNHHHALMAPSSPSPLVKNTQGPASKLEERDRYTATAIYIGTARDKDIVVFYRRWAKTGFRRDPTPFGTTILKCSKAKIYGSGLHTQKGTHXKASEALTLYLFSVGGAPTTNIPNGGILGTHTVVRHQQSDSGPRGIWGPNIVSGLHQHKWVRLYRDVVAQHWVHSGGNTPYKGARFN

SEQ ID NO: 996037 - protein, 349 aa, Homo sapiens
GEIATDSDTPCPVDLQRPGPRRARMTSPEPLGSPACMGLCRRVSFVDPVTCGSQGLHSPEPPTSGGEKPGLTMGLRCNMFPRLPPGGELQRRAWPTGNPFRLGQCPRKGKTDSMRAPRLAHACRGRDQSKRSQEAVDRRSEAMRMDCRGSGTVGKRKRLGEYSDQIRDKMLRIVEKHEAGGIRGQQDVDRHDYTKRPYIINLKQNSTSPMRKGYVEQGRNSNMPRDQRQAEREHGLDTREYSKHSSTISTQTRQSTDSRHDAAAGSYDTTRKDTEENGRTSSRAVKRGETRTSGTHRLGSHQRRQPRAAQEHPQHRVTEHRGATAPKNYRPLTTNHPEKARPARSPASS

SEQ ID NO: 996038 - protein, 250 aa, Homo sapiens
VDYIGTASASAHAHRHRVRSQARVGWRTQTTPGKASEGGVRSGPCEWGQARGLVAGSGAFILTGAEHPRRPIAPEYVRVRRALRTHVMCVRSEIRARHHSRTVGRLRCSGALYPCLALAYGRDRAATAVPGVEADPWQSRRSRRRRRMENFRKVRSEEAASGVRGRGRRPGSGPFADLAPGAVHMRVKEGSKIRNLMASRHRQHGAAATRAIVFSGCGGTTKTVTCAEILKRRLAGCTSHAARYRSVREC

SEQ ID NO: 996039 - protein, 247 aa, Homo sapiens
GAVKALVVSKDSLRICIHVPVPGGSDAFPVRSPVHLSVPSAEDRVALVLLWMREFIYDGTEESIEGALGRVLDGTVNAWCKRDVKLQTRLTHMSDPLRIAAAELNQQRKGGHVRSEWRRGRTLFFDRDVCRRIRPGGHTNHGEAGPSSHVHAIPLMLPLVIHGGFWMRAKETLMHRWPVDRVNTIRHRIAIKGKMGSAVYMEIQFTTRPCEKLISACAEYGSVLREHGVQRRSGDCRREPAARGVDY

SEQ ID NO: 996040 - protein, 294 aa, Homo sapiens
PLAPLFHVSVQDPMTDSVSRLLTIVGAVLNCQHHLYLGPNVDACAADPPGQNDGAHRLPPPLRGHTRRRGAWRRGPQRIRKRRGSPLLDPGHWVLAQQVHLASVAPVLPPSPPDHHTAPGKSPKILPDILEENRGHPYGLESNYRSGTKCGLKCELLAKCEFFNAGGSVKDRIRLRMIEDAEARRDAEARDTMIEADIRATPGSGWSLAAAVRGYRVHHRDAREDELREGGRAAGTGAEMWRTPQCQVRFPEVTWGWLWAKKETPSNITKRRRRNPGIPRSKPPVGRTRPGGPR

SEQ ID NO: 996041 - protein, 198 aa, Homo sapiens
MGKVKVGVNWIWSILGAWSPGLLLTHGNSEILKAIQCTPYHMHRRTSQWYTYCPIMYPPYEQIPMATVHRLENRASLSIKWSNPHPHIFPGSADARPHNPKWVPIAGGHDVNCIACRPITTMEHASYPHPTPIGNKHDDHMTVTIHYIGNNHVQILKKLEYHPHSIMEHHQSFASYQHHHQLDYQEIHLWYRSSNTTL

SEQ ID NO: 996042 - protein, 186 aa, Homo sapiens
ERYAYASLGREQALFMSTAQFNRISYTGLREIAETPAGQEGIVGTSKGAETMEDEYISLATEILGQACIALIPRVASKMTPHARTSIASQRKRPQAKRRHKTDSPLHNPRQRRSKRIRRIQCRHKHVGHERTAAESVMSERMKFAGQEYFHEEVTGRAGSHMNFPNPRSDHCRGSALYAPKAVVSR

SEQ ID NO: 996043 - protein, 346 aa, Homo sapiens
MQCVAGLAGGGSGRASGSLLGPPALQARVLGFRYLENSGQINSGAVAEGSCEVQLHSRWHAEHCLHRHCLNKSPPKRGLVVGIDVHRRIQGQKGQPLPGTFTGDYEPGSEYNLNSVGPELPEPGAPVHSVPAVPCGGPGRGINFETVFLLSGNDPAIHLYKENEGLHQCVRNSRGKLFPELTNLSSSVSGWTSTISPGTSRRPLSSGLSEWVCPVSPRGPAESRGLQIVARPADGPISRVMCVSLWTAKGPKGRALTGGVQGLPVGSNFGAPGVYWRPAEPGGVTTHAPAGERHVTALAWNPRIDGSKTRGTSAEGDIRAANVFSQKSGEAHLRYDREECAGGIIS

SEQ ID NO: 996044 - protein, 136 aa, Homo sapiens
MAPWHNTPTEAKERSRGPKHVTTKQKRWTLRQCPTQRIDTCRAPRGPHKSNERHENTEERQGPNAPTEPHMSIDKRTYHGRHNHMGARETLHQDPPPERQQITQQITVHKTPYTTYPTTNSTRREIGTNNAHTRTT

SEQ ID NO: 996045 - protein, 41 aa, Homo sapiens
MLVTEICTNIITKHRRHGHGEFVEVGLMKRSIPWLYVSSER

SEQ ID NO: 996046 - protein, 107 aa, Homo sapiens
MDPQHIVLGRTRETTPILQVVWLGWMSPKHLFSPPGDRRPALTTRGGGPPTARSYDPEARTNTSQRDTCRGEEKRLTPTKRSVSNALANLGEAGPEVYTAADAHEER

SEQ ID NO: 996047 - protein, 233 aa, Homo sapiens
  misc_feature (127)..(127): Xaa can be any naturally occurring amino acid
  misc_feature (169)..(169): Xaa can be any naturally occurring amino acid
MHPSANRCCVVNKPNTDTLRVGGRPPCPRHPGRTRLFNKTNLTAGAPRGNTYVSTSSHRGHSQPSITSSKETRVAPISTKYHWRIGDRLTPPGGATTTPNEGATHTHLLHTTAGGAKLINVGRPQKXPVLVPTHHHRQCCVDFCERTRSITLYRYNKPLSYNVCLRPSXLSPAPTTKEDRSGAYQTISKQHRAATKCVLDSVTLKQRQKEHYGEQTKLNIRPLMNSSDKSKHE

SEQ ID NO: 996048 - protein, 272 aa, Homo sapiens
DPTLTPPRGSRSRGPGLSLQALTPTLLASSLVAFSAPEVSMPTGPHGLPDPMLEPHFPHPTLATPRPTHYYSPYGTLHQNSEIIYGPRLIAYVIKAAPTAITYPMTPTQSRANHIRRAPSKGYDGTTRRAPNTHNSTSHSVASDDTGRQHLPILRDPATHEPRGTAPAGPQLPRTYQDTTFPDALRQPLKRHTDTRNGQTRPEKRDTTKTTCQWPANNHKRMKPHGTKNNITIQFSDPPWTKRMAHPTLRATTIGHIATPHPTDGLVAIYGH

SEQ ID NO: 996049 - protein, 393 aa, Homo sapiens
ARSGHHTFYNELLRGPWRSTQMLLNEDPLNPKANKTRMMTHDYVMRPINNPWTMYCGHPVPCLYPLRLLVTTNGIVMDSGDVGHPHGAHLRGHKHLPHAILASGPVLARDHERATYMKILTEPRTTRFTTTDLSGKSCASIKEKLLHTLTMDYRDRRLDTAAYLLLSLEKSYESARMSHGQYTNLSQGAAPGSPDGSMNQNIPILELLGIYDGIQITHLQTPSTDQCDSREHPPKTRRPPKHESHDGRAPHTTTGPHRRTRTARQRRYHRPWKPKHQKHNSRTHRHAPEEKEPPEEDRVGSTMGAKEPTNTHARTQAPSTSTAKDHTDNGGPTKETTRQHADLERHHNSTTNHTRGTGQHADRHTRRPREHRHHKPAQGRQDRQRQRTQPQHP

SEQ ID NO: 996050 - protein, 194 aa, Homo sapiens
MGYPNYALTPFHGGTWIRNGLGFPQDQGANAKNETKEGAPRKGGVDVQRGNPGEEPTLARNRTVSRQGQPRTPQQTRKERTTRKGRDKERGTNTKLQHKMSRRKQQGPTQERQQPGTRVDGDHKQTDVRETQEEQRTDRETRNTWTRRTTERAANTGHHKTRRLDNETPGTLRPAARRKDRKQTSDKQTKDEER

SEQ ID NO: 996051 - protein, 334 aa, Homo sapiens
MPSSWISFGNWYRKVTSPLALPGFRSLAGCRGGRPVPGEVLVQRVKCWVLLGDLGPVGVTSGVWFSRVRFLGLSWCFGFCWLAGPGLGCQVGACWRQSSRNLCPPPAPGPEEVRHGVLVMPPSIEPWLHLVSKGLGLDLSGRGQVKWGSLGATQADSKTQQTLASRCVDITRDEGVHCGVAHRAMASVPGHAYLWTSALDTNKETSDSETEQDLNDQTGTMKGCTKEDRKVNPRPNMVAPKRGTDQYSWSRDKKKAMRDNKKVNNRGNSHKETRKRTQQTQGTKGKNRHQTVDMTQEQGTKEHRVITERNHSGKAATITKEEGPQQTRDHYKGP

SEQ ID NO: 996052 - protein, 97 aa, Homo sapiens
MEHENEETPDSPTGPRGRDRSRKDWTGGSARDVSKYPQKTTRKERETKGTGTSTSQTRGKVHNIKNNTEGPPGTKFTPPNAGFAGIIKGGKPCGGKG

SEQ ID NO: 996053 - protein, 132 aa, Homo sapiens
MESAKPTGSPPRRGVQWWPAPGGNTRSPRCKNHVPTSEGDASSLWWLEATFGPVSTHFGETYQACPGLIWERRACQELLDRTSIEWTHAFFSHAHVTPITRGPSSAPPNDPPGLANVELHFHSIRLPNNRPN

SEQ ID NO: 996054 - protein, 118 aa, Homo sapiens
MCVCERGWVGEEEKMCAEPPQGHVALCRTHAVGGKEETCRCDTVCAPFQCALERTQTERCVDTRVTPSGVSGNRGGPEATPESTSRAKTQNSKRRERRHTGRGTHNTGTTDTTQVGTQ

SEQ ID NO: 996055 - protein, 496 aa, Homo sapiens
MCLLCAALACSPWALLPLLPACLPPWSPGPDVPAAILAPADQSAEELCSSEDLQAVWPWTGPMISIDVWKHACIRPAGSISAYQDHPSSFTASKDHSGKRASVVRTGRQSTVHRTTRPSVLLPRHHDPPTLAISCQDNPQTQPKTVAWVNQAGPDDWSSDPKPRDPYPQKPKHTYKQRRDPDGIQHLTDTNYEPATAIESAPPATAAHNQSLPHKPQGPQCPRHKGDNQPKASPAEPPGDPTHRQHLAMTRAQHRQAASTDNHRQSRRRAPHRHQQTPSTRTTPPQQHTQTGAHHRSAQTKLHTGEPAHNQTRHHEADPAAARTHPRPHKRSIKSKIATRNSETWRRPYGKNTGRSYDEQDRIHDWRTNGLRAPKPKHTPTACQDRQTNKRHEPRQKIRNRGAPPRPGNQVTADTSTTSSERAQARQSARTQAKTATTASARTTTAGSASTPRGRARREGQRAPARTRHHSEGRARTRFSQGTTRQSAHRRERAGE

SEQ ID NO: 996056 - protein, 180 aa, Homo sapiens
TRGVSDLDSKINFKFIKSDPTIRVNQTKSDQAIVPPCRGGWGPQGAQVLQRVARGTGGGLVVAGSAGGPCGQFCKWCCWGGLCRCGSGGLDCAGWPRVGWLLRKAGWTPVAFSIVPARDSRVLPPVAFSAMWGSFRSLRLPVGTAFLNVEGSPGLQNFLWGGSQHLGPLGPTIPNNTLCR

SEQ ID NO: 996057 - protein, 149 aa, Homo sapiens
LAPGAPIACPHAARHPGPCRRSSADSKPFRRDHRCASRARTRPLPPCPVRGKLKFDMSGVKMWELWIIGEEESDPGMLTETETAGQDLFDNLGRGENLDDIINMMWMTYSTGFKHAELLVRAYEDSVRCGTKSSMALTLRFHNSPATLR

SEQ ID NO: 996058 - protein, 104 aa, Homo sapiens
MKPPQRDSAKGGGQGAQWGMAHTPAFPGTRKYTLPKTQGGEGTKEKHPAPQKGTATQIWRTQCGGPEGTPGGNRRPPTRIDVATKATMLGKKRNKEARGVTKQR

SEQ ID NO: 996059 - protein, 313 aa, Homo sapiens
ALVCIVSTSIAVRLRYYMVVLSPFLVLRQLPAVRDICGELVEEAYPLNVYDVLCHRTSDTTCSGTLTGDYQMCFGQLNVRQFGGERIATARVPGGLRQTLGIRQTRRVALGKGLDSTARFVTKMRQSRDSRSRLSIALTLIGGRNLSEYAMTKRVVDRGHFSRVSSLPVTNIGPCPDLRRGGRIPVIDFALFGHGRQSAPLCSVDISLKRIFALSYKAPKVEEDSSLELARAIPKGYYAVILVGRTEGQTSLLCIKGENTYKGRKHAVLLAVTLILVPYEATFQWGGGPMQMLQATKPLEDGSPKLKRMRQPN

SEQ ID NO: 996060 - protein, 327 aa, Homo sapiens
ARHSPPGLAAGVLADGEASPGEGGSGLRLSLKKTPDSPTGQVRWMGQRPDPHPCPSIVPSYPLSEVRAIAVVDQTCRWRQTPETRAPGPRLLSGHAIEPRLIKHLQKKSKEQREQETVLKTKRQRTSKCEETVTQKQGKKTDSHAERNTQTSTGTDRCTTNREDREPLQIEDGPTMKTQDGDNKPGRENTGQYPSERKTGKQRRRRGNKRINRRKPEPRDAQDARTTREEGNREPTRPPVRKRQSNQATAEQHNTPNKKQNNNGKKPTHDNNPKCNSTPRKRANSEIDKTIRRTKTSSEHTASTTSQSTRPENMAKTRPGPDTGHLR

SEQ ID NO: 996061 - protein, 277 aa, Homo sapiens
  misc_feature (118)..(118): Xaa can be any naturally occurring amino acid
MWEFTEEPDRYEPDKDRRSSEKCPTSRVYPISLSHTFLQECRANTLALQGTLGTISQGALGATLTAHWAGAQDTGGPVGGHQRGGNTTELLNYGLEPRTTRTWSGKHKNAPDNKGDDXARDQTSTTSHRQTQNSDHHTRRDREHPSARAHPRTLTGLVTASNSTWSRPTEGSNKDNDEPNQRGGPNTTGVTNSTTITDRAKMRPERNEHPHKQWRDWGTSTADVTSPPPAKNRESHNHNARAREEASNEVIRHNEERDKVKRQFRERLTQRAYTSPD

SEQ ID NO: 996062 - protein, 42 aa, Homo sapiens
  misc_feature (26)..(26): Xaa can be any naturally occurring amino acid
AQTERHSDDLSLGWGHLPSLQLGVSXGPTQTERHSDDLSLGT

SEQ ID NO: 996063 - protein, 176 aa, Homo sapiens
LFYNMCNKKRFSQKRPKPMSSSDSSDSDDDMGSRFVYKFSLHIYNMLSKKTFALRAKTKMPVSMYPARASVISDIIVIGIYNLFVYSRHLGVSSGRKGAQDVAAWCTEPMIDIGSREVQTPGLPYVGHGLNGSLPNLLLTDLEGERNLIVEKRKGASGAKQGESKRMVTPEARTRT

SEQ ID NO: 996064 - protein, 322 aa, Homo sapiens
EGLEGRGVRDRTQVQIEHDGWDEDVNKHGQGKDLGETEQDEAELIREDTRRGALHKLPVRAPRGRAGGGGVKGHGEEELQRDVSAVDESPPLEDAIRSGRAESQDYRISGARAADDPRREPIPEARGGAEALSRWGPRATLMYGASPGTCEFPSGVLILDEMAAGGDGKVEDPEGRVFDERYRALYRGLSNSAERGQGCLETPGSAGEEPGQGRLGVNEAPWGVGVLKDACRRSVAERGPRVCPQGLQLAAIGRVRIDGPSYNRGAPVDLMARVWEPAIPICVGECIHSEGMGSSGTRASAGKYEVWKKNVSHGRGGDKRDK

SEQ ID NO: 996065 - protein, 102 aa, Homo sapiens
  misc_feature (34)..(34): Xaa can be any naturally occurring amino acid
  misc_feature (61)..(61): Xaa can be any naturally occurring amino acid
  misc_feature (92)..(92): Xaa can be any naturally occurring amino acid
MSLTESERAVLGVSRKDVHSLTELAVQLARTPHXYTGKGPISHRTHTHRRSMNLCAHRSHXMSIRHGTGNDVDIGIGHYFLRVSERLNHCIXDRLCVEIRDK

SEQ ID NO: 996066 - protein, 206 aa, Homo sapiens
  misc_feature (24)..(24): Xaa can be any naturally occurring amino acid
  misc_feature (42)..(42): Xaa can be any naturally occurring amino acid
  misc_feature (44)..(44): Xaa can be any naturally occurring amino acid
  misc_feature (58)..(58): Xaa can be any naturally occurring amino acid
MHSMATQRTWQYVAELRVLDTSHXQSQIEHESHPHLYVLAHXEXEIRSPQYRVQNQWXVQYRSNTLLCASDECMMDRGIIGSPIVSELTYSTGDNLHMSAYLKKKDESHDGSSKYLQSIEEQLRNVDGLYDCIALCLLQHQLPQLLVERRQISGACSSYAGLSLDDVSSRDDFTEERLAKLQDPFSLYQCHTIMNCTRTCPKGLNP

SEQ ID NO: 996067 - protein, 111 aa, Homo sapiens
FRRAPATICLVDAHACSDVPQIMHGLPAFYRQMIAVYMILARIISPGTHVVDVTECLVNECPDARYSACFKVYVAPALTPDCVVALSQLGAKEGRTGRWSSTKLGKIRERD

SEQ ID NO: 996068 - protein, 186 aa, Homo sapiens
  misc_feature (2)..(2): Xaa can be any naturally occurring amino acid
MXCVMLLARCQKQMVRVPNQRVADRISLLVPSRRWMRIEEVYSLRASELPSVVLVYRGYPRVGPAHCADMHTTQRNRCVSKTSTWSRSSDSPSGEDLGGESWAVDFQSRWRECTLAILVGPQGCQRSALELVSAMVYWGYPSDTCQLVFSPQGFWGVAASSGPPQTFVRKCVPWEEVPTQGATPEV

SEQ ID NO: 996069 - protein, 152 aa, Homo sapiens
AQKGQGAAVLEQQEVSSSAHALHPDQITPLPSLPTRTLIARFVQAQPILPKMSRVAKYRRQVSEDPDRSQQPAGRTLSLAMEMEELVGMELDVVVYALERAYDVSRGGCRSDGETIRMKQSTGVYNREAMLNFCETGDQRNLCTREMSTGCE

SEQ ID NO: 996070 - protein, 165 aa, Homo sapiens
MGPPPPRQDNTQAKVRKTHQSKKPPQKHKNNKRPTQKHNERGRWKTNKRGRHNTIRNKKNTQATKRHRTGNHIVTNKQSDDKRTKPHETRHTADRQIHKERSTTARQQDSNTHTRHAQQTKHTHHNTRIRVIEDDREVHCDKSRETKEYRANRRESRQEYRSTPR

SEQ ID NO: 996071 - protein, 72 aa, Homo sapiens
VRRFLLLGLRASLSWREAKCKYELSGKASCTLDTVWEDKHKYEEAERRILTNTEALHRAVRSRCLSHVLANA

SEQ ID NO: 996072 - protein, 72 aa, Homo sapiens
MSSHSLRYTGTRYQATGGGFVAKARGRDSINIESSTRVMQRTQPGQLPDSCTGAGHRTTGQSVKKTVSPYGE

SEQ ID NO: 996073 - protein, 138 aa, Homo sapiens
WSLPAQRSLCRVGRGRGVQDMLAGPHTSPHIRLLLKIWGCQPGGRGPGHASALLTLGSAELDGLSKGRWAPTEATAAHSLGRSRPKRPSGDPPLRLLAVWQVLSHPAQGACLPPEALFQLWEHRQQPPKHCPGARWEP

SEQ ID NO: 996074 - protein, 132 aa, Homo sapiens
MYRSTQAGDTGRTQYERTKTNRQGRAGYNDQRHRERLAVAPETNQALQKQRKQSKTNRTNKQAKRHHEERIRQRRRKKGTNPKENKAKNREEKETEANRQRQGATDERRKQTRSGNQEYTEQTKKHNKTHQR

SEQ ID NO: 996075 - protein, 38 aa, Homo sapiens
MFRGTHEERTVNEMRDRTELRPFCRGKLYTDKGFLNRD

SEQ ID NO: 996076 - protein, 314 aa, Homo sapiens
AQSLAFADPRAPSHTAPRELSHGLMSIAGALSGRTHLAPCTVSTVRAFCGASDAPPGRSSPAIDGGARRSPSGDEWMGMVSEGIPYDGATDGPMSHRRVHPHSWKLPQSSTGDRTTNRGNDNEIQYAVKSQHTFYTDDVYLCCAPDGGTPCVRDRWTPLNTPSDYREKMIQIMSESIQDPSHVRKTIQDCAIPVRALARHQWHRDGLPVTGGHQTCGQSTRGMPSAMPSCVWTLVAGLTDYLMKISQSAAYSSPHGRAGNRALINGKAVLRRPDIEQRWQDATHLLEKSTLLTTGTYNVQIRALRYRSDLSRIH

SEQ ID NO: 996077 - protein, 88 aa, Homo sapiens
MLSLGRLYVVYEGVVDHNNGLGYIAASRKNRAKRALTASSDSSTRLAKLRFDNSPSGKSPNGVYGEGLRKYVETTYPSSAQVIKPRVL

SEQ ID NO: 996078 - protein, 242 aa, Homo sapiens
PSPDVGPRRADSQRLDANGGLSRSLARGRRVRGRQGRGQARSRQSCQAEVEGRTWEPQSDAEVLLRDSEYVTERPSSSCTAMPPRDHPPESPGPKHPWFGSAVLSGARVSPAPLQGRWVSRVPHQNLNRLKSSGTSNPPFHGYWSTARVREPDYRGKAAGKLRWTGSSPTECADGGADRGQCPGKDGEGDDAVDYARKSITQDRIACEAESRQRHAGDWNPEKPVSTARQEWHRGPRDARET

SEQ ID NO: 996079 - protein, 149 aa, Homo sapiens
MNKNCDENTPRAGREQTKREHKDQTSGPQNTHSSSAPHTHIIGKHTKASKATEEKKEKGEDEHPHRREGKQTTGKGRRNTRPRQRRRRRHKRRRNHGRTAVKEQEQRETRGRTQHTDREEQSNQYEGDSRRKDTDEHDEEKQKMRDRTS

SEQ ID NO: 996080 - protein, 282 aa, Homo sapiens
MWCGPDAGPAMLYGLVGDGKISPRYVAQIISGLISHLGEKCSCRCVNAHTLSGPPFSVKDRSIVPQVLFFTIFLVFSMGRGLSFWALRQGGLTRRESVAGFPAEVPRLQADRPLWAPHCVTVGIQVGYDKRHCVQQVWCTEGSHTPEGKCETLWGESVPGLLSPYWTIKHCVGAYFRAGEILRKPGSGKSYSRGARTQLYNRDKITTNARLSHNYPISRILFLHINKERRVHREYPSPYTQFKQFQIGAPPKGGKLETYRMITPGNIRGAGTSNSFRKLSLK

SEQ ID NO: 996081 - protein, 197 aa, Homo sapiens
MVQLGICAFRSNGTDQEDASHIALLDIQLSGRAKGASGPGPAAAHLQDRNQEQDKVERRRQVPLSTLSHQSWSCCELCRTVVSASAPGEIPYMAAMRAMPARSHDQQAVSITSMRVGELIAPAGSPWVHAENSVVAASIGHEDGGLEDLSHVLSSMRTMNGKRVGPFPRYADQVRSHAGYSEESMKTSLRDLALYYP

SEQ ID NO: 996082 - protein, 156 aa, Homo sapiens
MGMWSIGAGALGAAALEIAAMAEHMISDSTVLRLHRKAALDAYLVGYSTCKTLVQGTKGLSKQYGAMAEKNVTHVIYGPCGGQAVSFCREEAADLYSLNKQCWTSVGVPNYAVVKEHIRTEVKDFQPLFQRTQIFLDDNEKSSMVHKGGHDDVDGI

SEQ ID NO: 996083 - protein, 606 aa, Homo sapiens
  misc_feature (190)..(190): Xaa can be any naturally occurring amino acid
  misc_feature (445)..(445): Xaa can be any naturally occurring amino acid
  misc_feature (527)..(527): Xaa can be any naturally occurring amino acid
  misc_feature (557)..(557): Xaa can be any naturally occurring amino acid
GGGRAESMRRSPFTLRARCSALSSLFRCPAAAAHELDTGRVSFLLVQIFLCAAMAVVRDCHRRCELVLLCLRTRMLVIKWRCRRIARDHKTDGPYDKCKAVQTRHGTERTTVSETGGHFGSATERIRTRAIRRKSGECQWGLVSHWFPRFPSVTREATPPLAPKPLIEVSMRSRYTPPESSRLAPRLERXTSPFSKRRFRPLNQEVASSNVPFFSICVAGSSPGVVERQTVDQPIMAETSTSFGATVDYATYIKLQDDSPRPPRLEVSPVPPWWHHAGLAHWLASRGPGPSNPSVTAHHILIGQVYSRRWREPPPMALFWANFFFQRRTQDNKPPSYVSLVWSGSYVAQGVNHRDYEAENNTRDSYGETQTRWEMSRRHETRIIPPEKWVSPFGGLQQAHHFVPLVGALDTTGNLQTSQKGNFARRHTRGSEAFPPGGSGAPYCXNPPKRRAPLSSKGMDYTVPPGLAPTWRWYTVSEASKVSLLTPRVGDTGVALLNQLCTEAPRLCYTGQRYRGAPSTLACRNRXFRDWFNPHGGGHNPAIRATTMSVRRKAQTXKFYFQGSATLNAGGWTQKVHHFTISQSGSSRRMRIPKERFTICARRANL

SEQ ID NO: 996084 - protein, 138 aa, Homo sapiens
MHVVYSMHMFAAGIDSVAEGRKKIQIRYVTAGSILVKKAGHMRVTDTSLPGNTVPRYKRELAAGKTANKLMDAIKDSELLNRKHSLSEHIDISDRTENGHLAGCTGRRTMGTATGPDEAEHEQTGGGNADSKQNKTEP

SEQ ID NO: 996085 - protein, 218 aa, Homo sapiens
RAGVLWCKNSRNMPCGSVSARELLIHQLCLTYHYRALQKPCNIIVPLKGTQKGAGMRPCTVPTDSVWVDYVVMGTGQSEEAESRGSSPGHRVLYLGRWVPFWTSRNRSNPVSHRSMRGSARKSVCLERHDMRVTFHLKKESNNYKGGSMDFYTGGLRGPKVVNEGEALVLPATVGEKGGSHTGKRNDWGPLPRQLWSILQQVRFEIDVRVMHCFDLVV

SEQ ID NO: 996086 - protein, 112 aa, Homo sapiens
MEVVDPGDPRPMKTETGQCVNPEKINEGKQRVPRHRPESAQQGEKQRKKRTKRPAREDTPGTKKKTRAPKTDNHHQKRKKEQRQRTKQQRDQRNKASHQTTTSKDTHIDTTD

SEQ ID NO: 996087 - protein, 203 aa, Homo sapiens
MDILCHLAFGWGGAKKLGNGITERFDLGVAIEFVSPLQWRSHEGAQKPQESATRNEEFPSRVPAFVADGRTFQGNGLYTEEQEEFRKHGDQQLTGARERNRGNFSNGTISQEGALYPFGERELGGHHIYALGKHSTKPLVASLTKASVNQRRPFHQIFDAHMIGNFHADTTDQVYLMFIALCYHTLWPYQHGKTTCVPTRLWH

SEQ ID NO: 996088 - protein, 250 aa, Homo sapiens
MQWCGTDASREVCHNSSTTLGYKCLNILYLPTLWRGPFPTQEKINPSPRTWWSHAVPNAHDLPPSHSPRGLLTRENIHVGREANKHHDRTHGDTTTAPPHTTTQPTATTRKKIKSTASSTTHNHNPQHPTNHHPTDGRRRPHNHKPHTNPKRTHHHAHTQNPPQAIQNNSTRNNPTRTTTGYHQRSNYGRPNRIPTETANTQPATHFQTTTKIAATWQTSTTSGDQPTYMHHLTHKPIRNSHNESQHPPL

SEQ ID NO: 996089 - protein, 151 aa, Homo sapiens
  misc_feature (13)..(13): Xaa can be any naturally occurring amino acid
  misc_feature (70)..(70): Xaa can be any naturally occurring amino acid
MRPRGTNYPPIHXKAEDIFGKHVEKGKCTQSRTVDHTEITRQNSEAPNRGTYAEKHMAKGRALQTGTVDXWEHTHEQTNNWKHKRRCKQGVKPQSASVSHRYANEKDTHVDRNPRIGRREQNTNRDKNNSRHHNNSKREPQNANRWNRDTG

SEQ ID NO: 996090 - protein, 127 aa, Homo sapiens
ALNSCTCKWRFERNILRGSTGQLADIDQLDSRNESYTYSRTQWKTVSDGRRDRSNSHGAAQREREAQATVQESLIAKTWFKASTGLGRSLHVASSDRGATKDGQSSTRLAQNHSVGLAPDGEFHRGP

SEQ ID NO: 996091 - protein, 154 aa, Homo sapiens
GGQNNFKLFCPGKGKRGGPGVWGAVGCASLVSQPKKQFDWKGENTSVLGQHPSPGFGRLKGFAAITETPCEISGVLGEKCVVNTRHGHKNIVCRTACDVEILGVERRENFAHRGVSEENLCDPAEKRLHEASPEEIYPGQKRANTESEQESRQA

SEQ ID NO: 996092 - protein, 148 aa, Homo sapiens
MEVTRIVGRHPYDEGLTGYTEVWYTPVHTYAAHISRKKVCVILDVLNRIARMYTDIPPYVDRVNPLVVKDRISNKWEEQHIATQVQMPMWEERHTTPLCIRNGRKPRNERSESHTHTNEEYRKGLDPKTIETVGHMYVEHKVDYKPII

SEQ ID NO: 996093 - protein, 531 aa, Homo sapiens
ASSPSEKAMLQIRAPRSVKPKWREAGRCSTSGYLPGVYRSDAGRLRLWYLNGSVSGELNYYGRLQGNLKIGMRWSVHPADPLIVLLPPVSFATYDSPVSRSTQSRMSQAEVTARDLDSENTVSAWRKAVCRCYLIVFSERSDDSAPRGHNSDIEKPVYYNQNYRAQKRPFTPREGPISFPEKLDMDVNGIGSKYPFGRGSSGGSFSRIGRGRSFWMEGTKREGKQFPGRIPNRRHKANFASHGTPWACPKLNSTEDYRRYTRGTQNKVTSRKARSGRHLRSGAAGTKKPRASGRTIGNNNPVFGSYYPFGERRVASLIFRSAKTEPFPMRGGRGQHKGGKCWVIYQTYYVVRNNEFSSHHRNGKRVSIDPKKIIGLYNNSGRKSKTLGHASSYNALKPLHTGSEVLPFKLFPNGSYVLLKRTIERHVNKQHKAIENAKTVSTQRQKGHKRSHQKAHHRANNVTADENQHGRDGRLKPRTQPSWRQHDRERSGAQQRRPAGCAITRPDGKTAPQNDPIVTPATESRPTQSDV

SEQ ID NO: 996094 - protein, 432 aa, Homo sapiens
  misc_feature (64)..(64): Xaa can be any naturally occurring amino acid
  misc_feature (67)..(67): Xaa can be any naturally occurring amino acid
MTVIGYMGLAVSEKGDDPSKRRYPDGIDTVGITVVPQWLTPVHLLSIGTECEYIAKHTVEAEHXDFXLPKLKTLTLSQSFEATFTSHVLKQPAALAFAWKTVVESVDNWIIAHNTGTESPSEHVQALTLGDSKLKYAAEPRLPNHTSKQQLSGRRTDMGKVTLDASLGEPNLASWTSASAYHKGRINASRHRGPIGAAFLAGSQNIKPQIDARTLSAAHLTRAKRGHEKTKRRPRTPSSTYAQVTDRTTKRHPGEAIDTPSKECGDTHMSTNTIHENEGGQPDRTIPAGTRQGLNLPADIKESIREKTGTSNLNKYPRKLSHAKVRAVTARLAKKPKAENPQHHTPLPKKKLPPKTIQGEPAHSAKTRMQHKPKEKKPQKRRKRDTEKTNRNSRAEQQTRDRDISHRKPEADTQNAKDKNTKKQDKQKKKKN

SEQ ID NO: 996095 - protein, 312 aa, Homo sapiens
MVKPDKNPGQQTHIRRILTRRHPNSSTTDTTVIDGNQNNTLSAKATEFFTAEKPTIEDMKQQTGPTKRLNDHVKEQRPKTSTGHIANRSTVSNAVGHWRDQQSRNNRGTLGSTPPGMANTNCNRDRIKGNTNTCKQSHLTEAMNTTTHENRRTASDTSDTPSKHPLTTQHPRKHASETRNTTGGKKATQDGKPTQHKTNLGRTRGQTTNHNTARTTRVKTAQGHTHRQEKERKRNRGERTRRMRHHKQDGKTEPQLEEVQTHTRHKTVIDIATYATDEKRKGRETRLWKGNKTDKTTDKQYRYDQRPLNLRQ

SEQ ID NO: 996096 - protein, 262 aa, Homo sapiens
GRSWCLMVYAISWGRLDGHRGLTGTAGPQGGGRMLVKASALSGNFYRNELNYAGLFRSRNAGYDPSQIHFAEMTPYATILWCAAQTRHTSCADSGATVMDGPQRGQRRGPGPASWIQSFKGGFGNETSPRTPGRLSLAKGNTEDRIEVVFSHVMTRLPNGGFGLDRFIGKGPLTQKGKTMFLDPFIFLAWGRRFADFNRKGSRVVGDTVHRRMLNEGHPMDAKTRRDNGRISRIILSISRDMKEIMLHDRYGQEAEKIRGEY

SEQ ID NO: 996097 - protein, 443 aa, Homo sapiens
VVPETCLGSRILTTRATVDVSCRRKRAAVQVAPDLGVYTRDRPPVARAPLRQGSLDNLVNIIRVCEETFDANLRQMLRVVVQSLLAWTRHGFAWLWLTRQSLGPSQMGGIYMPESGQTTFLSIKIAVLFDRCTHATRDLTFFKGLRVEEQVTARARSTWVEYCEAAPLRVHKHPTLVSPHTWRGGRWYHPKMKLAVPSMGKVQRTHGLLRRTIEEKQTAGDTRTYRNPLMEEIHPVSGINSDGQFQNILKKDNFEIPRWEVACNPETSQTLQRITAVGSQTPNGRTQYTESSGRPDGTGRRSPDRVQQAPGRETERRSQLHSKARHCTSLAERVRTKTSTGTRHGPSGDNPMRAHKPGAADKENRNATKSNTLAEPTTHRQKMRQRRKKQLARGQHQKREFTTNGEPAKRQTNKTKRTPRPHKDQAATLHTARHSEINNPSPQ

SEQ ID NO: 996098 - protein, 238 aa, Homo sapiens
MRGHRAQGHTGAGPREDDHGERPHTRNGDKQRRSSKETRTQESGPKHSESKKEPDMQRRRSTHQEEEGQHDHTTRRRQRMRDRKHRASPTKRKRKRERVTEREAARTTDTTNTDTKTATGEHHLNPPTRTEKGEGEQHPSSREETPTTNKDNKTETHRHTHTEVREAELSVKDKTDKQRTKQADQTEANPTDTHTTSQPEGETNKPQISTNSPEPQRAKRREATPTEAQQRTTRDTAH

SEQ ID NO: 996099 - protein, 501 aa, Homo sapiens
SGQCGQRRADGLERRNQIAASPKTLSYCGRAWFPWDLFCERCREPLPAPQSPPGAAWPEAGAPSDRQQPLWRGVRPTMSAPVADDGVLCNGSLPVPEHRKNNEPLDVCDRTNIIKKNTVREHERTSKREERRRRTEEKQTEHTREQQGAAKNKKTEGKHNHTEAEKEETDKGTTGQHNKEQNNQERSDVTRNPAHDRTSTSQKRNTEERTRETQHEGNKEGEQRTEQEQATANRTPRKGTKEKPQTTQNTKTHRDNTREKRQQKENQIGTKRDTKDKPHETKRENTRNKERQQHTKAEEQKNQKKNRTTQTSTDDDGEGTDTKNESEKEEEEQNKQSKKTRQKMNSIEEEQERQESDERRTRAKRQEEQHKGGENNKRKRGKERHEQRSEGAAGHQSARASQTPETLRHVVDEKVEKSRGEHGQAGHGTQRIEENDSGKEKESGQDGDDAEDNMAQDDKERERGRTSRRTEKTTKRQGANEGTDQTTKDDERTGETSEQRR

SEQ ID NO: 996100 - protein, 575 aa, Homo sapiens
CIGYTATNQDFIQRLSTLIRQAIERQLPDLDLRLPTSGQEGHGGTRAAGGGMQAGRQAQQEERGMSNLLTLQMWAPYHVGRTDGREGGPRGERKTDGRTRATDLTRHANRKERRHGPPRQSSQHMTARPRKHRQQSPIDTRKKTKFTNKSTNQKRKSKERKDNTQEYPKRNKERNKHTKTHKKTENTIGTHGHAYQKPKSSDRRTKLENRNHKTGKKDDDRKKRKSKQPIARREQRRTNPRKRKDKISLQITKRDRTPTASIRRGHIPTLRNIRDKERPNLRQAGNAYNKRDSIRRVNNIDKRGEQHIRIRIILGHMQTHRQQGDNTREKHKKKLDNKTSTKSTKIIKMIKIQSTVEDKRHRRQKKQQQSTKEKQTRPHEQQEKRKDKGTNNDKQERTQKRTTHEGEKTQWEEKHSTPKKQKQRTNTQTDTSHDREDNGERQRETGHSNRRETAAYQKQNTKNKRSNARNFLNNARAASRTYDQETYRPQSTNHNTKAKRPVEQTSPEDRQTREHQKPEVSQTATTLDKEHEAHMTREQTATQTHIKQTQQQSKEVTRHTHEDSTTHNEYSAPKY

SEQ ID NO: 996101 - protein, 203 aa, Homo sapiens
MGETSSRDTRKSPRCICQPVVGGDTPPREKLEAAPPYPQNNYIEETTKRGGRTAQQKRPPHNTRWVMHNNTNTSNTGGGDTRHTSRRNRGANTHSLFTHRGGDNKICCENTAKKKRATDEADRACGAHNNEGEHNSAANQSRAGNELGKKQPAERKTRGTHEGRSTFCCVHQERCHHRNLWKKHLLIEAAHMPRKKTQSSAVQ

SEQ ID NO: 996102 - protein, 353 aa, Homo sapiens
VYSKQYLKNNKIASDMIPKGKSLPIEIKWSKLVEITHCGQMKRKYQCLQCDPAAQSRSPNIPDADRRAGRRWSARWPSIQGQAQVGSAAEPRPAMLYKIGQEQQDTPSFSLEVCNIVAGQRCIDTRLTDNQSSSMIRATAGSAPDRQEEISKLMRSASFNTDPYVREYVEYMVQTMRMTDRDWRRVTLHPTHSIPLKGSTELKPNWRSPCTRRQYWRTMEGNKSRSSTEANRKKSQDEECTKCRDISGPPQSDTMHGTVSTLRGPYSSRATSEKNLSKETTWACPKSSGPDTGHPAQHNRKWARTAGRHKEPGTLADTALSTARTNEGGHTKAAAKRPGSTRGNDSQHEHNTE

SEQ ID NO: 996103 - protein, 172 aa, Homo sapiens
MPGWRGRTGHTPAHRVERANGSERGDSRGHGTEENQRVRHTERRSQRDRVQNTRKRAQCNGKMIAHNARGQRQDKQEREKRETKNRRTEERRKENRQTTHTRRHNEQWRQETPRHRQRSISGRGGVRSNEGGRQDEEWRRQERQKRHRENKGAAFQGDGKTGHGASGEEGDR

SEQ ID NO: 996104 - protein, 211 aa, Homo sapiens
MRGHTLTLQVPHLSMASYTYLGRPGADLAPQPIYNRDCACALEEQPVLTDRRHHLNPKAKQREDDSRFCERPSTALDMYVDIPGRASTLLMPLGLHQLDICTWTSRSNVELNTTRDDPIITEGDYDRINPKAHPCTDTEKHWTCDRRNLEPVTKRSVAKPSLQRCRPDGRNSALQPIKRRRTAGERSQLTPDPHQGRTALCPQRLAPPGDD

SEQ ID NO: 996105 - protein, 198 aa, Homo sapiens
CLSPTDAWRTDGEREVRQSCALRWPRCMQSLPASGCSLLIALGPAGSSSSRWPGPGHYLLVWAACLPPVNLTLARQIACEPGCCGGAAGLTRSNLRKAPMCAAVLRLCVLRGGACLDTCAVKLCEGCACGGVALLGTLTKTRLMPVNRLLIASREVPWLSRRRTRTHILGRLGTKRQRGNTNFITPIWEELAKGGNGT

SEQ ID NO: 996106 - protein, 102 aa, Homo sapiens
MRTTTTNREKSEETQTRNRDEDTGGKTTEDTTQSERAQRDRQSRTTALQCKHRNEHNKRGEQQTTVAQVTLDRHTRRYRQTCESRHTQVRKCQSDEHNRENT

SEQ ID NO: 996107 - protein, 117 aa, Homo sapiens
VEAESLTRQSSPVDVGGDEPQEKVCYLWKRGRIGGTWNNWLVSLASIHTVMRGVTHQVTREACRGLELVVGLDRSKSLRKPCRSEAPVLPKDGAVNGPSVVGDQTPIEALDFYRKTD

SEQ ID NO: 996108 - protein, 85 aa, Homo sapiens
PGDSHARVLTDGGLAALREVPQWLHGRMVQEWWQCPALRETSYFSVGNHWRIHTVEWAELPTMTTSHLVDGDDSHSNTLLTADNW

SEQ ID NO: 996109 - protein, 104 aa, Homo sapiens
APGEARGTEREAGTMYRRKLTALDYHNPAGFNCKDETEFRNFIVYGLKTRKSGTTRLTTEGHLRHIHSSDWPKFFEKYLRDVELSFHRFKIDKKLLTGFLVIDC

SEQ ID NO: 996110 - protein, 153 aa, Homo sapiens
  misc_feature (95)..(95): Xaa can be any naturally occurring amino acid
VNGYRGRGLCHLVVFALRLAVIRTRSRRPDGRWPGETGGPRRLERPELGWSLRGVRVAVEERAVRSACGEGEALNRLRKYPEHAGPSGQVGRVLXVLMHSWLEYQNLRVGLDRVAQKQAQRRLIPLDRYGAQGGNYIVGTLYNCCHVSTANPV

SEQ ID NO: 996111 - protein, 36 aa, Homo sapiens
MAGTDSASDAEERTDTRPARMPKEAILLEEDFLLKA

SEQ ID NO: 996112 - protein, 290 aa, Homo sapiens
MSVDKAELCGSLLTWLQTFHVPSSTVPAHQDLSSGLADSLCAEPEVDPILGSTAGMASKGIIGKIHGPQLEQLTGPAHLKHGLTRAIVAVLPGMSMDASMCQQEHLPACEPSLESSQTRQSSGKLLQLVLGCAISCETKQDHIQRIMTLEESVQHVVMASHPRAHDQETIMTTHGHQTDVWQLDRQNRRIQYLSEEAAEGTEIRRADRTRGENRNNRKEEQATLEIANKTHTRIRKKGARTKNQEHTSAKRNQKNNRTERQAEQNADTSEAPQNTQRTKHKKKTRDRRNQ

SEQ ID NO: 996113 - protein, 340 aa, Homo sapiens
AACRAEPADCPPFTLRCPVLRAVLPVPAALPCHHDWNSAISFAKDFLCLEASHAAISKTGLWLRSERVKLLLQCPARHPMQIRLNRQAVPKGIVDCIMSSIPKAARAVTVPSWRVQTYANATFASIHPIKALTLRLQRISSKDRTLHMEGDDGTQGHTRQRNMRGHYRQGDNTMSTSRAGCRARRQTTTHIHSNTEVHHRDEEINNPKETQGLGQRRHRDGQEVKGNKRTREIPEEALGSTGHRRQESTESTRTREIRERTNRKPKANYTERADTGKTRRQIKPKVTPGQRNQHKSSRDGDRTTREHKWRTAHQTRKHKETARTNNSENEGWDRHDDRTH

SEQ ID NO: 996114 - protein, 37 aa, Homo sapiens
MPTRNKTPRLMKANYKYGDISTRYYETAHYREPRRMH

SEQ ID NO: 996115 - protein, 125 aa, Homo sapiens
MIRTQTQGEQKHIEAEDLTTNKRAEADNTQAQHTDDGEQHRPDKRNAETREKERRNATAASRTTGERERAGSTADQTKRRTKSRGKTTQRKDATGRKIHTGRTRRETKKRTRTSKAQNQIEKPQE

SEQ ID NO: 996116 - protein, 591 aa, Homo sapiens
  misc_feature (372)..(372): Xaa can be any naturally occurring amino acid
MFSGPYPKCELAAGCKGSIPGPAPSGAALGNRWALRLWNPLGWDTLYEEYELEMIYRHRDTYELTPTDGDQGLALEGDILHLTEIYHRDISLTETVSGHREQNESTRERGQHTREGRLPKNSPGIKRAIVRRHGGRTQLWGAPDETRLIALRQKQHRSDKKREGATNRNNNKRHSTQRHETGVQPTDEGEKSSWWKNKQANYEGTKPQTIQEPHRGHRRSHRHTMRRTTTSDNRQEKNEAEHTTEERNTLDERSTHHNRQQTSSKLTARSHEARRADEGGPSHTRPNITQIEPPTRTQPPSYSQIQFKTRERKTNKPPINEDPTKHSRQEIVRNAPQNERQRQTGTPSRSAPRTHTDKQQRARHKTSPRMVXQATTDERRHKVRYRATKPRANEGGDKHHHTSQQAATHDEQHNRPTKTDEITAISITDDPERGTTINRHPADSKSAQTTQEHTNKNESKLNKTDVKTTPITKHISDGHTTREEARPPNAADLSEEKHPPAENKPPREDSRSHIPPTNRNNAQGDHQSSDPTTPARRTIYMDAGHNTTRVGEKQANIYTDGDCKKGGASRKTTVNAEPRRTTKRRERVAPQ

SEQ ID NO: 996117 - protein, 279 aa, Homo sapiens
REKKSLTGRKYNKFQKCLVFSPPYHPTSNRNTNHSITTHSLPQGVSTAANIWVSELRGKRGMEEECIWENTILSLFSPPSGPRLRKNLDCPRIQNSGSGSCENWGAKKLRRRKPLRGNEISAWEPLQNSVDPGALRTSGTNAPDQCDNSVPIESNMSCNILKLLNIIKQVDKVYSSTPKESTSPLINLLAYYNRRGTRAPRKLGREPTTGLQRPATGDTDDERPVQNTVAEQTMQNRTVLDQGISPHTGTPEDREAGSHTPNKHYTTRPARPGTQAPTL

SEQ ID NO: 996118 - protein, 399 aa, Homo sapiens
MPTCESDKYYTTHMRRQRSAPAQIHRGAAQHAPATDETHTRGIQKSHMATTLPARGGAHKHHQTCAQRGRATPPITPGPNASATPREHHEQAPAGHTSPTHRPDESSQQSTKKPVRQTPAEDARLQEERGETKTHTQTLSHLRTTSEEALYEQTPSPHHTRRERTTTHSRPPTRHNASNRERATSSDYNAPQPTAKRNTTQKQTQKANSSHTINQRATARDITHHEHNTEHIVPIYNRPTLTEHHTAAETIPTRLRTREQSARGEHNPARTYGRARARIPNVAQQSQHSELGENSEENNDETEHNRTAQQQRRTTKQEENERDPQNTNQGSSEVTMYTDETSNGETEQELREEEGQQDTISTYRRETEYNEGHEARKQDTKRQQRRGTANQEQTGLPTN

SEQ ID NO: 996119 - protein, 108 aa, Homo sapiens
MTPQNKKEEDVHGGAITAGVAPPEKKGGGRITEREKAREEQACVCVETQQPSIKFLRAEEINNIDRSRNQRVSAADEAACERTRRRAPKKKGGHTPEKEPRYVDEAKD

SEQ ID NO: 996120 - protein, 219 aa, Homo sapiens
KAETHLEFEVKDPDLESPGEMNVSDDPDAVEMTSDHLVRKLVHKGVAPPVKVGFGAFSEHCMPKCRMAAEDIEFPDMFMIGNLDVSSLEGPVVCPVPGSPSTQLSRLLCTHTNAKALTFGTCHPGQTGTVLVGCVRQEVGKLVAFAIPSDSCGVAVAEEECCPPPSNTEAPPGETRTEAGAETRSPGKAEAESDALPDDTVIESEALPSDIAAEGQSQD

SEQ ID NO: 996121 - protein, 437 aa, Homo sapiens
MHDGYHSIATNHNIPILMSINCWHVPAPSMAPKEWPSLRDDICTMKREGSKQRTRNSTVTKHVDVRLDSQETHCSIYIRGTESNPHSKTMNIVGTRNRRKELANHTTPTITIPFTAQTRRDIPRRRHIFMQDKRGSYSKRRINTCRERTTTRSKGKDANKARIDNKTLKWGPQGGKVPSQREWTMDHDPQIESKVGNFPGTTHKESDKRNEHNTNHKSRAMNHREQANPIPVRKWATLQREGTQAHQLELNQQIGPREPKRHKQETRNKAEEHTREETTKGRNGAIKHHQEPEEQQRQTTKSRNTRKKQRTNIEHPYKQDTNRQAQTKREKPTRQRHTTGDKTPKEERDTQQGTKTIDKKREATEDRRRRRRGAKTRQTMNEESTRTKKTGREQQDQQKRQNSTREQDKERSNESNKRQNNREQEKQKRQEREKKRE

SEQ ID NO: 996122 - protein, 215 aa, Homo sapiens
NSQALFFLSETSRPFLPVAVAQGRANSPQEAATPATSSRPIGVWQGSVGGKNSASQFAVTGVATPQDSVGFSIGLCPSKQHLRTTFPRSQLKPKGFVNNPPVRGILRVATGRTTQNLPAFFTHVFVSQGGLSPRASRSSGRPEFPPGRENRLGLTLRKEHHPFCFVSGAYKAPRFGVKKAETANKGGCKRFIRIQGRGLNWKTSPEKIKAFGRAV

SEQ ID NO: 996123 - protein, 307 aa, Homo sapiens
GACGQAPRSSGFVEWNTGVSSPQSRCWEALLVLREDTSKAGALPMEAPVARMSTQSTHPLKPEAPRLPSGIPESHEMLFSWGLHDLSLSTGDVSRAVTPRVTLSAPFDASSVYSLHSSVLVRLPPVPVMNDPVLPDPMSTACPWAWIRRDGHALWPFIIWLARGTRRDSLLESLTLHTVLGATIAHLHVLAVSPSPSGQQGMGPHPAVVLPAPPGQPAGRAPVPPLMCEGRAGTPSMRGPSSTPWAPAPLPVGSLTFMGASTVPAGHPFLRHEQRVLTGCQLGANMIPGLARVPLLMAGRFPRWGRP

SEQ ID NO: 996124 - protein, 86 aa, Homo sapiens
REAARTVQPGRAGGMAGPPALPPPETAAAATTAAAASSSAASPHYQEWILDTIDSLRSRKARPDLERICRMVRRRHGPEPERTRAE

SEQ ID NO: 996125 - protein, 242 aa, Homo sapiens
GLRQPGLPAPARPLASRCEREAPVPVAGGWRLEGPAHPPGLRRLPAAAASLNRGVVFCCFDPAVAACVCAAGLSALCRLVAVVLCLLAVSAELKQGCVELLLRVPGLPAYVNLGPVSPLHLAACPASFAVHAPSLRAVSEPRRCMCELVLAAFRTAWVELSPCHRTIEPVSYGPSCRGLGPVITERTTWRVNERTVICRRHGAPPESTGFRFLVVDSSWAIGTGKRKRLRNPYENEYISLRS

SEQ ID NO: 996126 - protein, 78 aa, Homo sapiens
MDRRQHHELSVKGACAPWWVKTAETHHTRDSLSKITTIYAVFVLRRALHMCPHLGFHSASVITSDKRVQSWLRITGTS

SEQ ID NO: 996127 - protein, 253 aa, Homo sapiens
DVKILVIPMVPFDHPASNRYVSNKPILESLVILPRLSPDVAQDSELLMTLGRNKAKAVMSIQSYVGQLVVVRLNSDHASHSQSPGEAGPELGARLKSSNREKDVVGKGIAFTESGGERVPDSISIGRFRNQQIDLVSLLMPEGLYRDSKFRGHDDVLFCVCRRPRSAQRVGARGVHQVARIRVNQMIASAVIQSAWREPIRHPQCCTFDRTMSSWAHMHVQRILTVRRARKEGPTTSSEGEVVGYQGKGYRMP

SEQ ID NO: 996128 - protein, 242 aa, Homo sapiens
RKLNRNQISSTTRASVTILHGSLFYPSYKPLEILRDLPSPFPTRHLQDSTFVVATGFPRTSRHYGLNFPPPIVRLQSALTQIVLTLSRSQNYLLLWLSGSPDSPRYVTILRKMWLDYVPVCLHLLNDGSLRKKETDKNTQENTYKKTQIRTRHIQYRNAVQRKPRTQRGDKGSWKGTEAAWGASSQKAPPRPSPAYTGRLYGAGRIQQSACGLCRRKNARRTEKQEDPTEGTKREKGVGGDP

SEQ ID NO: 996129 - protein, 280 aa, Homo sapiens
MAFLMLTERKILRYIQLRKGPNVVGPYVAYYNPSLTPVRTLHQGAPKTRTSIITLYITRPDLALIIALQYEPPSPEPNTLVNVKLGLLLILASSSLGVVLNPRDQGDAIKSQINALIGDHVRAVAISNLNEVSLDSHSYVNHTLVISGSFNLSTLSTTQEQLLITPGIMTLGHNMIDLHTYAEIKRNPFDLAEGECELVSSVTSNTRGPFDLMLHSEYTNMIINMHLSINLLDKCEALRRNDSHIGPRPTLTPVVIDSSQSQEFYLIKSLAYYRCPRSGP

SEQ ID NO: 996130 - protein, 336 aa, Homo sapiens
  misc_feature (94)..(94): Xaa can be any naturally occurring amino acid
  misc_feature (97)..(97): Xaa can be any naturally occurring amino acid
  misc_feature (200)..(200): Xaa can be any naturally occurring amino acid
RGLSARSRPPAMAVHAYTSENRRTSDRGPDQERIRLRAGPPSSSPRTQRHPPAARHERQARRLRRASSRATRALLIRRYALPCIMHMRDTHLAXRLXVRYGQRSNVDGSSSAFAKYRRTEWTRYGTAHASSTLASRGPRLGAHGRRIAKATLPGDLEASPALDRPWPCRFGSAPIFGTREAAGSPSTGLCAQITPFNPEXPLAGAANGEMRCLGGPRTMESRPQVSPLGLPSLRGILSPKTKGLPSPKANLQAFDRVKLRYKRGVGQTFSSFQGNPREGRGARDKERTGRGLAVLLTRGFRRKSAQVENSKARGGVPVLGEPKAFRFPFSISLRVQ

SEQ ID NO: 996131 - protein, 102 aa, Homo sapiens
MRTDIGGVISNEGCMHPTARELLKMDMTQMEFPDASFQVVLDKGTLDAVLTDEEEKTLQQVDRMLAEVGRVLQVGGRYLCISLAQAHILKKAVGHFSREGWM

SEQ ID NO: 996132 - protein, 192 aa, Homo sapiens
MGSLGARHRRRLALLVCGSAIVDTPINDARSRAGAGGSSPAEAMDGFPGSESRYTTNGDYYVAVYASSIHCTVMFWSRRAYITEVAIYRSLGALRDRCDAHVPVNMCALRSDPSLVASNSHEVVPTLAGDVASTVVYHDGVLQSGASHTRGKGQYTLRKLAFAMARVKTTKMDSTGHCVAYCVKVINEQAGS

SEQ ID NO: 996133 - protein, 172 aa, Homo sapiens
SQVTQRAGSPTLRAARGVWLFAAAVEGTRGARWRWDGNRGVRSQGGASGEQGPKVKGGPGRESRQQGLVRFRASTFVDMMAAMSDTCPLPIMSTYDSSMQDINSFFANPILTLTERNRDLIQIRHGLRVSLTVQFGSASTACDFIFNMSCELTMGVPFTEAISLVHAGPSRS

SEQ ID NO: 996134 - protein, 118 aa, Homo sapiens
  misc_feature (103)..(103): Xaa can be any naturally occurring amino acid
MCLALDAPAVCFLPREKILYQYHLSLCPVEFVLDMPQHLSLFPFLGVFDWEGAMCWVSPSRVLTLAWYFNSHPGFVVAAHVSSFSCYSVLVYRSCAVQSLSQXGLTRMALSVLFVHVL

SEQ ID NO: 996135 - protein, 222 aa, Homo sapiens
MGCGVVESVETHVGGWAEPFASSFSVMCVRPSGLSRGVFFLKYFVALISGVSHSRVPRLRRGPRGRAEEARGKSCGARHNRVWAVSIPVGGTFLANQAVFGGAPSAKKTRAVADTVCQFVRGARRGDSSPQPEKVPGNKERIPTFVKGLIPEWPIVVSLPNDEPPIFHGWGKNTLKRASGVPPGYYRGAPPVAVNTRTGSYWEALSPRPRGAFVCLPRKGPF

SEQ ID NO: 996136 - protein, 206 aa, Homo sapiens
PKKRFFFFSKNGKKKTKRGPPGGENLGSPPPQKKGGGGGPPLTPFLLVHYWLPPFGLHSVVWRLSPRGGAPPPSSGGAGGFVGPTQRRLYCPSTPLFLPQKYFLGGEGTFCATKKRGGHNEERKKRSWRRRCGSARQKERCELSIQKGWEACENQKKTHQGWSTRVVWWRTKRRETWGPHTPLGVEHEREPKRGGVADPEWKVAHP

SEQ ID NO: 996137 - protein, 244 aa, Homo sapiens
  misc_feature (128)..(128): Xaa can be any naturally occurring amino acid
  misc_feature (134)..(134): Xaa can be any naturally occurring amino acid
  misc_feature (136)..(136): Xaa can be any naturally occurring amino acid
EDPSSMGRCDPWTEEGRRVCVPCVNVNAPIKAAARLLSVDYRCRRTRATSYGASLKGSIIHRYLGTAVSSLPSAKSESFLGVLVSQSLSNARTDHASCADRWSYIMSGAQDLMVYAGQGNGRLRLQAXGRHCCXPXVASTQMLLNGLGEDSWYALSRQGGEERLGRTALDTAVCSLASTLWSKTLWHHTDLSSHATETREKPNAQTPVMESLATTRVFPIEKVYFSLYAQPEARVFAWLVRLVG

SEQ ID NO: 996138 - protein, 287 aa, Homo sapiens
SGALVVFEEAFFSFCEHGNQLEYLVGSLCGSASGWMFLVLLMVALVGELSGPLRLRGSAQVDLLAFFDHHSSFDLSKTLASNAGEGSSRKQSRCDRLAHGSKQLRVVDWLVKNIDIGAWGRIHGCGDSDKRTLGLRHVWARGMPRVAMSQNTALLSLVLMAGTFFIGFFLRRFKKQSVLVLAGSGGELGTLWVPIAILDHGALWNYSIEDTYSQKLERSHVDIGDWPKKRGARVINPLGEKSPFLCGGWFARPVPHLVFILILMETKITSSSSQEGGMLQKGRFHWN

SEQ ID NO: 996139 - protein, 226 aa, Homo sapiens
  misc_feature (158)..(158): Xaa can be any naturally occurring amino acid
MVPRYQKHLPAYNTIKTGLRECGGGELSSGLLVSQSSLRVLDISLLKFVVDSDGVKKLPINAVATLVAPRVVDSVLLIKCEKLNPRGGRARGKISTNSEGREKSTGCGLPHDRVSSHSGVFVKRTEKSRGNSRKTLPCLVVKGSRGKAPKHEPCGPPXVMWVGVKDFSGKAVRDVGLEKRVAPCVLDTSTQKKQPLQRACRKGPLGGKMGVAQFSISWGTYGRQEL

SEQ ID NO: 996140 - protein, 82 aa, Homo sapiens
KLEAQEMPSQLFTLGASEHRPLKTPYFDAGASCTEQEMPRIPMSCPPLEERSGPLSPWSHIAWGPPIPVPPGPTLLCEDVSL

SEQ ID NO: 996141 - protein, 104 aa, Homo sapiens
MHTHPKNMQDQGNQQNKETQARHEQLEKPNQIQSNKDKSKTENNRQKTSDKPTRLPREQETNNNQHMSRNTRQNETVNKPKKHIEDTHATNPKKQHDNNYNKHK

SEQ ID NO: 996142 - protein, 179 aa, Homo sapiens
MQSLGSLCSRTYACEQTGSAMDRNFGFSNHDWACGQMTRESVFRCVTCQIVMCQLDAPWLAGKEGTPGGKHLVDLRRFEALQCFKKQIPDSVRPQDIPYAIAFPKVFPKVRTVVDVEVTWIAKTLVNKALRIKARMRTDSAVEAGLVPRGNTTGPRDPGGNPSNRTPAWETYSSLQVTK

SEQ ID NO: 996143 - protein, 213 aa, Homo sapiens
ARTPSTRLTAPAGPAALAVRHVPCYVSPTLVCLPETCCAQWTYPCCYFTCGRRCAHAAQWCDVSWLAYVIYLYRVYKRSMTMFNPDLAIHEVSFPVVNQGQLSALCACELPTGIPPYGVPFPTITPQVPLVTRNVVRHIIIHGSGRKLVSKKASTKTYKKHQRKDIQRQLARSIRRFLCERLAEAQLIEKQGIVRATIRKSQNTIVIYITIGL

SEQ ID NO: 996144 - protein, 229 aa, Homo sapiens
MGGDLRIVSGADIMTHACDQPGDRTTDYTIHVWFIAAEAYARLLYQSFMGRIPALPTSSLLQAIDVCVIPEVHACERRLLTSHCVNSLWMLPSLLLRSILVVPRGHWCMEVYQWYLCKGPSFPVAIKRRGRTLERPYRCSMNVGSTCEATAIVVPTPSQLLHDNDLALDVCARMMLAFWVVPPNGTRDDRYMRWRRGGVKASMSSVPKPRGVVIERPQCYSPSLLRILT

SEQ ID NO: 996145 - protein, 360 aa, Homo sapiens
DQDQIVTVADGDGHLDEGFNPPTIVAHMASSSPRQDSEAEPRVHERLSPQTPGCGMELPERGLSYQGSSHSFTINPSRMRAPFSTSPKLTPMDNRPPGQGSLIPYPHTLKLHSSSHNDPGITLATLAAGENMTLSRQALDPGSKPMHYRDELLIPAGIVIRDASSDRPQVKCRYSVLARQHVQSEPGSSHFNPHSKIASFDNQAHYDTASFRLICHNYTGYPTLHELMYTYSTAEGFNNTHRKEDIDYNDTLHRHYNIAHSCAIDHKKNRKRHHDNTMTTEIDNRTQKHNEQQAQKRTHKEQAPKEKNTTTDHKLAHTDTEPHKKHTKKDKDNDDPKQEQKDTEHEPEGTKQNIKNKKRT

SEQ ID NO: 996146 - protein, 168 aa, Homo sapiens
  misc_feature (94)..(94): Xaa can be any naturally occurring amino acid
  misc_feature (112)..(112): Xaa can be any naturally occurring amino acid
AFPDFVYKRIKARNRLAEIHGVPRGLYDGARPRGDGACQCQGVAAPGPSRHCSRGNDRPYHYLCRNPYDRVAGGCRAVIVRVCRGRDIERINSXRVRQLGSMQVISVAASPXAAVSKRSRLSSFRRTSQGTWSRAMVSPVSWSLSADGLSRGTRGALRSLRPLGMFAC

SEQ ID NO: 996147 - protein, 30 aa, Homo sapiens
MANYNASRRDTGQWAEISPDFPARFQINMT

SEQ ID NO: 996148 - protein, 132 aa, Homo sapiens
  misc_feature (8)..(8): Xaa can be any naturally occurring amino acid
VYRRLGTXGVGVARNRVLGVQAAEDPRRPAPVSAWADSRGRQAVPGGHVAANKVAPGCMLTGCDQCTMRGQGPQQGAEHYVLQDGLFVAIVDILPFEWCLTASGVEDFIDDHVASRGLDSCDTLANWRGSAP

SEQ ID NO: 996149 - protein, 277 aa, Homo sapiens
  misc_feature (106)..(106): Xaa can be any naturally occurring amino acid
  misc_feature (134)..(134): Xaa can be any naturally occurring amino acid
MCSLEILNVVSFTIQNSIECKGYVGRNKCLCRKHNEVKDVPEELMVKVRERGLYYCDRIFQMHTPQEPVALKHGVGGWGTDTDKRKHAAIVNTISRHYNSNVRIVXLSVSGSNWPPNNPRVSRGIKNNLNSPTXLLRWDRTIADFLKHYPMEPRSNWEKRWRWRLFDALLDKLIILEGLRPQNRNLVTKVLPRPIDELGGKTKAARGKFGGHLGGRAHLIEVAILGTWGSHAGGPRSPGRHKIGESFNGLSYSGKLLHTYSESAQGKMYPSLRLGKT

SEQ ID NO: 996150 - protein, 109 aa, Homo sapiens
  misc_feature (55)..(55): Xaa can be any naturally occurring amino acid
APRRCRTDEIGSCSALSVTEVSRAFSLLCKMATLKEQTQLHQVMRERSRQAASKXIMITVAGVFGQVGYGCVLSGILGKSHGLNERCFLMGCFWTRSRALRGKKWNGIV

SEQ ID NO: 996151 - protein, 155 aa, Homo sapiens
  misc_feature (59)..(60): Xaa can be any naturally occurring amino acid
  misc_feature (107)..(107): Xaa can be any naturally occurring amino acid
  misc_feature (118)..(118): Xaa can be any naturally occurring amino acid
  misc_feature (145)..(145): Xaa can be any naturally occurring amino acid
ARGALTEVACFTFSQLWRNRVASKRLLHAASARSRSPCVAVVRRNRLRGHVMHRRSFPXXRHPSAGASLRASCCFLSSRDVGLIWRNVLRARGASRRGALLMISHCXRTLLRIERRKXAVDDASETKGAATLTRNRRMLRRGIQXDVTMPLRDRH

SEQ ID NO: 996152 - protein, 238 aa, Homo sapiens
ALCEHKSHVPSHLAQIPQMYVRPDDFPRSVEGVVRRSSWALYRLSSQKYLKLGLGHRPNDSAYGSAKGGLGEGTVVGKLMSQREPRNAQEANKRFLLFPLASAFSLFVMLLRAEGLKDISRRLRGMASRGRPASASVSGRACSLNGRLVRWEHNRGASLGIVGPCCPALHDFRWGSKFWKVCAQRVVMGLACSSQHWGGRALACPEWGRGGSTPARRERRHRVRGPAAWVAKQRMILV

SEQ ID NO: 996153 - protein, 154 aa, Homo sapiens
ASWARVSAAAMAAVDLEKLRASVRGKAIGRPDQAAATRNGMNAAVRAVTRMGIYVGAKVFLIYEGYEGLVEGGETIKHANWVSVSNIIQLGGSLSLAALACKAFYHQWRGAGHAVYKLVHATASSNAVTSSCGDAQSLAGSQSSCRQASGAACW

SEQ ID NO: 996154 - protein, 42 aa, Homo sapiens
MPICFRSLGDTRLLLAGIPSGRSGRASALARDVPTFPLDVVD

SEQ ID NO: 996155 - protein, 371 aa, Homo sapiens
  misc_feature (63)..(63): Xaa can be any naturally occurring amino acid
MVVSAVIIVTRGPFSSGTRSTKTVVAFAKYAVPKYRCNAIYINTSRLALLKLGQLTPVLRHSXLWAIRRGIAVWHISLGWYSPSFAEAQATGKSRRGDADICKRTIAERRFPAPAEGHTQAGSTQFSEVVAIRAKSIRLRFRHRGGTCAARNPLQWLCNTVGTLAQGNPNKTLKGVHTMGANSRWGGKELHKLRKVVVHTLSNPIKCSPSKSGTKGNTGGLAGLRIGEAALTWNGAELVHWNGSRLGGLDFGRTGGTPLALESLKLFLKGLTQLNGCLFGAHPAPPKDRSCRPNGTPLWEGPYSQTIASVHMETVGLRPLREKALGLGVGVWPKKRPKRKFPKASGKPPPDRLQRAQSGSRHWAGLACEGL

SEQ ID NO: 996156 - protein, 190 aa, Homo sapiens
MRVQQAVPVRGASWATTLDSQLFGSMCFSARWVDWMRMLRGRWDTVYSPRAIIQGLTRAMYSRRSKMTPWWEHHGSIGGYADGETFPGYVGHGLGYAYESPFVGPTGYGGITVGFTPLLRDVLEKAPVLSPEPRARDFNKRLHANCCTTEDAGSYNRFNRHVPKGLNRALVSAPMGMPMSVWNEPMFDDA

SEQ ID NO: 996157 - protein, 82 aa, Homo sapiens
GRTQLTWSSPHELVREVSRSLLSPVAWMAHRLNGKIVYCDPSLRDNKEAIHVSNPSKIHSVVECLDNSLVYWSVCLIYVYCA

SEQ ID NO: 996158 - protein, 96 aa, Homo sapiens
MLHDEASLMIHSFPDLSNKFTYDEVGSLLTPRLNSRYRSDDKETPLELRALAVNGVLWRHDIDDECSNNEREDLTRGPPSSLRKGSRSSLEATRSM

SEQ ID NO: 996159 - protein, 73 aa, Homo sapiens
IPQNNNNLENLINPGAVIRAEGHQMAAEHKSQAPRCTGKKRLARSCRGEEGPGVYTRGYRLHNRLRRRLSSDG

SEQ ID NO: 996160 - protein, 43 aa, Homo sapiens
MRMYEVSDSVYGMSCEQEEGRVYRGTYGPPPLPKGDCGPITRA

SEQ ID NO: 996161 - protein, 141 aa, Homo sapiens
GFKAAVCLTGMTVAGVVLLGSLVQSEMTRLLTIHSTTPYPRSSAPPHPPFQLARVAQPRSNQLAMHARDDPTLAPITRVVERRRLVDRLCRRHTYSLSKFTSQLCVDEGHPRQPCEVAPLRAASISQKRLFPARDNLVANT

SEQ ID NO: 996162 - protein, 480 aa, Homo sapiens
MPSLKKSHCEHQGARGPTKCLSARTWAREYSTKRSGTHHQQGGRHTHIENTVATYIRCRHPQSGGNPTQISTRPQRDPDWMTHRPQSVGNHMRGGITTPRKTQQGGGQAYKIPGHKKRQGSPNSGPMPEPNLQEGPTQHTTKPQATSGGENPMWNTNKPNTMWTPPTNPTQEQRPPKETVQPEAKPINPGATTTKKHYPAQESNLGGDETSGTTPPQGEDIHKLPPRNVSQATARASGNTSHPAHSSDPTLGDGHYSGRQNTSGDTRSAQTPEKRLCSSTKQHNKTRGSAQISRTQSEQTGVTPRQRHNKNRNNAPTREIHDATHEVAIKRTQAHTSTPNNEVDTRITQPGRHTPTYPAETAYPTTPPRAKRASHIRRKRANQTAHPDKLVTRPIRHNSNKPSPSLHHTARIVPTPHQDQPPDAIRQHSDATNDRAPYTQTGQSRPKTTKNTEKHPYTTNHSPRRQQAARSNTNAQAPRH

SEQ ID NO: 996163 - protein, 109 aa, Homo sapiens
MPGKWEEKRTLGPPTREQLVSLEQTEKCIDLHLWSFSKNLRHRVLALGSLLHKAQTCCGTQVGQDWVSSPLGPLEQCWAPLLSCFHNKSGGRYDLFLYTRVHTCGGTRC

SEQ ID NO: 996164 - protein, 251 aa, Homo sapiens
  misc_feature (44)..(44): Xaa can be any naturally occurring amino acid
  misc_feature (110)..(110): Xaa can be any naturally occurring amino acid
  misc_feature (171)..(171): Xaa can be any naturally occurring amino acid
  misc_feature (217)..(217): Xaa can be any naturally occurring amino acid
VNRPPSLLVPMSPRSTVLACRRANGEEGSPSRLNGFYYSRGRQXQATQVGTGEEVSSHVESHDIRLRFQCKKTFNDASRQVLIYNTCLPTNVHTSEQALTRHRERGWYAXTERPRHGYTQKSYAESKVKYTFGLFMRVHPSRPICRVSTLLLGTRLENRGYTRQSVRLVPXRMHSCALLNAVNTCVGHVKPVVHALRLASQGRRATRGQGGLARGGXRKCMLVQAGMRGRPALMCWQQEGKAQAREKVSTP

SEQ ID NO: 996165 - protein, 74 aa, Homo sapiens
  misc_feature (45)..(45): Xaa can be any naturally occurring amino acid
MHQVWFRIGPVRVVVQTRGGKSTVCTLKKAGWEPGAARLSYGGKXNVYPPRTDVSGGWWEREATWKGPPEGFWG

SEQ ID NO: 996166 - protein, 110 aa, Homo sapiens
WKQNFTLLWPRLECKGLLSASRATFCAFAGVEADSPCLSPPKLAWHLQALRQQARLVYWYFYSRKRDFLSMCVAQAWFSRNSPCTPQGVYSLPPSLCLPKSVRGYYTGAL

SEQ ID NO: 996167 - protein, 81 aa, Homo sapiens
MQELNKYRLRTNCKNAGPCTLLRRGPQPFLVGAGPGLQNMLRRFIIVISLAEWKVPMPSYNTSVFKHDMGNCLSMSVYSVQ

SEQ ID NO: 996168 - protein, 157 aa, Homo sapiens
  misc_feature (49)..(49): Xaa can be any naturally occurring amino acid
  misc_feature (114)..(114): Xaa can be any naturally occurring amino acid
MGDDCVPPKSVPEKKHKRGPGRDLVSPGGRPPPAGVGYNPLLKDTMMRXGISPPREKNLSPTDKNLTTIFTRGPGEKRRHPISIVGAPPWEKPGFGGEHPCVRSRPRDREQTIXAADCQHPKRCRYYTPLDSSKQAPPRGETPPTLTDTARESSHST

SEQ ID NO: 996169 - protein, 159 aa, Homo sapiens
MAPPNDEYQYRCGASLTAWRCSVKILDVSNSSRISVEWPEMSVEQSAKGAHSAVVCRVIPSEKQGARFDQRTSFCEMKEADENTAVGGLGYPSVGETGSISQTSISAVVAGSIMRREVWPHSTHWCGDPPLNTSEGVAALVRVSRRCDSYSSGRNLAYY

SEQ ID NO: 996170 - protein, 243 aa, Homo sapiens
LREDGGRAGGEVKVDGSEPKLRQEVVVIISSRVLCHVDRKRAVRLVERGSLRRNLLGMSGVDRELRLGHTLRPFHEAALTKGQGHFLINRSELIGGACNKREKKVSQRRRPHRKSSVEKQLRRKPSACLPSKHTELIDGVGPEEERRGNPGSSLRKIRWIMQVHLGLDMCSPGGSTHNTGHHKIAMSRNLHSTDFYAKNFSHLTYLGITCIVNLLKGGQVGIHDPKEVFWGKAPSSMKSSMIG

SEQ ID NO: 996171 - protein, 241 aa, Homo sapiens
MQSILYLPLVCQRKSNVEAYHTPDVAFGNEIASWSHLPRGSRQAGGQKRQESKLSHTIKFSDPTRLTGFYINCSWDRTRRTYTTEKMSDTSLTVTGGIMKPEQGATTGRGCNERQATPHPHPPCGNVVVTTTSQAPPRRLHWTRGQSSPTQAKQGQHTSKPSTQQESSLTSRGQSWRDSCQKAVPIKAKQEAQSTRNVQPRDNCNEMVPPTGRQTRQSTTRQTTTGRQTEQQTPEQTPAPE

SEQ ID NO: 996172 - protein, 281 aa, Homo sapiens
PPKNRGGGAPPGAPQGGGAPPRKKNTPAGGGPKFCLGPPAGGGGERENTEGGVEWSKKKKGGGGGPPRKDDICAPGPWSEEGGAPGVMTPPPAGMGGGGRARERKKGDDDGRVLTDSRGGVEQGRGGGGGEGCPPAAREQQLAKKEEAAVGVLTPTRGRAIKRKREPPNWGWRAAPHPSVSGELVCWHEEKPPQEGRATQWSGRSLKPGSNYAISAETAILEQTGDDCQTTQVRDSPPQNRWAPPDERERRALVFGEGTPRWCENNLWGDQSRQQKRDPRW

SEQ ID NO: 996173 - protein, 181 aa, Homo sapiens
ATDAMNICPRRAGTFRNKDNVARVRRDEAQAREEEKERDAEGAAWLINEARTEFLRKKARHQNSLSELEASKDGGSPQSFWPLWDLIAAERAWRGTWKGGEQRQLKSTRNNMRQEKERHRKKSFLVLFWTEYLAPEMCAEVTDSSALSTQAYRPPGSEVESARDTGSLHRIIDEGSLVSTG

SEQ ID NO: 996174 - protein, 103 aa, Homo sapiens
  misc_feature (22)..(22): Xaa can be any naturally occurring amino acid
MIAQLRMLGFALVMKMLPRGSXHVWLLLYPGLRHRGTSLVDRAGLITRLRWLGLRSPSVRGVCFLSGLGRTTPWSFPPLTSDIKGNLGLPRDLHNLVPQEAFT

SEQ ID NO: 996175 - protein, 206 aa, Homo sapiens
DDSLSGTCAVITCRPPTITVLHGTLNRPVSTGDTYVALLARGPEHLSCGRTAITATWGLRISATSQMGLDAKEMACSYTSKTISGPRCIGKVKNRMQVRYHVVHYTYHNAFVCRIEYWNVQTLYAYKMNRSMNPQYVCRLGELLREFVLHRLKPGHRGSALVIPAGGKTDSPAKEDLVMAITSAFGSIPQRHTRLDVSSEANGWAQ

SEQ ID NO: 996176 - protein, 102 aa, Homo sapiens
  misc_feature (93)..(93): Xaa can be any naturally occurring amino acid
GERYPRPPRGPPHKGPRSCVAAAAVPWLASAGAEICCTSWGLFICCFFSGFLIFFVILDKMSVRDIKIERGTLVALGALQTVFPRDNFTKHVXVNLGKASDE

SEQ ID NO: 996177 - protein, 99 aa, Homo sapiens
MATRYVWWDAECGEMNTWSSTVVTVVAATIRKSFCTLCDPVNKWWKFNCTETRYSRDHLKYDNTLVAVLQTEYTICQTLPRSRASNGGMATLALSIEGG

SEQ ID NO: 996178 - protein, 185 aa, Homo sapiens
MAVEPPVAPLEAPVDRITVILRPMVGGLFSTKCQHSNGSRIARVGPSMFLVNREEHEVYVRGGRIRITGAAQSRSMIRNGGGPSSRIQSAGLVSSEDDVKPWRIRVDAGRSFDTIISPRSSGSVRSDAQDVLPAYLSFPAVTKQVRLLHLSLPEVRQWKTQVTSISGNRLGGPARTTYGGPEKDL

SEQ ID NO: 996179 - protein, 102 aa, Homo sapiens
AVAFSCFKMKLNISFPVHWLPMLIEVKMNAYYVLSMRTRMGTEVAGDALCEEWERVTVAPNQMLGTTHRRSPHVRRVSFEPLRRVRLAYGAKRAFLLTRPNG

SEQ ID NO: 996180 - protein, 72 aa, Homo sapiens
RDGAEQEEPCAMVEKEEADGGISEEEAAQYDRQIRLWGLEALETVAGLSEMLLVGLKGLGAEIAKNSHLGSE

SEQ ID NO: 996181 - protein, 337 aa, Homo sapiens
  misc_feature (130)..(130): Xaa can be any naturally occurring amino acid
HAGRDHPVSSVIAASITARLAIPPGLVPHEESSCIVKSAYGSYAWGLTDWMPVITNESPSSQFCKIIEAPRDRGREKRREIQALPTGPRVTEEHVWLRARSALWCLDDVRRWVRLCGSVPVLTTVFRQRXAIRGPGLVASDRSSWAPVCRRIALRREQQTRPRNPPGHHWGERSPPRRQSSSSSSPSNEERHKQLVSPASAGGKMHGVLSQPCLSQQPVRHPSDWVPRRRHAWLVSAAGPACSLAGPGPGHRPPGLGRRGPHGPRLGASQAPRPLSNSPSKRSAVDRFSYFPLLLLGHNGVGAPVAACLLGRDTGPRSQAEPGSGVLTSGAEAGPIL

SEQ ID NO: 996182 - protein, 234 aa, Homo sapiens
QSYGFCGKGVCIVWQKKTRKKALGETPAFCPPLTPNGAAVFIEHRGGHTPPFPNLVPGVLPCGQWGGVVGVWDPCGRVGDLRSHSRDVVDIRLPSGVSKLCWLISRVHLAGSPRPRGDPRARANRKPRGRTPAPRGSSQSVGPEVHPSGEPSSYEPQSVLGGKTMCQETQGACIPWKVASGRGGGGHSLPTKSLGDQRKISLGARGISPVAIWAPLPQKAPIFTLRKTFKGQSS

SEQ ID NO: 996183 - protein, 111 aa, Homo sapiens
ARNLNGGTCLSSAAVRGITLLKPLSCTSIRRASSTDNAWEHSVEMVGRNKPRGREETVQEISIQRVCASVATYTLDLETHYNCTQQDTLANETVLNEEFHRTRVRLCVQRD

SEQ ID NO: 996184 - protein, 172 aa, Homo sapiens
DQQFHAITVTQKIVDGPSGRLRRDGREDLHNIIPALMTLSTLRSMSSLLLNEEARVVWSAVSPACRRVRGGPDLPCMKTLPDIDRAPEGGESRRRRDPIKGSPGRTLRTRWSPLTSIGTSTPPVFDAGADIGSSMKQVCQRYISWYEQTNLDYQANRGGGSFMVLINGHSRR

SEQ ID NO: 996185 - protein, 70 aa, Homo sapiens
AQHGLSSRLSLPLFFQKAPQPSQTRWCYVLVAVGGFDRNGLDHLTPAEIASPGRGNDEFLKNSVDDDMLS

SEQ ID NO: 996186 - protein, 237 aa, Homo sapiens
MIFKGGQTDSWGATPLFTRGGQGKTDNRLRDNLQDEHNPRATKRGPKHRGEDTHFLCTTSLEENFRGRTPQEGPKLSAGIQQHHGALLRREPRKNIQLGEQPLYSGGAHRYLSQVSPKGARRKHYASSEGRGKRSSYDQMRERASHQERICRVVEPPPMWRPPPEFEKRSMWVRTPTQPRREKQADHNNGGSSKHYTHQGGKEIYTPYGRFVRHPLVRDTSYFTPRLNNIMVAHLDH

SEQ ID NO: 996187 - protein, 99 aa, Homo sapiens
MLACAALGFDRVEACLGFPRDMIEQPRRIREVEKIMGLVELSMDSSPSKERRRTPEDSPESRNRNQLTNSWTKFSLEGFYWRTLRPWSNVGGPAWANGP

SEQ ID NO: 996188 - protein, 274 aa, Homo sapiens
  misc_feature (84)..(84): Xaa can be any naturally occurring amino acid
  misc_feature (87)..(87): Xaa can be any naturally occurring amino acid
  misc_feature (138)..(138): Xaa can be any naturally occurring amino acid
  misc_feature (140)..(140): Xaa can be any naturally occurring amino acid
MEGVRTRTTHSPCTEHVTRAAFTGVLDPVRPAHEARGSTGPASALAGTQPPALRSVWRAEQPTSGTHRERLVRTRRQNVCHGRXRRXAPIQIVQGAVFAVRTVLLLPLSNRTARHCGHILSVCMSNLYVNVLSVGHTXTXAREGGEAHVPRGLRSTKMLGWTPSKDIGVFAVVTKADAHSMAEVHASELLSLASPYAAYLQLALMEKYTIEEPLGTYTCRTLEGDKVEAQQIMPRCELAIGSRPLPIWYTDPLGGALCLSSRLEGQNTRKVRSK

SEQ ID NO: 996189 - protein, 103 aa, Homo sapiens
  misc_feature (42)..(42): Xaa can be any naturally occurring amino acid
MATQVWLCGVVVNVGVYSPRIESRKWEPTIDSETSEGVLDGXESAISHRVKCYTGYGKCVSMNPADPSEYRYPGGFGEKLTQVKPGTFQKIVPKDPDQALAGN

SEQ ID NO: 996190 - protein, 142 aa, Homo sapiens
PQIALLIGPYLKSELINKSWAGGSHIHQLVQFIAPRLLVPRGFSQRTTWRFTIRSASIRRFSQFSNLGASLSIFILSLTERLSWERDKLRLGTPFSLCVLFPQVGLVSGILHYSYVDPTLSLYHKCLIVWVCDTLSLRGSPK

SEQ ID NO: 996191 - protein, 86 aa, Homo sapiens
MSEEQKIKRRQGRGSPVYLFQTKYLKQQNLQKSPSLSIVCVFPTKVQTSRPEQTPLKRALSGANRAPRKKRSGKKRNRFANLTDFF

SEQ ID NO: 996192 - protein, 503 aa, Homo sapiens
KKVLLCPLGEKLQVTRELCCGVPSLTRGCAQVCENVCLSKKKKKIPLPRGWGREITRCVRDTCVEKISAGHILYMYNAQYDVCGPIIHKRGPGEHSWYSVACPRRGVYSARFHKERGGDEGGERSAERERTHKVGRRERGESLTPLETHTQRESISPTTEGPREHLSTLCVTLSERGAPRGEHRLYTLCIPPQSVSTQTTLSPEEGRHTERHHYSVRKREREYSHTRERAPMWGPRGHHWERGALHTPQARNLTTQHIVWGRRESHERAREGGATHTLMRRETTGEENIHPEETPPLSRGGGPTQHKHNRRNTLSKRQHSTPHITLPDKTIDGGRINKTPPLGGDKTGTTYNNNICASPQHDKRVGLRPHTHIQLVRNETPARLYPTTRGGGPHPTTGREWDTLPHPIMNYHTRWREKRIHTKQRITRTENRYFLLARVSLISSHSIIDGVVLTPTGEPLLSFLQTKRREPGDQAVILCCVVRRPRSVERPSVGEQLVWGCTY

SEQ ID NO: 996193 - protein, 58 aa, Homo sapiens
MRGGHHAKILITSESNPSRGLPGVRGVAQRAWPHNTTSGGEGHGALIKKRRPYWGETA

SEQ ID NO: 996194 - protein, 108 aa, Homo sapiens
  misc_feature (77)..(77): Xaa can be any naturally occurring amino acid
MAGRLPAGPWGMGSALNLSGWGVRASAGLRMLQQKSCVHRAECAGDDQKLMLLSSSDRVEDAREDHPIPCALTGRSXCTRLHYVFLRYPTLIISCNYYRETLRITSKT

SEQ ID NO: 996195 - protein, 325 aa, Homo sapiens
EEEDEEEEIDVVTVGLVVASSDINGVTRWQHRCACHERSPGSREGSSPHEVILKWMPAIHQQHNMPPPLPTCESEDASPLQKMIKSEASPRPLKSVIHPKRLESLSPRNSDSEDSERRRNHIILVAPAFARTFGPCFLTLRDRRAGVGHTNEKAAKVVVLKTGHVSMSTPSKAEETPAFCWNRKNCRRDSSSWYLKIEQRSDLLEASQTVQSLQLGTFDIVEPNVVVALKKCGFTSNRSRVRVRHRVGREHQVGSVERWAAEPMCCGLSSHLTPDMGYVDEGPWGVEPGVQFDTRRLLRHREQGAPGINGRLRKRGKTINRNQTN

SEQ ID NO: 996196 - protein, 261 aa, Homo sapiens
IKKGNLFWGPRAPGPGEGGPLKEKKTFFGPFFGNPVVRRGVTPNLSSLGGKLETARRGLKGTNTIPSGRRNPFVCATDGNSRGPHCGGREKGGLQIVVLTLCAEGPQTPGVSRGCENILYLTVRMFLENNSPVEDKMLSRAPNHPLTRVWMCARGKYIPPKNACGVHNRGGGEYHSPLSLCLVEENVGGLVETLLPREGVCSQVGASTNTLLREGVMESSVLWLPREERGSLSTRRENISSSLCVGEHNNIVPTYLQLCYV

SEQ ID NO: 996197 - protein, 190 aa, Homo sapiens
MPGSSSEYGSGIPRGEWKRWIPNICVLCKVPVPKGESRSPAALSTDSQQVDSSGQQGLSFHYPLLRVLQQNEAKHICSLLTSGIWWARAASNRAASLWDGLLLQQLNHQRCGQAHIAQSGPAGDPVSTFLSLGVFLRAQEGVPNWSREALGIEASSLAPPGGCPTSGEQGRDFPGAPPVVTLSHAVPETP

SEQ ID NO: 996198 - protein, 315 aa, Homo sapiens
GGGPPFKRGFGAKRRPRGGDTGESPPFPPKKGVPPPFSPGGGGSRQKEPARGEATRRDPHEWLTRCSRVEETSQPRRRCPTPPPGCGPQARRMNTAQDRSVHPPTAHTAGNSRRRTTPARPHDALPSAEGGAHSEGTGRQCARRHERGSQQPPNRKETGAGAPPRAEKAIFLRGRGQKKPPREGRPLIRRGVCRSSGDNHHKHPVEKESPPTSRGDHAREKRVCHPPKKKIVPPRVVTTTTDRSEEAGVTNTSQRRTPSDSTPEDKEWRRTTEATAPRLTERHTHSRNEGTNKTGGRQQSTTPQSHHEEPPRKTH

SEQ ID NO: 996199 - protein, 176 aa, Homo sapiens
RGGCGTLGRRKAGKRKWAGVLVQTPVATSQKSTQMVQEKIFIRFPRDPVGHRGCPGGPAVRALATKIQAAVGGAFTCAGKKFLSGEEISHLLSRLAAYRVHSITAPTAPRLPRRTPSSMVPMCGSLVFCIIAWGRQLVSRECPWDTSWPHDFPEPALREASELLRELCIKNMVWKY

SEQ ID NO: 996200 - protein, 137 aa, Homo sapiens
MYRRADVAAKIAVRARCCGRGPRPSSPGLTESPHDDFVFIFHCFANGTFQCRLATSVVQIDDWDMLQMCIYSLIERILCAADTVMIDSLKKTWAVSSNVLADSVLPAYMAMRKCLIGHKERLVEIIVSESLVGGIVH

SEQ ID NO: 996201 - protein, 235 aa, Homo sapiens
VLLSSLLEEISQVCFLRGTSKGVKSSPGPPGRQEAVGGTSPDDCDSRTWAEDTYCVGPLHHGLHKGLVVARWIQDTLTVSVRPSRNILVIEAIIGQAELTPVLGYEQRGELWQVDPGTTLPSQQRRRRGSYPEVSQLHDAIVQQEVTHGLVRHFIDEAFAIEGRNMVELVQGPRSSAIIALATVVGTLDDRLGLPRHGKGTLRVGLSKSGLWVMSRRHDGLAGGERASGEESSRG

SEQ ID NO: 996202 - protein, 217 aa, Homo sapiens
MRKKHPNEPGNKRTREQKQKKTKRGTAQEHKKTHTRKKKTSKDETKQDTDGDSNKTQNQEARKERHTTDETETKVKATKNETQQRTRETKEKTKTKLKPSTNDRKTLRRERGTGQREAGQEQEEAEEPQREVPTDACKTTRDEKAQQEQPADKAQPHNETETREETNKNNPNKHDVNPAQQIKEEHPHTHDKHTQKTPSQTATWREKSINDRTVISE

SEQ ID NO: 996203 - protein, 89 aa, Homo sapiens
KFLMVPILDRNGFATAWRTTEFYADIKILTGPKRLYAPTRASTSHSLHAIKSSTSKEAPKDTSEVIDNRAPRQSSALVSFRRLSYRVLF

SEQ ID NO: 996204 - protein, 179 aa, Homo sapiens
RTSSCQKSRGLFNRTASTIRSRYEAGAIRSSQNFSQSRRHTNKTARNNRGTLLGHCRQCQGKRTRRQKNGQPPPRGNEGPGDKQEKATQRRRMAGSGGWPPGCLKEESGSDEAGSGLILSSPVEKPLIPLMRIPNLALQSRGKPPSSRTKAGSKSASRTHRGSHRKDPSLPGILKLFKQ

SEQ ID NO: 996205 - protein, 213 aa, Homo sapiens
MRKPVHVSTPEQHSPQKESENKTERTSKPTETSTNTQTEAKNNTEAIDEKIAKRSPTEIQQNTRKNKNQNTTGEQSKNKKKRSQSNEPEMQNKGSELTRPQSGRSITRQDNTQQRENTDTNIEQHRHNNNQEEERITHNREPKHPGKRHDPHNQNKRQNKPIEHKADPGAMSEQRDTRKLSKRRNRKQVRDCIPNVTEAPAATTERDSKERAE

SEQ ID NO: 996206 - protein, 224 aa, Homo sapiens
SSLTQDGSTPQPSIPGPGVCELEQTSVEGQLCGIHGHSIQQSHAPGNNEIGDTLEQRSDIIKGPWAFIQPDPHYPDVGSQMSGTTLKYGSEIMPSSDSGPEEKTLNGRWNVTRDPATTHPLIDWMKLFAAGNNPGQEFRDTTMHRTGSIQYRSPDEAKQKTVRGKRRNRYTERNPPQRPAERHTYTSTKAQTHTDEYSSNQRGTRDAAQAQHANHKRQRNHAAL

SEQ ID NO: 996207 - protein, 198 aa, Homo sapiens
MAERGQCRARAVASEGGSPKLWQLPCGVQLQVHRSQELRFGNLHLDFRGVWKCLDAQARTFACRDRGPQDNLCSGPCSNGPMCGSRTPATDSPLRSASWRSETDGTMAPDPRNGGSHRQPRSVHLDQRAQPHGRPPVNAARGRLHCNARRRCNPDHGNPWCSLAAVHCAQRTSGTSTSRPHAPIAAGTLGQSNDNPYD

SEQ ID NO: 996208 - protein, 311 aa, Homo sapiens
MVEKINPLVLDHGFGVCPPGLCSGRYAHPSAMICFTIAARRAARSRKGRLVLVTMLSINDIHTWELTAGTEAKVCESTVGPMHSTSIDPMCESMRPILGGQYPGINESRAYYTLSYERKLLVVPGRDAPQVLAGSRPALKPKGPNREKMTSDYVGDLQHPGMFVAIQAVLSLYASVATSGIVMDSGDGGHPHGAIYEGYALPHAILRLDRGWPGLTSYLMKEFSTEEATVHTTAEPEIVRDIKEKLCYVRPDFEQRLHRGFSSSLEKNLHCRGQVIHPGMTGPCRGLPPSSGRLGSENPYHILSDPNFPVG

SEQ ID NO: 996209 - protein, 287 aa, Homo sapiens
MTLVQLSISCDHLIDKDIGSKSDPLCVPLTNDVGGEQLALSLAGLNGVQELLKTLSSSKTLHAGGTCFENESRSYAFGIYDIDEQDARAEGMMTFLRGAECSLAYRIVSKPRYCLSPCMLIGLDEHCWRWGDHLRSQLTELTDNSCSYTMEVEGHEDLDIGIGLPGKTLESTFMGASPRNTDDGTKGTVVYHESGGHQEQAETHSWKAFSSPRARIYVVGTPRTSVQCDKRPRLQCAVQMTYRYVQTGWQRLRVDRRELNDSHELADGTHSTQRCTTARCGYRRLFD

SEQ ID NO: 996210 - protein, 601 aa, Homo sapiens
  misc_feature (149)..(149): Xaa can be any naturally occurring amino acid
  misc_feature (577)..(577): Xaa can be any naturally occurring amino acid
AGAQAQHEIDRFNESPENKLWYFIGPGSRRAWGLEDIDERGERKLEGECPTQEDSSLAMRSYQVVISLWWQVELECDSLQEATIFWQQERKRIEAIGRHRDGHSPGAERKGIPDPSAYEIKHHTPDVTRWLGKMGLREGELVYRAMETXTPVGGLVPAIQLENRFQPKRYRLGAGHNEELLERLFFLGLAQILIANPEVYISLKGTKGHFGESLSCAVPGRLGKLAKRLREDEITTRRPRYTRKTRRFQAGPFMETVGPIPRREERVLGGPRWFQAGLWSSGEGALLAMWKQFGIRPIPSFESLAAWKQDRPSITGSILNTVKPLCLAPLSTSLVRPFCLVNPWWGHGESLGQRHRGYYNLGAMWRPEAKGARSQARGAAQFSPGRLGGGKRWPTRSPKIPRDPWKREPFVVNIALGEVALGVRPQTGAVAGQSVHTGGAQKREGTPKREGRQQGKAPQGTLRGHRNQGVPEPAAGGCGGAYHDENGRVVQAEAQRAISTRERGEGGPKGAPPEWRAMQDPHEDAAKGYPFTSTGCRQAGDPGLRKHRRPRGLARKRDTWVVSNEGDRKETKTQWKXSESKRRDDEDRQRDERGHDTKHPQ

SEQ ID NO: 996211 - protein, 290 aa, Homo sapiens
ASEAYSCFNDERWASPIPDHWVPEPHRSDRDERSHFVLFYVVSVWPARSELLTLWVKTGRVMWILKSSGWETEKTKVVPMKAIGCPLTHCSCPTCILRYGRYVPCYIQTQGITWQTDREHSGLCVVAIVVGANSETLLQSSGSICNKIRRDREFLDREHVYYSALERLGPKRARRIRKDFAIVLYREDDVRSHVVMKALEIKKVRNLDQSTQDSASCYSTCPEHKRRRICSGQKQRTKNNHRKRLQNMQTFGQGELTEAPETAQEQLRRDADFLSASFYSRSESSPNFDL

SEQ ID NO: 996212 - protein, 245 aa, Homo sapiens
MRMEDHAVKDRVNRRKEPHRPHTELVVTQSVEPAGPDEQANELDKTPHKTDTMCNYTVLDNQANSDWNEWTDNNKSGGNNGERHQTMPLDYAKDNDRNHEGQTKNTSEQPGNHAKRTRSNTLGIQPERDANKTKETSQRAAQVTIPRSHAKAQEKRQEHRIRRRMKNEGDSEEKGAQRKIKQQRPRQKARQKGQKKSRREAERQEQEPEKKRTKKSAESRTSTRRSLTPCGNDGKCTHTGKNQLE

SEQ ID NO: 996213 - protein, 380 aa, Homo sapiens
LVAIVRDPAALARSAFSYYKSTVITFRKSPVFGCLPGQSYEAFYRPGARGEQYDVGNLLWFDFGLAFPPEKRAKRGNIQSPRETRQGPAQLQVLPSGAGPRAQHLNPNARQSILFPLLLIIAGQISSACLVAIRGLHPSSSGVWAGWTLSLTWSWLAEYFDDVIGFCWQMTCAGDLDDVVGFMHNAQLDITGRAYSTCQQQWTDCGRTAADCTGPEPGTTGNLGHTIVHVNRDSGTGIDEYGQGRLQTAVAEAPGLDRDALAKHRLATGRRVRTPQYSTNTRNQPRHVGDTNGRGTQLAHGIGRPKEREERGGTDSPGDTPGASRRKRKPERVKGPRKGTPQRPYRSEENHMQTKISGTTNVDEHHAQQLHRSPPGPNEH

SEQ ID NO: 996214 - protein, 283 aa, Homo sapiens
  misc_feature (10)..(10): Xaa can be any naturally occurring amino acid
  misc_feature (257)..(257): Xaa can be any naturally occurring amino acid
MCYENNHRMXCVLWVTIAARRERLRDHHRGAVLEAFAMTCAPCDVTASIMCDVTRASDRVCISFRNIAQISIVRPYPAYVTTKGYLVIAILWGNAPYGGIGPNQRPMLRQGKGTLLLIQSHNKFHYFDARCSDDSSMSSTLASISRSRSHFGSMPPTSKAKDREPCYCVRVREGWNSLEVATCRGPFSEELVSSGEALRPEEEAYCYGRTVEDSPLGLGDPNAEFPVGTRGLAFTWTSGKRFPLPRGEVVSPKGRTXRAVALEVGFKPKAIWSHNAKEILDAR

SEQ ID NO: 996215 - protein, 401 aa, Homo sapiens
  misc_feature (173)..(173): Xaa can be any naturally occurring amino acid
MSSAREKPTPPAMPAPTVRLLPCCTRPPSRPVRSLGQAAVRCLSSCAWPFDGLTCALLHCDALPVPAHALSCPVQPGCVACGAASVQANGAPTVLGRYVAAPLLSRSLPWSIVTCHALLACRMMGDRVATWERVLFGGPVRAPRASAVWEAARLDRVCGTTVTTFFWARALDXLRLACGPARQLGQRSRSLLVRLLACTILVRVALLCCPSAALDAEKGAPRPGRLCELPIANHPGGPMRSTKAACNLTNWAGTDALSSIEHLSLNEVAGPGGAPVAFVAPCVPRACWPFGGRPSRWCLNVCEGTGTPCFGPSVCPVAPALPKVFRALRGHGPGGSRSGLRSLARLARHFPPRWAVPVRLIFSGHANGGGLPRFLTCSPPGGVLSSGASHRPPWETPFRFT

SEQ ID NO: 996216 - protein, 268 aa, Homo sapiens
ALFRQALLFCGIRDPLEVIQADLSDKTGFEQRFSRARTEPSESAHLGQSGFLGCPRQPTHSHATTHLTLLFLILANGAQALSAVCALHSAQRLSTGQGGQEMQRAWTALVRILARCDIMAAAGRWWHSSGSVHPAPASTNLNLISTGSGHLLGPLRQAPAGAAAPTWRRMCTSIGHHKTQVLMFLRSTTIEDERLCPGAICGPVLFGQECTSQPGVGPDGHQSLKARTEEMLKRPSYDASSGVSPQATGESKDVNPAGDFNACLRFTD

SEQ ID NO: 996217 - protein, 69 aa, Homo sapiens
DASGFRVGSGEVWSCSDFHEETAVCDVRMQRSGGTLGEPVTSLNPHCSEEPEWALRAGPRYWLAGRVGP

SEQ ID NO: 996218 - protein, 387 aa, Homo sapiens
MNTGDLTESGVNGAWKESSRPLWCTQEVVLCAPRNGRCFGVPGVTHLLPLGTVMREGRDSCNNCVLRNDQSSRRQRPWDNYLAICGAEHLHFLRGSGASGKVKASQGWRGWYEYRPSIGLHTGDKGEPRRPPRGESHGVPARNIASIPFICVDRQSCFSFAGGIRIYITLCLVRGTGDCHLLQARMDRLRRTVPSTHISHWWNYTLVNAVAANGVTPFGTPVYQGTLTLASAREAYYATARRCESGDEGSAEKGNEEVASLHKEIGGMIVEGPLVATLCPPPLCVYSGGTRRFVSQPYRGVNNGQNLFDNEMPLIKEFYGLGPLVVPGAALRSTPCTDSFSKVRLPVKALWGVNPVALFGQGISLQNLCLLYGPGKTGCTSVSPCNV

SEQ ID NO: 996219 - protein, 113 aa, Homo sapiens
MSKRGRGWVLWCEISGLSLGLRGKRCSQLVLTTHGSNNTMYIISVTRGSEGTAMNEHIPRVHGVGDDGDGHQSRKAKPELRRKVGSSSVVIRTYGESHTGENKMDVVILDFAR

SEQ ID NO: 996220 - protein, 135 aa, Homo sapiens
MDLHLLTLDQDLKDGGRPTPLPFRSKCALTRAREIDPGKYPLAPQDVKTGWQSSPDAPTPRCRQGKELKTSCDWEGWLDRKKSMSEAPGLHREWCFVHEKYEFLILREPFNGEVDGTDFQFRKGEMRSSMQDLGE

SEQ ID NO: 996221 - protein, 127 aa, Homo sapiens
MLVWQIRATLETTKEKTQVWPGAGTGELCDAEEGHQQTDVANSQRFHGQQAIHLPGPNMWSRSGSSRTRLGSGVAYLGLRILGKPDNWARDEHCCLKLRAVAHRGGIPSEGPSVGHAEGAVPLAKHE

SEQ ID NO: 996222 - protein, 312 aa, Homo sapiens
  misc_feature (229)..(229): Xaa can be any naturally occurring amino acid
  misc_feature (248)..(248): Xaa can be any naturally occurring amino acid
MTLEDGQGMAPRTLLLLISGALAVYPEAGARARSPMTGNSLRTIPDVARERRAEVRMHDLRSSTPPKVGAVAGGHLKTGELFAGWVAHRLNARDDQRRVVDARRRAVDSSRRITARRRILSCVSPGDLAAGRSAADGPQVDGTIVPPHVGTLVGSSMPAGILSNDETQRRFRRIVDRSVVWAVRIVGGIGSRSSVFVRWRFGDRALPYHSGVADFPNQARVITRRSSWXRLDGHGCTDSCAWLSPHGXHQSAYTVGASVGSHWSVGHGWQRGWTQGPYPLCTRGKLLSVRGMSVALPGGGITPLGRENPWQP

SEQ ID NO: 996223 - protein, 200 aa, Homo sapiens
MCSQGRGIPVSTEESSSSSEEEERTQTPLSPLRSSTKGLGRVTREQRPQGVGVGGLVGVEAVALCHPGSHERACTSRGPHEARMHGKSAETSSPVACVSGSFCSDPRLRRHVRVNHEGIKEFTPVRYCTEGKRTFSSRLILEKHVQVRDGLQLGAQSRGRGMHLARVPVSRGQGARSEDSRSRSDSCSEELRERSASKSP

SEQ ID NO: 996224 - protein, 68 aa, Homo sapiens
EDPGVAMGRRPVRCYRYCKNKPYPKSRFCRGVPVCQDSYFSDLGRHKQAKVDEFPAFVATMVSDELWS

SEQ ID NO: 996225 - protein, 273 aa, Homo sapiens
  misc_feature (218)..(218): Xaa can be any naturally occurring amino acid
MIIQVGDFPLHDPGASDIYQAIFHDRTIALKERIGFRVTCGSRSTFGASSTSLICGPRRLTVHIYSSCRNCIMLAMFGSIGKRTNYCRRMLHAIWRSRYHSQGVFVSRQIAYRVSATGVAADEVAVMAYSFKLNVAEKGDRHLRLVPQLYGRTDGSVSWYCVEHLAQRGWGTWLLRGFARDFGSFRRPQPFPLGSLAPGFGLLPPGSPMKFPLGSPLXDRAGPVSLLPKGVSIPFPFLFGKTDTPGGTRFLTRSPRAGGLQEQGPRRARGNPD

SEQ ID NO: 996226 - protein, 97 aa, Homo sapiens
MSTAAHSAEKWFPGNFRDLEKGVDPRGHIGLSEKGKATDTDSFRERCTSMRSAPFSRAQQPCWCAQDFGKAGDPTVEDKLNRATTVLGKKRRGGKNA

SEQ ID NO: 996227 - protein, 251 aa, Homo sapiens
  misc_feature (70)..(70): Xaa can be any naturally occurring amino acid
  misc_feature (76)..(76): Xaa can be any naturally occurring amino acid
LRDLFVFAAYAARVGRGAVQDLSSRCRSPPIVKHWDLPFSIMTPRDELARYGNEHELQMHLVQPYVAQTXAILDLXHTRVDMTREQIGRSSRSDRFGSRSLSHESRWVGTGCHRQHVIQVLEHVASGRHQFHCNISSSIRELSHAVNSSAVSIHRKDMVRGTQKAIGTKLFAFIGNCYHVLQRGTVCMVGILKDRVTRDLEDSVDWGLRSQGRAGATCDEGVKLQGKGSPTLHKVTAGIHRSTMGKHSVDE

SEQ ID NO: 996228 - protein, 301 aa, Homo sapiens
  misc_feature (249)..(249): Xaa can be any naturally occurring amino acid
ILVWFWPHSRSSIGLPKEAPKKKKGHKWSPVVLGFFHSELVLMSAQESVGYQRRTCDHPGRVLSESVTNQASLCWTLSGDEIFQWWIIGKEGDGLGVLRIGTIGQLVRPQGCIGPTYSCGQSQPWKFCDKGPPIITSDSPDVVPSEKVNVVPHETGPWWTREKKPKVPSIVVYIDQVSPQPSGSQVSTVGFSKMWKTRVSPTRECVREERGLSCGPGGKNHLFSRKFPLILPFPWLSMWGRFTTCRVWXHLGLWYEPLSQSTGEIVMLQSPLPEIYGRTWLCALGLTGGSGGHHSCGTIFI

SEQ ID NO: 996229 - protein, 303 aa, Homo sapiens
  misc_feature (60)..(60): Xaa can be any naturally occurring amino acid
MPLWHVYSHYSENSYTVLSAICGMELRSSSNRPINLDYTVMFLTSSLHPSIFFYLISPHXCTSYYIVEIRYTPQCDRTWSPNSPVCCPLVTPVFLQSLLPYRTDTICAPEAKYNAKTFLETGRSAQQIFWFLNRAVKKQQGGSRVLASCGQWLRDGVFPKRDLIGAYLTDEDPISWGRNPNSSRTLKSKDLEVELNDAHRSSFSALNYPALKSEETLAWINPFNQNWLGWTRVRWEGFDLQTAGYTPDQLGENARLVLGLSLGWGARQSKRQEKLVSVFPGISLQVVVGTSKNPGLIDEVRRK

SEQ ID NO: 996230 - protein, 384 aa, Homo sapiens
MGRYWCGMGAREDLSYRGRSEGPRCEGQLVNSFDLRLKVSLDLQAIGRLSRSPQHWCTDPLAWKDSLVYPIKLSTYEALSQVAPGGMRPICLRDPDVPRLEDSPRGTLNDEKENDGLTDLIVLARALYNYTPGPSDDRLCANPMGLLVLVRLSYSPSLVSPSPSLGRKLVQLEPSLWEGPVGGFTPNYLWLSPNSLPGSGGLPARVTRAKPSQFAWRYVEKRLAAWRLGEENAIGKLLELLSPVTSEKEFHVPSVEQTEWALRMAFLPQSLRGTSRPGGKRIPGWPVRSTFPQVGGNRLCSAYSVNRSPLLKHFPESHTERTCGPHRCAGQFPVPLAIFPTLGKGKETSIIVKSSWAPENCVPTRVHVHTHCGGKLKPGLSPVG

SEQ ID NO: 996231 - protein, 387 aa, Homo sapiens
  misc_feature (63)..(63): Xaa can be any naturally occurring amino acid
PQNPGGFLGGGGKKNFWGGGVAPTTHVREHERHVSVGPNPPSGALVGEECGATQQSEQPSAMXVCPPRETVVTRRKGVPESTVGGFTPIVSLARPSRRSVSPAPLGFTGGPWGAAYLWGRGGGGPPKRVFLRDPPVCDNPFSPQRVSFARGIYIQEDAVCKNTPLMLPMYARPAPPTEHICAPYYVWTTQERGVVSPHATLFVRRPPLRGEQPPSPGERNLWVGSLCGAGAPRGHTLFCPTQCVFSARTPRPRVCSPPRSVCRDASRLKTTVHPLFYVLQETFVVAARPLCFECAPPEENSFVGALCVVHPLGSPLVCGLSRHSSATRRFVDHPPLSSGGYREAPLLLRHHMLLWWVVIRCAPPAPGRHLAPLFCVDTVAGSLCYPP

SEQ ID NO: 996232 - protein, 104 aa, Homo sapiens
MKILTERGYSFHHHGRAGTSCATIEGESWCYVALDFEQEIGTRASSFFLWEQELRACPIGPGHSPFGASERVPGCPGGRLFHAFLPWATWTPCGIHETTFYSIF

SEQ ID NO: 996233 - protein, 291 aa, Homo sapiens
MRERAERGIIRVNHRGDSLYIIGEGHSLRRTNKEGRTTRTPPARPKSWKTRGGEKHPTPHPEGGGAHLPRGAPTQTSSRRGTTCAPKNRYNTTTTHRKNTQNKEKHKTNARPQQTNHCLSIHSAGEHTQSSCRQKTRGVKDTNKQNQKQRAPTKDKLARANQNHRGDPRQTPKTTPNRNRATKSVKKQGNKQKTTRKKRTNTRKEHYSPPKEDKRPTNNTKEQAKPQKKPHPEDTRQTTQTKVGAQHNQLSEKRKEPTTKKETDRDWSKHTPPQKEQNTHTSTHTRTRNKE

SEQ ID NO: 996234 - protein, 212 aa, Homo sapiens
MFPLISPMVTVVGAPQPVMWTARGGVGTGGRQGVAPCVGALLFTKKSSLASSPADPKPRGPYRRVRQALGMTEWPDKPLPKKTPAWALYPRKRTPREKTRACVAPGFQEEKLSQRGPKSRGGKHNYPGGHQWCGAPCTSAEKSPIKISNHLYDHEEGSNPLFLKPQYPGSNPLNFLSWAPFLIGKGHPYEAYPDENIPAYHTRKGPQVCGPR

SEQ ID NO: 996235 - protein, 248 aa, Homo sapiens
ERLCLSLLRRPEDAGARVALTVAGSSHRTSRTRMWAWVEVRCYLDDKLSPGGSLSHLTIPGWLQLAGCSGVEEDVAPWEKWLQNPNRNRPISLHAYHVCSVYPCWDDTGVLITPCFWRYKLYHWSRVDGGSYMLLESVCQMTECLEHGPCLRCTTHAAVTPCVHAIPSGGCRVSGSPFVDYACVFSTTLGSGREVVHVPRRMRLYLRACRTCLYSSLLVLNVTTRAKEDPSCIASSGASIGVSVSQWM

SEQ ID NO: 996236 - protein, 80 aa, Homo sapiens
GEEVVVRQTNSRFSGFRGFRVVWSEGGGSNKKPAGSGPQSSSSDLRATYPPPRWLEHLTLCSNRNGYGEATVRCVVGREL

SEQ ID NO: 996237 - protein, 209 aa, Homo sapiens
  misc_feature (107)..(107): Xaa can be any naturally occurring amino acid
  misc_feature (113)..(113): Xaa can be any naturally occurring amino acid
MPWRREGHGTEGELPARSLFVEEGPEARRMSGESPMMETKDMALLDGSVWCDLVYYAHKSKDTPYQADTSIRTVVIMDSCIYQELRTRREPTVYTSRTETVARTWQXLKTKYXHTYESLLRSTGPYNDAFSVQRLDVYISLETLKQYAEQRPQGGTIRRQQRTYMQEAMYGRSVRAPREPCTEGTRSASSQHGGTSAPIRKQTYAWYPC

SEQ ID NO: 996238 - protein, 80 aa, Homo sapiens
MDRERFQNLDKEGELRGWDRMRARAKTRCTRTGLGRSRCSVAEGRVSRVLQADGMDGGVSIWDVKSLEYAVNGLKMNDCE

SEQ ID NO: 996239 - protein, 265 aa, Homo sapiens
MSSCAGVGGGCEGRLMLVQMVRRPVACVCFTTPSFFLLPARRVKVVQTRIGVCPAALGPRIMQCMLVTIIGTDLVKDMKIKSPGVEIYLFFPARLRNQQIIDFFLGGLFKDEGVKIMPVHKADPCRQLHQVQRRYCMHIEDYNGQRSGQGVNVAPMEGGPTASVGAIYPGPSLSIVPVRRGYLGGTKIGKPPHWSPCKVTGLAALCLVRLIPAPRALASSPHLLPKKLLMMAWNDDLYTSARGCTATLGNFAKPPLMPFLEPTGT

SEQ ID NO: 996240 - protein, 564 aa, Homo sapiens
  misc_feature (106)..(106): Xaa can be any naturally occurring amino acid
MPSRRSVGAYPCADTAHSCIILNSRELCIHEQRMRNVALIILSNDTEEDRRDGIVPLERWHVRRRIGRRERTKKRVNNSHRTSRFTSRVATDCTYSAFARAPRRGXHQGSLLHNKLAEAHIASLVRGSRMHCESDWNTQIQNRGKGEKSKRLWDQNKRDYVTLTKQKKDSPVPNNSNSSPELEEISHNFRTEGEETSVVGKKEEAEGMVKPPKEDDGTVSEHNPPTLLKSETPQRGGGHFGTTRHSRIKGFPQGTNANVTPIGPPITNISWSQQQVKNPLKLTKERISIILNLIGDMEKHATPNLRQPFSPKRKSWGPTFRGFMQSISIITILEALSNNLLYPSASLGPRGERNTYGHASRVLGNTPPPPKALYNLLTFCGHHSIIPCTLYYIKQAGGELYTAEDSIRHTADTNTFGREPPPQNAWASYKTTTHNLRVRAAPQNNRSSAYLLDSATSEQYSPYKISTSPLTVSLSHTFPTIHTHPLCAGPSSPSGPFMCRTTLPPKTHTQKTPNPHRRQNPLFIKSATTQKRTSADSEKPSGNTSRFPKLSTSLDKRHPYPLPP

SEQ ID NO: 996241 - protein, 295 aa, Homo sapiens
TEDPGVAMGRRPDRCYRYSKNKPYPTVIAFCLRVSHDAKDSHYLDLGRKKAKVDELSAIAGPHGCQMNMSRLVLIEATERDYAQTLCSQVKYHAVTQVSSANDRLPIIQECRAPTPYTNAQYTHSKQSMIDPWSLAEPATATPKTTAIAKGCHNRNHTPQGAQLLSTRGYHTIGRPKVHIHLLPKSLTTQHAIGPQTTREAAYDDTDSDPNEPANDNPQGTPTDTTPTAPDTDNEYPQNLRTHENDMRGPIHPKRLQHALNLDNTGPTPLGSDPHTQPRPPHHPPNCPPPAAHQR

SEQ ID NO: 996242 - protein, 294 aa, Homo sapiens
MKDLPTSVPVGATPSLGGTKVGLQAYSQRPLNACSWAPGGNFHSLYWHEREQKGDAKTNAPRPNGVERNAGPCVAPGAHSPTVPPVTRGPNPGGGPPDEALVGQRRNTKVGCRRPARSHPKCTRVTPLSVAPVDEHPHNNPKGGTPPAKRHTRHARTPNNRAARRQQTRSLAHANTSPPPRAPQHNHGAHTTTPYPPTPPHSTRTETVPRDHHTTPKHRGPHDFNARNDQPLHPPTNPAVATPRTGTTLKSTPVRHWHAPPPAAQRPRNLHREKHLPLPTRAVTTHLNLTPRQP

SEQ ID NO: 996243 - protein, 152 aa, Homo sapiens
  misc_feature (18)..(18): Xaa can be any naturally occurring amino acid
MGGPWGKTPNQRRPMREXQHSGMDARELGQTLGDSRVATQSGDAEGNAKPRRENTRAPLRLAPRTDKLILKSRATFIPKGSEMCTQETIMRGAHIYRGPSRLADEETTTTIPPTIHTRGQHHSDHGRPLIVCDTSTSCEPQHATLKYVDHPW

SEQ ID NO: 996244 - protein, 225 aa, Homo sapiens
LERLWLLLLRAAEDAMGECPTLGEAMSHEHTVIACGSGRKFVYMDEKQYAWMSLTIEIKDRLQLQGALVVGKTSSWGRPMSPDPDRPMSRVCGIMWQALPLMGRYRSSDSSFWRLVLPASRSIDGGAQGLLRSRSLSAQMTDLSGLGEDGCSPFTPGPEAWGQPTHGDCCVSVLASSPSSSASVVAPTMLGSGQEWHRGDGMSSSQVLRGPACSASLVALVTTTS

SEQ ID NO: 996245 - protein, 244 aa, Homo sapiens
  misc_feature (94)..(94): Xaa can be any naturally occurring amino acid
  misc_feature (115)..(115): Xaa can be any naturally occurring amino acid
  misc_feature (146)..(146): Xaa can be any naturally occurring amino acid
  misc_feature (169)..(169): Xaa can be any naturally occurring amino acid
  misc_feature (236)..(236): Xaa can be any naturally occurring amino acid
GEGMTSHHLGLSWQDSSHCCLLQLLTYGYFHSSRFHCNELCGGIISGSSYLWPIMACLVLESWDLESLIRGVMINRGKRLAQTRESTMRAQIAXTPALKRTSHSHECTSKTRIRXRNESVSVNVDGPTEYAMLPVLPGHLLEEPRXFLLEARRSHSMVSPQRSARPSTXTHLAKLKIKNTKKTGVPFSKSYNGGLKDDYDDVEIPLQKYVKNRESVVEHSAFLSFLARTGRGFTQXYLKTIKNG

SEQ ID NO: 996246 - protein, 109 aa, Homo sapiens
KIKVPERRSSLFSLTIKESEIIDFFLGASLKDEVWKIIVRVDRSQSRVPARRTEVQGDLFAYRVTNKIGSTVLDLWLLNVASKMAGGLPGHPMVAINPWPKLITIDLPV

SEQ ID NO: 996247 - protein, 106 aa, Homo sapiens
  misc_feature (84)..(84): Xaa can be any naturally occurring amino acid
  misc_feature (106)..(106): Xaa can be any naturally occurring amino acid
MYRALRILARYASPRAGSSRQAEFRFPACGGAGVPSVNVLSETAVRHGKPIDSYRDRNFNDEPSLGGDSDSDGAPSCDESMYEXSQHPWTTPHGCKLCEELAVMCX

SEQ ID NO: 996248 - protein, 130 aa, Homo sapiens
  misc_feature (74)..(74): Xaa can be any naturally occurring amino acid
MPGGYSRSSCCHTILPLLVDNGTREKPVQGRIETLHDCSILLRRNCVTVERANSVVPEPRLTKVANANNNLSTXLVHTMRQNGGPTVDRHGGRVVVIHFMVAVIHAYSIASYDAWKEAPGMLLRREVMEL

SEQ ID NO: 996249 - protein, 110 aa, Homo sapiens
MLARQQGDGEEACGRSSLKNNLPKAKTRGSKYSYGDAWWWVVAHEKYYPRGGEDPLFEYNLTVGTTWVGAASVGSNKKKVAVVELIQGETYPALPVTPPRREEEPGQKKA

SEQ ID NO: 996250 - protein, 222 aa, Homo sapiens
MAGKLTEDDGYDTVVIRATLMTSKFERHDSKDSQDPGFCVHTIETGIVTHEMGEKSQLRVPNSKWLVGTEPESSVRVTRTRNVDMTDSAPVEGCRHLRVAPFGGPEGREPASRRTQRGSAWWAVPVGCWSGGNVNQGLVRTLLVVNLEEIYSTTKNSLTGNYWTLGGQYSGGGLGTPALGNLGIRRRCGIGRNPLVAGICWGLWTRGPDAGDDKENEGGTGV

SEQ ID NO: 996251 - protein, 115 aa, Homo sapiens
AAFQQPSLPPPAPVPDPPAPTHPRGHGHLARRTVLGAPEQLSSVSGIHLGPLSLIRLCSTKAQIRIARIPRYTRRSSKPDRSGWPDGWTDERLRQTRRRRKDDEATLKTEDDTDR

SEQ ID NO: 996252 - protein, 214 aa, Homo sapiens
GVLKIQDVGVETITTIAAQFVIVGARGPPLSPCNVQYAPPQHVSGPDKSMPPFPRGFNLRNLGHALQCDFYKASHPHRVRSILSTGRDTNVRRASEVCIIRDTRERREFSRTPILSPDTHDLVKVYRLTGVNHTLNSDMTGGAKGPGITMKCCSCTHVKCVGVLVRCTPTGAGSIGRIGGERAVQKPLNPVEEADRRQSTFLGCFLATSRVVLT

SEQ ID NO: 996253 - protein, 244 aa, Homo sapiens
  misc_feature (90)..(90): Xaa can be any naturally occurring amino acid
  misc_feature (104)..(104): Xaa can be any naturally occurring amino acid
  misc_feature (107)..(107): Xaa can be any naturally occurring amino acid
HLFDTLCLPAGIRRLDLSCQAQPMRIDTTHLRPVAQMSPMRLPDYARRCGCVIYGWAIGPDFPLRMTSSIIHIHECCCRVTVPLQENNQXGSDTICARGRIVGXYDXVNLPLDDRASSLIGPRETDQLAVSACPLRHRETGEHHRFESRLSSTVHASLVERALGEIPNPGASTNEPFRTTSEGLPPVGLLGESVEQAPKLLRMNAEGRSPDDNRPNVSQNRGKTTEELNLPCNLSALCRMDTFC

SEQ ID NO: 996254 - protein, 148 aa, Homo sapiens
DHSCCILPARIEYLRQDKLLDESKIGVCLLVRTQPEWHKVMEKSKYETAWIQLTEEECDRTRRSDLALESIITSAEVGDRLCNVCRSHDMLTSIRAEYGWPPQFGDGAEQGTFSGSRAGPNESGPKPQELLMTVGVLPKTHQCVDASI

SEQ ID NO: 996255 - protein, 112 aa, Homo sapiens
  misc_feature (29)..(29): Xaa can be any naturally occurring amino acid
SPLLFSPHPAGTPGSRQALLPCRTQTSPXARMSPHVAPCSTGMPEPLQGAPSQAPSCGPGLSPRDHERGQEEEECSPKIPTKAVSRTELLRALGAQGLRIPGAHRQNADENP

SEQ ID NO: 996256 - protein, 258 aa, Homo sapiens
  misc_feature (141)..(141): Xaa can be any naturally occurring amino acid
DPKQWKTMTTAFASAQDAAVKPKAELVFVSNSHQCHLSEIELHKSTQRGALHSWAHVGPRHRFPDVVPEYSQGPAGIRLPANSAERRQQGFISDAAARASYLTPRWRCSGPRRDPAESVSRLGLPYSEDYSSCLHLIYRKXNDSERNAEGSEMGNSQQCPRSLRVAACWVPGPVRSSVVHCPWRHETRHLDSFTLRWHEVRFPVLGVDWKFVGSLFQRQAAREPSWAGCGGYACNPSTLWGLSRGSLEPKEFETSLGT

SEQ ID NO: 996257 - protein, 109 aa, Homo sapiens
MRAKPIWCGALGAPTDHKGVWHLMASGVCPHVNWPLGVKVAKVLWATPRNGRWAIRAFPPLRFGPRRTPPKRRNLTVGRFPWPGMVLPGKGNKETHFHTFLIVLPMGGY

SEQ ID NO: 996258 - protein, 149 aa, Homo sapiens
MLHELRTTGVARDVEKQEFLYQILAETGVDCPSTKQTVSGSDFLESSDDKELNDGCTVPLERYTGAVIIPLALCFGYADMQGGSLKTLEVLMYPNGVHESDFQYVTRNWSTWTLGLHDIVLVVVSSSIPRSDLKSTRIACTTIPPVMFP

SEQ ID NO: 996259 - protein, 83 aa, Homo sapiens
AAAPPSWTPAVCSLSSWPGVTKVLGRTGFSGHECSAGGAWNSWTTASRSIISQCKNGSRCARADQMHSPILEIRAKNARTVCA

SEQ ID NO: 996260 - protein, 179 aa, Homo sapiens
MRIGQPAGDVQALPMGALSQEPMENAKLSMVDMTRGPCDRTSFQNAGIALKVVPDTEWGCFPEEPREDLKNTHGMTDRLYRSLRSWMQPLGPVWNSEHGNSFVEQKAAEAPAERVRWNWRTRLLGWVLTKSGSGAQSPCETQQRAVFSILQTQHEYSFVVPLGPKPSPFANCTLRETWC

SEQ ID NO: 996261 - protein, 356 aa, Homo sapiens
SNWSVNSHKVPRGVGAPSQGPDRPCGTFPLRGGVHAWIFRVLCPTSRFGRQAVSECAGVERLSEGALGEGASAAGPTTMCVWSLETIGGREAPFLLLTQGGLLSQGGFQKAGFTPRDRPVSYGQIEEELGEKCPPLVSGANFSPEGYCPCAPFVGSAKSFKSQVFPHRAEVRATGQDPPRIPNAEEILRAVKTQYYVGHNVCGSVLLYTTPRRGGEKTILVWELSSNVRGYNTSPLWGAIPPWRLFPARTQLVGSTNPRGETKRGAPRRWKIPPGKKKTPKGHHSKKGGYKLAEEETVMCHKMVSPRHATSRLRAVVVYRSIKTIGRGGITFRCSLLTTTVGADQRGPPRRVLVVM

SEQ ID NO: 996262 - protein, 180 aa, Homo sapiens
GLSRPFSLVRSVAGVGEADPESPDAAPLVAAGLVTITPRGGSRSCRMAAPVTITATHELARPDTHAVACVFSDHAGVWDANETEERMYSYTGACKELPVSHLMFALTATGPDQRKRFASESESVLSIVMRCICLVPSDGLSHGVIGLQRILHVPSDPFTALVISLLARSHFQSREETWCH

SEQ ID NO: 996263 - protein, 254 aa, Homo sapiens
MNTGWWQPECRPEPTESWNEGKVQDEATREQRRKRTKGHHRGSNLNAAALSARGNTSETDVVEQRSYQKRGWCLGHAGAPCKYKYFFDFPVDDQAKECATSRDEDTHSQFWEERHRGYRDRVRGGNIPKENPSYTMYRCIPPGGDSPGQEMRERKGAYKRQSKTAADPNKRVRRKPPTNEVNNKEPPTEEQQHNSTTRSKVAGHKTKKSRSNISRVDSARSVGDCLRVERIHSTNENKHRATNKTTHSNTEATT

SEQ ID NO: 996264 - protein, 261 aa, Homo sapiens
MESYLPLTPGLPRGAYIDSIYSAELEVMRRSTHDLLGMLVVVAQLDCSFWERLSGRQCRIYELRNQERVSVAGASKLLANVVYQYKGMGLSMGTMICGWDKRGPGSTTWTVKGTGFQGATFSVVLSSVYAYGVMDRGYSYDLEVEQGYDLAVEPFYKPLQRCLLGRGAATSNTWGDGLDPSLSDMCVIYLRSIVALPLEEGGCVWVLGEAWQTDRASPPFREAHGRILSWADLVPLRGEGCLGDPLKKQTKKPLGKDPRLN

SEQ ID NO: 996265 - protein, 224 aa, Homo sapiens
LVLWRAAELISERGCLLSPAMDVCSPIDIGVLLEKGESSGKNVTLPACVQGCLIRPDVVTLCSLANLHHKLHSTALYLSSGMSRSIRLVLSLWGSLARCCVLEYPEYEVVGLDALAMSCLWKSMCPWRAAMLCTNQKPGAVWRSLSERLTHSNEYASLCLPWRAHAPTQPTGQCLEGHRSEEVPETSFGSRRYVEGYRKSQEADLLLKITSGCHDITRSMPLSG

SEQ ID NO: 996266 - protein, 313 aa, Homo sapiens
RERHGGSLEAECRLRCPKTPSSVASKLQWSAPASYLNSVLSQWTDRNPQQTACVMCTQHTRCLQIPPSLAPKAVSSLSWTKPRGVSLGVLASLGGLALRVPYLILSVLLPDGTILPLCLVPLYSFHGHLAPLDKSARLTTRSWVMPCRESCHGEGFGALSALSFAVLCYGYYHDVRICKAVGHAVGALTLLTSYFEELMLASVPLLCHAVTLPLGRDFLLGPFGGAVLASLSSPDYPPEFISGAHRCAAFSPPCGDLSHITGTLRGCPRVCSGPASTGSSVGPIAPLETLARLSTLSVNGGPSRERRRFPPSP

SEQ ID NO: 996267 - protein, 302 aa, Homo sapiens
FAKARPEDTQAVDFVWLRTTVTEVCKSALVSPVHRYGDTCLEWTERMCVSLRTRRGDRSRKRRKIYSELGCWNHVGYGRVLSTFWGIVSGVYEILASLWMFGDRYSLKMGEMTGSADYGSLWLSDGLISCWARETIILQTTPMTKIVLVTAGVRQCERWTQSVVISVHRIVDCLLLHDSSDRALYRLLIAIIIVVVQATWDDSDVCYWRLSGITQKRVKGSGGNRMLVEFDSSWAERGFQPAGRTCGGKGDQWAVARVDGPGARVDRRRRLAEEDAKGEGNQKERPEGTSHQQRRGRNAKPK

SEQ ID NO: 996268 - protein, 293 aa, Homo sapiens
RRYLLDASERLRAEAPWTLKALVVTVCRKGVQGGLALSPGLRDFRSQKSVHGSLSRPLVYQVVVDRQWVVGLLSRGMAEHAPGQPSGNCRLKLARNPLIAPYLGGPSPYSWSLDPGFYPSVYSIQPRSLSLVGSYVQKILDGVCGHDMCTDMSDITKILPEVSVAPASGWLESEEKVVGMVGALPVDDPTAVRERRLRAVLMLVVDREHPSVRGDSKSLGRELISQFRPGTWYREVILGERTTNFPGYGPLPELGSANGPVLFLCGPAGLRQAGFRSLLGGGGPSGVAKHSRG

SEQ ID NO: 996269 - protein, 161 aa, Homo sapiens
MVKHGRIKPDEDEVDGLEKKMFAYCDPKKLPGGPYFMVLHASGCYIKLSQCVTSWREDGICGGISTPKYQYAIDEYYRMKKEEEEEEEENRMSEEAEKQYSTRIMLPDLIPFVSDRIPPRDKGISRLHSVNCQLFGHGRRTVAVFLDTHANSRTRSHHKMK

SEQ ID NO: 996270 - protein, 105 aa, Homo sapiens
MPYDMKRMRDASSTKHLEAALEQWNQGQKDTQKGKSHRSRSLMSREHDALTTQEGRPERSIDLGHAKKAGAHGDNRPPHTWLESGRRGSERQSMQRGGCGASAPT

SEQ ID NO: 996271 - protein, 125 aa, Homo sapiens
GKKRTPLPPPLFFNPFLKRGENTRGLRIGGVQPWCFLWPPLNSVIYWGFLLSPTKAFIIVGRLHQLVLFYPKVVVYFVPFFSYFIAFLPSFPARWPHNVFLSPTLFAPPPFLGFRSPRYFVTGLC

SEQ ID NO: 996272 - protein, 77 aa, Homo sapiens
EEAAVVLEYYKQKGYAEASTPRSEMRSMPRVTPEGHHSICLLSLGPGLGSKRRPESVLYNTHITHIQITPTTRRQYL

SEQ ID NO: 996273 - protein, 131 aa, Homo sapiens
KTQGCPLTPLLFNIVLEVLARAIRQEKEIKGIQISKEEVKLSLFSDNMVVYLENPKDSSRKFLELIREFSKVSGYKINVHKSVALLYTNNNQAENQINKSTLFTIAAKIKILRNIHKQKVKRPVQGKLKHC

SEQ ID NO: 996274 - protein, 403 aa, Homo sapiens
MRRVQTGCCCQCCCSQGLLVQWHCKQAVLQPELMLRMLEPLSESQQLLAVQTLLLALMPYPARLRQPAAEMAGAGWSASRLACLIASLGSLAYHSPACGTALLPLCRQHHTHACQAATLLRPLVTHHGRPFTAPFTARFATVGKTTCEHTGHGADSHHQHDPGQGTNRPRGAMRTTRNHTPEHMAQNSDHTRHTPVRPKTNDRARTTHPSDKTHTRAAAGRPRPSDDHARAHPQKTTASAGRGPRGRARRTLASSRQHDRPAGGPHAQRERPQGAAGRSDNPEQPPSSTHPTLERRSHTQPPCPQIYRTRTDHSPTHRYSRADRPTVSSLQPPCGGNRAAVLTARRSTTSERRAHAHEQTSGRGALTARTQASTKGMRRETTVTSAGEWAGRRGAMEGGDEEQ

SEQ ID NO: 996275 - protein, 160 aa, Homo sapiens
MPRVALTACCDVGMNRFLTNLLVYWFQSHQNYSRLRSSLMPCYLIVKPMHAPYFKAYSRRQWQRSPIDLRPSMTPEGKLFLGRSLFYPLVHFTSCVVLQTHLLLSSDKCYTNFTNVNRERCRSLSGLATLGQSCLGGDIAKKRIGGLGHMNISALVMTVN

SEQ ID NO: 996276 - protein, 285 aa, Homo sapiens
MSICGSCEIHGALDIATNGVDVRHDHVNCILTALSYRTHCNLRSLYLRNVRVTFYSDNLHGILRDSWDKLSICSCVWVPFLCLKLKQLHVFTPRSNSSRESIYTTRMSESQHVTYYVSCVHILLSTVEGLSIISRYPYMRPGWLVLSVSEHAVNALFVPPRVNGRLYAPGFLIPAVTLAQREHTPVRREPDRRLVPPLVNDLQKSLGLVSGTQLIVSMAPSQLEAKLETIEVGCKNSPRTRMENAGLSDPVRRKKRLTPKATFVDLSMPMCVLHRNGAPQSSVDF

SEQ ID NO: 996277 - protein, 109 aa, Homo sapiens
MMSKGRIGCPWLKIEELSRDTYRVNPEGDHDAALLVCSNGYVRNRRPATLSEVYDRTRVRRTAGRRFSIGNERSQVEEEIWWKNCKMWAIGITVLVIFIIIIIVWVVSS

SEQ ID NO: 996278 - protein, 120 aa, Homo sapiens
MPRGQDYTPYRIPLRSLPGDTPKHGLVHGQRLAGTRTLPCQSIPWHQSLPARGTLDTHATSTRCHKTRRRAHAPSEHAAPPLGTSLHHMPPTRPRAATTDTAPHGPQPQRHNIGATATGH

SEQ ID NO: 996279 - protein, 243 aa, Homo sapiens
GGWATKGRVFSALRTGAEEAAVAPGAFERAHPSPRAIADPGPTGGTPRDSPRAFLAAHGGRSSMNPPRRVISGGAVWRLGVTIRAAERPWELCWVEIQRLRGGAQVEAIDARCEGLEANEGTEGPLTTGYRKMAYGLGKKFNSGPQGRGIQFLVENELLLVINPEEIARFLYKGEGLNRTAIRGIPGGRGKNEPGSCPCVCGSGMSFTPTQSGCRASGSFYGSFRYRRGPENDRMMEGLRPGY

SEQ ID NO: 996280 - protein, 181 aa, Homo sapiens
KCRVCFKNFGGPSPVKKIRESQFENAVLIKSSMMACYMGRDRVLLVEIPSQRCLVSLTPRRYQSPWRTYASTSSSNRHGGQQISIRVLYEREHGTCMDHDKRGSVERSAIQRLHSRLTSSGITSSTRSSHTHLCFLVFNNEIHVNSHPLHVSWQCERATKVGYMHVERVLVRLRLHGSSIV

SEQ ID NO: 996281 - protein, 360 aa, Homo sapiens
GLLRVCCRRLRAAAEPPMEAEAADAPPVRGLSRLLSCFSFTQDCHIPSNSELNAGYNAVISEFCGAAGSKSTATQMHIPETSYNLCAPASFSSRPGWLGRSQLHHTQPTGHTCTPLLLTTPTGTQATSRHSAQHTQPSPPSQHPLHAPITRPEHHRNPAPARATPIRKRKSQRTYYRPTPPQQQDHVPHALVPPTATTLPWRTQYPRADNAHNHRALNAGTRASRITHANYDHSTSIQPPGAPKRHQVTKHPGNISRRRKGVLVTYNWTRRQQHCTMKTTRRHSHPHNGRGPPNRPGKPAPTPAPNDTPITVAPTAATQTPTPSRHASVNTQGHTAQTRPEPSSTPRHGANTTTHGSPPK

SEQ ID NO: 996282 - protein, 88 aa, Homo sapiens
  misc_feature (63)..(63): Xaa can be any naturally occurring amino acid
DRSVRHIAAPGVLRCVVSSSTLLFTLLGILARMTREVPCLLMYQAYDKYTTSRRYAYPRDVWXPPHDEPMWPLRVRLLLTTRCMFNTV

SEQ ID NO: 996283 - protein, 145 aa, Homo sapiens
KHEFIIENKNDPEENLGNTIEDIGMGKDFMTKTPKAMPTKAKIDKWDLIKLKSFYTAKETIIRVNRQPTEWEKIFAICPSEKGLISRIYKELKQMYKKKTNNSIKKWAKDMNRHFSEEDIYVANQHMEKKPHYHWSLEQCKSKPQ

SEQ ID NO: 996284 - protein, 289 aa, Homo sapiens
  misc_feature (208)..(208): Xaa can be any naturally occurring amino acid
KKNKARGIMLPDFKLEYKTTVTKTAWYWYQNRYIDQWNRTEASEITSHIYNHLIFDKPDKNKKWGKDFLFNKSCWENWLAICRKLKLDTFLTPYAKINSTQIKDLNVRPKTIKTLEENLGNTIQDIGMGKDFMTKTPKAIATKAKIDKWVLIKIKSFCTAKEPIIRVNRQPTEWENIFASTHLRKGYIKNLLKNLTLQGKKQPIKTVXQDIEQDPPEEDIYAGNKWKNVHNPATNNAMKPGKPSARMEHTGATRARWNDLTGKSNTGKGQNEKNQVTRHKTIRTKNGKT

SEQ ID NO: 996285 - protein, 69 aa, Homo sapiens
ARDSDFKNGGNDAPVSLIFSASSSSSACHRQASATLMSERESSPPEKEEAQEKTGKTEPSFTKRKQPVL

SEQ ID NO: 996286 - protein, 93 aa, Homo sapiens
RVELANQEVNESSSSVLVIVAINTWPLSRQVDGERRIPQPGGICMVGLHDQRYCEDETFKECARYEEPFVKIARCTIVKLFRSERVGTASWVH

SEQ ID NO: 996287 - protein, 282 aa, Homo sapiens
SSGLRSGKARHSRIRHPCRPHCHGHHEDATTYGGKKAKKGILDIFKCWRDCDMEMEGIVLAHGEERATIKSTDLELTESMTDESTQKTRKRPALQSKKFLRRLAQKVMQTFTYYASEDKLDEQGQTMSETKISGTGKSTEDCLARNRPDKAADTREMHRQDRAGEQSDNPTYHIDSHELNTGKIKQNVLTMQTRNEGSQLTRNDTVDEHRNRQQKYKNHRWHDRQRGTSSKPRHKQCGYNTEKKKNSGYGPHIGIICNSGDNPAEMVEMNLDEDTGDKTEHR

SEQ ID NO: 996288 - protein, 378 aa, Homo sapiens
ATRGFPERKAWLPPWASEPWLPPRPRSQQLEEGWRLQPRHHGGQTQPQTAVNCRHSDRPHRRRDHAPHPDVRTHHETANPHHSPRRPTMKETRGLRRGCPPSAPRPPTTPTQACGAAPRRYRPEDDERQPHGAPPGIWRGLPESSDPWTFPITMLAHWVNDGQTHLAHACIGDRRMLPAPGEASASKSFLTVHPAWLALTDLVRGSFLTNPVDNRREPVQADVREHNRPRQGRLQEPYNRELTKDSDTGVHHGEQSRARMARRAGTGHTGAEKGTEPNENTGDTQKGRHGMRKTETHIHHERQGKGSARHPSRPRERSDSTHTTKEDGDCSGHGNKVNGCSPRGDSSNTMSPKELARRDKDAATNKKGGTPATNSHER

SEQ ID NO: 996289 - protein, 134 aa, Homo sapiens
MYTALSQWYVALGVYTSANENETTMYSMFLSNVAFTNKFHCTYYSLIRIFVDDIRSEIDPLVMGILMARFYYFKLVRKNEKEVGLSVGITPVCRMCGPGGKHLTHLTTGSCSTYPSKLLTAATALRTGLNLEQT

SEQ ID NO: 996290 - protein, 105 aa, Homo sapiens
MDEQMSDGKGYRGHDGAGTGMAQQAPPFCPRTSDSDVQGSTGGDRPDRKNHQHRETRIEPGQPTQTNSHRRYEPAQDTRQRRGQDQQTQTRRTSKGETATRHTSV

SEQ ID NO: 996291 - protein, 105 aa, Homo sapiens
MNHRLSWLLVSVPLTALNRCPVRLVVETLRIMTLARLTHGLVGAVSISISDPSDTKGHVKHNAEKAQIAHLIVRVCQHLQAPGTITLRTPQRILHAWFAAKSLVY

SEQ ID NO: 996292 - protein, 153 aa, Homo sapiens
MTVDVVGDVESWQRNSYDYGSSQYLNTLCVDISIVTHLLKSDVDIVFIVPRCDWTSIVFIVVANVAILELSFMMSLLLSKCCFLDTSPGFLPYITRVGSEYLRRFRLFIAQFIFRTSGTWLEAVASVWFASRKKKSSDVVREKYNNLRIRQRR

SEQ ID NO: 996293 - protein, 75 aa, Homo sapiens
EFLSERTEQFLFHLQQMISNFNPRECKLVQKSSKVQELVSLLPVEIETDTVGATWSVLWLRICRPAVEGWTLHRM

SEQ ID NO: 996294 - protein, 94 aa, Homo sapiens
EMESRLCCPGLKCRGQSRFTATSASVGFGRFSVPQPPEFAGIAGTCPPHPVNFVGGFTIVGSGVALELLTLVVCPPWPPKVRGDYRLEPLRLGR

SEQ ID NO: 996295 - protein, 119 aa, Homo sapiens
MIILRVSGTRYLNHPKAKPYGRLEYTYGEKSKRGISHQPNRISLHFRGHSVEEPSLLGLSSDITHHQVIALWMSTLDLVLATLSESVVISWPTMENLCAGHKKPCRTNVMSETGERGIA

SEQ ID NO: 996296 - protein, 186 aa, Homo sapiens
MGNPMAHNIIMHKLWLIHLVIYDVSLMPAKSCKMQVIMVVLFPQQMLLKKLTTNDYNAAQPGINAIEAYSGANGILNNSDEGLNYGVDSEASIVSCSSQKNWAKKLRKCEQFSWDAPVVWWCEELRRSENLTFTGGRSWHYEYAVAQELLRCMGSTVVSVEAVDELGSAGNICDNMLFSYEYEVEC

SEQ ID NO: 996297 - protein, 171 aa, Homo sapiens
DLRVAEALHKLKSRSGGGRQKEERQNASVQSTPQAPLRISLHLSRGPGAGSVLVLPKPYLVQILSSSGLWKVGIGTETCSDEVEPLWTEIPSEVRFWKFVHPGRYRGAQKPVSIGTGYVPKANQKAEDRSRLEALPRDGHPSDGRNTNEATMGPISVKSRELNVLTAHVAV

SEQ ID NO: 996298 - protein, 177 aa, Homo sapiens
SQIVTQMYDLIRAFLAKLCLWETHLTRNNLAHFPTLKLASRNESDGLNYIPKIAELKDRIPEKAVLIFKLYESELTLFSSPFSTKIDSVHEELQMEVIDLQCNTVLKTKYDKVGIPEFYKYLWGSYPKYKHHCAKILSMFGSTYICEQLFSIMKLSKTKYCSQLKDSQWDSVLHIAT

SEQ ID NO: 996299 - protein, 68 aa, Homo sapiens
ASRIKILTDKEEAERKYNASMRRHIEVLSDAKKTGTSDVHIVLSETKGFKSVCKDGMLEVHLDKSILI

SEQ ID NO: 996300 - protein, 38 aa, Homo sapiens
MNLLHRSGGTTHGEETNTGMKTTNQRGGKKGGKDRSRR

SEQ ID NO: 996301 - protein, 69 aa, Homo sapiens
CGCPAVVPATVTTCSKGFILKEVEVFVVNRLKKCYDAAYRAQEYDRVRGPRFPNLWRIWGLFIARSGSA

SEQ ID NO: 996302 - protein, 151 aa, Homo sapiens
DQHREEAEHMIVRYPTRSQATCCPSRPNAGPMAKTHYHEGHLQMICFGLLGFTCAITSEDRLILGMFVEENASFDYYYSTQMLCASLWLILADPYLRISKEISYGPNMNACVLCENTNDRLVQRRALPWCVQVNGHDHNGMTIGLRKRLIT

SEQ ID NO: 996303 - protein, 113 aa, Homo sapiens
MRFLYGLCENGETISVDEGVPLCLTDDQCRPGSNTEEPLLLPNDSRLAWITVLCAPCQYSLATSRHVRNKGAIVAWACRAISDESIRWSPDGRTIPWNEKMHFLVRPLTKRRA

SEQ ID NO: 996304 - protein, 229 aa, Homo sapiens
MLPTTPFARSLSVNVSVGLPSILHKAQADQRHFSQQQPSKVTTLSHLLFLSIYTPLYILNFYHLTIHFSTHILEDNQIMSSAYSKCNTNSSLQRTTIQETTPLLNNTTCSNPQTPKPLSADTHRPNPMNTAETREGREYTPHQLGTHETQGHNMHNHLTHNDANVPPKPKSTTTGLPEQRTTHREHHTPTTPNPANHSLLSTQLLLQQHVATTLPILNNTTPLNLILNH

SEQ ID NO: 996305 - protein, 84 aa, Homo sapiens
DSFDLCCMPCVRRLPPGKRVKLVRCEPTVRLYTQYLQPAQSLKSVTMFCLAKLCLHPLSDPELGSMMLHTDQVSSISVHLDQEC

SEQ ID NO: 996306 - protein, 325 aa, Homo sapiens
MLELSCPTTAAAGPQDIAGTSSTLITSAHRDPDPAPACPMTPQMSHGRPCLDGVRSNDTHQGAPLVTDVGLVCATPCKLNGDGPVYLHGRYTDVEGSCLGDLSDRLAEAHPDLHLSAAVSQRDPVQHIAVPTRSAIYMVLRFLLLDFASQSITLSTVIFDVSVMGATRMRAIMSTGTRVLLHLGPVHSAGWLAIPQWRWLQLTVVHSLSSSSSYILVGPPGCIPRGWPVAWEGPQKALKISAGWLLTGNRGEGKAYLRTPLYPHGIPLRPVPRGRSYLSVESISSTLASSQTACGNSHLTTLWFGTSSSHTRIESHNSRICPLHS

SEQ ID NO: 996307 - protein, 190 aa, Homo sapiens
MQHKNRRNKREQTTKDTENKEQNGRAAKSSTQEARTDTNSHGTGTHRRKETAQNRTTNRRRRTKKKNNTRAETRRKHNHNKDVNPEPNRDKENTKRNRMRYRGSQTRPEHWIQTNTPDNTKKQTRATTDHNEDEQRPEEQPMQGERQAQKQHKTARNAKQTRRQAHEKQYKLRDRSKHTPTTDRSKKLKK

SEQ ID NO: 996308 - protein, 151 aa, Homo sapiens
SRSFWCSLHCSVSSAPRGPASVASLPAGIGRSTAKTPGPTGSLEMVRVPGPTSRERGRGWLELVGSGCGGTLASPQLAPKIRGPEFSLAQLGLSAPSAIGWRRADSSDPGHPVSSLRSDCALVWSPLWAALPPLPELSPIVQDHWTVVRGE

SEQ ID NO: 996309 - protein, 347 aa, Homo sapiens
VDDKYPEGTVSKKEQDRNGLAYTDGLTDGSPNEALALRTLFGLRVSSIVVSNTPVIPAMVKGCGPGDPSRTRGCYRLAVKHERYPDICCMKGTIIQVPMNAQTHHARNLLSSSAWDPLKSLMSRQNQWRESSWARPWPLQQKSRGNKHYNRPLCIQHTCATVVMKTQKWAVNEPGNKPHRQRMTGDASTEPAEEPLMNRDTHEIQPQNNLHSVHTDQTPQNIIDSTTHQAQGKLNTEPAEARNEKTRPERLCERGIRAAQNTTIRRRNDERGRARPKGRRKKEEGKETCTTKGTENDRERHQKYSDRARGRKQQHSEDRTKKLNVSMMDKHAQKEDRADKHRMTWRR

SEQ ID NO: 996310 - protein, 140 aa, Homo sapiens
MPPEQQQPGNRKNRKAAGNVSASIQRNGHIAPTPHLQHQSADARSASRELQLGSPPQMMTVAHRRSPAGKPQEASPSRMSRVTEPRRRHSMQSAEEHGAIGRQRGTMRDEGSTSPKPESTQAPTARQSAERPAAHDVSVK

SEQ ID NO: 996311 - protein, 51 aa, Homo sapiens
MDCGGLRGLNSVEVVAKWAPRALGWGPAPPGGVGLAFPALALGPPSWRPGD

SEQ ID NO: 996312 - protein, 67 aa, Homo sapiens
KSAKYASGGPTIYHLYHTYIHFIRNYTPGTLCQIVHALSLNRKVMYLASTPLEKSLATEDHREDSSS

SEQ ID NO: 996313 - protein, 309 aa, Homo sapiens
ELWERSPDTGIPRCLSISLICTETSDGLAMEFWAEDWSCCLVCIFSKQCVQCCKCNYVHVWEEAWSMPWWWSPDDFIHDASPLNSPREVTDVILMTGVRLRHQGKGAASEIATFVENGGRISVAYHDSVKGPGLSISTDISKNTVYVVQMRQDLRPDDTAVDVLCERLQKPMASDYYGLDALGARGPRSSSPQHPRPCPKVCPAEPRGLLLGQKRAHVPLDGLGDASGANFTWTPSVGKTAVHARLKRDLWWCTAWSLSCLVCRLSLWGLSCLCPRLETPSPSNRVGGALAGGGYTGSAFPLSWAQFPR

SEQ ID NO: 996314 - protein, 72 aa, Homo sapiens
HCHLSSESLSRTKSLPSHILIFPYKSPLILYIILGVHRTNHICYIFFETNTYPHLADLSIYPHRSATMTDTA

SEQ ID NO: 996315 - protein, 274 aa, Homo sapiens
  misc_feature (166)..(166): Xaa can be any naturally occurring amino acid
  misc_feature (169)..(169): Xaa can be any naturally occurring amino acid
GERRERKVASEPADHHQRSSPGAVSEIRDRTFLTYPCVPHIRPLLSIAYPTIHSTISLKISLGAEYTSIDTLRMGRCRKDIGPFTLVAIFYHREGHYISDKLGQLQMSVRSHDDKIPRRNNKKAETVRRERFNATVPQECKKSQMMTRSTDTEPEKKVSTRQRAMXTKXSGPLRATAGGHPPEERWVRIQRVVSCAIDESVVTTHGIRGRHAAQGPGSCLGWPIYLVSGMDLCRSRDSRSRAGGHGPTGALTCTGCAGRHDRFGDFVAGRLVVL

SEQ ID NO: 996316 - protein, 99 aa, Homo sapiens
ETPGAMRRQHEGIKSLTWRPKSVGRQWVCERPIRGACGVLRCAIAHMAYAWKNTEKLEQKYTRHRMTLILMPWSAENYKVGWVLAKDPELADKSKHGEY

SEQ ID NO: 996317 - protein, 290 aa, Homo sapiens
HRLLIMTLCDSICLLAWDFRTPANRGALTDVCYVVLWVLLGTPAGRMLAARFYKSFGGEKWKTNVVLTSFLGPGIVCVLDFRTIMNLILWWEKDLQSAIPFWDTWLPYWAFGSCISVPSEPWIGAYIVGCSEEVPLRAPSSTQSRFHVMIPEQSFYSDEAPCLVVIMGGILPLGCICDTTFLHSEYVFGHTRMYYNVGFLFLVFHHLGLLPVLEGKYTSLLIPPMCRGFHVAMVSILNEWLTGFIPLSMQYLVFQTGITVTEPNLCLSPRYGLGSFFTDRPRRSGAHILA

SEQ ID NO: 996318 - protein, 93 aa, Homo sapiens
TVSEPNLVHGRRRALLLVMGVSGSGKSTRGPPACHLIWDGNSMMLSDYYTGGTSKHDVNMAYRFSDQDLDSSGSVTCYDILLIRCSLGTAVWF

SEQ ID NO: 996319 - protein, 146 aa, Homo sapiens
GSDVPGKAGGPQCWGRGLRAVEGRPQAGSLADRLTLPSEPHPRPSQDPSDASGVSGARFFLESGAQCGLNLRPPTSSSPSQSPLGVGAEGARVGEEPSPSLLRDALLAPFLFGELGSGAFCLTRGEKWEPCIIDAGERALEPGSGL

SEQ ID NO: 996320 - protein, 161 aa, Homo sapiens
  misc_feature (150)..(150): Xaa can be any naturally occurring amino acid
MRSILERLSSTQQAEDCSYDVSLNTSVFTRARKGGSEPVRPHWEMSHRIALYSSGCSLFHFLHQRLQVRENSFELIQQVEILIFWSYKGMQRLYPGAPHQGDQKSTKLYSLCFSHNKYTNGTKCTKWANQYTRYIFFPQVLPQNQLQILXFLFILPEMFYT

SEQ ID NO: 996321 - protein, 82 aa, Homo sapiens
SPIKKRKVLVLPVLKDELRRKMCPDSLYTRSDKALIALFRIIKAWYLKLLCPLLVLRTQAIMLVNKTTVRKCAQLHLSRTMT

SEQ ID NO: 996322 - protein, 137 aa, Homo sapiens
MRVLHRMIRASSYIVACDSRANKKTPGGNSRGVLLEQYSQYENVCWRLNQVVLLIKRGCSNEKSVRNHPIFLRPARPVGGMCMTPPKRQHNTKRHNIPQADNIQQTTKRSSVQDTGRSNTTASPNNEGKGEKPHQNR

SEQ ID NO: 996323 - protein, 75 aa, Homo sapiens
VHMGYSANLPCNCDDCVSFTDVPLCGSCKAIKGFRILQWEYRPQSYEASLTTIENQSSNSYEVALQVWWKWPRFP

SEQ ID NO: 996324 - protein, 163 aa, Homo sapiens
  misc_feature (6)..(6): Xaa can be any naturally occurring amino acid
MTRCLXVRIYVKNAWRQAEFVLRTVSALDDPDGHNVKSINPESRRASDDSELATHGSCFAGKQLEDGRTLSDYNIQKESTLQTWSLRLRGGMQIFVKTLTGKTITLEKWKPSDTIETCEWPKIQRSTEGNPSRTKQEASSFAGQASWKDGRNSFLTTNIQKES

SEQ ID NO: 996325 - protein, 112 aa, Homo sapiens
SPDEATSQNRLNAGTYFLLLHPSRSPFPLTRSHLIYTSLRRLGSLIHSYYCTLHCPKELSKLAELNKLNMTSVTQLACCMKLKHEPAFTAAPTSWNSREELHVRKPPIVWRQ

SEQ ID NO: 996326 - protein, 119 aa, Homo sapiens
MRSGDRDQPGQHGETPSLLKIQEIGRVWWHVPVVPATSEAEATELLEPGRRRLQWAGIAPLHSSLSDRVRLHLQKKKKKKDLPDFRGKPFVSGEPFTYFFITTFGPFWKTLHGLTIPEE

SEQ ID NO: 996327 - protein, 321 aa, Homo sapiens
DIWAASCMKELPAVGLLFADSWTLDRMTCLNSGLQNDGTEEAVTQTGLKHALSSPCPQRPPNCHIGQVMRRREELWPFREHSPRGSLSQAVKPSIRALQYLGISKLSECQRIPRRPDAGSMHRKKISLHDLQYKGTDRRPQSKDGSMGHPRDTDKGHTRLRQSYGKHSASACRDLQFHVHNMSLVGTLKVEGKNSQRPFAKTWTIWAIPVSQIPMVGIETTSLLRSVTFPIRKVGPPKRRVFPRTSIWTVNKGRKQEVQHWQGVQYHKSPEMTATTNTPFHDNNASEGAIATLPPTHVDTARIAGKQHVVAARHRHCEQIP

SEQ ID NO: 996328 - protein, 274 aa, Homo sapiens
MDRSGSLESFVNAFNCLRGRTLRSPGEIVAGLQGAGAWELGKTGLAYDIWVKLTKAQAGGPTEENTNSNSQCAVRGEKQQGCHRHGQEDPGSWHKGIPITLMAGNNRRTHTGGQEIFIKRGLSWHKSKGGVMWSQDTIWGRAIVHRHQCLASIKNKRRTWVGRGTIKLTHAKEVQWIVGHERPKKEYSPLQRAIVEHNGERFCATRLKTVGYLMVGRDRICHRGEACRPRRRRHIIDSAPRLAKMLVTQNTRKIVTPAKCGATTLSFGGLKHFV

SEQ ID NO: 996329 - protein, 109 aa, Homo sapiens
MEGETKRHRKKEKGESTRIGARGAARRPQIRKKRRRHRATERIPRSKENYPGTNNTKGTGKMIAKHGEKKRTPGNTQGCTEATPTNRGETRDLKRGRQKKREVTHGART

SEQ ID NO: 996330 - protein, 111 aa, Homo sapiens
  misc_feature (62)..(62): Xaa can be any naturally occurring amino acid
MLVPAVSAEVGDRVHVWPECYRVMCVVCVDEEVRILTRGGTCPGNLVVPNCSNEPAYSCSEXRTHMSRLSCWRKNPQIHQILISRELVMKSGLGEEKLLSGTNNSMSSSKQ

SEQ ID NO: 996331 - protein, 168 aa, Homo sapiens
TLSVSEYRAWGGVGGARRCGIGDRNGSVIPGYRFILFRRQQKGSEMAAVVYRHDQVTGLPRQVMSQVVVTLLISEYWKILDVDGYKPVAYKADLPYLTNIPNIQYVCGALVRARASMVRFPTKVMCAVSPCREDLALSNVRNSYGEYKPTGVWEQLIDCARDMKALGL

SEQ ID NO: 996332 - protein, 95 aa, Homo sapiens
SFLPLCLVEPGDGLHAESGARFMNMLWQQWCLTVCWYAISGGKADYVTNIDDVQPHDRPLQPCSGWLGFDRVPPAKAAELAQWAKKQDRPSMITR

SEQ ID NO: 996333 - protein, 160 aa, Homo sapiens
MAQHEYNREFSVLMKHYGQENVRGRSAVVMTGKKGNQTYNAGTNRGDRGPLHQSTRITPDQQARPSNTGGDTAKRNCQNTSGQVRPQGEEQGGRKWEGGRQVQNRGGRARGQGDGPATREATVTPKGYVTRRGEGQTRGGRVQQSTSGQRGPTHDEARRK

SEQ ID NO: 996334 - protein, 210 aa, Homo sapiens
TLPGRRSPALALSAASAAAAVVPFGVPASGHGAAASRKAGLCVCAQRASRCAASDAQYLTPILCQLRAARPSLRRGVHAAAGHRPAAQEACRPRAGRSQQFGAINITFIADVVKKIAPAGGHIDMVSQGFQYSKPKRCRWLSGDESNIVVGKNGTEFVTTLPTLVDQTRHRGSKVDAERTVPTLPEGPKFNGMVDMTKQAEHRHSIQICT

SEQ ID NO: 996335 - protein, 205 aa, Homo sapiens
MNVEKKDKEQAREERRTKSKRRRPRHARGKKRTHRRRHHRDKENNKIAYDSNETEEKDEARGPTTKKREKEMKNGETDKRQRNATRQTDTGQQEDNIIEENNQKEENNRQKPSGKKENNDETTHEKKQAAKKTKRDDKEQTPHERPKPMDERHTKEEQEETTRRRKKTRGRHNTHDTNTKNRSRLSEKKDKTTSNKRNAHTTKHH

SEQ ID NO: 996336 - protein, 71 aa, Homo sapiens
NNEEIQNLNRPITSNKIKAVIKSLPAKESPGSSGLTAEFYEYQAFKEELMQFRLKLFQKIEEEGILPNLIL

SEQ ID NO: 996337 - protein, 134 aa, Homo sapiens
  misc_feature (30)..(30): Xaa can be any naturally occurring amino acid
  misc_feature (36)..(36): Xaa can be any naturally occurring amino acid
  misc_feature (58)..(58): Xaa can be any naturally occurring amino acid
SPHSLQGFGTHRLLEFLYRYPWLVSEQLSXITRESXEPLLRGSEHVAIKYASHVPETXALSTTPAGGPTSNRNLCDRLRDGGNWMARPACWQPPPVVYVGFQETKFVCLRQGVVYDLVFNGLPPRRHGRDVNTR

SEQ ID NO: 996338 - protein, 48 aa, Homo sapiens
MERQYQHYTIPERITNNKTTVHTPNDTKQRQPTPTAPHPARQPQPTLA

SEQ ID NO: 996339 - protein, 35 aa, Homo sapiens
MATVKQLRNYRQSSQVRWLYACNRSTWEGQGQGGS

SEQ ID NO: 996340 - protein, 115 aa, Homo sapiens
TQFDNASSLEDKIHLELPYVVNPLHDNRTEMPTSDKMTYLDGPCYFLEIFQKLFASTSYQTIVSLSVAIAENPLGLPSLMHRDACYVPSSLKRLMLLMDENNIDVQCPSRGVIAG

SEQ ID NO: 996341 - protein, 162 aa, Homo sapiens
MGGPLASWMECAFLSVVAGLNPRLVYSKHGLQTRCRAVRLRPRVGSLETRSTRCPDLLVTVRVGWVIIGQRLPDAVRAAWSILASGRPVRGGLRARTLSHARKEGGAAGEKQDDPQLTWPPVAGGHAGGVLPLPEPLYRLYCQKYLDLDGLRQLAGHASDKD

SEQ ID NO: 996342 - protein, 92 aa, Homo sapiens
MVTRYGDPQILLNNRVGLTRVPEQGGDLLNPEEHPEERRLWEAEDMEGRDSGQVRKYKTADPIDGVLRSWIIRGVRRISFPHMHRGERNFED

SEQ ID NO: 996343 - protein, 68 aa, Homo sapiens
EEEKEKKKKKKTTKDMTIQFLLTTGKDIRGRIMSSVRVPQEVLYCILGPRTLIHYQLDQETFLNSIIT

SEQ ID NO: 996344 - protein, 150 aa, Homo sapiens
NQQPLVFCLDRLNGAWRGKQLYPSGLHKERVTSSLCDLSLTVNPFVEVDACLLGQHLCALTCLASPQKFSPLIYGHHVSWSTPWLLSPSFLPFNVIARLCCLLSKDPAYGPDRHTRTGQHWRKGYHFLKGKGTRLEGDSEIPALLTKRNP

SEQ ID NO: 996345 - protein, 61 aa, Homo sapiens
MVWSPPFLTVIASRDVASIPLLNRRDTHTAEISFSTYLGALRSGNRSNGLAATIGQFFPTT

SEQ ID NO: 996346 - protein, 152 aa, Homo sapiens
QENRLGPGGGGCSGPRSRYCALLLRLECSWAMMAHCSLDLLDASHPPILASVVAGTAGTRHPAWLIFTLMCRAEVLLFCPGWSQTPGLGRSACLGLPKCWDHRHEPRCLASAVILILCFSPGDLLLALPHSCIETTGCGLSPQAPHLTPLYP

SEQ ID NO: 996347 - protein, 71 aa, Homo sapiens
IDQCTDDASHGATRYADLWSSHDKDAGQPLKGQGCEVTKSLNTESNRAEGRIGADASENQRQPRQLGGPRL

SEQ ID NO: 996348 - protein, 107 aa, Homo sapiens
MEEGERHVSHSSRQEKRACVGKLPFLKPSDLVMAYHTPNHHYHENSVGKTLTLQWLSTHRVHNGLLPCECGGKLMGTYKVHVVKLVLGDTSLTISYYYSMLCLNLLL

SEQ ID NO: 996349 - protein, 89 aa, Homo sapiens
KKKSGPSCTKGLCNPLELVITNPPDPHWKKGERVTLGIDGAILDPQVNILVRGEVYKRSPEAVLQTFYDELNVQYQKFQEKQEIVFAIS

SEQ ID NO: 996350 - protein, 102 aa, Homo sapiens
VGIPEADSMRVRDVSLRWLSCVRATLSFWPGGYPAYSKDSGYSRHPAENGKSNFLNCYVSGFHPSDIEVELTERHVGENRESGAVLHELFQQGGVVLPSVYI

SEQ ID NO: 996351 - protein, 132 aa, Homo sapiens
MKLRAHSLAACLILQITTGLFLSQWHLLTKKGLKPPVFIKSAQNHSEAREIMDGIQIRIPVSTAQWEPSKYTFNHDHLPYNIRGERPQILTGSIYSTVQKPLKTIRELIPLLSCNRISTQGLINKRIVFTST

SEQ ID NO: 996352 - protein, 110 aa, Homo sapiens
MSSSMCIGGSFSSWQKDKRASFDLPGTGSTDSEWGAGECGQICGCVVRWHRATLSDSSYGALSVLGKCHSFFILTLMKDLIFSGKIGVSLRYQDLQFMVIHAPQEEEIET

SEQ ID NO: 996353 - protein, 160 aa, Homo sapiens
SAEHPAAAAGSRSCQQQHHGQLHTSKQPCKAHVGIMPIYPNIQVIRATIRCKQQVLAHSTASWVSRSAILGIRAHRYSKLQSKLPLHNQSQGVLHIISQEIIHRSLSSIAHIKKDVNKSGEQKSQADKRNQQQTALARIPGQWSMDVQAYDRLWSKARKR

SEQ ID NO: 996354 - protein, 168 aa, Homo sapiens
MKISWVQWLMPIVPATQEAEAGELLEPRRRGGCSELRLHYCTPAWANRARLRLKKKKKKNSGPRDGDVGAHGQGTIQENIRGTEHKERGGGRTPRGAPQMKDNHWARQGENNTKLIHNREEEINGVTNTETHVGHKTTLEDEGKTKLDKTRTRWKDETNRRHKANDKP

SEQ ID NO: 996355 - protein, 161 aa, Homo sapiens
SKRTVGLFLENTDMDRDISRRVRRRRNATTDPCWMYALLRDCYDVQTRQAREYARRAVEPKRDLGARTDLHGLARPNNQTRRGTTDDGSETRHIGHNTIIPNHAEQTTREQTKVNHNGHEKRQGRRREREHITERKRTIIRHTKEEKRAPHKTARARRRMH

SEQ ID NO: 996356 - protein, 191 aa, Homo sapiens
  misc_feature (99)..(99): Xaa can be any naturally occurring amino acid
MGFSPLLRFLAGPPDVRYCISQLLASYFVSTYDGRGLTVPSYRRRFRAYPIFGFTGPPGMRDWTLSIFQGDWYNLLEGPAGELTLFFSWGREPTPLKGXGGMTLLAIRSKFGYHFPGLRYWLFPGKTSGSTGPQPVGVREVHYYQGIGTSQSLNCVNCLPAGVKSLNATPADTSLMLTNVTCEPGNWFPAT

SEQ ID NO: 996357 - protein, 140 aa, Homo sapiens
GGGTRAEAAVVDVGCARARGVGGLVRECRALVGDEAVRDGDGRFYVGNLPTDVREKDLEDLFYRSDGPHPARSELKNRQRPRALRLRALRGPPRLQRMLLMEEMVMIMASVGFVWSSPGLMEVRRWSGPVVGGMGSYKKI

SEQ ID NO: 996358 - protein, 42 aa, Homo sapiens
MGMERRRVRVGKHMYHYEMGGAKKTTGVLGWEGNQQAFSRIS

SEQ ID NO: 996359 - protein, 155 aa, Homo sapiens
MLYMQITERADKSMDSQPPKLVEDEDDDTFSYTVEEQLKTCCWLWPQISTNEQCSSPGCCRQFDIYTEAEQTKNSGQLSTGGKIHEACMLALEAQCTAIITESVKNGRDPLYDMHGFMTKCHPLHDTSRPLKVYSLSLLWAAAHYGLVRRYQLVS

SEQ ID NO: 996360 - protein, 109 aa, Homo sapiens
MSGKHENATEGQAPVLKRERGEQKKQESKQNQEPQETESGRETRHEEEMTAGRHPPANQVAERAERAGRLSELKQEEHDHKQRSDRGITERKQNERGRDRHRGPAYERR

SEQ ID NO: 996361 - protein, 114 aa, Homo sapiens
FRPRSMQPCRTHQRIPRLARPTEPAECRFRNVARILHVHEPYCGTHVLSTVSEDSYIFSYIYFGEPFLTSRDYGSCGCSMYTITSYVRTRIHNTTLHVISTESSTTSSYHVIIP

SEQ ID NO: 996362 - protein, 104 aa, Homo sapiens
NTTDHMTLARYSGYLDHHLTWNCNPILFPMEICPQLSHPDSSILQRINLELWLNLFKAILCVCINGLLIIWTFRTYLYNASICLPCFYLLIFCPLCYSLFLANC

SEQ ID NO: 996363 - protein, 119 aa, Homo sapiens
  misc_feature (113)..(113): Xaa can be any naturally occurring amino acid
MSQGEVCAVTAFSVGIAIINHIWTLQIRSSTTEIGTVHEENIGNGTTRSALTILDTGAGHYRHDWQRWVSRCPALFHACFHLDDVMFRHCVSVNSATICPWPVASPGDASSIXGLYQGV

SEQ ID NO: 996364 - protein, 149 aa, Homo sapiens
MIRKSDHPFTVSSLVMWDSLKLEGTWVEYSYVTKDKGNKVSADKVSKTHSMNGISKKEAIPQYKSGQGTQAPMRTCAIQHGRGTTGMTRIGQERQNRKLGLSNETQKEGKQGMPEQGDPVMRSGQDNTVKRPGDRKWRKRITKEREQKA

SEQ ID NO: 996365 - protein, 215 aa, Homo sapiens
  misc_feature (72)..(72): Xaa can be any naturally occurring amino acid
MQPRHINLPDQNVFPRFFNSAEASLGANISLQASLQHSKSAPGMCGVTISRNPSAHGTCNCGKCLIDHCRSXLVAAIIALSRPNPFFLLPRNIEPQTTRGQLQDTYQRDTRKPVTEDEETMPPHCVCILSPGNLDGKRIGYNQFMKQGLSRVLSAHGATNPDSYNNVIPGIEIARSGGRCPILEKPKTVHAMDLGRTFQNGLNRNTENSENLFPK

SEQ ID NO: 996366 - protein, 70 aa, Homo sapiens
MITGREQEGISSRVSVPAKPEWRNFSSHLLNKSKAKKSWSGRRRISAMLKDSPVDKNTTFNYIYSIPLET

SEQ ID NO: 996367 - protein, 77 aa, Homo sapiens
EAGEAARSLSTIAASAAGELPESLEPPVNRSRYPRDVEDGSAHGRASEVASTPSLRPGLHLAGKGAHQGQRTMVETE

SEQ ID NO: 996368 - protein, 112 aa, Homo sapiens
IRSRRASEWVGKMEVPRLDHVPQQPHSAPVMEVIKNLSLEAISAVDRERERTSQDSGIAEMEELPVPHNIKMKQYKRVTLFKISWEHGFKIKGSHYTLFYDLNKNENKKPPR

SEQ ID NO: 996369 - protein, 226 aa, Homo sapiens
MTANVSFFVGQQDNERNFGERRINSWTRPYIKPGEFPMVRVGSLGLRTFILPVKYKDNEHHHSTRNWDSVRKNMMISIAKDHLVRTLTQRSALQLLRHLILVTRDFIPRLINAGIEGTTLGGGDVHNGPTTKGHWISQAREPTRDWSENYPRVLAHGADAEQPAKMMPSMTRASEQYAVTGTSNEPESNHGDLEIVHRRREHTGTADGDTRRRSGRKSLTAQSGAR

SEQ ID NO: 996370 - protein, 67 aa, Homo sapiens
HAVRIPWICVKSGFDARRVEIRLVLAYMTDAAQLRDVSPYYDLIPKILTRTSFDLLRPGVSRRDLAW

SEQ ID NO: 996371 - protein, 243 aa, Homo sapiens
MASPCIVRSHIYKASMRAVQHALTCGLFIARHNMILQVAYTLMCPPVHVLLIDSIILVLTHTKAQRKRHYRRTMQWWRTVNYRGKSRYAGGSSQSFMRAAHEWSGKYGKSMLLTYLVCCVLLCDDSRQPRLVTNLHFLFPEGIKGNGAGPLRLIACRANPPQSPSRLEEMRHPIEVGFMIETDDSLKIKLGSSRQAGPFIIWDPGGSTNGCRVSGTEACEQKREPFFIFNCLITFQALDGPKG

SEQ ID NO: 996372 - protein, 108 aa, Homo sapiens
MSTETKLRYSGIFHHWIWTVIVSQGHYNTAYGRVRRGKSIDSDNFKRSSRLTSETLLESWHSRNHFGHLKRRLRIDIMTGFLRQGRTWRPVLYTKACTLALHLLHLNI

SEQ ID NO: 996373 - protein, 127 aa, Homo sapiens
MEFPSVAQAKGAGWCLAPKTSCLRGPGDSPDSSSKWLDTRVPGTVPLILDSADGRLCGPAVQILTRWVSPYPQGDSGYRDAPRLLTAVCFTRLWVDTRSGLDACFRKGVPVSEGSWDMPSLICVASL

SEQ ID NO: 996374 - protein, 114 aa, Homo sapiens
TDSLFGSACLHQGEINSLVAHTKPVWWSLHTDVSEIWCCDSDQEDLPREINPLSSCSLLHERDPPTTSGPQTNQPKEHLTNFKSDHPTSPLLPRLLIARLSQVQFFLSLRSSTL

SEQ ID NO: 996375 - protein, 200 aa, Homo sapiens
MLKTLNKLGIDRTYLKIIRAIYDRPTANIILNGQENGSIPFENWHKTGMPSLTTPIEHSVGNSGQAIRQEKEIKGTQLGKEEVKLSLFSDDMIVYLENPIVSTQNLLKLISNFSKVSGYKINVQKSQAFLYTNNRQIESQIMSELPFTIASKRIKYLGIQLTRDVKDLFKENCKPLLNEIKEVSTKWKNIPCSWIGRIIS

SEQ ID NO: 996376 - protein, 510 aa, Homo sapiens
  misc_feature (203)..(203): Xaa can be any naturally occurring amino acid
HAAPTRHAHTRALPPTQRLPCACASCAPYTPPHAPRTLPPAPPSLPAPPARATPTPRLLPLLAHAPRKPPHLSLLRALPPTRTTHRLHTRAHSTGPLPNPPPAPLLSTPHAYTHTPPRTHSPLRPQPTCAPHAPARRAPPHAPRHTLPTRLPPRTHATAHAPFLSTRALRHPAASLHAPLHCALHAPRYPHAPFSLTATSFHXALPHPCHAARATPRHTRARAPRAHAPPLSTAACARARTPCARAPPTWPPPLLGTPPPLPSHRRPLYTTHRAAQPLASNSGPTHAPSLAKDTQHTHTHTHTTRAPRRPRPLSTHGSSSPLFPHRCAPPTTAASLHPPVYPPPPLFPSVFSPTRRCAAPPLIYPSTASAYLHLTPAFSRHAGPPGARPPLTHTRPLSALRGPATHPVPLNPPAAPTLPLAPRPAAPPLSPSSCARRLAPPSSLSAPPPFTPFPRRTFPPPPSFPPLRPSSPPLSSPACATLPASPSPTLAPGPFFASAPVRWPHLFRRP

SEQ ID NO: 996377 - protein, 79 aa, Homo sapiens
SGARKCSLYLMIRATIDPHRDQYRISNTGPVRLLPRKICVAAVESDHSLSKIIIAGTKLTISYPHSYYPNSNPSSSRIV

SEQ ID NO: 996378 - protein, 134 aa, Homo sapiens
MDVRPPVHTEISVPPIPLLFIHISQAESNGATFSSFQLKAYDVVRMEVPELSEASLVSGAVGECTVVLLWNSLVQQEKFRDLVGGRYPNQYPFDGYVLLISNLCPLESRLSIATRDLLFLYSIPCKPVDDSHPE

SEQ ID NO: 996379 - protein, 453 aa, Homo sapiens
LGLQFHWQNPRGRTQSTVVLEVCWGKPGQLSSVPAAAKSRGVPGPFNVFPSVSLNFLDHHSLKNYICVVMANPSSPPLGAVFLVFLSPKPSSAGALGPQAPRVPGGNGSFFSTSNAWSERGTHSAAPCGRHEGPGDPTTEAPLSVSNSRVSRGDTARGAWAQEARGGGVLSQTLFFLCENSNIQKGDTEIIHHSRRGASTLVAIGGTKKPPGIAPLKGTPHIAGTGPKRARGSTCVPRESWRRDTSAPKERALAPPHMTTSSRQDKTEQRARGPWKKGLQKSQKAWASQTAAFQPPGKRRPERGPGTYRVTRGRSAAPPRDRAHKRPQAGDPTRELIPQGGTTAHDCGQYDTRTAGKPRKGAPSVPSRAGDTSWRSQGRHTPEADKWSSTKAHNMGSTGRHKAAAATHTCKRRDRQDTTKTDINKGALSNAERLKHANRDRQRQERRSPAPAR

SEQ ID NO: 996380 - protein, 84 aa, Homo sapiens
PERSWRIRHVGSTRYRKEEPSHVEYEARTEFMNNRIGPYIYCRCHPTGILQAQLRTLQYACAYYYSGYTLLKCTLATNNCNTLD

SEQ ID NO: 996381 - protein, 141 aa, Homo sapiens
AGSLHHQMGENFAIYPSDKWLISRIYKELKQIYKKKTNNPIKKWAKDMNRHFSKEDIYVANKHMKKCSSSLVIREMQIKTTMRYRLTPVRMAIIKKSGNSRCWRGCGQIRMLLHCWWECKLVQPLWKTLVIPQGSRTRNTI

SEQ ID NO: 996382 - protein, 260 aa, Homo sapiens
QDWKFLASHFPNRTDQQCQYQVAESLNPDLVKGPWTKEEDQKVIELVKKYGSKAVDTDAKHLKGRLGKQCRERWHNHLNPEVKKSCWTEEEDRIICEAHKVLGNRWAEIAKMVAGRAETRSWREDLIVRKSHTHQREGWTQEASLRRVQRLQAPSVLAAGARGQGRPPECPAHGRPGKSSDQLALRPSYHKGGGKPVKGGTCSRHHIEGTGAHRYRSWTQGEHQSLEEFPKREGQESSPPEKRLLKSGWWGSNLLIPWGF

SEQ ID NO: 996383 - protein, 101 aa, Homo sapiens
  misc_feature (93)..(93): Xaa can be any naturally occurring amino acid
FRLRFRNIFQALLEEQNVECGRCVLNYSVSGLCGDPSSRQVPDAPCLVASLVGFPIPSDNLCHACGCPGTSACAACLERDLIYEIIDVWSSEXMDIVGRTP

SEQ ID NO: 996384 - protein, 293 aa, Homo sapiens
MDQGQPMKPHRIRMTHNLHAQIYGLYRKNGISYQPSREANAEEMTKLRTAMTYIKFLRSIRPDNMSEYRQADAEIQALVRTVQYSMVLFEFCQLSTGGSVASAVKLNKQQTDIAVQLGWGPAHAKKSEASGFCYVNDIGSWPSLELLKYHQRVLYIDLTIHNGDGVGKRAFYAKDRVIELCPLITGYGRRSFPRILGTYGEIEAAQTGKFYAAENNRNGNGFVTRSIMSTLEGRYIQYERSIHAKGRSYNRGGTRHHSRGNSEKMHSTTIEQTTEVYTLIDTSRLDYGSGHHT

SEQ ID NO: 996385 - protein, 309 aa, Homo sapiens
LLCLMPPVPCLAGLRGTVRGCSGWLLAGVRGEFRFRFFVRLHRRLREDGWPGGFPVCVLQCWLCCRSLRRGGRGCCLGPGRNSGGLLCEWARLRVKGLYRSLDALERAILRPGMLPVQPNDTSRELPWDPLAMGGTLQSDLGCASQGWISPAKRPGPQRDSSRSSSIAVQNRNHNCTEAQKMADKILTSKGFVNLVPESQAYTGLSWLLTRKLDQTIMRKRLDIHEGLKVPIKAKEGSWKLFSTNTFNPGKVDAEDWDKDTVSPWDASGHKSVLEDYAVSNMCAKNKEGVLVQIKEYSSERTGGTRHRI

SEQ ID NO: 996386 - protein, 362 aa, Homo sapiens
MSAFEKPQIIAHIQKGFNYTVSDYRKKANTSLNVAHIWCNHLSQQRYFSYWRSWLDNFIYVNLSTAPAHASIFMKGPSHSTIITCHSMAIGGTQDIGSKEHLKHCALSTPQHCDTCRHACWDPTRPHHPRLIPDSYLLRTLYHTRDTTNDDDLLLGNPVQDISRQLRLYISTNETKPAAPAHARPEPTEPYLLANTSQPYSWTPPRKTNTAKLNRSTKEDNNTYSQQKKGGEINSQSQLQHTYTDHHTTTYHIKANLTIPGPTLQRQHNPPTQTDNTGYSQIDSQSRPGLRKHPHVQPPKPTNGGTRPPTTAHTKPKPRQPQYKHHNNRSKTNPHAIHETTAKRPPPETKWSKTTLIRRTHP

SEQ ID NO: 996387 - protein, 220 aa, Homo sapiens
MAFTYPKHTSIRVERNRMRRKGDSNLDVLHTIRLMFGGQSVCSFSVRGVASRMSTALLVLATDWIRHQKPKQDQLLLVEIQNEGPSVKSRPPKIMVYTAPTGPSCFRETRSGGGEIPKGSSSFTRNVTLGKTFSIGSFTRRDCLSLVVIDLSGWSLDGHIPVPIVRDFPGPGRCTFHGVGLPEFRATLCVRAFLCGPTSAPNGVCTLVTHIGALSPSSSF

SEQ ID NO: 996388 - protein, 252 aa, Homo sapiens
MRMRHSVNLRSAPGPEELVQEIQELDTGATESLRKVTAALLGRVVLVSAYPRASPNVLVTGLALVCTSRPLGSPVSWDLSVVELGELQRSQSFVLNGGCGRTGLDSLSGVSPRVYESLALSTSPRVLHGGAVNVLTRRDYMCRTSIVAPSGRRLTEVRCSPGGGRTLRVCLPGLGSSVKCRFTRRSGNEHAVLASCRSSPSRRACNWLVPLQRAGRLTDVTDEDRRFVSRETRGEGASQAEDSAPKLQAQAQ

SEQ ID NO: 996389 - protein, 189 aa, Homo sapiens
MELSAIVEANRQDSFSCLSSTEEKIEEIHYDKDASIVAFFRLDSFSEAHSEIPKSSQQLEGEHTDLHIRSVESLVNEYADQVVHGYRLITSSLISSIQVCRDKTVAYTVAETPGPVAEFISLSRDSFVVICPHMTEDNQDVIQGKDLLIAYYDVDYEKSAKGSCYWRYRVIDGGKGIPGMLGTNQLCLY

SEQ ID NO: 996390 - protein, 263 aa, Homo sapiens
MHGWGDPRKLTVMADGETNISFYPWWQVGEEGELSEVDAPYKNIRSRGELTITTIRMGEPPNDSVTCPKVSAHQQMGIMGPYKHKDEIGVGDTRPYYISLEELIVGNHPWILNTITARIESSNTKPFSMTADYYCHDPYAQVDCSLDYHSMQETKHPNDRAPGLSLKAPSIGKTRQANQVGRRRANTAPGETDCITITVAARGGAKPKRESAQTETQSGHSWQHPSSRGRKHAQKNTRDYIRAARHLTGTSILWHAHMTNSTY

SEQ ID NO: 996391 - protein, 148 aa, Homo sapiens
MTAPYLPYAVLYQVLNISFGITEDIRTFHNAMSSMLAVSVDPSNFDSYLLGAQWRYPWSRKVTSTSSDIDARQWMISRCYHSMIESRIVTPPIDEPMHGCSTWGLHDYVNSVAASEFPCESTQNALDLLLRSKGQLEKETSRDPYGRP

SEQ ID NO: 996392 - protein, 314 aa, Homo sapiens
AEVLVWCLSVLEAISLMPPGGAIVAEQCTAGPESDGRTRVNASTLLAISTVNNVELPGLSSLRSWMNTETRSTEAPYASIPVDAQHALQIRSWRTLCGGMHAPHGKHRTKGSADSGPVLKVDLTEYPPDVLTYNRTERNGVFLLPFEGRASGMPNRERVLPYRGGRHEFYEVGVEGTRQVTAHPGGEEEKTNSPRSTTVKNETRLMRLPEEQAEERTVENDKLSKCTARRVLKDHGTPWSEAQIKGLLIPSRIKPHRIIPDRTLKQARQDPRFLLCVRDQGNYSEAVTLGHRPHLITRRTNGGTQRGNKHTGGQ

SEQ ID NO: 996393 - protein, 308 aa, Homo sapiens
MWPVHNGDSSPMSRLQTCSHSDDDHAAVEHRRPQALIMSLGVRLQDLDRSTWTERRVLRRDYRSSNLTRKPGWGRRLFPMRTCIKHNTSGLRAHDGMMRCQVEPKRTGGDGVVRVMPGIRNERKQGSERRQWAKQFLTRVGYSPTGTNNTGLGTRARDGWGPRTTNKCSSTHVPPCVPMKGGSTCEPVGDGNPNLSAKGLVPERRGSLKRRIQAQFPLFNPVSEGQAREAPRCLEGGPQVNRPWEKGPELKEVGPGPKRLERAVLMSLRDVGPMHPRWRWAWPPMGVMIRPNPHQEEHLMECVGSFTL

SEQ ID NO: 996394 - protein, 368 aa, Homo sapiens
MPVTPCGCLLLPAPQAALLLLLPIPCEPCLLPCCACCCVPCLSPCDPLRWLCCDLPVLAPGAPPRPGPGRSALYYPGSHYCLCTHTLWRIGTPPVITRECNACHTTTYDPMMCPMEHPLSADIAMATQMQMRTETRLSILLWCSDNLPAVHRLVNLTSSRVGRELDIYNNLRQTPLHLAVITTLPSVVRLLGDSWCQDPWTLELTWQDGQSHGRCEAPQPALPWRALLDRADPGHGLDLEGRELIDWVIQALHVAVNTELQDIVQALVNTRWRTSTQRHHYTGGRSQVISAVETHASLGDGSRCSKGPTVNGNQYYSGEERPLTYSTLARGLTAGSTQIAHDQSRELNTAKSRAYVCRHRLKLMGSEQ

SEQ ID NO: 996395 - protein, 182 aa, Homo sapiens
SIVPILIAVAIPNAYRTKKFQAIYNYAKAPMRCRPLRATRMRFADAIKSASPKEHPKTRSASNIRTRATIKRPAKHSAPLHNAALLLLNSLPLRQYPQWPHECKTTTLESFGRDGFVDQLVVIKAVVNQIARGLPGDRRRLQERTKTKQTRMEFGAVAVVERHGSDHGKHHNMLVVGRSRAL

SEQ ID NO: 996396 - protein, 353 aa, Homo sapiens
MCAGMIPGLVPNIVTTAASCGLHGLSDCAGLPGPVALCWNRACEVFLQCHGATCGRSDTYYQSPTGDRILKKVELTLYLGPACDLTLFDFKQGILCYPAPKAHPSGGCQQEAKEAFKASQDSDNVRLDPRVVRSGRRPRGMRSKDDTDTDPAFIPCSVGAVRTCGISFSGDGHPKARVKSCAKTVEHHDATCPSTRGERSTCSSGLGWLGERCAPGQVDTQQVYGAWAPTRAHRTRPICGKAEGARVDRRETDTLELGAETRKGIDRARERQPERTVGRVQVARRQQEHVYTQKKRRPKTIRSVSRKTTTKLQIDHEGSTNLAPTSVNREKAAGKTTRTTEDIQTTEGEPVRR

SEQ ID NO: 996397 - protein, 139 aa, Homo sapiens
MGLNPSGCSNTIMVTMETTGQETLGQMVPGMVQPVMEHLYRSWGLTCWKSKHFYKTQNNTTPTQQHRQPTNKPHHAAAATHTTKKRQPRTKRGPHHIDANDTTADSDRQHRGPAQKGENAKNKTPGTTAVSNKAPACDK

SEQ ID NO: 996398 - protein, 322 aa, Homo sapiens
GVLQVGVDDHWHVLRCQAFRTREGRLKCCYATLLHALCITKPVCDLLRVTGEPHLGPTSSWNGRCDVCACWSELASELCQIDKEAVQKYAYLNVVGMVGSIDNDFCGTDMTIWQLDSDLHRIIEVVDAIMTTAQSHQRTFVLEVMGRHCGYLALVSALACGADWVSFQNLHRGRLAGAGCVSNSREKRARNNQAEYHHRSAEREQLIPKINPSPLTTITPARDTHLALIDNVVTTIQHDREQKEPLVRSDRTQTKQTLGLESPLDCLDGPHGNPPVKYEDDARGTPSRRRMAGNCTCGARLTSRKWTQRSRRQSDENSEDAH

SEQ ID NO: 996399 - protein, 203 aa, Homo sapiens
IDSTVSFGASTRAYTLREKPHTCHRLCKGDEKMGGEDDELKGLRGGSRGGNGAVISLTEFNSAHNEADFYLCTIEEGNLGHSKTKEEEEELTWVTSSEDDEIIKPEDVDPSVGRFRNMVHDCEWSHVKKKRVEEALCSLGRGGIRVAGAVLECSPISGGLYRGPAPHITSEAGVPVNMASMGQYSSVGLRHARANDLTPGCGA
